(19) United States
(12) Patent Application Publication
(10) Pub. No.: US 2002/0147140 A1
(43) Pub. Date: Oct. 10, 2002

(54) Nucleic acids, proteins, and antibodies

(76) Inventors: Craig A. Rosen, Laytonsville, MD (US); Steven M. Ruben, Olney, MD (US); Steven C. Barash, Rockville, MD (US)

Correspondence Address: HUMAN GENOME SCIENCES INC, 9410 KEY WEST AVENUE, ROCKVILLE, MD, 20850

(21) Appl. No.: 09/764,877

(22) Filed: Jan. 17, 2001

Related U.S. Application Data
(60) Provisional application No. 60/179,065, filed on Jan. 31, 2000.
(60) Provisional application No. 60/180,628, filed on Feb. 4, 2000.
(60) Provisional application No. 60/214,886, filed on Jun. 28, 2000.
(60) Provisional application No. 60/217,487, filed on Jul. 11, 2000.
(60) Provisional application No. 60/225,758, filed on Aug. 14, 2000.
(60) Provisional application No. 60/220,963, filed on Jul. 26, 2000.
(60) Provisional application No. 60/217,496, filed on Jul. 11, 2000.
(60) Provisional application No. 60/225,447, filed on Aug. 14, 2000.
(60) Provisional application No. 60/218,290, filed on Jul. 14, 2000.
(60) Provisional application No. 60/225,757, filed on Aug. 14, 2000.
(60) Provisional application No. 60/226,868, filed on Aug. 22, 2000.
(60) Provisional application No. 60/216,647, filed on Jul. 7, 2000.
(60) Provisional application No. 60/225,267, filed on Aug. 14, 2000.
(60) Provisional application No. 60/216,880, filed on Jul. 7, 2000.
(60) Provisional application No. 60/225,270, filed on Aug. 14, 2000.
(60) Provisional application No. 60/251,869, filed on Dec. 8, 2000.
(60) Provisional application No. 60/235,834, filed on Sep. 27, 2000.
(60) Provisional application No. 60/234,274, filed on Sep. 21, 2000.
(60) Provisional application No. 60/234,223, filed on Sep. 21, 2000.
(60) Provisional application No. 60/228,924, filed on Aug. 30, 2000.
(60) Provisional application No. 60/224,518, filed on Aug. 14, 2000.
(60) Provisional application No. 60/236,369, filed on Sep. 29, 2000.
(60) Provisional application No. 60/224,519, filed on Aug. 14, 2000.
(60) Provisional application No. 60/220,964, filed on Jul. 26, 2000.
(60) Provisional application No. 60/241,809, filed on Oct. 20, 2000.
(60) Provisional application No. 60/249,299, filed on Nov. 17, 2000.
(60) Provisional application No. 60/236,327, filed on Sep. 29, 2000.
(60) Provisional application No. 60/241,785, filed on Oct. 20, 2000.
(60) Provisional application No. 60/244,617, filed on Nov. 1, 2000.
(60) Provisional application No. 60/225,268, filed on Aug. 14, 2000.
(60) Provisional application No. 60/236,368, filed on Sep. 29, 2000.
(60) Provisional application No. 60/251,856, filed on Dec. 8, 2000.
(60) Provisional application No. 60/251,868, filed on Dec. 8, 2000.
(60) Provisional application No. 60/229,344, filed on Sep. 1, 2000.
(60) Provisional application No. 60/234,997, filed on Sep. 25, 2000.
(60) Provisional application No. 60/229,343, filed on Sep. 1, 2000.
(60) Provisional application No. 60/229,345, filed on Sep. 1, 2000.
(60) Provisional application No. 60/229,287, filed on Sep. 1, 2000.
(60) Provisional application No. 60/229,513, filed on Sep. 5, 2000.
(60) Provisional application No. 60/231,413, filed on Sep. 8, 2000.
(60) Provisional application No. 60/229,509, filed on Sep. 5, 2000.
(60) Provisional application No. 60/236,367, filed on Sep. 29, 2000.
(60) Provisional application No. 60/237,039, filed on Oct. 2, 2000.
(60) Provisional application No. 60/237,038, filed on Oct. 2, 2000.
(60) Provisional application No. 60/236,370, filed on Sep. 29, 2000.
(60) Provisional application No. 60/236,802, filed on Oct. 2, 2000.
(60) Provisional application No. 60/237,037, filed on Oct. 2, 2000.
(60) Provisional application No. 60/237,040, filed on Oct. 2, 2000.
(60) Provisional application No. 60/240,960, filed on Oct. 20, 2000.
(60) Provisional application No. 60/239,935, filed on Oct. 13, 2000.

(51) Int. Cl. A61K 38/17; C12Q 1/68; C07H 21/04; C12N 5/06; C12P 21/02; C07K 14/435

(52) U.S. Cl. 514/12; 530/350; 536/23.1; 435/6; 435/69.1; 435/183; 435/325; 435/320.1

(57) ABSTRACT

The present invention relates to novel musculoskeletal system related polynucleotides and the polypeptides encoded by these polynucleotides herein collectively known as “musculoskeletal system antigens,” and the use of such musculoskeletal system antigens for detecting disorders of the musculoskeletal system, particularly the presence of cancer and cancer metastases. More specifically, isolated musculoskeletal system associated nucleic acid molecules are provided encoding novel musculoskeletal system associated polypeptides. Novel musculoskeletal system polypeptides and antibodies that bind to these polypeptides are provided. Also provided are vectors, host cells, and recombinant and synthetic methods for producing human musculoskeletal system associated polynucleotides and/or polypeptides. The invention further relates to diagnostic and therapeutic methods useful for diagnosing, treating, preventing and/or prognosing disorders related to the musculoskeletal system, including cancer of musculoskeletal tissues, and therapeutic methods for treating such disorders. The invention further relates to screening methods for identifying agonists and antagonists of polynucleotides and polypeptides of the invention. The present invention further relates to methods and/or compositions for inhibiting the production and function of the polypeptides of the present invention.

### Statement under 37 C.F.R. § 1.77(b)(4)

[0001] This application refers to a “Sequence Listing” listed below, which is provided as an electronic document on two identical compact discs (CD-R), labeled “Copy 1” and “Copy 2.” These compact discs each contain the following files, which are hereby incorporated in their entirety herein:

| | | | Date |
|---|---|---|---|
| Document | File Name | Size in bytes | of Creation |
| Sequence Listing | PC005.seqList.txt | 7,563,909 | 01/12/2001 |
| V Viewer Setup File | SetupDLL.exe | 695,808 | 12/19/2000 |
| V Viewer Help File | v.cnt | 7,984 | 01/05/2001 |
| Controller | | | |
| V Viewer Program File | v.exe | 753,664 | 12/19/2000 |
| V Viewer Help File | v.hlp | 447,766 | 01/05/2001 |

[0002] The Sequence Listing may be viewed on an IBM-PC machine running the MS-Windows operating system by using the V viewer software, licensed by HGS, Inc., included on the compact discs (see World Wide Web URL: http://www.fileviewer.com).

### FIELD OF THE INVENTION

[0003] The present invention relates to novel musculoskeletal system related polynucleotides, the polypeptides encoded by these polynucleotides herein collectively referred to as “musculoskeletal system antigens,” and antibodies that immunospecifically bind these polypeptides, and the use of such musculoskeletal system polynucleotides, antigens, and antibodies for detecting, treating, preventing and/or prognosing disorders of the musculoskeletal system, including, but not limited to, the presence of cancer and cancer metastases. More specifically, isolated musculoskeletal system nucleic acid molecules are provided encoding novel musculoskeletal system polypeptides. Novel musculoskeletal system polypeptides and antibodies that bind to these polypeptides are provided. Also provided are vectors, host cells, and recombinant and synthetic methods for producing human musculoskeletal system polynucleotides, polypeptides, and/or antibodies. The invention further relates to diagnostic and therapeutic methods useful for diagnosing, treating, preventing and/or prognosing disorders related to the musculoskeletal system, including musculoskeletal system cancer, and therapeutic methods for treating such disorders. The invention further relates to screening methods for identifying agonists and antagonists of polynucleotides and polypeptides of the invention. The invention further relates to methods and/or compositions for inhibiting or promoting the production and/or function of the polypeptides of the invention.

### BACKGROUND OF THE INVENTION

[0004] The Human Musculoskeletal System is comprised of skeleton (e.g., bone), muscle, tendon, ligament, and other components of joints, which constitute the basic structural framework of the body. Together, the components of this system provide the strength, stability, frame, and elasticity necessary for movement. Additionally, the musculoskeletal system protects the internal organs, stores minerals, and produces blood.

[0005] The primary component of the musculoskeletal system is the skeleton itself. The skeleton is a highly organized connection of bones responsible for many functions, including supporting the body against gravity, providing sites for muscle attachment, producing blood cells, protecting the organs and other soft body tissues, and permitting flexible movement.

[0006] Anatomically, two types of bones can be distinguished in the skeleton: flat bones (e.g., skull bones, scapula, manible, and ileum) and long bones (e.g., tibia, femur, and humerus). The long bone is composed of two wider extremities (e.g., the epiphyses), a cylindrical tube in the middle (e.g., the midshaft or diaphysis), and a developmental zone (e.g., the metaphysis) between them. In a growing long bone, the epiphysis and the metaphysis are separated by a layer of cartilage (e.g., epiphyseal cartilage or growth plate), responsible for the longitudinal growth of the bones. The external part of the bones is formed by a layer of calcified tissue (e.g., the cortex or compact bone). In the diaphyisis, the cortex encloses the medullary cavity, the location of the hematopoietic bone marrow. Toward the metaphysis and epiphysis, the cortex becomes progressively thinner, containing a network of thin, calcified trabeculae (e.g., trabecular bone or spongy bone) and hematopoietic bone marrow. At the center of most bones is yellow marrow, which is used to store fats. Therefore, the cortical bone fulfills mainly a mechanical and protective function, and the trabecular bone fulfills a metabolic function.

[0007] Bone is a balanced, dynamic system, constantly degrading and regenerating. Bone is degraded by cells called osteoclasts that remove from the center of the bone, forming the central cavity of the long bones. Osteoblasts are cells found in the osteoid tissue (e.g., bone matrix prior to calcification) and are responsible for the production of the matrix constituents of bone (e.g., collagen and ground substance). As bone matrix is produced, osteoblasts become progressively embedded and differentiate into osteocytes, or bone cells. As calcification occurs, these osteocytes then differentiate into cortical bone or trabecular bone within the calcified collagen fiber matrix. Blood vessels penetrate the newly calcified bone, bringing the blood supply that will form the hematopoietic bone marrow.

[0008] Joints are formed when two bones come together and allow for bending and movement. Tough bands of connective tissue, called ligaments, surround the joints, join the two bones together, and keep the bones properly aligned. The joint capsule is lined by a synovial membrane, which produces synovial fluid for lubricating the joint. Joints may also contain fluid-filled sacs (e.g., bursa) that reduce friction in areas where skin, muscles, tendons, and ligaments rub over bones. Most joints are freely moving synovial joints; however, some joints (e.g, vertebrae) are partly movable and allow some some degree of flexibility with cartilage, or menisci, between the bones, while other joints (e.g., skull sutures) do not allow movement at all.

[0009] Composed of striated bundles of myosin and actin fibers, skeletal muscles have very long fiber-like cells that contract quickly, but only when stimulated by nerve cells. Muscle is attached to the bone by tough connective tissue, called tendons, and arranged in opposing, balancing groups around joints that facilitate balanced movement.

[0010] Although the musculoskeletal system was designed for strength and endurance, the components of this system can become worn, injured, or inflamed. These disorders can range from mild to severe and from acute to chronic. Generally, the treatment depends on the type and severity of the disorder.

[0011] Diseases and Disorders of the Bone

[0012] Several types of bone disorders occur from an imbalance of the growth and breakdown cycles of bone. The most common, osteoporosis, is a progressive decrease in the density of bones, causing them to weaken. Osteoporosis occurs in several different types and is seen more often in older women. Postmenopausal osteoporosis is generally found in women between the ages 51 and 75 and is caused by the lack of estrogen. Senile osteoporosis results not only from the imbalance between growth and breakdown but also from the calcium deficiency associated with age. Secondary osteoporosis is caused by secondary effects of another medical condition (e.g., chronic renal failure, hormonal disorders) or by drugs (e.g., barbiturates, anticonvulsants). Idiopathic juvenile osteoporosis is a rare form that occurs in children and young adults who, for no obvious reason, have weak bones. Treatment for all forms of osteoporosis is aimed at increasing bone density (e.g., estrogen intake, bisphosphonates, fluoride supplements).

[0013] Paget's Disease also results from an imbalance of the growth and breakdown of bone. The turnover rate is areas affected by Paget's Disease increases tremendously; resulting in abnormal, enlarged bone that is soft and weak. Although no specific genetic pattern has been determined, Paget's Disease tends to appear in family lineages. There is no direct treatment for Paget's Disease, rather treatment is given only alleviate pain and discomfort.

[0014] Bone disorders can also result from infection. Bone can be infected through three routes: bloodstream, direct invasion, and adjacent soft tissue infections. Osteomyelitis is a bone infection usually caused by bacteria (e.g., Staphylococcus aureus) which results in swelling of the soft bone marrow tissue, compression of the blood vessels, and possibly death of parts of bone. Pott's disease is an infection of the vertebrae by the bacteria that cause tuberculosis (e.g., Mycobacterium tuberculosis, M. bovis, or M. africanum.) For acute infections, antibiotics are generally the most effective treatment for this disease. However, if the infection is severe or chronic, surgery may also be required to remove the infected tissue and replaced with healthy bone, muscle, or skin.

[0015] Most bone carcinomas are benign. The most common type of benign bone tumor, usually occurring in people aged 10 to 20, is osteochrondroma. Osteochrondromas are growths on the surface of a bone that protrude as hard lumps. Benign chondromas, usually occurring in people aged 10 to 30, develop in the central part of the bone. Chrondroblastomas, usually occurring in people aged 10 to 20, are rare, painful tumors that grow in the ends of bones. Osteoid osteomas are very small tumors that commonly develop in the arms or legs but can occur in any bone. Giant cell tumors, usually occurring in people aged 20-40, most commonly originate in the ends of the bones and may extend into adjacent tissue. Treatment of these tumors generally involves pain management and, possibly, surgery to remove the tumor.

[0016] Although rare, malignant bone tumors may be primary or metastatic. In children, most malignant bone tumors are primary; in adults, most are metastatic. The most common type of malignant primary tumor, multiple myeloma, originates in the red bone marrow cells and most commonly occurs in older people. Osteosarcoma, usually occurring in people aged 10-20, commonly occurs in or around the knee and cause pain and swelling. These tumors tend to spread to the lungs. Chrondrosarcomas are slow-growing tumors composed of cancerous cartilage cells. Ewing's sarcoma, occurring most commonly in males aged 10 to 20, develop most often in arms and legs. These tumors can become large and can affect the entire length of a bone. Metastatic bone tumors most often originate from breast, lung, prostate, kidney and thyroid cancers.

[0017] Treatment for bone tumors depends on the type of cancer. Most treatments are complex and involve a combination of chemotherapy, radiotherapy, and surgery. Prompt treatment is especially important for malignant bone tumors.

[0018] Diseases and Disorders of Joints, Ligaments, and Tendons

[0019] The most commonly diseased tissue in the musculoskeletal system is the joint. Disorders affecting the joints and their associated components are considered connective tissue disorders because of the presence of large amounts of connective tissue in these structures. Most of the disorders of joints involve inflammation and may be the result of an immune or autoimmune reaction.

[0020] Treatment of joint disorders varies according to type and severity. Drug treatment is generally aimed at reducing inflammation. For mild inflammation and pain, drugs such as nonsteroidal anti-inflammatory drugs (NSAIDs, e.g., aspirin and ibuprofen) are commonly used. Alternative drug treatments, used in more severe cases, are corticosteroids (e.g., prednisone) and immunosuppressive drugs (e.g., methotrexate, azathioprine, and cyclophophamide). Other treatment plans, used in conjunction with drugs, include exercise, physical therapy, and sometimes surgery.

[0021] Arthritis, or inflammation of the joint, occurs in several forms. The most common form of arthritis, characterized by the degeneration of joint cartilage and adjacent bone, is osteoarthritis, or degenerative arthritis. Osteoarthritis causes the formation of rough, pitted cartilage in the joint resulting in limited joint movement, stiffness, and pain.

[0022] Another form of arthritis, rheumatoid arthritis, an autoimmune disorder, is caused when the immune system attacks the tissue (e.g., ligaments, synovial membrane, bursas) that surrounds the joints. The joints, including those in the extremities, become symmetrically inflamed, resulting in swelling, pain, and eventually, destruction of the interior of the joint. Psoriatic Arthritis, occurring in people who have psorasis, resembles rheumatoid arthritis; however, it doesn't produce the antibodies characteristic of arthritis.

[0023] Other autoimmune diseases may also affect the joints and tendons. For example, systemic lupus erythematosus may result in episodes of inflammation in the joints and tendons in addition to other connective tissues and organs. Joint inflammation is common with systemic lupus erythematosus and can lead to deformity and permanent damage to the joint and its surrounding tissue; however, the bone does not erode as it does in rheumatoid arthritis.

[0024] Joint disease may also result from infection. Reiter's syndrome, or reactive arthritis, is an inflammation of the joints and tendon attachments resulting from a bacterial infection originating in an area of the body other than the joints. There are two forms of Reiter's syndrome that occur more commonly in men aged 20 to 40. One occurs with sexually transmitted infections (e.g., clamydial infection); the other usually follows an intestinal infection (e.g., salmonellosis). Once a person is exposed to these infections, there appears to be a genetic predisposition to this type of disease.

[0025] Infectious arthritis develops from an infection of the synovial fluid and tissue of a joint. Different bacteria can infect a joint, depending on the person's age. Infants and young children are most commonly infected by gram-negative bacilli, Staphylococci, and Hemophilus influenzae. Older children and adults are most commonly infected by gonococci, staphylococci, and streptococci. Viruses (e.g., HIV, parvoviruses, and the viruses that cause rubella, mumps, and hepatitis B) can infect joints in people of any age. The joints most commonly infected are the knee, shoulder, wrist, hip, finger, and elbow and become red, warm to the touch, swollen, and painful.

[0026] Crystal deposits in the joints can cause arthritis and pain. Gout, characterized by sudden, recurring attacks of painful arthritis, is caused by the deposition of monosodium urate crystals in the joints. This accumulation generally accompanies hyperuricemia. In addition to managing the pain associated with this disorder, treatment also involves the administering of drugs to reduce the levels of uric acid in the blood by increasing the excretion of uric acid in the urine. Pseudogout, characterized by intermittent attacks of painful arthritis, is cause by the deposition of calcium pyrophosphate crystals. This disorder usually occurs in older people and causes the degeneration of the affected joints. Unfortunately, there is no effective long-term treatment available for the removals of the calcium pyrophosphate crystals. The only treatment available for pseudogout is pain management.

[0027] Diseases and Disorders of Muscles

[0028] Damage to muscles can cause pain, limit control over movement, and reduce the normal range of motion. Diseases of the muscles can develop from injury, inflammation, spasms, or inheritance.

[0029] Several muscle disorders are inherited. Muscular dystrophies are a group of inherited muscle disorders leading to muscle weakness. Duchenne's and Becker's muscular dystrophies are caused by different gene defects on the same gene resulting in weakness of the muscles closest to the torso. The gene for both diseases is recessive and carried on the X chromosome. Duchenne's muscular dystrophy is characterized by an almost total lack of dystrophin protein, resulting in progressive muscle loss, including the heart muscle, and ultimately resulting in death by the age of 20. Becker's muscular dystrophy is a less severe illness characterized by production of an oversized dystrophin protein that does not function properly. Landouszy-Dejerine muscular dystrophy is transmitted by an autosomal dominant gene and results in the muscles of the face, shoulder, and legs weakening. Neither Becker's nor Landouszy-Dejerine muscular dystrophy is fatal. Currently, there is no cure for muscular dystrophies. Treatment regimens involve physical therapy and exercise to prevent the muscles from contracting permanently around the joints, and sometimes surgery to release tight, painful muscles.

[0030] Myotonic myopathies are a group of inherited muscle disorders in which the muscles are not capable of fully relaxing after contraction, leading to weakness, muscle spasms, and contractures. For example, Steinert's disease is an autosomal dominant disorder producing both weakness and tight, contracted muscles, especially in the hands. Symptoms can range from mild to severe. In the most severe cases, extreme muscle weakness and many other symptoms (e.g., cataracts, irregular heartbeat, diabetes, and mental retardation) can occur, resulting in death by the age of 50.

[0031] Pompe's disease is a severe, autosomal recessive, glycogen storage disease in infants where glycogen accumulates in the liver, muscles, nerves, and heart, preventing them from functioning properly. This disease is fatal by age 2; however, there are less severe forms of Pompe's disease that can affect older children and adults, causing weakness of the extremities and diminished ability to breathe deeply. Current treatments for the less severe forms of Pompe's disease and other glycogen storage diseases involve limiting exercise and diuretics to reduce the level of myoglobin released into the blood due to the muscle damage.

[0032] Periodic Paralysis is another rare autosomal dominant disorder that causes sudden attacks of weakness and paralysis where the muscles do not respond to normal nerve impulses or artificial stimulation. In some families, periodic paralysis has been linked to the level of potassium in the blood with some families influenced by high levels (hyperkalemia) and some families by low levels (hypokalemia). Diet (e.g., avoidance of carbohydrate-rich food) and treatment with acetazolamide are the most common treatment to control periodic paralysis episodes.

[0033] Muscle disorders may result from inflammation. For example, Polymyositis is a chronic connective tissue disease characterized by painful inflammation and disabling muscle weakness and deterioration. Although the direct cause is unknown, cancer, viruses, or autoimmune reactions may play a role. Current treatment regimens include restricting activities during periods of intense inflammation and treatment with corticosteroids or immunosuppressive drugs to improve the strength and relieve the pain and swelling associated with the disease.

[0034] Although the majority of muscle disorders involve deterioration and weakening of the muscle, some disorder result in only stiffness and pain. For example, Polymyalgia rheumatica causes severe pain and stiffness in the neck, shoulders, and hips, especially in the morning and after periods of inactivity. No damage to the muscle is detected; however, erythrocyte sedimentation rate and C-reactive protein levels in the blood are high. Drug treatment involving corticosteroids are generally used to treat this disease.

[0035] The discovery of new human musculoskeletal system associated polynucleotides, the polypeptides encoded by them, and the antibodies that immunospecifically bind these polypeptides, satisfies a need in the art by providing new compositions which are useful in the diagnosis, treatment, prevention and/or prognosis of disorders of musculoskeletal system, particularly disorders of the musculoskeletal system, including, but not limited to, bone disorders (e.g., osteoporosis, osteomyelitis, Paget's disease, and sciolosis); joint disorders (e.g., osteoarthritis, rheumatoid arthritis, infectious arthritis, systemic lupus erythematosus, gout, and Reiter's syndrome); ligament, tendon, and bursa disorders (e.g., bursitis, tendinitis, and tenosynovitis); muscle disorders (e.g., muscular dystrophy, Pompe's disease, periodic paralysis, polymyalgia rheumatica, polymyositis, and Steinert's disease), neoplasms and/or cancers of musculoskeletal tissues (e.g., osteochondroma, benign chondroma, chondroblastoma, osteoid osteoma, and giant cell tumor), and/or as described under “Musculoskeletal System Disorders” below.

### SUMMARY OF THE INVENTION

[0036] The present invention relates to novel musculoskeletal system related polynucleotides, the polypeptides encoded by these polynucleotides herein collectively referred to as “musculoskeletal system antigens,” and antibodies that immunospecifically bind these polypeptides, and the use of such musculoskeletal system polynucleotides, antigens, and antibodies for detecting, treating, preventing and/or prognosing disorders of the musculoskeletal system system, including, but not limited to, the presence of cancer and cancer metastases. More specifically, isolated musculoskeletal system nucleic acid molecules are provided encoding novel musculoskeletal system polypeptides. Novel musculoskeletal system polypeptides and antibodies that bind to these polypeptides are provided. Also provided are vectors, host cells, and recombinant and synthetic methods for producing human musculoskeletal system polynucleotides, polypeptides, and/or antibodies. The invention further relates to diagnostic and therapeutic methods useful for diagnosing, treating, preventing and/or prognosing disorders related to the musculoskeletal system, including cancer of musculoskeletal system tissues, and therapeutic methods for treating such disorders. The invention further relates to screening methods for identifying agonists and antagonists of polynucleotides and polypeptides of the invention. The invention further relates to methods and/or compositions for inhibiting or promoting the production and/or function of the polypeptides of the invention.

### DETAILED DESCRIPTION

[0037] Tables

[0038] Table 1A summarizes some of the polynucleotides encompassed by the invention (including cDNA clones related to the sequences (Clone ID NO:Z), contig sequences (contig identifier (Contig ID:) and contig nucleotide sequence identifier (SEQ ID NO:X)) and further summarizes certain characteristics of these polynucleotides and the polypeptides encoded thereby. The first column provides a unique clone identifier, “Clone ID NO:Z”, for a cDNA plasmid related to each musculoskeletal system associated contig sequence disclosed in Table 1A. The second column provides a unique contig identifier, “Contig ID:” for each of the contig sequences disclosed in Table 1A. The third column provides the sequence identifier, “SEQ ID NO:X”, for each of the contig polynucleotide sequences disclosed in Table 1A. The fourth column, “ORF (From-To)”, provides the location (i.e., nucleotide position numbers) within the polynucleotide sequence of SEQ ID NO:X that delineate the preferred open reading frame (ORF) shown in the sequence listing and referenced in Table 1A as SEQ ID NO:Y (column 5). Column 6 lists residues comprising predicted epitopes contained in the polypeptides encoded by each of the preferred ORFs (SEQ ID NO:Y). Identification of potential immunogenic regions was performed according to the method of Jameson and Wolf (CABIOS, 4:181-186 (1988)); specifically, the Genetics Computer Group (GCG) implementation of this algorithm, embodied in the program PEPTIDESTRUCTURE (Wisconsin Package v10.0, Genetics Computer Group (GCG), Madison, Wis.). This method returns a measure of the probability that a given residue is found on the surface of the protein. Regions where the antigenic index score is greater than 0.9 over at least 6 amino acids are indicated in Table 1A as “Predicted Epitopes.” In particular embodiments, musculoskeletal system associated polypeptides of the invention comprise, or alternatively consist of, one, two, three, four, five or more of the predicted epitopes described in Table 1A. It will be appreciated that depending on the analytical criteria used to predict antigenic determinants, the exact address of the determinant may vary slightly. Column 7, “Tissue Distribution” shows the expression profile of tissue, cells, and/or cell line libraries which express the polynucleotides of the invention. The first number in column 7 (preceding the colon), represents the tissue/cell source identifier code corresponding to the code and description provided in Table 4. Expression of these polynucleotides was not observed in the other tissues and/or cell libraries tested. For those identifier codes in which the first two letters are not “AR”, the second number in column 7 (following the colon), represents the number of times a sequence corresponding to the reference polynucleotide sequence (e.g., SEQ ID NO:X) was identified in the tissue/cell source. Those tissue/cell source identifier codes in which the first two letters are “AR” designate information generated using DNA array technology. Utilizing this technology, cDNAs were amplified by PCR and then transferred, in duplicate, onto the array. Gene expression was assayed through hybridization of first strand cDNA probes to the DNA array. cDNA probes were generated from total RNA extracted from a variety of different tissues and cell lines. Probe synthesis was performed in the presence of ³³P dCTP, using oligo(dT) to prime reverse transcription. After hybridization, high stringency washing conditions were employed to remove non-specific hybrids from the array. The remaining signal, emanating from each gene target, was measured using a Phosphorimager. Gene expression was reported as Phosphor Stimulating Luminescence (PSL) which reflects the level of phosphor signal generated from the probe hybridized to each of the gene targets represented on the array. A local background signal subtraction was performed before the total signal generated from each array was used to normalize gene expression between the different hybridizations. The value presented after “[array code]:” represents the mean of the duplicate values, following background subtraction and probe normalization. One of skill in the art could routinely use this information to identify normal and/or diseased tissue(s) which show a predominant expression pattern of the corresponding polynucleotide of the invention or to identify polynucleotides which show predominant and/or specific tissue and/or cell expression. Column 8, “Cytologic Band,” provides the chromosomal location of polynucleotides corresponding to SEQ ID NO:X. Chromosomal location was determined by finding exact matches to EST and cDNA sequences contained in the NCBI (National Center for Biotechnology Information) UniGene database. Given a presumptive chromosomal location, disease locus association was determined by comparison with the Morbid Map, derived from Online Mendelian Inheritance in Man (Online Mendelian Inheritance in Man, OMIM™. McKusick-Nathans Institute for Genetic Medicine, Johns Hopkins University (Baltimore, Md.) and National Center for Biotechnology Information, National Library of Medicine (Bethesda, Md.) 2000. World Wide Web URL: http://www.ncbi.nlm.nih.gov/omim/). If the putative chromosomal location of the Query overlapped with the chromosomal location of a Morbid Map entry, an OMIM identification number is provided in Table 1A, column 9 labeled “OMIM Disease Reference(s)”. A key to the OMIM reference identification numbers is provided in Table 5.

[0039] Table 1B summarizes additional polynucleotides encompassed by the invention (including cDNA clones related to the sequences (Clone ID NO:Z), contig sequences (contig identifier (Contig ID:) contig nucleotide sequence identifiers (SEQ ID NO:X)), and genomic sequences (SEQ ID NO:B). The first column provides a unique clone identifier, “Clone ID NO:Z”, for a cDNA clone related to each contig sequence. The second column provides the sequence identifier, “SEQ ID NO:X”, for each contig sequence. The third column provides a unique contig identifier, “Contig ID:” for each contig sequence. The fourth column, provides a BAC identifier “BAC ID NO:A” for the BAC clone referenced in the corresponding row of the table. The fifth column provides the nucleotide sequence identifier, “SEQ ID NO:B” for a fragment of the BAC clone identified in column four of the corresponding row of the table. The sixth column, “Exon From-To”, provides the location (i.e., nucleotide position numbers) within the polynucleotide sequence of SEQ ID NO:B which delineate certain polynucleotides of the invention that are also exemplary members of polynucleotide sequences that encode polypeptides of the invention (e.g., polypeptides containing amino acid sequences encoded by the polynucleotide sequences delineated in column six, and fragments and variants thereof).

[0040] Table 2 summarizes homology and features of some of the polypeptides of the invention. The first column provides a unique clone identifier, “Clone ID NO:Z”, corresponding to a cDNA disclosed in Table 1A. The second column provides the unique contig identifier, “Contig ID:” corresponding to contigs in Table 1A and allowing for correlation with the information in Table 1A. The third column provides the sequence identifier, “SEQ ID NO:X”, for the contig polynucleotide sequences. The fourth column provides the analysis method by which the homology/identity disclosed in the row was determined. Comparisons were made between polypeptides encoded by the polynucleotides of the invention and either a non-redundant protein database (herein referred to as “NR”), or a database of protein families (herein referred to as “PFAM”) as further described below. The fifth column provides a description of PFAM/NR hits having significant matches to a polypeptide of the invention. Column six provides the accession number of the PFAM/NR hit disclosed in the fifth column. Column seven, “Score/Percent Identity”, provides a quality score or the percent identity, of the hit disclosed in column five. Columns 8 and 9, “NT From” and “NT To” respectively, delineate the polynucleotides in “SEQ ID NO:X” that encode a polypeptide having a significant match to the PFAM/NR database as disclosed in the fifth column. In specific embodiments, polypeptides of the invention comprise, or alternatively consist of, an amino acid sequence encoded by the polynucleotides in SEQ ID NO:X as delineated in columns 8 and 9, or fragments or variants thereof.

[0041] Table 3 provides polynucleotide sequences that may be disclaimed according to certain embodiments of the invention. The first column provides a unique clone identifier, “Clone ID NO:Z”, for a cDNA clone related to musculoskeletal system associated contig sequences disclosed in Table 1A. The second column provides the sequence identifier, “SEQ ID NO:X”, for contig polynucleotide sequences disclosed in Table 1A. The third column provides the unique contig identifier, “Contig ID”, for contigs disclosed in Table 1A. The fourth column provides a unique integer ‘a’ where ‘a’ is any integer between 1 and the final nucleotide minus 15 of SEQ ID NO:X, represented as “Range of a”, and the fifth column provides a unique integer ‘b’ where ‘b’ is any integer between 15 and the final nucleotide of SEQ ID NO:X, represented as “Range of b”, where both a and b correspond to the positions of nucleotide residues shown in SEQ ID NO:X, and where b is greater than or equal to a +14. For each of the polynucleotides shown as SEQ ID NO:X, the uniquely defined integers can be substituted into the general formula of a-b, and used to describe polynucleotides which may be preferably excluded from the invention. In certain embodiments, preferably excluded from the polynucleotides of the invention (including polynucleotide fragments and variants as described herein and diagnostic and/or therapeutic uses based on these polynucleotides) are at least one, two, three, four, five, ten, or more of the polynucleotide sequence(s) having the accession number(s) disclosed in the sixth column of this Table (including for example, published sequence in connection with a particular BAC clone). In further embodiments, preferably excluded from the invention are the specific polynucleotide sequence(s) contained in the clones corresponding to at least one, two, three, four, five, ten, or more of the available material having the accession numbers identified in the sixth column of this Table (including for example, the actual sequence contained in an identified BAC clone).

[0042] Table 4 provides a key to the tissue/cell source identifier code disclosed in Table 1A, column 7. Column 1 provides the key to the tissue/cell source identifier code disclosed in Table 1A, Column 7. Columns 2-5 provide a description of the tissue or cell source. Codes corresponding to diseased tissues are indicated in column 6 with the word “disease”. The use of the word “disease” in column 6 is non-limiting. The tissue or cell source may be specific (e.g. a neoplasm), or may be disease-associated (e.g., a tissue sample from a normal portion of a diseased organ). Furthermore, tissues and/or cells lacking the “disease” designation may still be derived from sources directly or indirectly involved in a disease state or disorder, and therefore may have a further utility in that disease state or disorder. In numerous cases where the tissue/cell source is a library, column 7 identifies the vector used to generate the library.

[0043] Table 5 provides a key to the OMIM™ reference identification numbers disclosed in Table 1A, column 9. OMIM reference identification numbers (Column 1) were derived from Online Mendelian Inheritance in Man (Online Mendelian Inheritance in Man, OMIM™. McKusick-Nathans Institute for Genetic Medicine, Johns Hopkins University (Baltimore, Md.) and National Center for Biotechnology Information, National Library of Medicine, (Bethesda, Md.) 2000. World Wide Web URL: http://www.ncbi.nlm.nih.gov/omim/). Column 2 provides diseases associated with the cytologic band disclosed in Table 1A, column 8, as determined from the Morbid Map database.

[0044] Table 6 summarizes ATCC Deposits, Deposit dates, and ATCC designation numbers of deposits made with the ATCC in connection with the present application.

[0045] Table 7 shows the cDNA libraries sequenced, tissue source description, vector information and ATCC designation numbers relating to these cDNA libraries.

[0046] Table 8 provides a physical characterization of clones encompassed by the invention. The first column provides the unique clone identifier, “Clone ID NO:Z”, for certain cDNA clones of the invention, as described in Table 1A. The second column provides the size of the cDNA insert contained in the corresponding cDNA clone.

[0047] Definitions

[0048] The following definitions are provided to facilitate understanding of certain terms used throughout this specification.

[0049] In the present invention, “isolated” refers to material removed from its original environment (e.g., the natural environment if it is naturally occurring), and thus is altered “by the hand of man” from its natural state. For example, an isolated polynucleotide could be part of a vector or a composition of matter, or could be contained within a cell, and still be “isolated” because that vector, composition of matter, or particular cell is not the original environment of the polynucleotide. The term “isolated” does not refer to genomic or cDNA libraries, whole cell total or mRNA preparations, genomic DNA preparations (including those separated by electrophoresis and transferred onto blots), sheared whole cell genomic DNA preparations or other compositions where the art demonstrates no distinguishing features of the polynucleotide sequences of the present invention.

[0050] As used herein, a “polynucleotide” refers to a molecule having a nucleic acid sequence encoding SEQ ID NO:Y or a fragment or variant thereof, a nucleic acid sequence contained in SEQ ID NO:X (as described in column 3 of Table 1A) or the complement thereof, a cDNA sequence contained in Clone ID NO:Z (as described in column 1 of Table 1A and contained within a library deposited with the ATCC); a nucleotide sequence encoding the polypeptide encoded by a nucleotide sequence in SEQ ID NO:B as defined in column 6 of Table 1B or a fragment or variant thereof; or a nucleotide coding sequence in SEQ ID NO:B as defined in column 6 of Table 1B or the complement thereof. For example, the polynucleotide can contain the nucleotide sequence of the full length cDNA sequence, including the 5′ and 3′ untranslated sequences, the coding region, as well as fragments, epitopes, domains, and variants of the nucleic acid sequence. Moreover, as used herein, a “polypeptide” refers to a molecule having an amino acid sequence encoded by a polynucleotide of the invention as broadly defined (obviously excluding poly-Phenylalanine or poly-Lysine peptide sequences which result from translation of a polyA tail of a sequence corresponding to a cDNA).

[0051] As used herein, a “musculoskeletal system antigen” refers collectively to any polynucleotide disclosed herein (e.g., a nucleic acid sequence contained in SEQ ID NO:X or the complement therof, or cDNA sequence contained in Clone ID NO:Z, or a nucleotide sequence encoding the polypeptide encoded by a nucleotide sequence in SEQ ID NO:B as defined in column 6 of Table 1B, or a nucleotide coding sequence in SEQ ID NO:B as defined in column 6 of Table 1B or the complement thereof and fragments or variants thereof as described herein) or any polypeptide disclosed herein (e.g., an amino acid sequence contained in SEQ ID NO:Y, an amino acid sequence encoded by SEQ ID NO:X, or the complement thereof, an amino acid sequence encoded by the cDNA sequence contained in Clone ID NO:Z, an amino acid sequence encoded by SEQ ID NO:B, or the complement thereof, and fragments or variants thereof as described herein). These musculoskeletal system antigens have been determined to be predominantly expressed in musculoskeletal system tissues, including normal or diseased tissues (as shown in Table 1A column 7 and Table 4).

[0052] In the present invention, “SEQ ID NO:X” was often generated by overlapping sequences contained in multiple clones (contig analysis). A representative clone containing all or most of the sequence for SEQ ID NO:X is deposited at Human Genome Sciences, Inc. (HGS) in a catalogued and archived library. As shown, for example, in column 1 of Table 1A, each clone is identified by a cDNA Clone ID (identifier generally referred to herein as Clone ID NO:Z). Each Clone ID is unique to an individual clone and the Clone ID is all the information needed to retrieve a given clone from the HGS library. Furthermore, certain clones disclosed in this application have been deposited with the ATCC on Oct. 5, 2000, having the ATCC designation numbers PTA 2574 and PTA 2575; and on Jan. 5, 2001, having the depositor reference numbers TS-1, TS-2, AC-1, and AC-2. In addition to the individual cDNA clone deposits, most of the cDNA libraries from which the clones were derived were deposited at the American Type Culture Collection (hereinafter “ATCC”). Table 7 lists the deposited cDNA libraries by name and links each library to an ATCC Deposit. Library names contain four characters, for example, “HTWE.” The name of a cDNA clone (Clone ID NO:Z) isolated from that library begins with the same four characters, for example “HTWEP07”. As mentioned below, Table 1A correlates the Clone ID NO:Z names with SEQ ID NO:X. Thus, starting with an SEQ ID NO:X, one can use Tables 1A, 6 and 7 to determine the corresponding Clone ID NO:Z, which library it came from and which ATCC deposit the library is contained in. Furthermore, it is possible to retrieve a given cDNA clone from the source library by techniques known in the art and described elsewhere herein. The ATCC is located at

[0053] University Boulevard, Manassas, Va. 20110-2209, USA. The ATCC deposits were made pursuant to the terms of the Budapest Treaty on the international recognition of the deposit of microorganisms for the purposes of patent procedure.

[0054] In specific embodiments, the polynucleotides of the invention are at least 15, at least 30, at least 50, at least 100, at least 125, at least 500, or at least 1000 continuous nucleotides but are less than or equal to 300 kb, 200 kb, 100 kb, 50 kb, 15 kb, 10 kb, 7.5 kb, 5 kb, 2.5 kb, 2.0 kb, or 1 kb, in length. In a further embodiment, polynucleotides of the invention comprise a portion of the coding sequences, as disclosed herein, but do not comprise all or a portion of any intron. In another embodiment, the polynucleotides comprising coding sequences do not contain coding sequences of a genomic flanking gene (i.e., 5′ or 3′ to the gene of interest in the genome). In other embodiments, the polynucleotides of the invention do not contain the coding sequence of more than 1000, 500, 250, 100, 50, 25, 20, 15, 10, 5, 4, 3, 2, or 1 genomic flanking gene(s).

[0055] A “polynucleotide” of the present invention also includes those polynucleotides capable of hybridizing, under stringent hybridization conditions, to sequences contained in SEQ ID NO:X, or the complement thereof (e.g., the complement of any one, two, three, four, or more of the polynucleotide fragments described herein), the polynucleotide sequence delineated in columns 8 and 9 of Table 2 or the complement thereof, and/or cDNA sequences contained in Clone ID NO:Z (e.g., the complement of any one, two, three, four, or more of the polynucleotide fragments, or the cDNA clone within the pool of cDNA clones deposited with the ATCC, described herein) and/or the polynucleotide sequence delineated in column 6 of Table 1B or the complement thereof. “Stringent hybridization conditions” refers to an overnight incubation at 42 degree C in a solution comprising 50% formamide, 5× SSC (750 mM NaCl, 75 mM trisodium citrate), 50 mM sodium phosphate (pH 7.6), 5× Denhardt's solution, 10% dextran sulfate, and 20 μg/ml denatured, sheared salmon sperm DNA, followed by washing the filters in 0.1× SSC at about 65 degree C.

[0056] Also contemplated are nucleic acid molecules that hybridize to the polynucleotides of the present invention at lower stringency hybridization conditions. Changes in the stringency of hybridization and signal detection are primarily accomplished through the manipulation of formamide concentration (lower percentages of formamide result in lowered stringency), salt conditions, or temperature. For example, lower stringency conditions include an overnight incubation at 37 degree C in a solution comprising 6× SSPE (20× SSPE=3M NaCl; 0.2M NaH₂PO₄; 0.02M EDTA, pH 7.4), 0.5% SDS, 30% formamide, 100 ug/ml salmon sperm blocking DNA; followed by washes at 50 degree C. with 1× SSPE, 0.1% SDS. In addition, to achieve even lower stringency, washes performed following stringent hybridization can be done at higher salt concentrations (e.g. 5× SSC).

[0057] Note that variations in the above conditions may be accomplished through the inclusion and/or substitution of alternate blocking reagents used to suppress background in hybridization experiments. Typical blocking reagents include Denhardt's reagent, BLOTTO, heparin, denatured salmon sperm DNA, and commercially available proprietary formulations. The inclusion of specific blocking reagents may require modification of the hybridization conditions described above, due to problems with compatibility.

[0058] Of course, a polynucleotide which hybridizes only to polyA+ sequences (such as any 3′ terminal polyA+ tract of a cDNA shown in the sequence listing), or to a complementary stretch of T (or U) residues, would not be included in the definition of “polynucleotide,” since such a polynucleotide would hybridize to any nucleic acid molecule containing a poly (A) stretch or the complement thereof (e.g., practically any double-stranded cDNA clone generated using oligo dT as a primer).

[0059] The polynucleotide of the present invention can be composed of any polyribonucleotide or polydeoxribonucleotide, which may be unmodified RNA or DNA or modified RNA or DNA. For example, polynucleotides can be composed of single- and double-stranded DNA, DNA that is a mixture of single- and double-stranded regions, single- and double-stranded RNA, and RNA that is mixture of single- and double-stranded regions, hybrid molecules comprising DNA and RNA that may be single-stranded or, more typically, double-stranded or a mixture of single- and double-stranded regions. In addition, the polynucleotide can be composed of triple-stranded regions comprising RNA or DNA or both RNA and DNA. A polynucleotide may also contain one or more modified bases or DNA or RNA backbones modified for stability or for other reasons. “Modified” bases include, for example, tritylated bases and unusual bases such as inosine. A variety of modifications can be made to DNA and RNA; thus, “polynucleotide” embraces chemically, enzymatically, or metabolically modified forms.

[0060] The polypeptide of the present invention can be composed of amino acids joined to each other by peptide bonds or modified peptide bonds, i.e., peptide isosteres, and may contain amino acids other than the 20 gene-encoded amino acids. The polypeptides may be modified by either natural processes, such as posttranslational processing, or by chemical modification techniques which are well known in the art. Such modifications are well described in basic texts and in more detailed monographs, as well as in a voluminous research literature. Modifications can occur anywhere in a polypeptide, including the peptide backbone, the amino acid side-chains and the amino or carboxyl termini. It will be appreciated that the same type of modification may be present in the same or varying degrees at several sites in a given polypeptide. Also, a given polypeptide may contain many types of modifications. Polypeptides may be branched, for example, as a result of ubiquitination, and they may be cyclic, with or without branching. Cyclic, branched, and branched cyclic polypeptides may result from posttranslation natural processes or may be made by synthetic methods. Modifications include acetylation, acylation, ADP-ribosylation, amidation, covalent attachment of flavin, covalent attachment of a heme moiety, covalent attachment of a nucleotide or nucleotide derivative, covalent attachment of a lipid or lipid derivative, covalent attachment of phosphotidylinositol, cross-linking, cyclization, disulfide bond formation, demethylation, formation of covalent cross-links, formation of cysteine, formation of pyroglutamate, formylation, gamma-carboxylation, glycosylation, GPI anchor formation, hydroxylation, iodination, methylation, myristoylation, oxidation, pegylation, proteolytic processing, phosphorylation, prenylation, racemization, selenoylation, sulfation, transfer-RNA mediated addition of amino acids to proteins such as arginylation, and ubiquitination. (See, for instance, PROTEINS—STRUCTURE AND MOLECULAR PROPERTIES, 2nd Ed., T. E. Creighton, W. H. Freeman and Company, New York (1993); POSTTRANSLATIONAL COVALENT MODIFICATION OF PROTEINS, B. C. Johnson, Ed., Academic Press, New York, pgs. 1-12 (1983); Seifter et al., Meth. Enzymol. 182:626-646 (1990); Rattan et al., Ann. N.Y. Acad. Sci. 663:48-62 (1992).)

[0061] “SEQ ID NO:X” refers to a polynucleotide sequence described, for example, in Tables 1A or 2, while “SEQ ID NO:Y” refers to a polypeptide sequence described in column 5 of Table 1A. SEQ ID NO:X is identified by an integer specified in column 3 of Table 1A. The polypeptide sequence SEQ ID NO:Y is a translated open reading frame (ORF) encoded by polynucleotide SEQ ID NO:X. “Clone ID NO:Z” refers to a cDNA clone described in column 1 of Table 1 A.

[0062] “A polypeptide having biological activity” refers to a polypeptide exhibiting activity similar to, but not necessarily identical to, an activity of a polypeptide of the present invention, including mature forms, as measured in a particular biological assay, with or without dose dependency. In the case where dose dependency does exist, it need not be identical to that of the polypeptide, but rather substantially similar to the dose-dependence in a given activity as compared to the polypeptide of the present invention (i.e., the candidate polypeptide will exhibit greater activity or not more than about 25-fold less and, preferably, not more than about tenfold less activity, and most preferably, not more than about three-fold less activity relative to the polypeptide of the present invention).

[0063] Table 1A summarizes some of the musculoskeletal system associated polynucleotides encompassed by the invention (including contig sequences (SEQ ID NO:X) and clones (Clone ID NO:Z) and further summarizes certain characteristics of these polynucleotides and the polypeptides encoded thereby.

[0064] Polynucleotides and Polypeptides

TABLE 1A

| | | | | AA | | Tissue Distribution | | |
|---|---|---|---|---|---|---|---|---|
| | | | | SEQ | | Library code: count | | OMIM |
| Clone ID | Contig | SEQ ID | ORF | ID | | (see Table IV for | Cytologic | Disease |
| NO: Z | ID | NO: X | (From-To) | NO: Y | Predicted Epitopes | Library Codes) | Band | Reference(s): |
| HANGA63 | 927404 | 11 | 168-254 | 1034 | | S0318: 1 and S0316: 1. | | |
| HANGA69 | 718174 | 12 | 86-268 | 1035 | Ser-21 to His-27, | S0318: 1 and S0316: 1. | | |
| | | | | | Ser-33 to Ser-39. | | | |
| HANGA85 | 746265 | 13 | 192-317 | 1036 | | S0318: 1 and S0316: 1. | | |
| HANGA92 | 791182 | 14 | 24-146 | 1037 | Glu-8 to Phe-14, | S0318: 1 and S0316: 1. | | |
| | | | | | Ser-20 to Gly-27. | | | |
| HANGC05 | 674059 | 15 | 2-157 | 1038 | Met-2 to His-18, | S0318: 1 and S0316: 1. | | |
| | | | | | Phe-21 to Thr-27, | | | |
| | | | | | Lys-43 to Lys-49. | | | |
| HANGC07 | 952586 | 16 | 95-226 | 1039 | Ser-28 to Thr-44. | S0318: 1 and S0316: 1. | | |
| HANGC14 | 952581 | 17 | 5-151 | 1040 | | S0318: 1 and S0316: 1. | | |
| HANGC30 | 966430 | 18 | 16-192 | 1041 | Arg-10 to Ser-17, | S0318: 1 and S0316: 1. | | |
| | | | | | Tyr-37 to His-43. | | | |
| HANGC33 | 702072 | 19 | 49-144 | 1042 | Glu-27 to Pro-32. | S0318: 1 and S0316: 1. | | |
| HANGC59 | 653577 | 20 | 72-179 | 1043 | Ser-9 to Lys-36. | S0318: 1 and S0316: 1. | | |
| HANGC84 | 715991 | 21 | 106-279 | 1044 | Asp-20 to Asn-26. | S0318: 1 and S0316: 1. | | |
| HANGF36 | 952583 | 22 | 126-206 | 1045 | Thr-1 to Lys-8. | S0318: 2 and S0316: 1. | | |
| HANGF49 | 722635 | 23 | 34-126 | 1046 | | S0318: 1 and S0316: 1. | | |
| HANGG22 | 848727 | 24 | 17-247 | 1047 | Pro-71 to Thr-77. | S0316: 2 | | |
| HANGH48 | 718759 | 25 | 89-232 | 1048 | Thr-4 to Leu-11, | S0318: 1 and S0316: 1. | | |
| | | | | | Gln-27 to Leu-34, | | | |
| | | | | | Gln-41 to Arg-47. | | | |
| HANGH53 | 727914 | 26 | 75-269 | 1049 | Asn-19 to Glu-25, | S0318: 1 and S0316: 1. | | |
| | | | | | Val-45 to Asn-54. | | | |
| HANGH58 | 811987 | 27 | 34-228 | 1050 | | S0318: 1 and S0316: 1. | | |
| HANGH66 | 661513 | 28 | 2-220 | 1051 | Tyr-1 to Lys-6, | S0318: 1 and S0316: 1. | | |
| | | | | | Thr-30 to His-36. | | | |
| HANKD09 | 625167 | 29 | 188-298 | 1052 | | S0318: 1 and S0316: 1. | | |
| HANKD47 | 719963 | 30 | 227-370 | 1053 | Ala-2 to Ser-9. | S0318: 1 and S0316: 1. | | |
| HANKD83 | 963964 | 31 | 130-312 | 1054 | Arg-21 to Ile-30, | S0318: 1 and S0316: 1. | | |
| | | | | | Lys-42 to Lys-48. | | | |
| HANKG78 | 710760 | 32 | 3-176 | 1055 | | S0318: 1, S0316: 1 and | | |
| | | | | | | L0777: 1. | | |
| HANKG90 | 746282 | 33 | 133-366 | 1056 | | S0318: 1 and S0316: 1. | | |
| HANKH48 | 721340 | 34 | 159-356 | 1057 | Ser-32 to Asn-41, | S0318: 2 and S0316: 1. | | |
| | | | | | Ser-44 to Ser-51. | | | |
| HANKH56 | 733063 | 35 | 202-318 | 1058 | His-13 to Pro-18. | S0318: 1 and S0316: 1. | | |
| HAOAA57 | 955693 | 36 | 139-2 | 1059 | | S0312: 2 and S0314: 1. | | |
| HAOAA78 | 756979 | 37 | 384-539 | 1060 | | S0312: 3 and S0314: 2. | | |
| HAOAA90 | 919249 | 38 | 82-279 | 1061 | Leu-14 to Thr-20, | S0314: 2 | | |
| | | | | | Glu-40 to Asp-52. | | | |
| HAOAC05 | 932017 | 39 | 118-312 | 1062 | Arg-34 to Thr-43, | S0314: 2 and S0312: 1. | | |
| | | | | | Glu-53 to Arg-58. | | | |
| HAOAD47 | 864899 | 40 | 235-384 | 1063 | Met-1 to Thr-12. | S0314: 2 | | |
| HAOAE53 | 964029 | 41 | 112-381 | 1064 | Arg-1 to Leu-6, | S0312: 1 and S0314: 1. | | |
| | | | | | Gly-29 to Met-36. | | | |
| HAOAE56 | 767915 | 42 | 1-234 | 1065 | | S0312: 1 and S0314: 1. | | |
| HAOAE60 | 657909 | 43 | 2-238 | 1066 | Thr-8 to Gln-16, | S0312: 1 and S0314: 1. | | |
| | | | | | Pro-58 to Pro-68. | | | |
| HAOAF68 | 752788 | 44 | 336-581 | 1067 | | L0731: 2, S0312: 1 and | | |
| | | | | | | S0314: 1. | | |
| HAOAH38 | 705946 | 45 | 239-337 | 1068 | | S0312: 1 and S0314: 1. | | |
| HAOMA13 | 915881 | 46 | 94-288 | 1069 | Arg-19 to Ser-26, | S0312: 2 | | |
| | | | | | Val-36 to Asn-44, | | | |
| | | | | | Gly-52 to Thr-59. | | | |
| HAOMB64 | 960293 | 47 | 138-386 | 1070 | | S0003: 2 and S0312: 1. | | |
| HAOMC21 | 670518 | 48 | 52-237 | 1071 | Ala-11 to Glu-22, | S0312: 2 | | |
| | | | | | Arg-38 to Ser-47. | | | |
| HAOMD90 | 788658 | 49 | 87-242 | 1072 | Pro-11 to Ser-24, | S0312: 2 | | |
| | | | | | Ser-35 to Pro-41. | | | |
| HAOME45 | 705947 | 50 | 56-280 | 1073 | Gln-1 to Gln-11, | S0312: 2 | | |
| | | | | | Arg-24 to Ile-46, | | | |
| | | | | | Arg-50 to Cys-61. | | | |
| HBCGA72 | 756953 | 51 | 1-150 | 1074 | Pro-5 to Pro-20. | S0334: 2 | | |
| HBCKB24 | 676825 | 52 | 239-412 | 1075 | | S0336: 2 | | |
| HBCKB82 | 779562 | 53 | 232-516 | 1076 | | S0336: 2 | 12q21 | 217300, 600808 |
| HBCKE22 | 674041 | 54 | 16-159 | 1077 | | S0336: 2, L0794: 2, | | |
| | | | | | | L0523: 1, L0607: 1 and | | |
| | | | | | | L0559: 1. | | |
| HBCKE78 | 746109 | 55 | 321-659 | 1078 | | S0336: 1, S0250: 1, | | |
| | | | | | | L0766: 1 and L0362: 1. | | |
| HBFMC73 | 764150 | 56 | 200-334 | 1079 | | S0362: 1 and H0529: 1. | | |
| HBSAK76 | 506666 | 57 | 51-176 | 1080 | Tyr-6 to Lys-16. | H0381: 2 | | |
| HBSAL69 | 573004 | 58 | 67-402 | 1081 | Gly-3 to Tyr-8, | H0381: 1 and H0419: | | |
| | | | | | Gln-11 to Thr-17. | 1. | | |
| HBSAL80 | 506580 | 59 | 1-378 | 1082 | Pro-3 to Phe-10, | H0381: 1 and H0419: | | |
| | | | | | His-29 to Leu-34, | 1. | | |
| | | | | | Gln-46 to Val-54, | | | |
| | | | | | Val-70 to Gln-76. | | | |
| HBSAM46 | 526732 | 60 | 202-345 | 1083 | | H0381: 2 | | |
| HBSAM48 | 727635 | 61 | 26-298 | 1084 | | H0381: 1 and S0028: 1. | | |
| HBSAP02 | 920648 | 62 | 141-338 | 1085 | | H0381: 1 and H0041: | | |
| | | | | | | 1. | | |
| HBSAP73 | 764589 | 63 | 3-227 | 1086 | Thr-22 to Arg-27, | S0028: 2 and H0381: 1. | | |
| | | | | | His-64 to Thr-73. | | | |
| HBSAQ64 | 530344 | 64 | 192-308 | 1087 | | H0381: 1 and S0003: 1. | | |
| HBSDB50 | 571365 | 65 | 2-367 | 1088 | Arg-56 to Glu-76. | AR061: 2, AR089: 0 | | |
| | | | | | | H0419: 2 | | |
| HBSDB63 | 745211 | 66 | 146-343 | 1089 | Pro-18 to Pro-45, | H0419: 2 | | |
| | | | | | Leu-49 to Arg-66. | | | |
| HBSDD91 | 775313 | 67 | 42-149 | 1090 | | H0419: 2 | | |
| HCDAA94 | 661278 | 68 | 3-167 | 1091 | | H0251: 5 | | |
| HCDAB17 | 530726 | 69 | 187-321 | 1092 | | H0251: 2, L0586: 1 | | |
| | | | | | | and L0589: 1. | | |
| HCDAE77 | 533925 | 70 | 60-251 | 1093 | Lys-34 to Glu-43, | H0251: 4 | | |
| | | | | | Val-59 to Leu-64. | | | |
| HCDAF27 | 592244 | 71 | 48-200 | 1094 | Ser-3 to Pro-11. | H0251: 5 | | |
| HCDAF29 | 533812 | 72 | 80-235 | 1095 | | H0251: 3 | | |
| HCDAF54 | 530529 | 73 | 156-434 | 1096 | | H0251: 2 | | |
| HCDAG92 | 724693 | 74 | 66-194 | 1097 | | H0251: 7 | | |
| HCDAG95 | 533871 | 75 | 102-296 | 1098 | Cys-32 to Ile-44. | H0251: 5 | | |
| HCDAH34 | 533870 | 76 | 45-248 | 1099 | Glu-1 to Gln-10. | H0251: 4 | | |
| HCDAJ67 | 925362 | 77 | 18-185 | 1100 | | H0251: 3 | | |
| HCDAK93 | 523648 | 78 | 77-199 | 1101 | | H0251: 2 | | |
| HCDAK96 | 960047 | 79 | 3-362 | 1102 | Asp-4 to Ser-9. | H0251: 12 | | |
| HCDAM34 | 523607 | 80 | 1-231 | 1103 | Phe-30 to Arg-37, | H0251: 3 | | |
| | | | | | Glu-45 to His-50. | | | |
| HCDAO32 | 530006 | 81 | 192-314 | 1104 | | H0251: 2 | | |
| HCDAT56 | 533881 | 82 | 388-558 | 1105 | | H0251: 3, L0766: 1 | | |
| | | | | | | and L0756: 1. | | |
| HCDBO13 | 709590 | 83 | 41-238 | 1106 | | H0251: 10 | | |
| HCDBR37 | 968501 | 84 | 80-331 | 1107 | | H0251: 4 | 12q14 | 123829, 147570, |
| | | | | | | | | 181430, 252940, |
| | | | | | | | | 264700, 600808, |
| | | | | | | | | 601284, 601769, |
| | | | | | | | | 601769, 602116 |
| HCDBR39 | 921893 | 85 | 2-361 | 1108 | Ala-1 to Arg-9, | H0251: 10 and S0001: | | |
| | | | | | Arg- 15 to Lys-29, | 1. | | |
| | | | | | Ala-47 to Ser-59, | | | |
| | | | | | Gly-81 to Thr-92. | | | |
| HCDBU77 | 661272 | 86 | 53-172 | 1109 | | H0251: 3 | | |
| HCDBW51 | 556469 | 87 | 48-293 | 1110 | | H0251: 5 | | |
| HCDBW61 | 960044 | 88 | 32-115 | 1111 | | H0251: 2 and L0756: | | |
| | | | | | | 1. | | |
| HCDBX78 | 847580 | 89 | 63-257 | 1112 | | H0251: 3 | | |
| HCDCB84 | 670159 | 90 | 3-125 | 1113 | Lys-1 to Asp-6. | H0251: 3 | | |
| HCDCE48 | 529893 | 91 | 89-205 | 1114 | Asn-1 to His-9, | H0251: 2 | | |
| | | | | | Thr-11 to Lys-19. | | | |
| HCDCE62 | 523582 | 92 | 21-161 | 1115 | | H0251: 3 | | |
| HCDCF11 | 967768 | 93 | 159-248 | 1116 | | H0251: 2 | | |
| HCDCK07 | 865908 | 94 | 2-148 | 1117 | Leu-22 to Glu-27. | H0251: 2 | 7q22.1 | 120160, 120160, |
| | | | | | | | | 120160, 120160, |
| | | | | | | | | 126650, 126650 |
| HCDCK91 | 592465 | 95 | 18-176 | 1118 | Arg-13 to Ser-21, | H0251: 3 | | |
| | | | | | Ser-40 to Lys-46. | | | |
| HCDCR26 | 960048 | 96 | 191-319 | 1119 | | H0251: 3 | | |
| HCDCX68 | 529778 | 97 | 30-104 | 1120 | | H0251: 2 | | |
| HCDCY13 | 921702 | 98 | 2-73 | 1121 | | H0251: 2 | | |
| HCDDB52 | 847581 | 99 | 100-267 | 1122 | | H0251: 3 | | |
| HCDDB62 | 529890 | 100 | 43-177 | 1123 | | H0251: 2 | | |
| HCDDI61 | 529937 | 101 | 3-83 | 1124 | | H0251: 2 | | |
| HCDDU07 | 954177 | 102 | 3-173 | 1125 | | H0251: 2 | | |
| HCDDV90 | 847575 | 103 | 20-157 | 1126 | Pro-36 to Lys-46. | H0251: 3 | | |
| HCDDY57 | 556465 | 104 | 244-363 | 1127 | Arg-12 to Cys-22. | H0251: 4 | | |
| HCDDZ09 | 523605 | 105 | 160-396 | 1128 | | H0251: 2 | | |
| HCDDZ44 | 863388 | 106 | 3-458 | 1129 | | H0251: 4 | | |
| HCDEB49 | 847572 | 107 | 1-144 | 1130 | Tyr-1 to Gln-16, | H0251: 2 | | |
| | | | | | Asn-21 to Ala-27. | | | |
| HCDEB78 | 921710 | 108 | 21-119 | 1131 | | H0251: 2 | | |
| HCDEG67 | 531239 | 109 | 257-355 | 1132 | | H0251: 2 | | |
| HCDEG95 | 533879 | 110 | 123-287 | 1133 | | H0251: 5 | | |
| HCDER16 | 667338 | 111 | 85-270 | 1134 | Asn-36 to Cys-41. | H0251: 1 and S0028: 1. | | |
| HCDER29 | 523506 | 112 | 2-211 | 1135 | | H0251: 3 | | |
| HCDET89 | 524045 | 113 | 157-342 | 1136 | | H0251: 3 | | |
| HFIAB89 | 848927 | 114 | 1-48 | 1137 | | S0192: 2 | | |
| HFIAB93 | 713799 | 115 | 317-463 | 1138 | | S0192: 2 | | |
| HFIAE82 | 779898 | 116 | 2-124 | 1139 | Pro-1 to Leu-9. | S0192: 1 and S0194: 1. | | |
| HFIAH10 | 964652 | 117 | 93-236 | 1140 | Asn-22 to Thr-28. | S0192: 2 | | |
| HFIAI07 | 952884 | 118 | 21-188 | 1141 | | S0192: 2 and L0748: 1. | | |
| HFIAP31 | 697775 | 119 | 3-203 | 1142 | Ser-22 to Ala-28, | S0192: 4 | | |
| | | | | | Arg-52 to Arg-66. | | | |
| HFIAP89 | 587844 | 120 | 145-348 | 1143 | | S0192: 3 | | |
| HFIAP91 | 925831 | 121 | 486-214 | 1144 | | S0192: 2 | | |
| HFIAV83 | 780358 | 122 | 146-36 | 1145 | Lys-24 to Leu-32. | S0192: 2 | | |
| HFIAZ63 | 966761 | 123 | 137-355 | 1146 | Thr-17 to Ser-22. | S0192: 16 and L0809: | | |
| | | | | | | 1. | | |
| HFIBI48 | 587871 | 124 | 1-210 | 1147 | Arg-1 to Ser-6, | S0192: 5 | | |
| | | | | | Leu-34 to Asp-42. | | | |
| HFICA06 | 934675 | 125 | 2-244 | 1148 | | S0192: 2 | | |
| HFICE40 | 587918 | 126 | 143-310 | 1149 | | S0192: 5 | | |
| HFICF01 | 916103 | 127 | 111-212 | 1150 | | S0192: 2 | | |
| HFICI52 | 522239 | 128 | 2-568 | 1151 | Arg-1 to Arg-8. | S0028: 1 and S0192: 1. | 1q31-q32 | 114208, 114208, |
| | | | | | | | | 119300, 120620, |
| | | | | | | | | 120620, 120920, |
| | | | | | | | | 134370, 134370, |
| | | | | | | | | 134370, 134580, |
| | | | | | | | | 145001, 145260, |
| | | | | | | | | 150292, 150310, |
| | | | | | | | | 150310, 179820, |
| | | | | | | | | 191045, 208250, |
| | | | | | | | | 226450, 600105, |
| | | | | | | | | 600759, 600995, |
| | | | | | | | | 601494, 601652, |
| | | | | | | | | 601975 |
| HFICM95 | 587875 | 129 | 148-261 | 1152 | Pro-18 to Asn-23. | S0192: 2 | | |
| HFICZ77 | 934192 | 130 | 1-141 | 1153 | Pro-1 to Arg-11. | S0192: 2 | | |
| HFIDB12 | 968922 | 131 | 288-509 | 1154 | Ala-2 to Lys-7, | S0192: 2 | | |
| | | | | | Pro-23 to His-29. | | | |
| HFIDL94 | 964316 | 132 | 122-325 | 1155 | Asn-1 to Ser-11. | S0192: 4 | | |
| HFIDM69 | 926894 | 133 | 336-485 | 1156 | | S0192: 4 | | |
| HFIDN81 | 959050 | 134 | 454-302 | 1157 | | S0192: 3 | | |
| HFIEC13 | 883185 | 135 | 1-525 | 1158 | Glu-1 to Arg-13. | AR061: 168, AR089: | | |
| | | | | | | 145 | | |
| | | | | | | S0192: 2 | | |
| HFIEF04 | 926824 | 136 | 2-112 | 1159 | Pro-16 to Val-26. | S0192: 3 | | |
| HFIEH79 | 855196 | 137 | 449-640 | 1160 | | S0192: 55 | | |
| HFIHB16 | 661971 | 138 | 1-132 | 1161 | Leu-21 to Gly-26, | S0192: 3 and S0194: 1. | | |
| | | | | | Leu-29 to Glu-35. | | | |
| HFIHD91 | 702324 | 139 | 582-734 | 1162 | Asp-10 to Lys-18, | S0194: 2 and L0740: 1. | | |
| | | | | | Arg-37 to Cys-42, | | | |
| | | | | | Gln-46 to Asn-51. | | | |
| HFIHE47 | 857988 | 140 | 385-1659 | 1163 | Pro-1 to Gly-6, | AR089: 17, AR061: 17 | | |
| | | | | | Phe-31 to Thr-36, | S0250: 1, L0439: 1 and | | |
| | | | | | Gln-66 to Leu-75, | S0194: 1. | | |
| | | | | | Leu-83 to Pro-91. | | | |
| HFIHF63 | 944246 | 141 | 2-610 | 1164 | | AR061: 1, AR089: 1 | | |
| | | | | | | L0747: 3, S0250: 1, | | |
| | | | | | | L0777: 1, L0731: 1, | | |
| | | | | | | L0758: 1 and S0194: 1. | | |
| | 973023 | 1010 | 895-530 | 2033 | Pro-6 to Cys-13, | | | |
| | | | | | Pro-15 to Leu-20, | | | |
| | | | | | Pro-47 to Gly-59, | | | |
| | | | | | Asn-82 to Ser-88. | | | |
| HFIHJ60 | 740280 | 142 | 34-177 | 1165 | Lys-39 to Tyr-45. | S0194: 2 | | |
| HFIHJ85 | 707899 | 143 | 212-385 | 1166 | Met-1 to Thr-7, | S0276: 4 and S0194: 1. | | |
| | | | | | Gly-10 to Cys-21, | | | |
| | | | | | Ile-25 to Trp-30, | | | |
| | | | | | Pro-41 to Glu-49. | | | |
| HFIHL29 | 690546 | 144 | 46-156 | 1167 | | S0022: 1 and S0194: 1. | | |
| HFIHS76 | 769952 | 145 | 246-404 | 1168 | Asn-16 to Arg-21. | S0194: 2 | | |
| HFIHZ33 | 588058 | 146 | 279-455 | 1169 | Arg-7 to Cys-14, | L2245: 1, L0731: 1, | | |
| | | | | | Glu-26 to Ser-32. | L0604: 1, S0194: 1 and | | |
| | | | | | | S0276: 1. | | |
| HFIHZ51 | 725587 | 147 | 1-201 | 1170 | Glu-47 to Lys-53. | S0194: 2 | | |
| HFIIB73 | 669594 | 148 | 262-441 | 1171 | | S0194: 1 and S0276: 1. | | |
| HFIIS21 | 670765 | 149 | 141-332 | 1172 | | S0206: 1 and S0194: 1. | | |
| HFIJF34 | 703972 | 150 | 1-144 | 1173 | Glu-1 to Gln-16, | S0194: 1 and S0276: 1. | | |
| | | | | | Ser-42 to Gly-48. | | | |
| HFITX48 | 934328 | 151 | 239-466 | 1174 | Thr-1 to Asp-8. | S0196: 3 and S0242: 2. | | |
| HFITZ24 | 677144 | 152 | 28-426 | 1175 | | S0196: 2 | | |
| HFIUE17 | 855119 | 153 | 182-307 | 1176 | | S0242: 7, S0196: 2 and | | |
| | | | | | | L0792: 1. | | |
| HFIUH54 | 929787 | 154 | 246-443 | 1177 | | S0196: 16 and S0242: | | |
| | | | | | | 13. | | |
| HFIUI66 | 746397 | 155 | 2-103 | 1178 | Thr-7 to Asn-12, | S0242: 1 and S0196: 1. | | |
| | | | | | Ser-21 to Trp-28. | | | |
| HFIUJ95 | 735969 | 156 | 48-167 | 1179 | | S0196: 2 | | |
| HFIUM59 | 724249 | 157 | 122-244 | 1180 | | S0196: 2 | | |
| HFIUO63 | 691921 | 158 | 161-334 | 1181 | Trp-10 to Pro-15. | L0754: 1, S0242: 1 and | | |
| | | | | | | S0196: 1. | | |
| HFIUP04 | 582296 | 159 | 2-88 | 1182 | | S0196: 2 | 1p22 | 170995, 191540, |
| | | | | | | | | 274270, 274270, |
| | | | | | | | | 600309, 601414, |
| | | | | | | | | 602094 |
| HFIVB03 | 924021 | 160 | 55-195 | 1183 | Ser-5 to Lys-13, | S0196: 3 and S0242: 1. | | |
| | | | | | Arg-39 to Tyr-47. | | | |
| HFIVB25 | 678022 | 161 | 20-130 | 1184 | | S0196: 2 | | |
| HFIVB62 | 741665 | 162 | 91-255 | 1185 | Gln-38 to Arg-48. | S0242: 1 and S0196: 1. | | |
| HFIVQ02 | 919802 | 163 | 214-453 | 1186 | Glu-46 to Arg-53. | S0242: 1 and S0196: 1. | | |
| HFIXA30 | 692637 | 164 | 142-243 | 1187 | | L0759: 2, S0242: 2, | | |
| | | | | | | L0766: 1 and L0663: 1. | | |
| HFIXC30 | 692635 | 165 | 37-282 | 1188 | | S0242: 2 | | |
| HFIXC44 | 839536 | 166 | 369-554 | 1189 | His-1 to Asp-9. | L0439: 6, S0242: 2 and | | |
| | | | | | | L0438: 1. | | |
| HFIXC49 | 722886 | 167 | 2-172 | 1190 | Glu-6 to Leu-17, | S0242: 2 | | |
| | | | | | Ser-36 to Gly-41. | | | |
| HFIXK83 | 767156 | 168 | 170-364 | 1191 | | S0242: 2 | | |
| HFIXK94 | 943717 | 169 | 58-417 | 1192 | | AR089: 2, AR061: 1 | | |
| | | | | | | S0242: 1 and S0196: 1. | | |
| HFIXM11 | 966714 | 170 | 3-95 | 1193 | Phe-5 to Glu-13. | S0242: 2 | | |
| HFIXO03 | 923735 | 171 | 269-373 | 1194 | | S0242: 2 | | |
| HFIXV93 | 597031 | 172 | 115-297 | 1195 | | S0242: 1 and S0196: 1. | | |
| HFIXY13 | 656812 | 173 | 148-258 | 1196 | | S0242: 2 | | |
| HFIXY57 | 734580 | 174 | 143-280 | 1197 | | S0242: 2 | | |
| HFIXY80 | 965077 | 175 | 1-174 | 1198 | Asn-45 to Gly-57. | S0242: 2 | | |
| HFIYA86 | 757155 | 176 | 192-356 | 1199 | | S0242: 1 and S0196: 1. | | |
| HFIYB24 | 952847 | 177 | 107-304 | 1200 | Asn-14 to Asn-19. | S0242: 2 | | |
| HFIYB40 | 964251 | 178 | 101-283 | 1201 | Pro-6 to Arg-13, | S0242: 4 and S0196: 1. | | |
| | | | | | Gly-46 to Arg-52. | | | |
| HFIYK01 | 916125 | 179 | 1-123 | 1202 | Gly-1 to Gln-6. | S0242: 2 | | |
| HEIYL01 | 919416 | 180 | 2-277 | 1203 | Arg-17 to Pro-23, | S0242: 1 and S0276: 1. | | |
| | | | | | Asp-52 to Lys-74. | | | |
| HFIYO14 | 657598 | 181 | 2-145 | 1204 | | S0242: 2 and L0779: 1. | | |
| HFIYP02 | 919501 | 182 | 1-162 | 1205 | Pro-8 to Arg-16, | S0242: 3 | | |
| | | | | | Pro-34 to Leu-46. | | | |
| HFIYV01 | 916064 | 183 | 264-425 | 1206 | Gly-1 to Gly-12. | S0011: 1 and S0242: 1. | | |
| HFIYV03 | 923755 | 184 | 173-298 | 1207 | Lys-31 to Asn-38. | S0242: 2 | | |
| HFIYV59 | 861487 | 185 | 25-255 | 1208 | | S0242: 2 | | |
| HFIYW08 | 958978 | 186 | 7-198 | 1209 | Gln-47 to Lys-52. | S0242: 2 | | |
| HFIYZ13 | 656795 | 187 | 1-321 | 1210 | Gln-32 to Arg-40, | S0242: 2 | | |
| | | | | | Ser-49 to Ser-59, | | | |
| | | | | | Asp-71 to Asn-88. | | | |
| HFIZF95 | 795734 | 188 | 52-204 | 1211 | | S0242: 2 and L0754: 1. | | |
| HFIZG93 | 928170 | 189 | 239-406 | 1212 | | S0242: 4 | | |
| HFIZH29 | 953895 | 190 | 252-392 | 1213 | Lys-1 to Thr-9, | H0124: 1 and S0242: 1. | | |
| | | | | | Thr-15 to Gly-23. | | | |
| HEIZM92 | 791267 | 191 | 403-573 | 1214 | | L0754: 2, S0242: 1 and | | |
| | | | | | | S0194: 1. | | |
| HFOXA79 | 774901 | 192 | 74-250 | 1215 | Gly-25 to Trp-30, | S0276: 2 | | |
| | | | | | Gly-36 to Pro-47. | | | |
| HFOXB85 | 752957 | 193 | 195-374 | 1216 | | S0276: 2 | | |
| HFOXC25 | 677995 | 194 | 64-186 | 1217 | Thr-7 to Gly-14, | S0276: 3 | | |
| | | | | | His-30 to Pro-35. | | | |
| HFOXC35 | 638311 | 195 | 2-358 | 1218 | Pro-1 to Glu-12. | S0276: 2 | | |
| HFOXE83 | 587955 | 196 | 185-283 | 1219 | Lys-13 to Gly-29. | S0276: 3 | | |
| HFOXL03 | 923772 | 197 | 160-321 | 1220 | | S0276: 2 | | |
| HFOXM54 | 587974 | 198 | 53-211 | 1221 | | S0276: 2 | | |
| HFOXN89 | 587984 | 199 | 76-2 | 1222 | | S0276: 2 | | |
| HFOXO24 | 733377 | 200 | 247-414 | 1223 | Gly-1 to Tyr-8. | S0214: 1 and S0276: 1. | | |
| HFOXR28 | 587994 | 201 | 166-324 | 1224 | Phe-4 to Ser-10. | S0276: 2 | | |
| HFOXR67 | 806488 | 202 | 3-257 | 1225 | Pro-21 to Asn-30. | S0276: 3 | | |
| HFOXS81 | 588052 | 203 | 144-383 | 1226 | Ala-5 to Phe-14, | S0276: 2 | | |
| | | | | | His-45 to Lys-58. | | | |
| HFOXU83 | 887781 | 204 | 1-267 | 1227 | | AR051: 17, AR054: 8, | | |
| | | | | | | AR050: 5 | | |
| | | | | | | S0276: 3 | | |
| HFOXU92 | 588057 | 205 | 77-3 | 1228 | Ile-2 to Ala-16. | S0276: 2 | | |
| HFOXV15 | 964296 | 206 | 159-335 | 1229 | | S0276: 2 | | |
| HFOXV80 | 771290 | 207 | 1-426 | 1230 | Leu-3 to His-14, | S0340: 1 and S0276: 1. | | |
| | | | | | Pro-19 to Thr-49, | | | |
| | | | | | Ala-54 to Gly-59, | | | |
| | | | | | Leu-77 to Gly-82, | | | |
| | | | | | Gln-87 to Ala-100. | | | |
| HFOYI36 | 935532 | 208 | 2-178 | 1231 | Val-3 to Leu-10, | S0192: 1 and S0276: 1. | | |
| | | | | | Asn-18 to Lys-37, | | | |
| | | | | | Pro-45 to Val-51. | | | |
| HFOYL77 | 494844 | 209 | 9-185 | 1232 | | S0276: 2 | | |
| HMUBM26 | 908912 | 210 | 2-565 | 1233 | Ser-1 to Ser-9, | AR089: 20, AR061: 8 | | |
| | | | | | His-28 to Glu-35, | H0529: 1 and S0032: 1. | | |
| | | | | | Phe-71 to Asn-76, | | | |
| | | | | | Val-83 to Gly-96, | | | |
| | | | | | Phe-99 to Asn-104, | | | |
| | | | | | Lys-109 to Ser-116, | | | |
| | | | | | Cys-120 to Cys-129, | | | |
| | | | | | His-140 to Glu-150, | | | |
| | | | | | Pro-161 to Trp-170. | | | |
| HMUBX25 | 678004 | 211 | 1-261 | 1234 | Ser-1 to Ala-8, | H0529: 2 | | |
| | | | | | Pro-65 to Leu-70. | | | |
| HMUBY88 | 740311 | 212 | 1-372 | 1235 | Tyr-44 to Pro-55, | H0529: 2 | | |
| | | | | | Thr-72 to Arg-77, | | | |
| | | | | | Phe-92 to Lys-110. | | | |
| HOAAB15 | 575254 | 213 | 1-114 | 1236 | Ser-1 to Gly-7, | H0252: 2 | | |
| | | | | | Gly-18 to Ala-23, | | | |
| | | | | | Lys-25 to Val-36. | | | |
| HOAAB42 | 530605 | 214 | 3-209 | 1237 | | H0252: 2 | 12p11 | |
| HOAAB56 | 507839 | 215 | 2-190 | 1238 | Phe-38 to Gly-50. | H0252: 3 | | |
| HOAAC31 | 693597 | 216 | 3-95 | 1239 | Thr-3 to Gly-10. | L0766: 3 and H0252: | | |
| | | | | | | 2. | | |
| HOAAD05 | 932756 | 217 | 560-126 | 1240 | | H0252: 2, L0753: 2, | | |
| | | | | | | L0455: 1, L0770: 1, | | |
| | | | | | | L0779: 1 and L0731: 1. | | |
| HOAAD52 | 859628 | 218 | 140-331 | 1241 | Met-1 to Leu-11, | H0252: 3 | | |
| | | | | | Ser-22 to Lys-29. | | | |
| HOAAE10 | 968532 | 219 | 89-208 | 1242 | | H0252: 2 | | |
| HOAAE45 | 530602 | 220 | 106-330 | 1243 | Gly-34 to Asn-51. | H0252: 2 | | |
| HOAAE49 | 859630 | 221 | 78-302 | 1244 | His-6 to Lys-11, | H0041: 1 and H0252: | | |
| | | | | | Glu-27 to Lys-38. | 1. | | |
| HOAAE73 | 960631 | 222 | 3-161 | 1245 | Arg-13 to Cys-30, | H0252: 3 | | |
| | | | | | Val-37 to Phe-47. | | | |
| HOAAF18 | 530600 | 223 | 156-347 | 1246 | Thr-1 to Ala-10. | H0252: 2 | | |
| HOAAH10 | 968368 | 224 | 200-454 | 1247 | Gly-53 to Asp-64, | H0252: 2, L0748: 2, | | |
| | | | | | Pro-72 to Arg-85. | L0518: 1 and L0759: 1. | | |
| HOAAI05 | 932537 | 225 | 87-251 | 1248 | Asp-32 to Ser-45. | H0252: 2 | | |
| HOAAJ23 | 531389 | 226 | 28-135 | 1249 | Lys-1 to Asp-8, | H0252: 2 | | |
| | | | | | Lys-12 to Lys-28. | | | |
| HOAAK90 | 527490 | 227 | 2-178 | 1250 | | H0252: 2 | | |
| HOAAM08 | 960060 | 228 | 25-201 | 1251 | Ala- 14 to Thr-36. | H0252: 2 | | |
| HOAAR14 | 526530 | 229 | 2-202 | 1252 | Arg-17 to Lys-22, | H0252: 2 | | |
| | | | | | Thr-39 to Lys-54. | | | |
| HOAAV23 | 527489 | 230 | 1-306 | 1253 | | H0252: 2 | | |
| HOAAW21 | 527487 | 231 | 193-309 | 1254 | Val-22 to Gly-28, | H0252: 2 | | |
| | | | | | Gly-31 to Gly-36. | | | |
| HOAAZ61 | 531065 | 232 | 31-333 | 1255 | Gln-4 to Cys-12. | H0252: 2 | | |
| HOABA20 | 932539 | 233 | 23-118 | 1256 | | H0252: 2 | | |
| HOABA93 | 792929 | 234 | 78-146 | 1257 | | H0252: 2 | | |
| HOABD58 | 738359 | 235 | 3-110 | 1258 | | H0252: 2 | | |
| HOABP66 | 507175 | 236 | 86-253 | 1259 | Lys-39 to Gly-44. | H0252: 2 | | |
| HOABP69 | 531049 | 237 | 2-76 | 1260 | | H0252: 2 | | |
| HOABR40 | 531051 | 238 | 245-358 | 1261 | Gly-1 to Asp-8. | H0252: 2 | | |
| HOEAK21 | 954961 | 239 | 2-280 | 1262 | | S0126: 4 | | |
| HOEAY14 | 659258 | 240 | 25-132 | 1263 | | S0126: 3, L0520: 1 and | | |
| | | | | | | L0749: 1. | | |
| HOEBL44 | 715851 | 241 | 69-272 | 1264 | | S0126: 2 | | |
| HOEBO31 | 693689 | 242 | 2-103 | 1265 | | S0126: 2 | | |
| HOEBP01 | 916957 | 243 | 3-470 | 1266 | Lys-11 to Asp-17, | L0439: 3 and S0126: 2. | | |
| | | | | | Tyr-24 to Asp-29, | | | |
| | | | | | Leu-50 to Ser-64, | | | |
| | | | | | Ala-76 to Phe-81, | | | |
| | | | | | Arg-132 to Ser-137. | | | |
| HOECN79 | 723113 | 244 | 88-237 | 1267 | | S0126: 9, H0658: 1 and | | |
| | | | | | | L0602: 1. | | |
| HOECY54 | 506692 | 245 | 31-342 | 1268 | Lys-28 to Glu-33, | S0126: 2 | | |
| | | | | | Lys-38 to Thr-54, | | | |
| | | | | | Pro-61 to Ser-70. | | | |
| HOEDD40 | 572900 | 246 | 86-346 | 1269 | Pro-8 to Glu-20, | S0126: 2 | | |
| | | | | | Arg-32 to Gly-41, | | | |
| | | | | | Ser-49 to Arg-61. | | | |
| HOEDD83 | 578934 | 247 | 34-267 | 1270 | | S0126: 2 | | |
| HOEDK10 | 915054 | 248 | 1-276 | 1271 | Gly-10 to Asp-15, | S0126: 9 | | |
| | | | | | Gly-31 to Gly-38, | | | |
| | | | | | Arg-41 to Asp-55. | | | |
| HOEDT31 | 826009 | 249 | 148-474 | 1272 | | S0126: 3 | | |
| HOEDU54 | 506576 | 250 | 391-513 | 1273 | Asn-9 to Pro-15. | S0126: 5 and L0661: 1. | | |
| HOEDU68 | 713695 | 251 | 32-169 | 1274 | Arg-28 to Tyr-36, | S0126: 2 | | |
| | | | | | Pro-40 to Ser-46. | | | |
| HOEEB63 | 745039 | 252 | 2-310 | 1275 | Gly-6 to Gly-12, | S0126: 2 | | |
| | | | | | Ala-14 to Pro-19. | | | |
| HOEEC02 | 919822 | 253 | 143-235 | 1276 | Arg-1 to Gly-14. | S0126: 4 | | |
| HOEEO45 | 717754 | 254 | 62-238 | 1277 | | S0126: 2 | | |
| HOEEQ17 | 663719 | 255 | 173-298 | 1278 | Asp-20 to Ala-25. | S0126: 5 | | |
| HOEFG22 | 744340 | 256 | 97-285 | 1279 | Ser-13 to Ala-18. | S0126: 1 and S3012: 1. | | |
| HOEFL91 | 790134 | 257 | 1-135 | 1280 | | S0126: 5, L0022: 1, | | |
| | | | | | | L0752: 1 and L0581: 1. | | |
| HOEFN92 | 698444 | 258 | 170-325 | 1281 | Lys-26 to Gly-31, | S0126: 2 | | |
| | | | | | Pro-35 to Asn-45. | | | |
| HOEFS83 | 615154 | 259 | 2-220 | 1282 | | S0126: 2 | | |
| HOEJE18 | 666349 | 260 | 90-278 | 1283 | | S0126: 2 | | |
| HOEJG04 | 859251 | 261 | 3-482 | 1284 | Asp-76 to Ile-84, | AR089: 1, AR061: 0 | | |
| | | | | | Thr-122 to Trp-139. | S0126: 2, S0028: 1 and: | | |
| | | | | | | 1. | | |
| HOEJW84 | 859225 | 262 | 195-425 | 1285 | | S0126: 2 and L0748: 2. | | |
| HOEKH88 | 924112 | 263 | 2-172 | 1286 | Pro-17 to Lys-23, | S0126: 3 and S0028: 1. | | |
| | | | | | Leu-31 to Ser-36. | | | |
| HOEKP01 | 918873 | 264 | 3-329 | 1287 | Gln-1 to Arg-13, | S0126: 3 | | |
| | | | | | Pro-27 to Pro-41. | | | |
| HOEKP79 | 963337 | 265 | 309-467 | 1288 | | S0126: 5 | | |
| HOEME76 | 974069 | 266 | 6-488 | 1289 | Lys-8 to Ser-16, | S0126: 2 | | |
| | | | | | Tyr-81 to Ile-94, | | | |
| | | | | | Ser-97 to Asp-111. | | | |
| HOEMK02 | 918364 | 267 | 3-89 | 1290 | | S0126: 2 | | |
| HOEMQ65 | 922789 | 268 | 132-323 | 1291 | | S0126: 2 | | |
| HOEOE25 | 907806 | 269 | 2-625 | 1292 | Lys-95 to Asp-103, | L0766: 4, L0517: 2, | | |
| | | | | | Pro-108 to Leu-115, | S0126: 2, L0794: 1 and | | |
| | | | | | Lys-150 to Leu-158, | L0366: 1. | | |
| | | | | | Leu-162 to Trp-167, | | | |
| | | | | | Leu-177 to Lys-186, | | | |
| | | | | | Glu-201 to Gln-208. | | | |
| HOHAA14 | 468867 | 270 | 185-385 | 1293 | | S0250: 2 | | |
| HOHAB04 | 665381 | 271 | 183-284 | 1294 | | S0250: 2 | | |
| HOHAB21 | 670814 | 272 | 3-158 | 1295 | Ser-10 to Phe-16, | S0250: 2 | | |
| | | | | | Asn-22 to Asn-27. | | | |
| HOHAE68 | 781448 | 273 | 20-286 | 1296 | | S0250: 2 | | |
| HOHAM36 | 782043 | 274 | 1-138 | 1297 | Gly-27 to Asp-35. | S0250: 2, L0598: 1, | | |
| | | | | | | L0766: 1 and L0745: 1. | | |
| HOHBE48 | 588317 | 275 | 77-364 | 1298 | Lys-1 to Ser-6, | S0250: 2 | | |
| | | | | | Thr-9 to Lys-22, | | | |
| | | | | | Ser-65 to Lys-73. | | | |
| HOHBF30 | 859046 | 276 | 153-518 | 1299 | Leu-43 to Pro-49, | S0250: 2 | | |
| | | | | | Asp-108 to Asp-120. | | | |
| HOHBL11 | 966720 | 277 | 23-280 | 1300 | Gln-4 to Gly-13, | S0250: 2 | | |
| | | | | | Arg-21 to Glu-29. | | | |
| HOHBL32 | 588329 | 278 | 273-461 | 1301 | Asn-43 to His-52. | S0250: 2 | | |
| HOHBO79 | 588271 | 279 | 245-442 | 1302 | Pro-1 to Gly-17, | S0250: 2 | | |
| | | | | | Gln-23 to Gly-34. | | | |
| HOHBW86 | 784723 | 280 | 111-278 | 1303 | Trp-8 to Gly-17, | S0250: 1 and S0028: 1. | | |
| | | | | | Glu-25 to Gly-30. | | | |
| HOHBX75 | 669536 | 281 | 3-497 | 1304 | Gln-13 to Gly-24, | S0250: 2 | | |
| | | | | | Asn-63 to Ala-70. | | | |
| HOHBY75 | 840109 | 282 | 191-304 | 1305 | | S0250: 2 and LO465: 1. | | |
| HOHCH04 | 859047 | 283 | 3-581 | 1306 | Cys-1 to Pro-8. | S0250: 2 | | |
| HOHCI05 | 935123 | 284 | 54-155 | 1307 | | S0250: 2 | | |
| HOHCM38 | 709295 | 285 | 114-227 | 1308 | Tyr-31 to Phe-38. | S0250: 2 | | |
| HOHCM90 | 703734 | 286 | 3-152 | 1309 | | S0250: 2 | | |
| HOHCO85 | 751299 | 287 | 93-260 | 1310 | Pro-49 to Lys-56. | S0250: 2 | 6q12-q13 | 203310 |
| HOHCP35 | 656516 | 288 | 155-295 | 1311 | Tyr-8 to Glu-15, | S0250: 2 | | |
| | | | | | Thr-26 to Lys-34. | | | |
| HOHCQ76 | 825236 | 289 | 157-330 | 1312 | | S0250: 2 | | |
| HOHCQ77 | 661480 | 290 | 2-115 | 1313 | | S0250: 2 | | |
| HOHCV83 | 735685 | 291 | 8-241 | 1314 | | S0250: 2 | | |
| HOHCW02 | 919142 | 292 | 159-284 | 1315 | | S0250: 2 | | |
| HOHDB11 | 966413 | 293 | 3-440 | 1316 | | S0250: 2, L0740: 2 and | | |
| | | | | | | L0777: 1. | | |
| HOHDB32 | 698781 | 294 | 1-162 | 1317 | Pro-21 to Asn-32, | S0250: 3 | | |
| | | | | | Gln-37 to Thr-54. | | | |
| HOHDD23 | 675616 | 295 | 266-412 | 1318 | | S0250: 2 | | |
| HOHDF40 | 710748 | 296 | 2-337 | 1319 | Phe-3 to Trp-10, | S0250: 2 and L0777: 1. | | |
| | | | | | Asn-27 to Asn-40, | | | |
| | | | | | Ser-43 to Lys-48, | | | |
| | | | | | Thr-52 to Ser-61, | | | |
| | | | | | Met-72 to Asp-77, | | | |
| | | | | | Leu-82 to Thr-89. | | | |
| HOHDF53 | 727620 | 297 | 219-344 | 1320 | | S0250: 2 | | |
| HOHDI48 | 966379 | 298 | 3-131 | 1321 | Ser-11 to Lys-20. | S0250: 2 | | |
| HOHDY85 | 764155 | 299 | 189-347 | 1322 | Gln-1 to Gln-17. | S0250: 2 | | |
| HOHDZ61 | 741382 | 300 | 41-175 | 1323 | | S0250: 2 | | |
| HOHEA19 | 668208 | 301 | 112-273 | 1324 | | S0250: 6 | | |
| HOHEC41 | 712037 | 302 | 27-470 | 1325 | Asp-1 to Asp-11, | S0250: 2, L0807: 1 and | | |
| | | | | | Glu-24 to Lys-29. | L0591: 1. | | |
| HOHEN50 | 662365 | 303 | 2-163 | 1326 | | S0250: 2 | | |
| HOSAB04 | 531565 | 304 | 82-324 | 1327 | Gln-34 to Lys-42, | S0003: 2 | | |
| | | | | | Ser-73 to Arg-81. | | | |
| HOSAR25 | 509226 | 305 | 2-208 | 1328 | | S0003: 2 | | |
| HOSBR08 | 925430 | 306 | 3-107 | 1329 | | S0003: 2 | | |
| HOSBU17 | 667195 | 307 | 365-505 | 1330 | Leu-25 to Arg-30, | S0003: 2 and LO589: 1. | | |
| | | | | | Lys-34 to Gln-39. | | | |
| HOSBU81 | 508735 | 308 | 43-168 | 1331 | Asp-28 to Thr-34. | S0003: 2 | | |
| HOSBV22 | 780092 | 309 | 1-204 | 1332 | Trp-1 to Asp-7, | S0003: 2, L0775: 2, | | |
| | | | | | Glu-14 to Trp-28. | L0770: 1, L0804: 1 and | | |
| | | | | | | L0659: 1. | | |
| HOSBW16 | 933016 | 310 | 6-155 | 1333 | | S0003: 2 | | |
| HOSCG51 | 967584 | 311 | 129-422 | 1334 | | S0003: 1 and S0122: 1. | | |
| HOSCM15 | 921336 | 312 | 126-353 | 1335 | Ser-2 to Gln-7, | S0003: 2 | | |
| | | | | | Tyr-40 to Thr-47. | | | |
| HOSCZ35 | 707379 | 313 | 23-256 | 1336 | | S0003: 2 and S0126: 1. | 5q22 | 175100, 175100, |
| | | | | | | | | 175100, 175100, |
| | | | | | | | | 175100, 175100 |
| HOSDE63 | 580959 | 314 | 3-122 | 1337 | | S0003: 1, S0027: 1 and | | |
| | | | | | | S0032: 1. | | |
| HOSDG51 | 523872 | 315 | 23-148 | 1338 | | S0003: 2 | | |
| HOSDN27 | 530459 | 316 | 2-154 | 1339 | Ile-1 to Thr-12. | S0003: 2 | | |
| HOSEB61 | 741812 | 317 | 359-601 | 1340 | Gly-8 to Ser-17, | S0003: 1, S0214: 1 and | | |
| | | | | | Ala-50 to Asp-62. | L0756: 1. | | |
| HOSEM84 | 831049 | 318 | 160-327 | 1341 | Pro-31 to Gly-38, | S0214: 2 | 2 | |
| | | | | | Leu-49 to Arg-56. | | | |
| HOSFO57 | 736034 | 319 | 85-234 | 1342 | | S0214: 2 | | |
| HOSFV63 | 873010 | 320 | 14-112 | 1343 | | S0214: 2 | 10 | |
| HOSFY79 | 774052 | 321 | 214-336 | 1344 | Gly-1 to Gln-10, | S0214: 2 | | |
| | | | | | Asn-20 to Gly-25, | | | |
| | | | | | Glu-28 to Arg-35. | | | |
| HOSFZ39 | 705351 | 322 | 180-344 | 1345 | | S0003: 1 and S0214: 1. | | |
| HOSGH28 | 686649 | 323 | 3-374 | 1346 | Asn-101 to Lys-108. | S0214: 2, L0758: 2, | | |
| | | | | | | L0596: 2, L0760: 1, | | |
| | | | | | | L0055: 1, L0803: 1, | | |
| | | | | | | L0526: 1 and L0779: 1. | | |
| HOSGJ17 | 508870 | 324 | 108-284 | 1347 | Ile-12 to Gln-19. | S0003: 2 and S0214: 1. | | |
| HOSMD84 | 959483 | 325 | 529-762 | 1348 | | S0003: 2, L0748: 1, | | |
| | | | | | | L0756: 1 and S0196: 1. | | |
| HOSNO86 | 858938 | 326 | 150-341 | 1349 | Gln-43 to Glu-54. | S0003: 2 and L0752: 1. | | |
| HOSQE05 | 930946 | 327 | 13-192 | 1350 | Gly-32 to Ala-38. | S0214: 2 and S0003: 1. | | |
| HRDAB18 | 509019 | 328 | 85-276 | 1351 | Arg-1 to Ser-18. | H0124: 2 | | |
| HRDAB60 | 509428 | 329 | 134-337 | 1352 | Gln-40 to Asn-47, | H0124: 2 and L0530: | | |
| | | | | | Val-49 to Lys-56. | 2 | | |
| HRDAF07 | 954331 | 330 | 36-329 | 1353 | Ser-47 to Gly-63. | H0124: 2 | | |
| HRDAF69 | 956269 | 331 | 1-225 | 1354 | | H0124: 2 | | |
| HRDAF90 | 531026 | 332 | 90-233 | 1355 | His-31 to Thr-40. | H0124: 2 | | |
| HRDAH91 | 525525 | 333 | 79-240 | 1356 | Gln-1 to Asn-20. | H0124: 2 | | |
| HRDBA76 | 534304 | 334 | 153-293 | 1357 | | H0124: 5 | | |
| HRDBC02 | 921144 | 335 | 117-284 | 1358 | | H0124: 2 | | |
| HRDBC30 | 530858 | 336 | 3-152 | 1359 | Pro-28 to Arg-33. | H0124: 2 | | |
| HRDBC52 | 867169 | 337 | 72-278 | 1360 | Asn-32 to Asn-43, | H0124: 2 | | |
| | | | | | Pro-56 to Cys-63. | | | |
| HRDBD35 | 525526 | 338 | 1-189 | 1361 | | H0124: 2 | | |
| HRDBE07 | 954289 | 339 | 214-369 | 1362 | | H0124: 2 | | |
| HRDBE18 | 956267 | 340 | 145-264 | 1363 | Ser-31 to Asn-40. | H0124: 2, L0776: 1, | | |
| | | | | | | L0748: 1 and L0777: 1. | | |
| HRDBE19 | 534495 | 341 | 161-394 | 1364 | Thr-3 to Asp-10, | H0124: 4 | | |
| | | | | | Ser-21 to Asp-26. | | | |
| HRDBE41 | 530856 | 342 | 3-158 | 1365 | Glu-1 to Pro-10, | H0124: 2 | | |
| | | | | | Thr-14 to Trp-21, | | | |
| | | | | | Gln-33 to Gln-42. | | | |
| HRDBG59 | 507381 | 343 | 58-234 | 1366 | | H0124: 2 | | |
| HRDBI81 | 932761 | 344 | 116-316 | 1367 | | H0124: 2 | | |
| HRDDJ28 | 925457 | 345 | 234-350 | 1368 | | H0124: 2 | | |
| HRDBK03 | 925460 | 346 | 226-351 | 1369 | | H0124: 2 | | |
| HRDBL61 | 575229 | 347 | 152-334 | 1370 | Gly-1 to Ser-12. | H0124: 2 | | |
| HRDBL75 | 524423 | 348 | 3-161 | 1371 | | H0124: 2 | | |
| HRDBM42 | 530849 | 349 | 1-375 | 1372 | Asn-1 to Arg-9, | H0124: 2 | | |
| | | | | | Tyr-21 to Cys-27. | | | |
| HRDBQ18 | 954274 | 350 | 1-183 | 1373 | Asn-1 to Tyr-15. | H0124: 10 | | |
| HRDBQ38 | 533939 | 351 | 1-165 | 1374 | | H0124: 4, L0521: 1 | | |
| | | | | | | and L0766: 1. | | |
| HRDBQ64 | 879705 | 352 | 1-216 | 1375 | Phe-1 to Gly-6, | H0124: 34 | | |
| | | | | | Ser-17 to Ser-23. | | | |
| HRDBQ82 | 533947 | 353 | 244-393 | 1376 | Ser-14 to Cys-24. | H0124: 10 | | |
| HRDBR04 | 927900 | 354 | 220-354 | 1377 | | H0124: 4 | | |
| HRDBR35 | 867167 | 355 | 29-175 | 1378 | Ile-6 to Thr-21, | H0124: 5 | | |
| | | | | | Glu-35 to Ile-40. | | | |
| HRDBT72 | 507847 | 356 | 226-354 | 1379 | | AR089: 49, AR061: 16 | | |
| | | | | | | H0124: 3 | | |
| HRDBU70 | 971700 | 357 | 2-88 | 1380 | Ser-17 to Gly-24. | H0124: 3 | | |
| HRDCA61 | 921128 | 358 | 280-456 | 1381 | | H0124: 12 | | |
| HRDCB18 | 968554 | 359 | 2-232 | 1382 | Pro-11 to Gln-17, | H0124: 6 | | |
| | | | | | Glu-51 to Ser-59. | | | |
| HRDCD12 | 921796 | 360 | 247-432 | 1383 | | H0124: 12 | | |
| HRDDF49 | 867159 | 361 | 3-80 | 1384 | | H0124: 27 | | |
| HRDDF95 | 967837 | 362 | 244-435 | 1385 | | H0124: 15 | | |
| HRDDH84 | 867156 | 363 | 18-260 | 1386 | Ser-7 to Ser-19, | H0124: 2 | | |
| | | | | | Arg-58 to Cys-70. | | | |
| HRDDN54 | 932764 | 364 | 61-183 | 1387 | | H0124: 2 | | |
| HRDDN90 | 531117 | 365 | 118-324 | 1388 | | H0124: 2 | | |
| HRDDY26 | 526783 | 366 | 13-165 | 1389 | Arg-13 to Ser-18. | H0124: 2 | | |
| HRDDY73 | 574336 | 367 | 96-374 | 1390 | | H0124: 2 | | |
| HRDDZ76 | 574324 | 368 | 3-92 | 1391 | Leu-1 to Pro-10, | H0124: 2 | | |
| | | | | | Glu-12 to Ile-20. | | | |
| HRDEB78 | 526861 | 369 | 12-152 | 1392 | | H0124: 3 | | |
| HRDEC91 | 747169 | 370 | 287-460 | 1393 | | H0124: 2 | | |
| | 790096 | 1011 | 2-97 | 2034 | Arg-11 to Glu-20. | | | |
| HRDED92 | 936045 | 371 | 15-218 | 1394 | Cys-19 to Val-25. | H0124: 2 | | |
| HRDEG76 | 574326 | 372 | 168-254 | 1395 | His-22 to Asn-29. | H0124: 2 | | |
| HRDEJ76 | 574335 | 373 | 17-109 | 1396 | Glu-20 to Glu-27. | H0124: 2 | | |
| HRDEK44 | 574380 | 374 | 31-222 | 1397 | | H0124: 2 | | |
| HRDEL91 | 790374 | 375 | 2-217 | 1398 | Thr-2 to Thr-8, | H0124: 2 | | |
| | | | | | Thr-23 to Ile-28. | | | |
| HRDEO12 | 867140 | 376 | 3-194 | 1399 | Asn-15 to Lys-21, | H0124: 2 | | |
| | | | | | Asp-49 to Ser-54. | | | |
| HRDEO76 | 952894 | 377 | 137-256 | 1400 | Pro-7 to Thr-12. | H0251: 1, H0124: 1 | | |
| | | | | | | and S0242: 1. | | |
| HRDEP31 | 766222 | 378 | 51-143 | 1401 | Asp-1 to Leu-12, | H0124: 2 | | |
| | | | | | Leu-25 to Ser-31. | | | |
| HRDEP75 | 574431 | 379 | 204-380 | 1402 | Asp-5 to Lys-12. | H0124: 3 | | |
| HRDEQ30 | 506774 | 380 | 1-144 | 1403 | | H0124: 5 and L0749: | | |
| | | | | | | 1. | | |
| HRDEQ96 | 507543 | 381 | 189-428 | 1404 | | H0124: 4 and L0599: | | |
| | | | | | | 1. | | |
| HRDES52 | 867115 | 382 | 94-255 | 1405 | Asn-1 to Glu-6, | H0124: 2 | | |
| | | | | | Ile-36 to Ala-42. | | | |
| HRDES65 | 526823 | 383 | 212-385 | 1406 | Pro-22 to Glu-27, | H0124: 3 | | |
| | | | | | Pro-49 to Thr-54. | | | |
| HRDET67 | 825182 | 384 | 89-346 | 1407 | | H0124: 4 | | |
| HRDET91 | 827084 | 385 | 68-298 | 1408 | | H0124: 3 | | |
| HRDEU33 | 572905 | 386 | 78-320 | 1409 | Pro-24 to Glu-32, | H0124: 2 | | |
| | | | | | Pro-49 to Arg-65. | | | |
| HRDEU42 | 881296 | 387 | 56-325 | 1410 | Arg-3 to Gly-9, | H0124: 7 | | |
| | | | | | Arg-53 to Thr-61. | | | |
| HRDEU43 | 765813 | 388 | 40-159 | 1411 | | H0124: 3 | | |
| HRDEU61 | 575566 | 389 | 349-239 | 1412 | Gly-1 to Tyr-7. | H0124: 7 | | |
| HRDEU78 | 573031 | 390 | 32-205 | 1413 | Leu-8 to Gln-14, | H0124: 2 | | |
| | | | | | Glu-17 to Tyr-32. | | | |
| HRDEU93 | 844316 | 391 | 3-461 | 1414 | Arg-2 to Asp-10, | H0124: 3 | | |
| | | | | | Leu-28 to Phe-34, | | | |
| | | | | | Asn-58 to Val-65, | | | |
| | | | | | Pro-79 to Ser-84, | | | |
| | | | | | Arg-106 to Pro-111. | | | |
| HRDEV13 | 574442 | 392 | 1-120 | 1415 | Asp-18 to Thr-24. | H0124: 2 | | |
| HRDEW02 | 848793 | 393 | 1-333 | 1416 | Ser-50 to Trp-56, | H0124: 2 | | |
| | | | | | Pro-95 to His-100. | | | |
| HRDEW30 | 526812 | 394 | 83-238 | 1417 | | H0124: 4 | | |
| HRDEW90 | 574288 | 395 | 110-271 | 1418 | | H0124: 2 | | |
| HRDEY14 | 574438 | 396 | 2-196 | 1419 | Thr-32 to Ser-38, | H0124: 3 | | |
| | | | | | Ser-55 to Trp-64. | | | |
| HRDEZ06 | 936072 | 397 | 187-282 | 1420 | | H0124: 2 | | |
| HRDEZ54 | 867127 | 398 | 2-307 | 1421 | | H0124: 2 | | |
| HRDEZ60 | 919386 | 399 | 2-220 | 1422 | Gly-24 to Arg-29. | H0124: 2 | | |
| HRDEZ64 | 536668 | 400 | 2-79 | 1423 | Trp-1 to Cys-7. | H0124: 2 | | |
| HRDEZ84 | 575553 | 401 | 230-382 | 1424 | Asn-28 to Cys-33. | H0124: 7 | | |
| HRDFB47 | 508001 | 402 | 2-163 | 1425 | Gln-1 to Trp-7, | H0124: 3 | | |
| | | | | | Ala-29 to Tyr-35. | | | |
| HRDFB78 | 589478 | 403 | 37-381 | 1426 | Ala-1 to Trp-9, | H0124: 3 | | |
| | | | | | Pro-11 to Ser-20. | | | |
| HRDFC68 | 574205 | 404 | 2-172 | 1427 | | H0124: 4 | | |
| HRDFE73 | 574142 | 405 | 139-276 | 1428 | Gly-10 to Phe-20. | H0124: 3 | | |
| HRDFE74 | 765750 | 406 | 152-268 | 1429 | | H0124: 3 | | |
| HRDFF42 | 953913 | 407 | 92-3 | 1430 | Lys-1 to Pro-6, | H0124: 2 | | |
| | | | | | Ser-17 to Thr-26. | | | |
| HRDFF62 | 574436 | 408 | 237-452 | 1431 | | H0124: 2 and L0748: | | |
| | | | | | | 1. | | |
| HRDEG25 | 574433 | 409 | 1-183 | 1432 | Arg-2 to Asn-23. | H0124: 2 | | |
| HRDFG37 | 792517 | 410 | 3-197 | 1433 | Gln-1 to Gln-7. | H0124: 2 | | |
| HRDFG46 | 574439 | 411 | 15-299 | 1434 | | H0124: 2 | | |
| HRDFH14 | 575578 | 412 | 24-140 | 1435 | Lys-1 to Gln-17. | H0124: 4 | | |
| HRDFH24 | 575245 | 413 | 161-388 | 1436 | Thr-1 to Arg-10, | H0124: 2 | | |
| | | | | | Ser-26 to Ile-31, | | | |
| | | | | | Tyr-39 to Ile-46. | | | |
| HRDFH25 | 953882 | 414 | 3-191 | 1437 | | H0124: 3 | | |
| HRDFH39 | 574558 | 415 | 62-268 | 1438 | Thr-1 to Trp-11. | H0124: 2 | | |
| HRDFH77 | 953673 | 416 | 208-387 | 1439 | Ser-17 to Gly-26, | H0124: 5 | | |
| | | | | | Glu-29 to Arg-37. | | | |
| HRDFI13 | 574561 | 417 | 1-177 | 1440 | Gly-1 to Ala-6. | H0124: 2 | | |
| HRDFJ71 | 574553 | 418 | 173-337 | 1441 | Glu-10 to Ala-19. | H0124: 2 | | |
| HRDFK03 | 924925 | 419 | 3-305 | 1442 | His-1 to Met-14. | H0124: 3 | | |
| HRDFK41 | 867106 | 420 | 185-328 | 1443 | | H0124: 2 | | |
| HRDFM18 | 574435 | 421 | 46-120 | 1444 | Gly-7 to Glu-12. | H0124: 2 | | |
| HRDFN95 | 574565 | 422 | 130-38 | 1445 | Arg-1 to Arg-7. | H0124: 2 | | |
| HRDFQ64 | 733847 | 423 | 56-268 | 1446 | Val-1 to Gly-6, | H0124: 2 | | |
| | | | | | Gly-23 to His-32. | | | |
| HRDFQ75 | 525524 | 424 | 3-149 | 1447 | Glu-7 to Phe-15, | H0124: 2 | | |
| | | | | | Asn-32 to Lys-41. | | | |
| HRDFT06 | 867109 | 425 | 57-245 | 1448 | Pro-31 to Ser-36, | H0124: 3 | | |
| | | | | | Asn-47 to Glu-59. | | | |
| HRDFT15 | 574549 | 426 | 3-134 | 1449 | | H0124: 4 | | |
| HRDFT45 | 506584 | 427 | 123-527 | 1450 | | AR061: 1, AR089: 0 | | |
| | | | | | | H0124: 3 | | |
| HRDFT84 | 584823 | 428 | 3-458 | 1451 | Pro-19 to Lys-25, | H0124: 3 | 6q16 | 136550, 602772 |
| | | | | | Asp-30 to Pro-42, | | | |
| | | | | | Pro-72 to Asp-83. | | | |
| HRDFU48 | 573030 | 429 | 3-134 | 1452 | | H0124: 2 | | |
| HSHAX53 | 518795 | 430 | 1-213 | 1453 | | S0037: 3 | | |
| HSHBV66 | 523348 | 431 | 155-316 | 1454 | | S0037: 3 | | |
| HSHBV67 | 529483 | 432 | 188-301 | 1455 | | S0037: 2 | | |
| HSHCF34 | 529313 | 433 | 89-226 | 1456 | | S0037: 2 | | |
| HSKCS36 | 529163 | 434 | 2-187 | 1457 | | S0027: 2 | | |
| HSKCT33 | 866514 | 435 | 1-264 | 1458 | Gly-1 to Gly-6, | S0027: 3 | | |
| | | | | | Arg-11 to Cys-22, | | | |
| | | | | | Phe-65 to Lys-73. | | | |
| HSKDA70 | 757183 | 436 | 98-613 | 1459 | | L0757: 4, L0806: 3, | | |
| | | | | | | L0761: 2, L0800: 2, | | |
| | | | | | | S0027: 2, L0770: 1, | | |
| | | | | | | L0646: 1, L0764: 1, | | |
| | | | | | | L0662: 1, L0653: 1, | | |
| | | | | | | L0659: 1, L0787: 1, | | |
| | | | | | | S0126: 1, S0390: 1, | | |
| | | | | | | S0037: 1 and L0751: 1. | | |
| HSKDJ16 | 661928 | 437 | 2-151 | 1460 | Gly-1 to Arg-6. | S0027: 2 | | |
| HSKEF43 | 866410 | 438 | 1-270 | 1461 | Pro-1 to Thr-11, | S3014: 1 and S0027: 1. | | |
| | | | | | Ser-23 to Thr-31, | | | |
| | | | | | Pro-49 to Ile-57, | | | |
| | | | | | Thr-75 to Ala-80. | | | |
| HSKEK63 | 744336 | 439 | 138-284 | 1462 | | H0135: 2 and S0027: 1. | | |
| HSKEM02 | 969071 | 440 | 3-401 | 1463 | Gln-31 to Gln-36, | S3014: 1 and S0027: 1. | | |
| | | | | | Thr-38 to Lys-44, | | | |
| | | | | | Arg-58 to Arg-64, | | | |
| | | | | | Tyr-72 to Val-78, | | | |
| | | | | | Val-96 to Phe-101, | | | |
| | | | | | Ala-105 to Gly-119. | | | |
| HSKET11 | 967000 | 441 | 2-427 | 1464 | Gly-20 to Ser-27, | S0027: 2 | | |
| | | | | | Glu-88 to Lys-95. | | | |
| HSKHJ11 | 965002 | 442 | 299-421 | 1465 | | S0027: 2 and S3014: 1. | | |
| HSKHS71 | 911592 | 443 | 1-381 | 1466 | Ala-94 to Cys-100. | AR089: 6, AR061: 4 | | |
| | | | | | | S3014: 2 | | |
| HSKIT38 | 855173 | 444 | 199-381 | 1467 | | S3014: 1 and S0194: 1. | | |
| HSKJS05 | 930979 | 445 | 1-57 | 1468 | | L0766: 1, S3014: 1 and | | |
| | | | | | | S0206: 1. | | |
| HSKKD70 | 916984 | 446 | 236-469 | 1469 | Gly-43 to Trp-48, | S3014: 1 and S0028: 1. | | |
| | | | | | Met-50 to Asn-60. | | | |
| HSKKL06 | 934040 | 447 | 107-409 | 1470 | Pro-13 to Ser-18, | S0390: 1 and S3014: 1. | | |
| | | | | | Gly-46 to Thr-52. | | | |
| HSKNO53 | 728210 | 448 | 384-533 | 1471 | | S3012: 1 and S0206: 1. | | |
| HSKWA56 | 916496 | 449 | 272-436 | 1472 | | S0206: 2 | | |
| HSKWA78 | 731756 | 450 | 257-406 | 1473 | Glu-10 to Asn-34. | S0206: 2 | | |
| HSKWA79 | 733394 | 451 | 148-312 | 1474 | Ser-1 to Trp-16. | S0206: 2 and L0749: 1. | | |
| HSKXG06 | 935455 | 452 | 221-90 | 1475 | | S0206: 2 | | |
| HSKXJ15 | 866373 | 453 | 121-450 | 1476 | | S3012: 1 and S0206: 1. | | |
| HSKXN20 | 668928 | 454 | 116-223 | 1477 | Pro-2 to Ile-16, | S0206: 2 | | |
| | | | | | Gln-18 to Lys-23. | | | |
| HSKXP58 | 955073 | 455 | 3-134 | 1478 | Pro-33 to Trp-38. | S0206: 2 | | |
| HSKXQ58 | 736045 | 456 | 24-170 | 1479 | | S0206: 2 | | |
| HSKYG66 | 698007 | 457 | 88-345 | 1480 | Arg-7 to His-12, | S0206: 3 and L0758: 1. | | |
| | | | | | Pro-22 to Gln-28, | | | |
| | | | | | Arg-70 to Pro-77. | | | |
| HSKYH52 | 466574 | 458 | 189-383 | 1481 | Ser-21 to Lys-32. | S0206: 2 | | |
| HSKYJ96 | 921032 | 459 | 101-268 | 1482 | | H0251: 1 and S0206: 1. | | |
| HSKZE12 | 970639 | 460 | 117-61 | 1483 | | S0027: 1 and S0206: 1. | | |
| HSKZE32 | 959400 | 461 | 129-1 | 1484 | Lys-2 to Cys-15. | S0027: 2, L0748: 2, | | |
| | | | | | | L0751: 2 and S0192: 1. | | |
| HSLAB77 | 772652 | 462 | 122-313 | 1485 | Ala-21 to Gly-26. | S0028: 2 | | |
| HSLBO30 | 574086 | 463 | 1-210 | 1486 | Ala-14 to Arg-21. | S0028: 2 | | |
| HSLBW19 | 671738 | 464 | 104-226 | 1487 | Val-25 to Lys-32. | S0028: 2 | | |
| HSLBX08 | 959911 | 465 | 2-271 | 1488 | | S0028: 2 | | |
| HSLBX20 | 574004 | 466 | 139-435 | 1489 | Leu-17 to Asp-22, | S0028: 2 | | |
| | | | | | Pro-30 to Glu-36, | | | |
| | | | | | Asn-40 to Asn-46, | | | |
| | | | | | Pro-61 to Ser-66, | | | |
| | | | | | Arg-76 to Ile-88. | | | |
| HSLBZ91 | 573987 | 467 | 3-284 | 1490 | Val-17 to Glu-22. | AR089: 8, AR061: 5 | | |
| | | | | | | S0028: 3 | | |
| HSLCB15 | 693455 | 468 | 170-631 | 1491 | Thr-1 to Trp-7, | S0028: 2 and L0744: 1. | | |
| | | | | | Thr-9 to Gly-18, | | | |
| | | | | | Gly-26 to Pro-40, | | | |
| | | | | | Gln-53 to Asp-66, | | | |
| | | | | | Ala-70 to Met-107, | | | |
| | | | | | Glu-110 to Arg-136. | | | |
| HSLCJ46 | 529622 | 469 | 3-278 | 1492 | Ser-87 to Asn-92. | S0028: 2 | | |
| HSLCJ47 | 908627 | 470 | 6-302 | 1493 | Ser-8 to His-20, | S3014: 1 and S0028: 1. | | |
| | | | | | Glu-28 to Thr-34, | | | |
| | | | | | Leu-64 to Gly-76. | | | |
| HSLCL38 | 951028 | 471 | 2-202 | 1494 | Asp-24 to Cys-30. | S0028: 2 | | |
| HSLCP75 | 529631 | 472 | 75-353 | 1495 | Pro-7 to Gln-14. | S0028: 2 | | |
| HSLCV95 | 793080 | 473 | 164-289 | 1496 | | S0028: 2 | | |
| HSLDA25 | 679301 | 474 | 1-297 | 1497 | Ser-1 to His-9, | S0028: 2 | | |
| | | | | | Gln-32 to Asn-37, | | | |
| | | | | | Tyr-58 to Leu-78. | | | |
| HSLDB29 | 866340 | 475 | 7-402 | 1498 | | S0028: 2 | | |
| HSLDC06 | 936010 | 476 | 3-227 | 1499 | | S0028: 2 | | |
| HSLDG13 | 913664 | 477 | 17-232 | 1500 | Arg-1 to Arg-18, | S0028: 2 | | |
| | | | | | Glu-28 to Asn-39. | | | |
| HSLDI16 | 574014 | 478 | 104-184 | 1501 | Ile-1 to Thr-6. | S0028: 2 | | |
| HSLDJ24 | 574050 | 479 | 1-264 | 1502 | Gln-37 to Ile-43, | S0028: 2 | | |
| | | | | | Pro-50 to Leu-58, | | | |
| | | | | | Glu-64 to Leu-69. | | | |
| HSLDJ94 | 753657 | 480 | 40-243 | 1503 | Val-17 to Pro-22, | H0251: 1 and S0028: 1. | | |
| | | | | | Thr-39 to Trp-45, | | | |
| | | | | | Gln-63 to Cys-68. | | | |
| HSLDK43 | 675440 | 481 | 132-353 | 1504 | | S0390: 2 and S0028: 1. | | |
| HSLDM32 | 699486 | 482 | 2-163 | 1505 | Pro-8 to Arg-18, | S0028: 2 | | |
| | | | | | Phe-28 to Arg-35. | | | |
| HSLDM79 | 526740 | 483 | 130-348 | 1506 | | S0028: 3 | | |
| HSLDP16 | 573210 | 484 | 2-277 | 1507 | | AR061: 0, AR089: 0 | | |
| | | | | | | S0028: 2 | | |
| HSLDW65 | 689722 | 485 | 238-429 | 1508 | | S0028: 2 | | |
| HSLEB25 | 669654 | 486 | 125-343 | 1509 | Gly-13 to Glu-24. | S0028: 2 | | |
| HSLEC25 | 572859 | 487 | 2-298 | 1510 | His-35 to Ser-42, | S0028: 2 | | |
| | | | | | Asp-57 to Pro-62, | | | |
| | | | | | Gly-70 to Gly-77. | | | |
| HSLEC36 | 936003 | 488 | 1-282 | 1511 | Ser-7 to Ala-13, | S0028: 2 | | |
| | | | | | Pro-54 to Cys-59. | | | |
| HSLED38 | 709381 | 489 | 102-491 | 1512 | | AR061: 3, AR089: 2 | | |
| | | | | | | S0126: 2 and S0028: 1. | | |
| HSLED42 | 572860 | 490 | 38-388 | 1513 | Arg-1 to Pro-8. | S0028: 2 | | |
| HSLEE46 | 572878 | 491 | 1-297 | 1514 | Asp-1 to Asp-6. | S0028: 2 | | |
| HSLEF89 | 572883 | 492 | 45-257 | 1515 | | S0028: 3 | | |
| HSLEG74 | 825500 | 493 | 3-221 | 1516 | Ser-12 to Trp-29. | S0037: 1 and S0028: 1. | | |
| HSLEH57 | 584090 | 494 | 2-142 | 1517 | Pro-1 to Trp-10, | S0028: 2 | | |
| | | | | | Ala-13 to Glu-18, | | | |
| | | | | | Thr-31 to Trp-38, | | | |
| | | | | | Glu-40 to Cys-47. | | | |
| HSLEJ22 | 572863 | 495 | 59-247 | 1518 | Gly-1 to Gly-10, | S0028: 2 | | |
| | | | | | Arg-35 to Gly-44. | | | |
| HSLEL46 | 573212 | 496 | 1-288 | 1519 | | S0028: 2 | | |
| HSLEO70 | 841952 | 497 | 22-207 | 1520 | Asn-20 to Glu-28, | S0028: 2 | | |
| | | | | | Gly-55 to Lys-62. | | | |
| HSLFE34 | 706986 | 498 | 3-263 | 1521 | Ala-8 to Gly-16, | S0028: 2 | | |
| | | | | | Ser-23 to His-49, | | | |
| | | | | | Phe-73 to Ser-79. | | | |
| HSLFF91 | 572885 | 499 | 10-339 | 1522 | Pro-63 to Lys-71. | S0028: 3, L0800: 1, | | |
| | | | | | | L0803: 1, L0777: 1 and | | |
| | | | | | | L0731: 1. | | |
| HSLFM86 | 785489 | 500 | 2-304 | 1523 | Arg-13 to Gly-22. | S0028: 2 | | |
| HSLFS42 | 948740 | 501 | 25-300 | 1524 | Pro-1 to His-7, | S0028: 2 | | |
| | | | | | His-12 to Arg-24, | | | |
| | | | | | Thr-32 to Gln-45, | | | |
| | | | | | Arg-80 to Leu-85. | | | |
| HSLFS45 | 717782 | 502 | 2-136 | 1525 | Arg-1 to Ile-8. | S0028: 2 | | |
| HSLFT76 | 725788 | 503 | 106-396 | 1526 | | S0028: 2 | | |
| HSLFT89 | 786061 | 504 | 73-390 | 1527 | | S0028: 2 | | |
| HSLFU01 | 916448 | 505 | 83-412 | 1528 | | S0028: 2 | | |
| HSLGD23 | 675872 | 506 | 35-448 | 1529 | Phe-1 to Gly-6, | S0028: 2 | | |
| | | | | | Pro-46 to Gln-56. | | | |
| HSLGH26 | 681705 | 507 | 160-312 | 1530 | Ile-17 to Gln-23, | S0028: 2 | | |
| | | | | | Arg-44 to Tyr-51. | | | |
| HSLGK79 | 774049 | 508 | 3-389 | 1531 | Pro-13 to Gly-22, | S0028: 2 | | |
| | | | | | Asp-57 to Ala-63, | | | |
| | | | | | Ser-78 to Ala-88. | | | |
| HSLGV91 | 780005 | 509 | 50-289 | 1532 | Tyr-1 to His-6. | S0028: 2 | | |
| HSLGX20 | 669648 | 510 | 115-255 | 1533 | His-8 to Ile-15, | S0028: 2 | | |
| | | | | | Tyr-32 to Thr-37. | | | |
| HSLHA55 | 866273 | 511 | 99-404 | 1534 | | S0028: 3 | | |
| HSLHC22 | 673918 | 512 | 312-452 | 1535 | | S0028: 2 and LO754: 1. | | |
| HSLHP20 | 669210 | 513 | 52-432 | 1536 | Gly-29 to Phe-34. | S0028: 2 | | |
| HSLIA21 | 668116 | 514 | 3-125 | 1537 | Pro-20 to Tyr-28, | S0028: 2 | | |
| | | | | | Pro-30 to Lys-35. | | | |
| HSLIG54 | 713982 | 515 | 67-396 | 1538 | Arg-1 to Gly-18, | S0028: 2 | | |
| | | | | | Ser-31 to Ser-37, | | | |
| | | | | | Arg-39 to Gly-44. | | | |
| HSLII61 | 918071 | 516 | 295-426 | 1539 | His-35 to Ser-44. | S0250: 1, S0028: 1, | | |
| | | | | | | L0748: 1 and L0750: 1. | | |
| HSLIJ57 | 659533 | 517 | 3-389 | 1540 | Arg-39 to Gln-44. | AR089: 1, AR061: 0 | | |
| | | | | | | S0028: 2 | | |
| HSLJB11 | 966227 | 518 | 1-144 | 1541 | Ala-1 to Trp-6. | S0390: 1 and S0028: 1. | | |
| HSLJJ21 | 670330 | 519 | 14-343 | 1542 | Ser-1 to Asp-12, | S0390: 1 and S0028: 1. | | |
| | | | | | Ala-22 to Asn-28. | | | |
| HSLJJ83 | 727874 | 520 | 47-307 | 1543 | Gly-19 to Asn-35. | S0390: 1 and S0028: 1. | | |
| HSLJK88 | 923108 | 521 | 79-216 | 1544 | | S0390: 2 | | |
| HSLJN31 | 750394 | 522 | 3-251 | 1545 | | S0390: 1 and S0028: 1. | | |
| HSLJN49 | 920062 | 523 | 83-394 | 1546 | Pro-35 to Ser-41. | S0390: 2 and S0028: 1. | | |
| HSLJN61 | 966267 | 524 | 160-498 | 1547 | Glu-1 to Phe-6, | S0390: 2 and S0028: 1. | | |
| | | | | | Lys-12 to Pro-31, | | | |
| | | | | | Arg-41 to Ile-47, | | | |
| | | | | | Glu-50 to Arg-55. | | | |
| HSLJN71 | 759941 | 525 | 16-213 | 1548 | Pro-16 to Arg-22, | S0390: 1 and S0028: 1. | | |
| | | | | | Lys-29 to His-35. | | | |
| HSLJQ31 | 961447 | 526 | 151-399 | 1549 | | S0390: 2 | | |
| HSLJW53 | 866261 | 527 | 2-94 | 1550 | | S0390: 2 | | |
| HSLKC70 | 866256 | 528 | 102-422 | 1551 | | S0390: 1 and S0028: 1. | | |
| HSRAX95 | 747078 | 529 | 61-324 | 1552 | His-14 to Leu-21, | S0011: 2 | | |
| | | | | | Glu-34 to Leu-46, | | | |
| | | | | | Glu-62 to Asn-67. | | | |
| HSRBE02 | 921205 | 530 | 60-269 | 1553 | Gln-19 to Arg-26, | S0111: 2 | | |
| | | | | | Gln-41 to Leu-47, | | | |
| | | | | | Arg-53 to Phe-69. | | | |
| HSRDE58 | 519542 | 531 | 32-181 | 1554 | Glu-10 to Cys-15, | S0022: 2 | | |
| | | | | | Ser-21 to Cys-39. | | | |
| HSRDI39 | 921749 | 532 | 144-386 | 1555 | Ser-40 to Lys-47. | S0022: 4 and S0011: 1. | | |
| HSRDJ68 | 530333 | 533 | 111-227 | 1556 | | S0022: 1 and S0011: 1. | | |
| HSRDK92 | 838033 | 534 | 1-222 | 1557 | | S0022: 1 and S0011: 1. | | |
| HSRDL32 | 530294 | 535 | 110-232 | 1558 | Pro-1 to His-7, | S0022: 2 | | |
| | | | | | Glu-17 to Lys-30. | | | |
| HSRDM42 | 523843 | 536 | 1-150 | 1559 | | S0022: 2 and S0011: 1. | | |
| HSRDN23 | 530334 | 537 | 90-212 | 1560 | Arg-16 to Glu-21, | S0022: 2 | | |
| | | | | | Leu-23 to Gly-32. | | | |
| HSRDQ89 | 780221 | 538 | 6-137 | 1561 | | S0022: 1 and S0011: 1. | | |
| HSRDS77 | 530289 | 539 | 148-243 | 1562 | | S0022: 1 and S0011: 1. | | |
| HSREB43 | 524678 | 540 | 3-125 | 1563 | Pro-7 to Cys-27, | S0011: 2 | | |
| | | | | | Tyr-32 to Lys-41. | | | |
| HSREC27 | 753810 | 541 | 62-310 | 1564 | Pro-15 to Ile-23, | S0011: 2 | | |
| | | | | | Ser-31 to Tyr-36, | | | |
| | | | | | Ala-43 to His-48, | | | |
| | | | | | Pro-54 to Arg-60. | | | |
| HSRED45 | 530233 | 542 | 3-146 | 1565 | | S0011: 2 | | |
| HSREG25 | 523815 | 543 | 156-323 | 1566 | Val-22 to Phe-36. | S0011: 2 and S0022: 1. | | |
| HSREG40 | 712779 | 544 | 1-513 | 1567 | Val-22 to Pro-31, | S0011: 1, S0242: 1 and | 17q21.3- | 109270, 109270, |
| | | | | | Pro-43 to Ser-51, | S0194: 1. | q22 | 109270, 109270, |
| | | | | | Ala-55 to Ala-86, | | | 109270, 120150, |
| | | | | | Ala-102 to Ile-120, | | | 120150, 120150, |
| | | | | | Pro-122 to Val-148. | | | 139250, 148065, |
| | | | | | | | | 148080, 150200, |
| | | | | | | | | 154275, 156490, |
| | | | | | | | | 171190, 176960, |
| | | | | | | | | 185800, 221820, |
| | | | | | | | | 249000, 253250, |
| | | | | | | | | 600119, 600119, |
| | | | | | | | | 600525, 600852, |
| | | | | | | | | 601844 |
| HSREG49 | 723267 | 545 | 1-165 | 1568 | | S0338: 1 and S0011: 1. | | |
| HSRFC96 | 558385 | 546 | 62-178 | 1569 | Met-11 to Asp-16, | S0022: 2 | | |
| | | | | | Ser-23 to Lys-29. | | | |
| HSRFD34 | 575288 | 547 | 29-151 | 1570 | | S0022: 2 | | |
| HSRFD47 | 973782 | 548 | 163-357 | 1571 | | S0022: 6 | | |
| HSRFE58 | 556519 | 549 | 10-156 | 1572 | | S0022: 2 | | |
| HSRFF03 | 925369 | 550 | 33-143 | 1573 | | S0022: 2 | | |
| HSRFG30 | 920265 | 551 | 1-273 | 1574 | | S0022: 2 | | |
| HSRFR21 | 529767 | 552 | 109-243 | 1575 | Ser-7 to Ser-12, | S0022: 2 | | |
| | | | | | Gln-21 to Trp-27. | | | |
| HSRFZ71 | 557976 | 553 | 62-289 | 1576 | | S0022: 2 | | |
| HSRGA32 | 529726 | 554 | 134-268 | 1577 | | S0022: 2 | | |
| HSRGB23 | 974538 | 555 | 296-400 | 1578 | Gly-2 to Gly-14. | S0022: 4 | | |
| HSRGE47 | 974539 | 556 | 2-214 | 1579 | Lys-24 to Gln-34, | S0022: 3 | | |
| | | | | | His-41 to Arg-46. | | | |
| HSRGG66 | 556518 | 557 | 2-112 | 1580 | | S0022: 2 | | |
| HSRGK48 | 535012 | 558 | 2-124 | 1581 | | S0022: 3 | | |
| HSRGQ30 | 534479 | 559 | 3-248 | 1582 | | S0022: 4, L0662: 1 and | | |
| | | | | | | S0011: 1. | | |
| HSRGS08 | 960211 | 560 | 7-195 | 1583 | | S0022: 3 | | |
| HSRGV79 | 921005 | 561 | 124-315 | 1584 | Arg-53 to Thr-58. | S0022: 9 | | |
| HSRGW30 | 529624 | 562 | 170-310 | 1585 | | S0022: 2 | | |
| HSRGZ32 | 699561 | 563 | 1-240 | 1586 | | S0022: 5 | | |
| HSRHA45 | 974551 | 564 | 19-168 | 1587 | | S0022: 7 | | |
| HSSAE47 | 720685 | 565 | 193-318 | 1588 | Ile-1 to Pro-10. | H0135: 2 | | |
| HSSAF46 | 508117 | 566 | 121-330 | 1589 | | H0135: 2 | | |
| HSSAN96 | 936108 | 567 | 57-251 | 1590 | | H0135: 2 | | |
| HSSAP44 | 508831 | 568 | 46-234 | 1591 | Gln-7 to Arg-18. | H0135: 2 | | |
| HSSAV18 | 508832 | 569 | 90-200 | 1592 | Ala-1 to Leu-7, | H0135: 2 | | |
| | | | | | Arg-27 to Gly-33. | | | |
| HSSAV88 | 508829 | 570 | 62-241 | 1593 | Asn-1 to Ser-17. | H0135: 2 | | |
| HSSBO48 | 871217 | 571 | 2-370 | 1594 | | H0135: 2 | | |
| HSSBO59 | 707683 | 572 | 259-402 | 1595 | Ile-4 to Glu-18. | H0135: 2 | | |
| HSSCC04 | 928001 | 573 | 46-132 | 1596 | Gly-1 to Asn-9. | H0135: 2 | | |
| HSSDJ02 | 871226 | 574 | 2-229 | 1597 | | H0135: 2 | | |
| HSSDL20 | 667599 | 575 | 2-172 | 1598 | Ala-1 to Pro-8, | H0124: 2 and H0135: | | |
| | | | | | Thr-19 to Pro-27. | 1. | | |
| HSSDL94 | 526758 | 576 | 16-297 | 1599 | His-10 to Arg-25. | H0135: 2 | | |
| HSSDR63 | 537329 | 577 | 1-225 | 1600 | Ala-28 to Glu-34. | H0135: 2 | | |
| HSSDX20 | 783128 | 578 | 17-127 | 1601 | | H0135: 3 | | |
| HSSED56 | 625572 | 579 | 182-370 | 1602 | Cys-30 to Arg-35. | H0135: 1 and S0027: 1. | | |
| HSSEF29 | 689837 | 580 | 152-403 | 1603 | Pro-41 to Met-46. | H0135: 2 | | |
| HSSEK75 | 766507 | 581 | 57-176 | 1604 | Arg-10 to Cys-16. | H0135: 2 | | |
| HSSEU91 | 766573 | 582 | 86-175 | 1605 | Ser-1 to Lys-8. | H0135: 1 and S0028: 1. | | |
| HSSEU93 | 911261 | 583 | 116-370 | 1606 | Asn-1 to Gly-17, | H0135: 2 | | |
| | | | | | Gln-23 to His-55, | | | |
| | | | | | Glu-68 to Cys-77. | | | |
| HSSEV89 | 572851 | 584 | 62-310 | 1607 | Pro-21 to Asp-27, | H0135: 2 | 16 | |
| | | | | | Val-50 to Cys-62. | | | |
| HSSFF80 | 753589 | 585 | 3-299 | 1608 | Gly-8 to Gly-14. | H0135: 2 | | |
| HSSFQ43 | 715318 | 586 | 209-328 | 1609 | Asp-12 to Asn-21. | H0135: 2 | | |
| HSSFR41 | 707006 | 587 | 75-359 | 1610 | Pro-13 to Pro-18, | H0135: 2 | | |
| | | | | | Ala-41 to Cys-50. | | | |
| HSSFX54 | 708845 | 588 | 3-248 | 1611 | Pro-42 to Trp-47, | H0135: 2 and L0581: | | |
| | | | | | Trp-62 to Pro-68. | 1. | | |
| HSSGC65 | 955064 | 589 | 2-403 | 1612 | Ala-18 to Ala-24, | H0135: 3 and L0761: | | |
| | | | | | Pro-26 to Asp-37. | 1. | | |
| HSSGC66 | 319740 | 590 | 101-3 | 1613 | | H0135: 2 | | |
| HSSGC72 | 760648 | 591 | 2-91 | 1614 | | H0135: 2 | | |
| HSSGD37 | 739505 | 592 | 2-160 | 1615 | Ser-47 to Ser-52. | H0135: 2 | | |
| HSSGH47 | 720367 | 593 | 66-353 | 1616 | Gln-1 to Lys-8. | H0135: 2 | | |
| HSSGI20 | 668919 | 594 | 114-341 | 1617 | Tyr-26 to Glu-31. | H0135: 2 | | |
| HSSGI75 | 767325 | 595 | 255-16 | 1618 | | H0135: 2 | | |
| HSSGI91 | 789411 | 596 | 3-305 | 1619 | Tyr-18 to Pro-27, | H0135: 2 | | |
| | | | | | Gln-32 to Leu-41, | | | |
| | | | | | Pro-90 to Gly-99. | | | |
| HSSGK96 | 960636 | 597 | 72-287 | 1620 | Gly-12 to His-19. | H0135: 2 | | |
| HSSGL55 | 766115 | 598 | 177-545 | 1621 | | H0135: 4 and L0747: | 7q32 | 180105, 190900, |
| | | | | | | 1. | | 222800, 246900 |
| HSSGL78 | 788924 | 599 | 211-390 | 1622 | | H0135: 2 | | |
| HSSGM62 | 707685 | 600 | 2-409 | 1623 | Ser-1 to Tyr-6, | H0135: 2 | | |
| | | | | | Met-87 to Tyr-93, | | | |
| | | | | | Ala-108 to Ala-113. | | | |
| HSSGN47 | 707003 | 601 | 3-338 | 1624 | His-1 to Gly-28, | H0135: 2, L0794: 2, | 19q13.1 | 164731, 172400, |
| | | | | | Ser-54 to Gly-79, | L0636: 1 and L0749: 1. | | 172400, 180901, |
| | | | | | Pro-81 to Lys-102. | | | 180901, 221770, |
| | | | | | | | | 248600, 600918, |
| | | | | | | | | 602716 |
| HSSHA92 | 792714 | 602 | 169-309 | 1625 | Leu-26 to Asn-38. | H0135: 2 | | |
| HSSJN44 | 716573 | 603 | 340-438 | 1626 | | H0124: 1 and H0135: | | |
| | | | | | | 1. | | |
| HSSJN49 | 708841 | 604 | 93-305 | 1627 | Trp-1 to Asn-6, | H0135: 2 | | |
| | | | | | Gln-37 to Cys-52, | | | |
| | | | | | Pro-64 to Lys-70. | | | |
| HSSJU66 | 653212 | 605 | 1-204 | 1628 | Gly-1 to Ser-6. | H0135: 2 | | |
| HSSJV60 | 970749 | 606 | 155-373 | 1629 | Arg-1 to Ser-7. | H0135: 2 and L0779: | | |
| | | | | | | 1. | | |
| HSSKB40 | 711130 | 607 | 68-325 | 1630 | Gly-1 to Pro-12, | H0135: 1, S0037: 1 and | 22 | |
| | | | | | Phe-25 to Asn-34, | L0754: 1. | | |
| | | | | | Arg-40 to Ala-46, | | | |
| | | | | | Pro-73 to Trp-78, | | | |
| | | | | | Gln-80 to Pro-86. | | | |
| HSSMT78 | 712468 | 608 | 123-380 | 1631 | Gly-6 to Arg-12. | H0135: 2 | | |
| HYBAE74 | 925074 | 609 | 36-239 | 1632 | | H0041: 2 | | |
| HYBAG11 | 967880 | 610 | 1-207 | 1633 | | H0041: 2 | | |
| HYBAU83 | 732419 | 611 | 106-234 | 1634 | | H0041: 2 | | |
| HYBAX25 | 456251 | 612 | 97-354 | 1635 | Leu-29 to Lys-34, | H0041: 2 | | |
| | | | | | Gly-63 to Cys-69. | | | |
| HYBAY40 | 531202 | 613 | 2-298 | 1636 | | H0041: 2 | | |
| HYBBB24 | 584989 | 614 | 19-150 | 1637 | | H0041: 2, L0764: 1, | | |
| | | | | | | L0766: 1 and L0759: 1. | | |
| HYBBI18 | 584991 | 615 | 174-350 | 1638 | Lys-27 to His-39. | H0041: 2 | | |
| HYBBJ30 | 693345 | 616 | 3-215 | 1639 | | H0041: 1 and S0011: 1. | | |
| HYBBL17 | 691328 | 617 | 2-166 | 1640 | Arg-20 to Ala-27. | H0041: 2 | | |
| HYBBK83 | 505138 | 618 | 489-127 | 1641 | | H0041: 1 | | |
| | 510490 | 1012 | 164-544 | 2035 | Ala-40 to Gln-45, | | | |
| | | | | | Gln-55 to Thr-65, | | | |
| | | | | | Pro-93 to Ser-101. | | | |
| HYBBG93 | 531201 | 619 | 2-70 | 1642 | | H0041: 1 | | |
| HYBAY92 | 792923 | 620 | 193-438 | 1643 | | L0748: 2 and H0041: | | |
| | | | | | | 1. | | |
| HYBAW03 | 925068 | 621 | 110-295 | 1644 | | H0041: 1 and L0758: | | |
| | | | | | | 1. | | |
| HYBAH65 | 518736 | 622 | 337-606 | 1645 | Lys-1 to Gly-7, | L0748: 7, H0041: 1 | | |
| | | | | | Arg-12 to Pro-18, | and L0747: 1. | | |
| | | | | | Val-22 to Trp-29, | | | |
| | | | | | Pro-41 to Leu-49, | | | |
| | | | | | Glu-51 to Asp-64. | | | |
| HYBAG53 | 669602 | 623 | 296-475 | 1646 | | L0748: 2, H0041: 1 | | |
| | | | | | | and L0744: 1. | | |
| HYBAF63 | 745585 | 624 | 308-508 | 1647 | | H0041: 1 and L0756: | | |
| | | | | | | 1. | | |
| HSSMZ93 | 530752 | 625 | 7-246 | 1648 | Arg-1 to Asn-12, | H0135: 1 | | |
| | | | | | Gln-31 to Gly-37, | | | |
| | | | | | Pro-48 to Gly-55. | | | |
| HSSMZ01 | 921800 | 626 | 72-278 | 1649 | Thr-18 to Val-23, | H0135: 1 | | |
| | | | | | Leu-39 to Gln-45. | | | |
| HSSMW90 | 975081 | 627 | 3-191 | 1650 | | H0135: 1 and L0755: | | |
| | | | | | | 1. | | |
| HSSMT76 | 928421 | 628 | 2-193 | 1651 | Trp-36 to Pro-45. | H0135: 1 | | |
| HSSMT70 | 530758 | 629 | 59-214 | 1652 | Pro-22 to Ile-28. | H0135: 1 | | |
| HSSMP20 | 854092 | 630 | 144-299 | 1653 | Asp-2 to Ala-12, | H0135: 1 and L0754: | | |
| | | | | | Leu-21 to Ser-45. | 1. | | |
| HSSKD17 | 726525 | 631 | 92-511 | 1654 | Gln-1 to Gly-10, | H0135: 1 and L0747: | | |
| | | | | | Arg-15 to Arg-22, | 1. | | |
| | | | | | Leu-49 to Asp-58, | | | |
| | | | | | Arg-72 to Trp-78. | | | |
| HSSJQ60 | 975185 | 632 | 1-147 | 1655 | Lys-30 to Phe-37. | H0135: 1 | | |
| HSSJP81 | 911334 | 633 | 153-440 | 1656 | Arg-11 to Leu-26, | H0135: 1, L0766: 1 | | |
| | | | | | Pro-29 to Gly-38, | and L0438: 1. | | |
| | | | | | Leu-78 to Ser-84. | | | |
| HSSJL22 | 871170 | 634 | 141-569 | 1657 | Ser-37 to Lys-49. | H0135: 1 | | |
| | 894004 | 1013 | 528-358 | 2036 | Val-34 to Pro-39. | | | |
| HSSJK65 | 747891 | 635 | 37-288 | 1658 | | L0748: 2, H0135: 1 | | |
| | | | | | | and L0749: 1. | | |
| HSSJH78 | 773558 | 636 | 84-218 | 1659 | Ile-13 to Cys-19, | H0135: 1, L0439: 1 | | |
| | | | | | Ser-23 to Glu-28. | and L0747: 1. | | |
| HSSJA08 | 959336 | 637 | 387-536 | 1660 | | L0764: 2, H0135: 1 | | |
| | | | | | | and L0804: 1. | | |
| HSSGK12 | 970714 | 638 | 236-370 | 1661 | Phe-10 to Lys-17. | AR051: 144, AR050: | | |
| | | | | | | 132, AR054: 132 | | |
| | | | | | | H0135: 1 | | |
| HSSGJ84 | 781975 | 639 | 335-505 | 1662 | Lys-9 to Lys-14, | H0135: 1 and L0748: | | |
| | | | | | Ser-33 to Arg-40. | 1. | | |
| HSSGD96 | 796410 | 640 | 1-111 | 1663 | Gly-1 to Ser-16. | H0135: 1 | | |
| HSSGD82 | 779899 | 641 | 168-524 | 1664 | Met-55 to Gly-66. | H0135: 1 and L0741: | | |
| | | | | | | 1. | | |
| HSSGD56 | 608144 | 642 | 209-379 | 1665 | Arg-1 to Asp-10, | H0135: 1 | | |
| | | | | | Gln-16 to Lys-21. | | | |
| | 975065 | 1014 | 34-204 | 2037 | Arg-1 to Asp-10, | | | |
| | | | | | Gln-16 to Lys-21. | | | |
| HSSFW84 | 781973 | 643 | 36-371 | 1666 | Gly-19 to Gly-28, | H0135: 1 and L0439: | | |
| | | | | | Gly-43 to Gln-67, | 1. | | |
| | | | | | Ser-86 to Glu-93, | | | |
| | | | | | Leu-95 to Val-101. | | | |
| HSSFU84 | 888462 | 644 | 1-402 | 1667 | Pro-6 to Thr-15, | AR051: 21, AR054: | | |
| | | | | | Ala-20 to Arg-36, | 16, AR050: 10 | | |
| | | | | | Pro-38 to Gln-85. | H0135: 1 | | |
| HSSFN08 | 959735 | 645 | 243-500 | 1668 | | H0135: 1 and L0365: | Xq28 | 300031, 300044, |
| | | | | | | 1. | | 300048, 300049, |
| | | | | | | | | 300049, 300055, |
| | | | | | | | | 300100, 300100, |
| | | | | | | | | 300104, 300126, |
| | | | | | | | | 301201, 301590, |
| | | | | | | | | 302060, 302060, |
| | | | | | | | | 302060, 302060, |
| | | | | | | | | 302960, 303700, |
| | | | | | | | | 303800, 303900, |
| | | | | | | | | 304800, 305900, |
| | | | | | | | | 305900, 305900, |
| | | | | | | | | 306700, 306995, |
| | | | | | | | | 308310, 308840, |
| | | | | | | | | 308840, 308840, |
| | | | | | | | | 309200, 309548, |
| | | | | | | | | 309620, 309900, |
| | | | | | | | | 310300, 310400, |
| | | | | | | | | 310460, 310460, |
| | | | | | | | | 311300, 311510, |
| | | | | | | | | 314300, 314400 |
| HSSFK90 | 788687 | 646 | 423-151 | 1669 | | H0135: 1 | | |
| HSSEB73 | 955200 | 647 | 334-137 | 1670 | | H0135: 1 and L0748: | | |
| | | | | | | 1. | | |
| HSSEU40 | 891055 | 648 | 101-238 | 1671 | His-6 to Ala-17, | AR054: 8, AR051: 3, | | |
| | | | | | Thr-37 to Trp-44. | ARO50: 1 | | |
| | | | | | | H0135: 1 and L0749: | | |
| | | | | | | 1. | | |
| HSSEP69 | 871211 | 649 | 30-287 | 1672 | | H0135: 1 | | |
| HSSEI90 | 789157 | 650 | 2-370 | 1673 | Phe-7 to Arg-13. | H0135: 1 and L0748: | | |
| | | | | | | 1. | | |
| HSSEG25 | 679351 | 651 | 150-338 | 1674 | Pro-10 to Asp-15, | L0766: 2, L0747: 2, | | |
| | | | | | Leu-38 to Gly-54. | H0135: 1, L0796: 1, | | |
| | | | | | | L0789: 1 and L0752: 1. | | |
| HSSEF33 | 702701 | 652 | 274-522 | 1675 | | H0135: 1 and L0748: | | |
| | | | | | | 1. | | |
| HSSEC79 | 775312 | 653 | 1-267 | 1676 | Thr-24 to Asp-43, | H0135: 1 and L0592: | | |
| | | | | | Pro-53 to Asp-58, | 1. | | |
| | | | | | Cys-62 to Gly-67. | | | |
| HSSDQ07 | 880720 | 654 | 81-419 | 1677 | Gly-6 to Thr-12. | H0135: 1 | | |
| HSSDI03 | 924975 | 655 | 107-283 | 1678 | Val-1 to Cys-13. | H0135: 1, L0538: 1 | | |
| | | | | | | and L0747: 1. | | |
| HSSDH37 | 575460 | 656 | 18-251 | 1679 | Pro-2 to Ser-11. | H0135: 1 | | |
| HSSDC50 | 724696 | 657 | 1-219 | 1680 | Arg-1 to Ser-7, | H0135: 1 and L0439: | | |
| | | | | | Gln-20 to Gly-28. | 1. | | |
| HSSCC14 | 600216 | 658 | 647-399 | 1681 | | H0135: 1 | | |
| HSSAZ04 | 933015 | 659 | 15-170 | 1682 | | L0766: 2 and H0135: | | |
| | | | | | | 1. | | |
| HSSAY34 | 703345 | 660 | 104-412 | 1683 | | H0135: 1 and L0439: | | |
| | | | | | | 1. | | |
| HSSAP68 | 564334 | 661 | 704-417 | 1684 | | H0135: 1 | | |
| HSSAJ89 | 875882 | 662 | 89-316 | 1685 | Val-16 to Gln-26, | H0135: 1 and L0747: | | |
| | | | | | Ala-32 to Ser-40. | 1. | | |
| HSSAE52 | 871244 | 663 | 10-180 | 1686 | | H0135: 1 and L0606: | | |
| | | | | | | 1. | | |
| HSSAA15 | 965347 | 664 | 42-491 | 1687 | Ser-13 to Ser-19, | AR050: 62, AR054: | | |
| | | | | | Asp-42 to Arg-49, | 51, AR051: 51 | | |
| | | | | | Ser-95 to Lys-104, | H0135: 1 | | |
| | | | | | Gln-145 to Thr-150. | | | |
| HSRAY10 | 961237 | 665 | 28-240 | 1688 | Ser-19 to Met-36, | L0666: 1 and S0011: 1. | | |
| | | | | | Ser-39 to Thr-49. | | | |
| HSRAS82 | 780222 | 666 | 46-237 | 1689 | Thr-5 to Asn-13, | L0748: 1 and S0011: 1. | | |
| | | | | | Pro-40 to His-46, | | | |
| | | | | | Phe-54 to Phe-59. | | | |
| HSRAF70 | 524680 | 667 | 194-379 | 1690 | Lys-1 to Gln-8. | S0011: 1 | | |
| HSRAF11 | 967886 | 668 | 176-271 | 1691 | | S0011: 1 | | |
| HSRAD72 | 539530 | 669 | 3-221 | 1692 | | S0011: 1 | | |
| HSRAD65 | 871268 | 670 | 1-135 | 1693 | Asn-1 to Arg-12. | S0011: 1 | 8p21-p12 | 152760, 173370, |
| | | | | | | | | 180100, 185430, |
| | | | | | | | | 270800, 277700, |
| | | | | | | | | 602629 |
| HSRAD53 | 525490 | 671 | 60-335 | 1694 | Ala-1 to Cys-14, | S0011: 1 | | |
| | | | | | Val-72 to Trp-77. | | | |
| HSRAD49 | 722134 | 672 | 211-390 | 1695 | | L0761: 1, L0749: 1, | | |
| | | | | | | L0758: 1 and S0011: 1. | | |
| HSRAD31 | 524845 | 673 | 136-249 | 1696 | Cys-2 to Pro-11. | S0011: 1 | | |
| HSRAD10 | 968614 | 674 | 236-445 | 1697 | Lys-10 to Gly-19, | L0803: 1 and S0011: 1. | | |
| | | | | | Ala-23 to Cys-29. | | | |
| HSRAD03 | 925505 | 675 | 120-305 | 1698 | Pro-10 to Met-18, | S0011: 1 | | |
| | | | | | Pro-48 to Glu-62. | | | |
| HSRAB87 | 823174 | 676 | 3-122 | 1699 | Thr-10 to Gly-18. | S0011: 1 | | |
| HSRAB82 | 522945 | 677 | 49-246 | 1700 | Leu-44 to Arg-50. | S0011: 1 | | |
| HSRAB76 | 508105 | 678 | 48-299 | 1701 | | S0011: 1 | | |
| HSRAB36 | 522946 | 679 | 2-163 | 1702 | | S0011: 1 | | |
| HSRAB34 | 706996 | 680 | 3-146 | 1703 | Phe-1 to Asn-12. | S0011: 1 | | |
| HSRAB08 | 960411 | 681 | 2-145 | 1704 | Ile-1 to Lys-6. | S0011: 1 | | |
| HSRAA86 | 527194 | 682 | 74-202 | 1705 | | S0011: 1 | | |
| HSRAA80 | 937640 | 683 | 2-325 | 1706 | Ile-1 to Cys-10, | AR061: 150, AR089: | | |
| | | | | | Arg-95 to Phe-106. | 93 | | |
| | | | | | | S0011: 1 | | |
| HSRAA64 | 955314 | 684 | 220-327 | 1707 | | S0011: 1 | | |
| HSRAA51 | 522834 | 685 | 3-326 | 1708 | Ser-16 to Gly-27, | S0011: 1 | | |
| | | | | | Asp-48 to Ala-53, | | | |
| | | | | | Thr-70 to Ser-77. | | | |
| HSRAA39 | 719712 | 686 | 1-174 | 1709 | Pro-17 to Trp-22. | S0011: 1 | | |
| HSRAA37 | 522837 | 687 | 29-127 | 1710 | Thr-7 to His-13. | S0011: 1 | | |
| HSRAA24 | 795855 | 688 | 3-446 | 1711 | Phe-1 to Leu-8, | S0011: 1 | | |
| | | | | | Pro-72 to Trp-86. | | | |
| HSRAA23 | 524795 | 689 | 3-251 | 1712 | Pro-8 to His-27, | S0011: 1 | | |
| | | | | | Thr-56 to Ser-61, | | | |
| | | | | | Leu-77 to Phe-83. | | | |
| HSLKB62 | 905738 | 690 | 212-937 | 1713 | Glu-84 to Trp-92, | AR050: 220, AR051: | | |
| | | | | | Asn-106 to Gly-115, | 151, AR054: 146, | | |
| | | | | | Lys-184 to Arg-191. | AR061: 7, AR089: 2 | | |
| | | | | | | S0390: 1 | | |
| HSLKB37 | 929743 | 691 | 171-374 | 1714 | | L0776: 2, L0748: 2, | | |
| | | | | | | L0598: 1, L0529: 1, | | |
| | | | | | | S0390: 1 and L0758: 1. | | |
| HSLKA06 | 934638 | 692 | 1-222 | 1715 | Gln-8 to Arg-14, | L0659: 1, L0809: 1 and | | |
| | | | | | Met-21 to Thr-27. | S0390: 1. | | |
| HSLJJ62 | 742895 | 693 | 173-436 | 1716 | His-22 to Tyr-32. | L0748: 3 and S0390: 1. | | |
| HSLJF33 | 938811 | 694 | 3-521 | 1717 | Glu-70 to Gly-76. | AR089: 1, AR061: 1 | | |
| | | | | | | S0390: 1 | | |
| HSLJD02 | 965826 | 695 | 47-907 | 1718 | Leu-53 to Gln-58, | AR054: 7, AR051: 1, | | |
| | | | | | Phe-162 to Gly-167, | AR089: 1, AR061: 1, | | |
| | | | | | Gln-282 to Ala-287. | AR050: 0 | | |
| | | | | | | S0390: 1 | | |
| HSLIJ48 | 721248 | 696 | 64-570 | 1719 | | S0028: 1 and L0748: 1. | | |
| HSLIG07 | 952493 | 697 | 269-454 | 1720 | Ser-19 to Asp-24. | L0766: 2, L0740: 2, | | |
| | | | | | | L0803: 1, S0028: 1, | | |
| | | | | | | L0745: 1 and L0759: 1. | | |
| HSLIE03 | 923393 | 698 | 163-321 | 1721 | Asn-27 to His-34. | S0028: 1 and L0592: 1. | | |
| HSLIC21 | 670359 | 699 | 189-512 | 1722 | Pro-3 to Ser-10. | L0742: 2, S0028: 1 and | | |
| | | | | | | L0366: 1. | | |
| HSLHZ82 | 779067 | 700 | 320-526 | 1723 | | S0028: 1 and L0748: 1. | | |
| HSLHZ10 | 963808 | 701 | 59-307 | 1724 | Val-24 to Asn-29, | S0028: 1 and L0361: 1. | | |
| | | | | | Arg-56 to Gly-64. | | | |
| HSLHV27 | 964075 | 702 | 983-21 | 1725 | His-8 to Gly-18. | AR050: 5, AR061: 2, | | |
| | | | | | | AR054: 1, AR089: 1 | | |
| | | | | | | S0028: 1 | | |
| HSLHG49 | 722570 | 703 | 162-290 | 1726 | | L0438: 1, S0028: 1 and | | |
| | | | | | | L0439: 1. | | |
| HSLHC40 | 710681 | 704 | 230-400 | 1727 | | L0755: 2 and S0028: 1. | | |
| HSLGY08 | 959371 | 705 | 215-397 | 1728 | Tyr-4 to Ser-12, | S0028: 1 and L0742: 1. | | |
| | | | | | His-23 to Leu-29. | | | |
| HSLGQ48 | 720956 | 706 | 141-413 | 1729 | Glu-2 to Thr-9. | L0438: 1, S0028: 1 and | | |
| | | | | | | L0439: 1. | | |
| HSLGP07 | 953305 | 707 | 224-442 | 1730 | Asp-7 to Arg-15. | S0028: 1 and L0753: 1. | | |
| HSLGO19 | 668634 | 708 | 115-543 | 1731 | | L0665: 1, S0028: 1, | | |
| | | | | | | L0748: 1 and L0750: 1. | | |
| HSLGN78 | 773565 | 709 | 1-156 | 1732 | | S0028: 1 and L0591: 1. | | |
| HSLGN52 | 466026 | 710 | 3-266 | 1733 | Thr-26 to Gln-40, | S0028: 1 and L0740: 1. | 12 | |
| | | | | | Glu-47 to Arg-53. | | | |
| HSLGK46 | 719031 | 711 | 2-226 | 1734 | Gln-8 to Asn-15, | S0028: 1 and L0601: 1. | | |
| | | | | | His-23 to Gln-28. | | | |
| HSLGK26 | 929286 | 712 | 422-607 | 1735 | | S0028: 1 and L0748: 1. | 1q12- | 104770, 107670, |
| | | | | | | | 1q21.2 | 110700, 145001, |
| | | | | | | | | 146760, 146790, |
| | | | | | | | | 159001, 191315, |
| | | | | | | | | 600897, 601412, |
| | | | | | | | | 601652, 601863, |
| | | | | | | | | 602491 |
| HSLGK23 | 675266 | 713 | 176-343 | 1736 | | L0747: 2, L0766: 1 and | | |
| | | | | | | S0028: 1. | | |
| HSLGJ37 | 708824 | 714 | 120-452 | 1737 | Thr-80 to Cys-87. | S0028: 1 and L0439: 1. | | |
| HSLGI76 | 770035 | 715 | 379-558 | 1738 | | S0028: 1 and L0748: 1. | | |
| HSLGI67 | 465989 | 716 | 47-253 | 1739 | | L0439: 6 and S0028: 1. | | |
| HSLGH70 | 871888 | 717 | 57-227 | 1740 | Pro-23 to Leu-30. | S0028: 1 and L0745: 1. | | |
| HSLGG86 | 784703 | 718 | 38-202 | 1741 | | S0028: 1 and L0439: 1. | | |
| HSLGG79 | 775146 | 719 | 1-126 | 1742 | Asp-1 to Thr-16. | S0028: 1 and L0740: 1. | | |
| HSLGA79 | 774051 | 720 | 2-151 | 1743 | | S0028: 1 and L0599: 1. | | |
| HSLGA45 | 717776 | 721 | 210-13 | 1744 | Pro-9 to His-17, | S0028: 1 and L0777: 1. | | |
| | | | | | Gly-19 to Gly-24, | | | |
| | | | | | Gly-30 to Ile-38, | | | |
| | | | | | Leu-42 to Lys-51, | | | |
| | | | | | Pro-54 to Asn-66. | | | |
| HSLGA24 | 955333 | 722 | 805-284 | 1745 | Pro-45 to Arg-50, | AR089: 14, AR061: 3 | | |
| | | | | | Glu-56 to Ser-62, | S0028: 1 | | |
| | | | | | Ser-70 to Glu-76, | | | |
| | | | | | Asp-141 to Arg-149. | | | |
| HSLFU18 | 666405 | 723 | 576-842 | 1746 | Asp-7 to Lys-13, | L0770: 3, L0777: 3, | | |
| | | | | | Asn-63 to Tyr-75. | L0731: 3, L0780: 2, | | |
| | | | | | | L0040: 1, L0764: 1, | | |
| | | | | | | L0766: 1, L0804: 1, | | |
| | | | | | | L0809: 1, L0790: 1, | | |
| | | | | | | L0438: 1, S0028: 1, | | |
| | | | | | | L0439: 1, L0751: 1, | | |
| | | | | | | L0745: 1 and L0749: 1. | | |
| HSLFT29 | 680451 | 724 | 1-462 | 1747 | Glu-1 to Phe-8, | AR089: 2, AR061: 2 | | |
| | | | | | Met-55 to Leu-64, | S0028: 1 | | |
| | | | | | Gly-93 to His-99, | | | |
| | | | | | Ala-135 to Cys-141. | | | |
| HSLFN96 | 796375 | 725 | 3-167 | 1748 | Gln-23 to Arg-39. | S0028: 1 | | |
| HSLFI01 | 876881 | 726 | 115-342 | 1749 | Asp-12 to Thr-18. | S0028: 1 and L0754: 1. | | |
| HSLED70 | 757319 | 727 | 327-515 | 1750 | Ser-40 to Ser-47, | S0028: 1, L0777: 1 and | | |
| | | | | | Pro-52 to Gly-60. | L0759: 1. | | |
| HSLEB84 | 783130 | 728 | 122-280 | 1751 | | S0028: 1 and L0754: 1. | | |
| HSLDW24 | 779689 | 729 | 33-209 | 1752 | Tyr-38 to His-45. | L0756: 2 and S0028: 1. | | |
| HSLDT25 | 949079 | 730 | 1544-867 | 1753 | | AR051: 22, AR050: | | |
| | | | | | | 20, AR054: 19, AR089: | | |
| | | | | | | 17, AR061: 9 | | |
| | | | | | | S0028: 1 | | |
| HSLDR18 | 578926 | 731 | 148-270 | 1754 | Glu-1 to Gly-10, | S0028: 1 | | |
| | | | | | Glu-21 to Asn-32. | | | |
| HSLDR05 | 932128 | 732 | 83-232 | 1755 | Arg-1 to Asp-7. | S0028: 1 | | |
| HSLDP66 | 866331 | 733 | 189-401 | 1756 | | S0028: 1 | | |
| HSLDO01 | 916969 | 734 | 33-113 | 1757 | | S0028: 1 | | |
| HSLDM82 | 780055 | 735 | 3-428 | 1758 | Tyr-18 to Leu-23, | L0361: 2 and S0028: 1. | 1p36.3 | 120550, 120570, |
| | | | | | Tyr-64 to Ser-70, | | | 120575, 153454, |
| | | | | | Glu-77 to Arg-82. | | | 236250, 256700 |
| HSLDF25 | 430328 | 736 | 363-1 | 1759 | Gln-38 to Cys-43, | S0028: 1 | | |
| | | | | | Val-55 to Cys-62, | | | |
| | | | | | Pro-64 to Pro-69, | | | |
| | | | | | Lys-76 to Phe-83, | | | |
| | | | | | Ser-85 to Arg-91, | | | |
| | | | | | Lys-113 to Arg-121. | | | |
| | 677994 | 1015 | 251-123 | 2038 | Pro-1 to Thr-13, | | | |
| | | | | | Leu-31 to Leu-37. | | | |
| HSLCY75 | 766533 | 737 | 326-550 | 1760 | Leu-22 to Arg-27. | S0028: 1 and L0749: 1. | | |
| HSLCX61 | 742031 | 738 | 343-507 | 1761 | Gly-4 to Tyr-18, | AR089: 3, AR061: 1 | | |
| | | | | | Gly-48 to Gly-55. | L0439: 2 and S0028: 1. | | |
| HSLCF96 | 637670 | 739 | 355-1248 | 1762 | Val-2 to Trp-7, | AR054: 38, AR050: | | |
| | | | | | Lys-9 to Trp-18, | 26, AR051: 25, AR061: | | |
| | | | | | Gln-20 to Gly-25, | 2, AR089: 1 | | |
| | | | | | Gln-79 to His-85, | S0028: 1 | | |
| | | | | | Pro-134 to Asp-139, | | | |
| | | | | | Asp-164 to Thr-171, | | | |
| | | | | | Pro-223 to Arg-228. | | | |
| | 954777 | 1016 | 1332-430 | 2039 | Thr-1 to Cys-6, | | | |
| | | | | | Ser-52 to Gly-57, | | | |
| | | | | | Gln-111 to His-117. | | | |
| HSLBW39 | 705630 | 740 | 1-432 | 1763 | Asp-2 to Trp-28, | S0028: 1 and L0591: 1. | | |
| | | | | | Pro-33 to Asn-39, | | | |
| | | | | | Pro-88 to Gln-104. | | | |
| HSKZE91 | 790166 | 741 | 75-335 | 1764 | Val-1 to Leu-7, | S0027: 1 and L0605: 1. | | |
| | | | | | Pro-11 to Glu-20. | | | |
| HSKYG48 | 721631 | 742 | 3-296 | 1765 | Arg-6 to Lys-17. | S0206: 1 | | |
| HSKXA69 | 754258 | 743 | 2-169 | 1766 | | L0748: 2, S0206: 1 and | | |
| | | | | | | L0599: 1. | | |
| HSKKE11 | 965857 | 744 | 90-245 | 1767 | Arg-1 to Gln-10, | S3014: 1 and L0750: 1. | | |
| | | | | | Thr-41 to Gln-48. | | | |
| HSKJR15 | 866396 | 745 | 59-406 | 1768 | Gln-11 to Gly-18, | AR089: 1, AR061: 0 | | |
| | | | | | Asn-25 to Ser-30. | L0666: 1, S3014: 1 and | | |
| | | | | | | L0756: 1. | | |
| HSKJC88 | 866402 | 746 | 154-357 | 1769 | Arg-52 to Gln-58. | L0809: 1 and S3014: 1. | | |
| HSKII90 | 788894 | 747 | 482-613 | 1770 | | L0599: 2 and S3014: 1. | | |
| HSKHZ47 | 720286 | 748 | 400-534 | 1771 | Tyr-1 to Tyr-6. | L0745: 3 and S3014: 1. | | |
| HSKHT93 | 957866 | 749 | 245-415 | 1772 | | L0766: 1 and S3014: 1. | 5q11 | 253200, 600887 |
| HSKHP10 | 964568 | 750 | 136-240 | 1773 | | S3014: 1 and L0779: 1. | | |
| HSKGS69 | 755046 | 751 | 3-335 | 1774 | Asn-23 to Pro-31. | S3014: 1, L0748: 1 and | | |
| | | | | | | L0749: 1. | | |
| HSKEH21 | 941976 | 752 | 2-703 | 1775 | Leu-26 to Gly-38, | AR061: 11, AR089: 4 | | |
| | | | | | Leu-101 to Thr-116, | S0027: 1 | | |
| | | | | | Glu-144 to Val-151, | | | |
| | | | | | Pro-177 to Pro-183, | | | |
| | | | | | Thr-188 to Thr-195, | | | |
| | | | | | Phe-203 to Asn-234. | | | |
| HSKDC06 | 935452 | 753 | 174-332 | 1776 | | S0027: 1 and L0599: 1. | | |
| HSKCR54 | 922730 | 754 | 86-547 | 1777 | Gly-45 to Arg-50. | AR061: 8, AR089: 7 | | |
| | | | | | | S0027: 1 and L0749: 1. | | |
| HSKCD43 | 714389 | 755 | 3-188 | 1778 | | L0759: 2, S0027: 1 and | 6q21 | 120110, 121014, |
| | | | | | | L0748: 1. | | 601666, 602772 |
| HSKBW86 | 785783 | 756 | 1-180 | 1779 | Tyr-12 to Ile-24, | AR089: 6, AR061: 3 | | |
| | | | | | Glu-43 to Lys-49. | S0027: 1 | | |
| HSKBW62 | 521937 | 757 | 23-175 | 1780 | | S0027: 1 | | |
| HSKBW21 | 671383 | 758 | 46-141 | 1781 | | S0027: 1 and L0779: 1. | | |
| HSKBV67 | 561585 | 759 | 90-257 | 1782 | Leu-15 to Ser-21. | S0027: 1 | | |
| HSKAE10 | 968508 | 760 | 640-464 | 1783 | Thr-17 to Arg-22. | L0752: 2, L0803: 1 and | | |
| | | | | | | S0027: 1. | | |
| HSKAC29 | 535402 | 761 | 184-375 | 1784 | | S0027: 1 | | |
| HSJCA03 | 925252 | 762 | 213-362 | 1785 | | S0032: 1 and L0758: 1. | | |
| HSJAY64 | 866540 | 763 | 123-284 | 1786 | Pro-4 to Gln-11, | S0032: 1 and L0361: 1. | | |
| | | | | | Cys-16 to Gly-21. | | | |
| HSJAB49 | 723261 | 764 | 209-337 | 1787 | Gly-1 to Ser-10. | S0032: 1 and L0748: 1. | | |
| HSHCL04 | 840406 | 765 | 640-1053 | 1788 | Arg-34 to Asn-39. | AR051: 23, AR050: | | |
| | | | | | | 17, AR054: 12, AR061: | | |
| | | | | | | 5, AR089: 4 | | |
| | | | | | | S0037: 1 | | |
| | 957191 | 1017 | 331-2 | 2040 | Arg-22 to Asn-27. | | | |
| | 957192 | 1018 | 3-173 | 2041 | | | | |
| | 957193 | 1019 | 344-192 | 2042 | | | | |
| HSHCK86 | 785392 | 766 | 1-291 | 1789 | | S0037: 1 | | |
| | 792112 | 1020 | 574-353 | 2043 | Gly-22 to Gln-34, | | | |
| | | | | | Tyr-48 to Glu-56. | | | |
| HSHCJ63 | 468536 | 767 | 73-336 | 1790 | Val-19 to Tyr-25, | S0037: 1 | | |
| | | | | | Gln-82 to Ser-87. | | | |
| | 470736 | 1021 | 478-359 | 2044 | | | | |
| HSHBU07 | 866636 | 768 | 227-457 | 1791 | Lys-3 to Lys-15. | S0037: 1 | | |
| HSHAH05 | 932689 | 769 | 209-96 | 1792 | Gly-31 to Gln-37. | S0037: 1 and L0754: 1. | | |
| HSCAF60 | 537444 | 770 | 59-199 | 1793 | Arg-1 to Thr-8, | S0118: 1 | | |
| | | | | | Lys-16 to Asn-21. | | | |
| HRDFU03 | 924698 | 771 | 187-357 | 1794 | Lys-1 to Trp-18, | H0124: 1 and L0748: | | |
| | | | | | Thr-36 to Ser-44. | 1. | | |
| HRDFH46 | 590391 | 772 | 261-464 | 1795 | His-1 to Asp-22, | H0124: 1, L0387: 1, | | |
| | | | | | Pro-51 to Lys-58. | L0747: 1 and L0588: 1. | | |
| HRDFG13 | 925350 | 773 | 1-249 | 1796 | | H0124: 1 and L0759: | | |
| | | | | | | 1. | | |
| HRDFF47 | 740594 | 774 | 1-114 | 1797 | | H0124: 1, L0598: 1, | | |
| | | | | | | L0655: 1 and L0745: 1. | | |
| HRDFD56 | 733556 | 775 | 47-178 | 1798 | | H0124: 1, L0439: 1, | | |
| | | | | | | L0745: 1 and L0756: 1. | | |
| HRDFA03 | 867122 | 776 | 405-602 | 1799 | | AR054: 74, AR051: | | |
| | | | | | | 68, AR050: 63 | | |
| | | | | | | H0124: 1 | | |
| HRDEZ73 | 774414 | 777 | 21-254 | 1800 | Gln-52 to Cys-57. | L0777: 2, H0124: 1, | | |
| | | | | | | L0774: 1, L0743: 1, | | |
| | | | | | | L0744: 1, L0757: 1 and | | |
| | | | | | | L0758: 1. | | |
| HRDEX24 | 867123 | 778 | 112-258 | 1801 | Met-1 to Lys-6, | L0731: 2, H0124: 1, | | |
| | | | | | Pro-13 to Asp-19. | L0800: 1, L0803: 1 and | | |
| | | | | | | L0804: 1. | | |
| HRDER90 | 789140 | 779 | 3-428 | 1802 | | L0748: 2, H0124: 1 | | |
| | | | | | | and L0592: 1. | | |
| HRDER35 | 707569 | 780 | 66-266 | 1803 | | H0124: 1 and L0748: | | |
| | | | | | | 1. | | |
| HRDEP20 | 690456 | 781 | 2-274 | 1804 | | H0124: 1, L0755: 1 | | |
| | | | | | | and L0604: 1. | | |
| HRDEK53 | 867137 | 782 | 2-181 | 1805 | | H0124: 1 and L0749: | | |
| | | | | | | 1. | | |
| HRDEJ33 | 487523 | 783 | 123-31 | 1806 | | H0124: 1 | | |
| | 867143 | 1022 | 260-556 | 2045 | | | | |
| | 974260 | 1023 | 3-245 | 2046 | Ala-3 to Ala-10, | | | |
| | | | | | Ser-49 to Thr-74, | | | |
| | | | | | Pro-76 to Lys-81. | | | |
| HRDDX67 | 460145 | 784 | 1-189 | 1807 | | H0124: 1 | | |
| | 462510 | 1024 | 243-115 | 2047 | | | | |
| HRDDX01 | 921501 | 785 | 388-200 | 1808 | Thr-27 to Trp-42. | H0124: 1, L0659: 1, | | |
| | | | | | | L0783: 1 and L0779: 1. | | |
| HRDDU41 | 712572 | 786 | 27-281 | 1809 | Asn-46 to Ser-55. | H0124: 1 | | |
| HRDDR39 | 867151 | 787 | 1-222 | 1810 | | H0124:1 and L0777: | | |
| | | | | | | 1. | | |
| HRDDQ55 | 490884 | 788 | 278-126 | 1811 | His-3 to Asp-11, | H0124: 1 | | |
| | | | | | Leu-13 to Glu-26, | | | |
| | | | | | Pro-46 to Gly-51. | | | |
| | 514848 | 1025 | 188-397 | 2048 | Lys-8 to His-14. | | | |
| HRDCD44 | 715769 | 789 | 3-197 | 1812 | | H0124: 1 and L0740: | | |
| | | | | | | 1. | | |
| HRDBH52 | 728715 | 790 | 48-251 | 1813 | Lys-4 to Lys-10, | H0124: 1, L0748: 1 | | |
| | | | | | Pro-39 to Glu-46. | and L0747: 1. | | |
| HRDAB42 | 800333 | 791 | 55-429 | 1814 | Pro-11 to Arg-16, | H0124: 1 and L0748: | | |
| | | | | | Pro-27 to Ser-32, | 1. | | |
| | | | | | Gln-53 to Thr-63. | | | |
| HOSOW01 | 914804 | 792 | 19-153 | 1815 | Leu-10 to Pro-16, | L0748: 2 and S0003: 1. | | |
| | | | | | Leu-39 to Ser-45. | | | |
| HOSNO25 | 974291 | 793 | 417-566 | 1816 | | S0003: 1 | | |
| HOSMP95 | 948496 | 794 | 3-278 | 1817 | Ser-2 to Leu-24, | L0748: 5 and S0003: 1. | | |
| | | | | | Pro-33 to Lys-45. | | | |
| HOSGN29 | 830653 | 795 | 1-432 | 1818 | Ser-12 to Thr-27, | S0214: 1 and L0777: 1. | | |
| | | | | | Pro-32 to Glu-39, | | | |
| | | | | | Gly-48 to Ile-55, | | | |
| | | | | | Ile-59 to Leu-80, | | | |
| | | | | | Gln-108 to Leu-113, | | | |
| | | | | | Pro-121 to Tyr-131. | | | |
| HOSFV77 | 856933 | 796 | 468-659 | 1819 | Leu-27 to Met-32. | S0214: 1, L0439: 1, | | |
| | | | | | | L0749: 1 and L0595: 1. | | |
| HOSFU59 | 739262 | 797 | 94-255 | 1820 | Lys-1 to Leu-11. | S0214: 1 and L0731: 1. | | |
| HOSFL57 | 734709 | 798 | 231-365 | 1821 | | S0214: 1 and L0754: 1. | | |
| HOSFL07 | 953183 | 799 | 464-583 | 1822 | | L0766: 2, L0471: 1, | 1p35 | 118210, 120550, |
| | | | | | | S0214: 1, L0748: 1, | | 120570, 120575, |
| | | | | | | L0749: 1 and L0756: 1. | | 121800, 130500, |
| | | | | | | | | 133200, 138140, |
| | | | | | | | | 138971, 171760, |
| | | | | | | | | 171760, 172411, |
| | | | | | | | | 185470, 230350, |
| | | | | | | | | 255800, 602771 |
| HOSFK40 | 711140 | 800 | 117-332 | 1823 | Glu-5 to Ser-16, | L0803: 2, S0214: 1, | | |
| | | | | | Gly-49 to Pro-57, | L0806: 1, L0788: 1, | | |
| | | | | | Arg-62 to Met-72. | L0779: 1, L0596: 1 and | | |
| | | | | | | L0599: 1. | | |
| HOSFI46 | 719021 | 801 | 112-300 | 1824 | | S0214: 1 and L0756: 1. | | |
| HOSFC66 | 750560 | 802 | 311-574 | 1825 | | S0214: 1 and L0602: 1. | | |
| HOSFB04 | 615200 | 803 | 238-426 | 1826 | Thr-20 to Phe-29, | L0439: 3 and S0214: 1. | | |
| | | | | | Tyr-40 to Gly-46. | | | |
| HOSDR12 | 971169 | 804 | 259-459 | 1827 | Glu-22 to Glu-31. | S0003: 1 | | |
| HOSDQ78 | 858983 | 805 | 123-290 | 1828 | Ser-1 to His-11, | S0003: 1 | | |
| | | | | | Val-22 to Trp-27. | | | |
| HOSDP27 | 682113 | 806 | 157-456 | 1829 | Pro-36 to Thr-43. | S0003: 1 and L0740: 1. | | |
| HOSDG79 | 781787 | 807 | 3-590 | 1830 | Leu-4 to Lys-17. | L0748: 2, S0003: 1 and | | |
| | | | | | | L0749: 1. | | |
| HOSDA04 | 951842 | 808 | 520-362 | 1831 | | S0003: 1 and L0731: 1. | | |
| HOSCV06 | 960555 | 809 | 59-304 | 1832 | Glu-5 to Gly-15, | AR089: 8, AR061: 7 | | |
| | | | | | Pro-36 to Arg-42, | S0003: 1, L0498: 1 and | | |
| | | | | | Pro-58 to Asp-70. | L0599: 1. | | |
| HOSCT25 | 783692 | 810 | 155-325 | 1833 | Ser-1 to Asn-9, | S0003: 1 and L0748: 1. | | |
| | | | | | Ala-16 to Lys-22. | | | |
| HOSCP67 | 753874 | 811 | 158-370 | 1834 | Lys-15 to Tyr-20, | L0591: 2 and S0003: 1. | | |
| | | | | | Ser-61 to Thr-71. | | | |
| HOSCO73 | 764756 | 812 | 2-163 | 1835 | | S0003: 1 and L0599: 1. | | |
| HOSBY89 | 787182 | 813 | 254-364 | 1836 | Thr-12 to Ser-26. | L0748: 2 and S0003: 1. | | |
| HOSBX46 | 719414 | 814 | 270-365 | 1837 | Phe-6 to Trp-11. | L0756: 2 and S0003: 1. | 14 | |
| HOSBX34 | 706769 | 815 | 389-547 | 1838 | | L0439: 2, S0003: 1 and | | |
| | | | | | | L0438: 1. | | |
| HOSBR53 | 728525 | 816 | 11-208 | 1839 | Ser-8 to Ser-19, | S0003: 1 and L0439: 1. | | |
| | | | | | Lys-26 to Glu-31, | | | |
| | | | | | Gln-55 to Cys-64. | | | |
| HOSBO34 | 706770 | 817 | 1-99 | 1840 | Thr-1 to Arg-14. | S0003: 1, L0779: 1 and | | |
| | | | | | | L0589: 1. | | |
| HOSBM55 | 732550 | 818 | 269-541 | 1841 | Lys-40 to Thr-45. | L0748: 3 and S0003: 1. | | |
| HOSAY52 | 728759 | 819 | 2-154 | 1842 | Leu-29 to Thr-34. | L0756: 2 and S0003: 1. | 14 | |
| HOSAX03 | 960942 | 820 | 48-812 | 1843 | | L0758: 3 and S0003: 1. | | |
| HOSAL10 | 968710 | 821 | 3-206 | 1844 | Ala-17 to Asn-22, | S0003: 1 and L0362: 1. | | |
| | | | | | Pro-24 to Gln-30. | | | |
| HOSAI41 | 712708 | 822 | 859-1077 | 1845 | Cys-1 to Gly-6, | L0748: 3, L0749: 2 and | | |
| | | | | | Gln-26 to Leu-45. | S0003: 1. | | |
| HOSAH30 | 693406 | 823 | 312-491 | 1846 | | S0003: 1 and L0439: 1. | | |
| HOSAF19 | 672078 | 824 | 124-267 | 1847 | Ser-14 to Lys-21, | S0003: 1 and L0596: 1. | | |
| | | | | | Tyr-33 to Ile-39. | | | |
| HOHEN28 | 686034 | 825 | 2-232 | 1848 | | L0794: 6, L0768: 2, | | |
| | | | | | | L0740: 2, L0777: 2, | | |
| | | | | | | S0250: 1, L0764: 1, | | |
| | | | | | | L0766: 1, L0655: 1 and | | |
| | | | | | | L0758: 1. | | |
| HOHEG71 | 760051 | 826 | 262-420 | 1849 | Ser-11 to Ser-31, | L0777: 2 and S0250: 1. | | |
| | | | | | Thr-46 to His-53. | | | |
| HOHDF94 | 793970 | 827 | 456-671 | 1850 | | S0250: 1 and L0594: 1. | | |
| HOHCV57 | 734413 | 828 | 66-380 | 1851 | Phe-2 to Lys-7, | S0250: 1 and L0748: 1. | | |
| | | | | | Ser-38 to Arg-44, | | | |
| | | | | | Gly-71 to Asn-94. | | | |
| HOHCL29 | 634778 | 829 | 257-6 | 1852 | Asp-7 to Gly-12. | AR054: 9, AR051: 3, | | |
| | | | | | | AR050: 2 | | |
| | | | | | | S0250: 1 | | |
| HOHCH52 | 588375 | 830 | 2-181 | 1853 | Lys-1 to Tyr-8, | S0250: 1 and L0754: 1. | | |
| | | | | | Lys-10 to Lys-16. | | | |
| HOHCG79 | 859029 | 831 | 1-156 | 1854 | Asn-47 to Trp-52. | S0250: 1 and L0763: 1. | | |
| HOHCD58 | 973105 | 832 | 101-373 | 1855 | Glu-8 to Pro-14. | S0250: 1 | | |
| HOHBZ27 | 588364 | 833 | 203-376 | 1856 | | S0250: 1, L0435: 1 and | | |
| | | | | | | L0439: 1. | | |
| HOHBY26 | 588358 | 834 | 3-476 | 1857 | Asp-32 to Asn-38, | S0250: 1 and L0591: 1. | | |
| | | | | | His-116 to Asn-122, | | | |
| | | | | | Phe-125 to Met-130. | | | |
| HOHBV67 | 718562 | 835 | 3-179 | 1858 | Pro-19 to Asn-27, | S0250: 1, L0731: 1, | | |
| | | | | | Tyr-46 to His-51. | L0597: 1 and L0589: 1. | | |
| HOHBS10 | 964324 | 836 | 157-408 | 1859 | | S0250: 1 and L0758: 1. | | |
| H0HBP36 | 708158 | 837 | 416-141 | 1860 | Ser-12 to Cys-17, | L0748: 4 and S0250: 1. | | |
| | | | | | Lys-74 to Gly-83. | | | |
| HOHBN56 | 859041 | 838 | 2-208 | 1861 | Asn-46 to Leu-51. | L0766: 4 and S0250: 1. | | |
| HOHBL35 | 973238 | 839 | 62-256 | 1862 | Ile-23 to Phe-32, | S0250: 1 | | |
| | | | | | Leu-40 to Ala-47. | | | |
| HOHBI84 | 782908 | 840 | 62-376 | 1863 | Gly-1 to His-6, | S0250: 1 and L0742: 1. | 9q | |
| | | | | | Pro-19 to Pro-36, | | | |
| | | | | | Ser-38 to Ser-46. | | | |
| HOHBB90 | 588308 | 841 | 300-434 | 1864 | | S0250: 1 and L0754: 1. | 17q25 | 114290, 138033, |
| | | | | | | | | 162100, 170500, |
| | | | | | | | | 170500, 170500, |
| | | | | | | | | 180860, 264470 |
| HOHAV60 | 489007 | 842 | 96-668 | 1865 | | S0250: 1, L0748: 1 and | | |
| | | | | | | L0740: 1. | | |
| HOHAT59 | 867949 | 843 | 2-214 | 1866 | Ala-58 to Tyr-66. | S0250: 1 and L0370: 1. | | |
| HOHAT11 | 966727 | 844 | 114-473 | 1867 | Lys-37 to Tyr-47. | L0180: 1 and S0250: 1. | | |
| HOHAQ65 | 859057 | 845 | 15-209 | 1868 | | S0250: 1 and L0748: 1. | | |
| HOHAM66 | 859058 | 846 | 1-522 | 1869 | Gln-94 to Met-101, | L0754: 2 and S0250: 1. | 17q12 | 144200, 148066, |
| | | | | | Thr-109 to Gly-124, | | | 148066, 148067, |
| | | | | | Gln-149 to Gly-155. | | | 148067, 148069, |
| | | | | | | | | 154275, 180240, |
| | | | | | | | | 182138, 600119, |
| | | | | | | | | 600119, 600881, |
| | | | | | | | | 601363, 601687, |
| | | | | | | | | 601954 |
| HOHAI11 | 947140 | 847 | 1510-2127 | 1870 | Phe-22 to Lys-30, | S0250: 1 | | |
| | | | | | Glu-122 to Ser-127, | | | |
| | | | | | Arg-183 to Lys-190. | | | |
| | 965035 | 1026 | 338-117 | 2049 | | | | |
| | 966030 | 1027 | 332-490 | 2050 | | | | |
| HOHAE76 | 494001 | 848 | 94-309 | 1871 | | S0250: 1 | | |
| | 859064 | 1028 | 156-344 | 2051 | | | | |
| HOEOA28 | 859156 | 849 | 521-739 | 1872 | Gly-46 to Gly-51. | L0731: 2, L0763: 1, | | |
| | | | | | | L0766: 1 and S0126: 1. | | |
| HOENH06 | 934095 | 850 | 1-201 | 1873 | Asp-24 to Ala-32. | L0438: 3, L0439: 3, | | |
| | | | | | | S0126: 1, L0743: 1, | | |
| | | | | | | L0747: 1, L0749: 1, | | |
| | | | | | | L0750: 1 and L0758: 1. | | |
| HOELI08 | 958181 | 851 | 413-138 | 1874 | | L0766: 2, L0769: 1, | | |
| | | | | | | L0800: 1, L0803: 1, | | |
| | | | | | | L0804: 1 and S0126: 1. | | |
| HOEEX37 | 708728 | 852 | 553-717 | 1875 | | L0744: 2, S0126: 1 and | | |
| | | | | | | L0747: 1. | | |
| HOEEU57 | 932562 | 853 | 1-738 | 1876 | Gly-1 to Arg-15. | AR089: 30, AR061: 7 | | |
| | | | | | | L0774: 1, S0126: 1 and | | |
| | | | | | | L0780: 1. | | |
| HOEER75 | 767265 | 854 | 278-463 | 1877 | | L0756: 2 and S0126: 1. | | |
| HOECJ59 | 739426 | 855 | 1-462 | 1878 | Cys-1 to Ala-7, | L0750: 2 and S0126: 1. | | |
| | | | | | Glu-16 to Gly-21, | | | |
| | | | | | Arg-24 to Gln-30, | | | |
| | | | | | Ser-41 to Met-52, | | | |
| | | | | | Trp-75 to His-82. | | | |
| HOECF70 | 573426 | 856 | 39-161 | 1879 | | S0126: 1 | | |
| HOEBT89 | 921065 | 857 | 215-364 | 1880 | | S0126: 1 and L0754: 1. | | |
| HOACG06 | 954572 | 858 | 88-252 | 1881 | | L0747: 2, H0252: 1 | | |
| | | | | | | and L0439: 1. | | |
| HOABY40 | 711510 | 859 | 248-466 | 1882 | | H0252: 1 and L0756: | | |
| | | | | | | 1. | | |
| HOABX26 | 753954 | 860 | 93-275 | 1883 | | H0252: 1, L0769: 1, | | |
| | | | | | | L0375: 1, L0748: 1 and | | |
| | | | | | | L0749: 1. | | |
| HOABX21 | 531390 | 861 | 3-89 | 1884 | Thr-2 to Lys-18. | H0252: 1 | | |
| HOABW12 | 968797 | 862 | 11-241 | 1885 | Pro-2 to Ala-7. | H0252: 1 and L0749: | | |
| | | | | | | 1. | | |
| HOABG91 | 811156 | 863 | 1-234 | 1886 | Asp-22 to Ser-27, | H0252: 1 | 11p11.2- | 133701, 168500, |
| | | | | | Asn-29 to Glu-40, | | p12 | 171650, 176930, |
| | | | | | His-56 to Gly-73. | | | 176930, 600623, |
| | | | | | | | | 600811, 600958 |
| HOABF65 | 888203 | 864 | 149-298 | 1887 | | AR050: 12, ARO51: | | |
| | | | | | | 10, AR054: 7 | | |
| | | | | | | H0252: 1 | | |
| HOABD07 | 954060 | 865 | 156-344 | 1888 | Ser-15 to Gly-20, | H0252: 1 and L0777: | | |
| | | | | | Ala-26 to Tyr-33. | 1. | | |
| HOABA95 | 796063 | 866 | 101-316 | 1889 | Lys-8 to Gln-14, | H0252: 1 and L0754: | | |
| | | | | | Ile-27 to Thr-52. | 1. | | |
| HOAAX37 | 708718 | 867 | 108-242 | 1890 | | H0252: 1 and L0748: | | |
| | | | | | | 1. | | |
| HOAAW11 | 967660 | 868 | 207-395 | 1891 | Leu-1 to Trp-6. | H0252: 1 and L0527: | | |
| | | | | | | 1. | | |
| HOAAW02 | 920869 | 869 | 108-329 | 1892 | Thr-1 to Asn-12, | H0252: 1 and L0766: | | |
| | | | | | Gly-18 to Phe-24, | 1. | | |
| | | | | | Cys-40 to Trp-45, | | | |
| | | | | | Thr-50 to His-58. | | | |
| HOAAV77 | 772512 | 870 | 154-378 | 1893 | Cys-30 to Arg-38. | L0740: 2 and H0252: | | |
| | | | | | | 1. | | |
| HOAAO86 | 859626 | 871 | 198-443 | 1894 | Pro-18 to Arg-42, | H0252: 1 | | |
| | | | | | Asn-55 to Ala-60. | | | |
| HOAAM67 | 751947 | 872 | 108-290 | 1895 | Asp-24 to Pro-31. | H0252: 1 and L0748: | | |
| | | | | | | 1. | | |
| HOAAK71 | 761445 | 873 | 156-389 | 1896 | Thr-18 to Lys-25. | H0252: 1 and L0748: | | |
| | | | | | | 1. | | |
| HOAAK11 | 859624 | 874 | 1-396 | 1897 | Gly-30 to Glu-44, | H0252: 1 | | |
| | | | | | Ser-51 to Glu-56, | | | |
| | | | | | Arg-91 to Asn-99, | | | |
| | | | | | Pro-101 to Gly-108, | | | |
| | | | | | Pro-117 to Leu-122. | | | |
| HOAA158 | 859643 | 875 | 104-238 | 1898 | | H0023: 4, L0759: 2, | | |
| | | | | | | H0252: 1, L0740: 1 and | | |
| | | | | | | L0596: 1. | | |
| HOAAH77 | 772514 | 876 | 2-211 | 1899 | Arg- 16 to Ser-23. | H0252: 1 and L0747: | | |
| | | | | | | 1. | | |
| HOAAH41 | 712601 | 877 | 106-246 | 1900 | Ser-9 to Arg-17, | H0252: 1, L0748: 1 | | |
| | | | | | Phe-24 to Leu-33. | and L0749: 1. | | |
| HMUBZ11 | 966856 | 878 | 161-316 | 1901 | Gln-45 to Pro-52. | H0023: 1, H0529: 1 | | |
| | | | | | | and L0748: 1. | | |
| HMUBY48 | 721586 | 879 | 50-154 | 1902 | Ser-8 to Glu-13, | H0529: 1 | | |
| | | | | | Lys-20 to Lys-31. | | | |
| HMUBY20 | 669581 | 880 | 197-361 | 1903 | Pro-23 to Asn-29. | H0529: 1 | | |
| HMUBV40 | 837969 | 881 | 3-434 | 1904 | Tyr-70 to Ser-81, | H0529: 1 | | |
| | | | | | Arg-87 to Arg-97. | | | |
| HMUBR94 | 793261 | 882 | 265-450 | 1905 | Leu-10 to Phe-15, | H0529: 1 | | |
| HMUBR78 | 955060 | 883 | 75-518 | 1906 | Pro-9 to Pro-17, | H0529: 1 and L0745: | | |
| | | | | | Asp-24 to Glu-30, | 1. | | |
| | | | | | Asn-65 to Ser-75. | | | |
| HMUBQ01 | 918052 | 884 | 29-214 | 1907 | Cys-6 to Val-13, | H0529: 1 | | |
| | | | | | Cys-57 to Asn-62. | | | |
| HMUBP74 | 765502 | 885 | 380-553 | 1908 | Ala-1 to His-6. | H0529: 1 | | |
| HMUBP38 | 716800 | 886 | 30-206 | 1909 | | H0529: 1 | | |
| HMUBN15 | 659543 | 887 | 258-40 | 1910 | Pro-14 to Lys-23. | H0529: 1 | | |
| HMUBN05 | 932057 | 888 | 248-439 | 1911 | | H0529: 1 | | |
| HMUBM89 | 786082 | 889 | 458-309 | 1912 | | H0529: 1 | | |
| HMUBM85 | 784295 | 890 | 86-229 | 1913 | | H0529: 1 | | |
| HMUBM23 | 675296 | 891 | 2-319 | 1914 | Pro-41 to Ala-47, | L0439: 3, H0529: 1 | | |
| | | | | | Arg-50 to Gly-58. | and L0438: 1. | | |
| HMUBM21 | 861218 | 892 | 316-525 | 1915 | | H0529:1 | | |
| HMUBM01 | 916291 | 893 | 1-429 | 1916 | Pro-11 to Gly-16, | H0529:1 and L0601: | | |
| | | | | | Ser-35 to Gly-55, | 1. | | |
| | | | | | Gln-63 to Leu-68, | | | |
| | | | | | Asp-118 to Ser-123, | | | |
| | | | | | Arg-136 to Ala-141. | | | |
| HMUBL79 | 774904 | 894 | 110-229 | 1917 | Gly-15 to Lys-20, | H0529: 1 | | |
| | | | | | Ile-25 to Leu-30. | | | |
| HMUBL25 | 678011 | 895 | 109-291 | 1918 | Glu-19 to Arg-25. | H0529: 1 and L0748: | | |
| | | | | | | 1. | | |
| HMUBI26 | 424764 | 896 | 3-209 | 1919 | Lys-6 to Asp-14, | L0439: 2 and H0529: | | |
| | | | | | Lys-22 to Cys-27. | 1. | | |
| HMUBH84 | 782971 | 897 | 33-251 | 1920 | Thr-19 to Thr-28, | H0529:1 and L0749: | | |
| | | | | | Ser-43 to Gly-54, | 1. | | |
| | | | | | Asp-67 to Gly-73. | | | |
| HMUBC76 | 769968 | 898 | 260-415 | 1921 | Gly-15 to Ile-21, | H0529: 1 and L0748: | | |
| | | | | | Ser-24 to Ser-32. | 1. | | |
| HMUBA75 | 767192 | 899 | 214-375 | 1922 | Asn-12 to Asn-25. | H0529: 1 | | |
| HMUBA61 | 741710 | 900 | 56-172 | 1923 | | H0529: 1 | | |
| HMUAT71 | 772958 | 901 | 1-264 | 1924 | Ser-15 to Asp-22, | H0529: 1 and L0601: | 6 | |
| | | | | | Arg-28 to Arg-35. | 1. | | |
| HMUAE85 | 783543 | 902 | 41-259 | 1925 | | H0529: 1 and L0731: | | |
| | | | | | | 1. | | |
| HFOZC29 | 923288 | 903 | 500-195 | 1926 | Cys-2 to Asp-8, | L0384: 1, L0809: 1, | | |
| | | | | | Ser-59 to Gly-65. | L0731: 1 and S0276: 1. | | |
| HFOZA47 | 909372 | 904 | 110-262 | 1927 | Ser-26 to Cys-31. | L0748: 1 and S0276: 1. | | |
| HFOYW76 | 769894 | 905 | 129-401 | 1928 | Gln-19 to Cys-28. | L0439: 1 and S0276: 1. | | |
| HFOYV08 | 959038 | 906 | 73-255 | 1929 | Leu-2 to Arg-8, | L0021: 1, L0769: 1, | | |
| | | | | | Lys-42 to Ile-47. | L0794: 1, L0803: 1, | | |
| | | | | | | L0527: 1, L0731: 1, | | |
| | | | | | | L0758: 1 and S0276: 1. | | |
| HFOYS58 | 735816 | 907 | 134-280 | 1930 | Val-10 to Pro-20. | L0589: 1 and S0276: 1. | | |
| HFOYN65 | 747740 | 908 | 3-167 | 1931 | Gln-1 to Thr-12. | L0439: 3 and S0276: 1. | | |
| HFOYN01 | 854780 | 909 | 242-406 | 1932 | | L0591: 1 and S0276: 1. | | |
| HFOYM48 | 721455 | 910 | 64-279 | 1933 | | L0598: 2, L0766: 1, | | |
| | | | | | | L0805: 1, L0777: 1 and | | |
| | | | | | | S0276: 1. | | |
| HFOYL33 | 702209 | 911 | 95-508 | 1934 | Ser-1 to Ser-6, | L0640: 1, L0748: 1 and | | |
| | | | | | Asp-24 to Ala-36, | S0276: 1. | | |
| | | | | | Arg-130 to Leu-135. | | | |
| HFOYK21 | 670653 | 912 | 28-180 | 1935 | Glu-21 to Glu-29, | L0758: 2, L0779: 1 and | | |
| | | | | | Asn-33 to Tyr-39. | S0276: 1. | | |
| HEOYK02 | 919458 | 913 | 3-140 | 1936 | | L0750: 2 and S0276: 1. | | |
| HFOYJ30 | 932485 | 914 | 42-299 | 1937 | | L0747: 1 and S0276: 1. | | |
| HFOYH01 | 916055 | 915 | 259-432 | 1938 | Thr-4 to Lys-17, | L0761: 1, L0803: 1, | | |
| | | | | | Ser-35 to Gly-40, | L0774: 1, L0775: 1, | | |
| | | | | | Thr-44 to Cys-52. | L0599: 1 and S0276: 1. | | |
| HFOYG88 | 494875 | 916 | 463-765 | 1939 | | L0747: 3 and S0276: 1. | | |
| HFOYG86 | 949496 | 917 | 220-62 | 1940 | Pro-19 to Lys-25, | AR050: 13, AR054: 7, | | |
| | | | | | Phe-37 to Asn-44. | AR089: 3, AR051: 2, | | |
| | | | | | | AR061: 1 | | |
| | | | | | | L0777: 2, L0731: 2, | | |
| | | | | | | L0659: 1 and S0276: 1. | | |
| | 955554 | 1029 | 245-760 | 2052 | Arg-27 to Gly-35, | | | |
| | | | | | Tyr-72 to Lys-78, | | | |
| | | | | | Phe-108 to Lys-114. | | | |
| HFOYC08 | 958975 | 918 | 209-364 | 1941 | Pro-28 to Thr-33. | L0770: 1 and S0276: 1. | | |
| HFOYA17 | 662642 | 919 | 94-348 | 1942 | Arg-32 to Pro-41, | L0740: 1 and S0276: 1. | | |
| | | | | | Pro-43 to Gly-50. | | | |
| HFOXW67 | 494854 | 920 | 264-485 | 1943 | Gln-29 to Asn-37, | L0439: 1 and S0276: 1. | | |
| | | | | | Lys-55 to Gln-64. | | | |
| HFOXV94 | 794175 | 921 | 2-322 | 1944 | Pro-3 to Arg-10, | L0592: 1 and S0276: 1. | | |
| | | | | | Pro-12 to Arg-18. | | | |
| HFOXT74 | 875383 | 922 | 281-535 | 1945 | Ala-31 to Gly-38. | L0749: 1 and S0276: 1. | | |
| HFOXT35 | 707088 | 923 | 143-325 | 1946 | | S0276: 1 | | |
| HFOXS42 | 713514 | 924 | 352-110 | 1947 | Ser-45 to Lys-55. | S0276: 1 | | |
| HFOXO57 | 928171 | 925 | 1-507 | 1948 | Pro-5 to Gln-14, | L0439: 1, L0756: 1 and | | |
| | | | | | Lys-26 to Cys-32, | S0276: 1. | | |
| | | | | | Tyr-58 to Gln-69, | | | |
| | | | | | Gly-78 to Gly-84, | | | |
| | | | | | Lys-93 to Leu-117. | | | |
| HFOXO33 | 702212 | 926 | 311-493 | 1949 | Asp-32 to Asn-41. | L0623: 1, L0646: 1, | | |
| | | | | | | L0748: 1 and S0276: 1. | | |
| HFOXM53 | 587972 | 927 | 333-560 | 1950 | | L0748: 1 and S0276: 1. | | |
| HFOXL88 | 909839 | 928 | 90-425 | 1951 | Lys-5 to Ser-12, | L0562: 1 and S0276: 1. | 7q22- | 126650, 126650, |
| | | | | | Thr-17 to Ser-24. | | q31.1 | 150240, 154276, |
| | | | | | | | | 173360, 173360, |
| | | | | | | | | 180105, 222800, |
| | | | | | | | | 246900, 602136, |
| | | | | | | | | 602136, 602136, |
| | | | | | | | | 602447 |
| HFOXK96 | 732057 | 929 | 83-256 | 1952 | Ser-21 to Ile-35, | L0750: 1 and S0276: 1. | | |
| | | | | | Gln-48 to His-58. | | | |
| HFOXK42 | 587960 | 930 | 3-179 | 1953 | | L0745: 2, L0415: 1, | | |
| | | | | | | L0769: 1 and S0276: 1. | | |
| HFOXF91 | 790103 | 931 | 149-376 | 1954 | | L0439: 3, L0602: 2, | | |
| | | | | | | L0756: 2 and S0276: 1. | | |
| HFOXF42 | 854797 | 932 | 124-378 | 1955 | Ser-6 to Leu-14. | L0485: 1 and S0276: 1. | | |
| HEOXD78 | 856499 | 933 | 136-306 | 1956 | | L0438: 1, L0740: 1 and | | |
| | | | | | | S0276: 1. | | |
| HFOXB33 | 701719 | 934 | 220-432 | 1957 | Leu-53 to Lys-67. | L0590: 1 and S0276: 1. | | |
| HF0XB26 | 681593 | 935 | 273-467 | 1958 | Gln-1 to Val-11. | L0601: 1 and S0276: 1. | | |
| HFOXA62 | 743466 | 936 | 266-430 | 1959 | | L0748: 1 and S0276: 1. | | |
| HFIZP86 | 785341 | 937 | 121-237 | 1960 | Glu-1 to Asn-6. | L0777: 1 and S0242: 1. | | |
| HFIZB62 | 743122 | 938 | 167-304 | 1961 | | L0596: 1 and S0242: 1. | | |
| HFIYX08 | 958977 | 939 | 3-158 | 1962 | | L0749: 2, L0369: 1 and | | |
| | | | | | | S0242: 1. | | |
| HFIYW79 | 858618 | 940 | 1-249 | 1963 | Phe-2 to Arg-11. | L0766: 1, L0744: 1, | | |
| | | | | | | L0439: 1 and S0242: 1. | | |
| HFIYS11 | 966702 | 941 | 93-401 | 1964 | Ser-1 to Ser-6, | L0748: 1 and S0242: 1. | | |
| | | | | | Gly-58 to Pro-65, | | | |
| | | | | | Gly-75 to Leu-81. | | | |
| HFIYN50 | 724175 | 942 | 266-379 | 1965 | | L0777: 2, L0770: 1, | | |
| | | | | | | L0769: 1, L0780: 1, | | |
| | | | | | | L0752: 1, L0731: 1, | | |
| | | | | | | L0759: 1 and S0242: 1. | | |
| HFIYJ92 | 791305 | 943 | 184-306 | 1966 | | L0439: 5, L0740: 4, | | |
| | | | | | | L0756: 1, L0752: 1, | | |
| | | | | | | L0731: 1 and S0242: 1. | | |
| HFIYA08 | 962212 | 944 | 191-421 | 1967 | Thr-6 to Lys-13, | L0589: 1 and S0242: 1. | | |
| | | | | | Phe-37 to His-45, | | | |
| | | | | | Ala-58 to Ser-72. | | | |
| HFIXZ95 | 915703 | 945 | 2-208 | 1968 | Val-2 to Ser-14. | L0608: 1 and S0242: 1. | | |
| HFIXZ19 | 683033 | 946 | 613-410 | 1969 | | L0758: 1 and S0242: 1. | | |
| HFIXR93 | 894013 | 947 | 242-460 | 1970 | | L0740: 2 and S0242: 1. | | |
| HFIXR68 | 752858 | 948 | 220-342 | 1971 | | L0748: 1 and S0242: 1. | | |
| HFIXP31 | 697759 | 949 | 3-317 | 1972 | Leu-9 to Asn-16, | AR089: 4, AR061: 1 | | |
| | | | | | Thr-92 to Pro-100. | L0777: 3, L0809: 1 and | | |
| | | | | | | S0242: 1. | | |
| HFIXP04 | 839910 | 950 | 185-400 | 1973 | Ser-31 to Glu-36, | L0779: 1 and S0242: 1. | | |
| | | | | | Lys-44 to Cys-51. | | | |
| HFIXJ53 | 489122 | 951 | 94-348 | 1974 | | L0748: 1 and S0242: 1. | | |
| HFIXB77 | 772116 | 952 | 137-352 | 1975 | | L0754: 1 and S0242: 1. | | |
| HFIVS81 | 387591 | 953 | 2-157 | 1976 | | L0439: 1 and S0196: 1. | | |
| HFIVS21 | 855131 | 954 | 1-279 | 1977 | | L0545: 1 and S0196: 1. | | |
| HFIVS08 | 959272 | 955 | 115-255 | 1978 | Pro-1 to Ser-6. | L0021: 1 and S0196: 1. | | |
| HFIUZ63 | 745033 | 956 | 74-283 | 1979 | Ser-12 to Gly-17. | L0748: 1 and S0196: 1. | | |
| HFIUY49 | 855133 | 957 | 65-382 | 1980 | Leu-10 to Lys-22, | S0196: 1 | | |
| | | | | | Ser-46 to Ala-54, | | | |
| | | | | | Pro-85 to Phe-91. | | | |
| HFIUV58 | 735350 | 958 | 2-205 | 1981 | | L0740: 2, L0747: 2 and | | |
| | | | | | | S0196: 1. | | |
| HFIUV18 | 787095 | 959 | 3-248 | 1982 | | L0746: 1 and S0196: 1. | | |
| HFIUM33 | 702319 | 960 | 214-372 | 1983 | | S0196: 1 | | |
| HFIUH65 | 747836 | 961 | 34-183 | 1984 | Leu-7 to Cys-14, | L0752: 2, L0740: 1, | | |
| | | | | | Pro-16 to Ser-24, | L0745: 1 and S0196: 1. | | |
| | | | | | Gln-43 to His-50. | | | |
| HFIUD47 | 720254 | 962 | 129-380 | 1985 | | L0750: 2, L0747: 1, | | |
| | | | | | | L0731: 1, L0591: 1 and | | |
| | | | | | | S0196: 1. | | |
| HFITH46 | 718078 | 963 | 295-672 | 1986 | | L0745: 1, L0746: 1 and | | |
| | | | | | | S0196: 1. | | |
| HFIJG36 | 707883 | 964 | 1-183 | 1987 | Ser-1 to Asp-9. | L0749: 1 and S0194: 1. | | |
| HFIJG20 | 669580 | 965 | 307-435 | 1988 | | L0748: 1 and S0194: 1. | | |
| HFIJF58 | 735927 | 966 | 214-492 | 1989 | Lys-1 to Lys-15, | L0777: 2 and S0194: 1. | | |
| | | | | | Arg-22 to Arg-31, | | | |
| | | | | | Thr-68 to Pro-73, | | | |
| | | | | | Pro-79 to Ser-86. | | | |
| HFIIZ92 | 494044 | 967 | 170-3 | 1990 | Asp-1 to Cys-6, | S0194: 1 | | |
| | | | | | Lys-15 to Phe-23, | | | |
| | | | | | Asn-46 to Arg-56. | | | |
| | 533295 | 1030 | 1-843 | 2053 | Gly-1 to Val-7, | | | |
| | | | | | Gln-28 to Thr-34, | | | |
| | | | | | Ala-100 to Thr-108, | | | |
| | | | | | Ser-115 to Arg-122, | | | |
| | | | | | Ser-156 to Glu-162, | | | |
| | | | | | Ser-174 to Tyr-186, | | | |
| | | | | | Glu-188 to Phe-193. | | | |
| HFIIU85 | 793332 | 968 | 242-526 | 1991 | | L0598: 1 and S0194: 1. | | |
| HFIIR63 | 744994 | 969 | 312-467 | 1992 | Ala-6 to Ile-12. | L0439: 3 and S0194: 1. | | |
| HFIIL37 | 561375 | 970 | 3-350 | 1993 | Ser-1 to Gly-18, | AR050: 241, AR051: | | |
| | | | | | Gly-27 to Leu-39, | 230, AR054: 157 | | |
| | | | | | Ser-76 to Thr-89. | S0194: 1 | | |
| HFIIK75 | 767222 | 971 | 541-810 | 1994 | Trp-1 to Val-6, | L0439: 2, L0777: 2 and | | |
| | | | | | His-20 to Ser-28, | S0194: 1. | | |
| | | | | | Arg-47 to Pro-53, | | | |
| | | | | | Thr-65 to Pro-71, | | | |
| | | | | | Ser-78 to Gly-90. | | | |
| HFIIK32 | 424259 | 972 | 133-321 | 1995 | His-5 to Thr-10. | L0754: 1 and S0194: 1. | | |
| HFIIK07 | 953034 | 973 | 84-317 | 1996 | | L0663: 1 and S0194: 1. | | |
| HFIIJ14 | 839523 | 974 | 429-707 | 1997 | Val-17 to His-33, | AR054: 62, AR050: | | |
| | | | | | Arg-51 to Leu-60, | 59, AR051: 58 | | |
| | | | | | Leu-85 to Pro-93. | S0194: 1 | | |
| HFIHW91 | 907618 | 975 | 3-527 | 1998 | Trp-5 to Pro-11. | AR089: 13, AR061: 6 | | |
| | | | | | | L0779: 1, L0780: 1, | | |
| | | | | | | L0759: 1 and S0194: 1. | | |
| HFIHW16 | 858594 | 976 | 3-272 | 1999 | Gln-22 to Trp-27. | L0744: 1 and S0194: 1. | | |
| HFIHW11 | 947856 | 977 | 22-201 | 2000 | | L0527: 2 and S0194: 1. | | |
| HFIHV56 | 470954 | 978 | 70-378 | 2001 | Ser-1 to Arg-7. | L0592: 1 and S0194: 1. | | |
| HFIHU76 | 769948 | 979 | 133-246 | 2002 | | L0748: 1 and S0194: 1. | | |
| HFLHS86 | 785419 | 980 | 146-325 | 2003 | | L0598: 1 and S0194: 1. | | |
| HFIHR78 | 773512 | 981 | 249-407 | 2004 | | L0745: 1 and S0194: 1. | | |
| HFIHN35 | 707075 | 982 | 327-560 | 2005 | | L0748: 3, L0749: 1 and | | |
| | | | | | | S0194: 1. | | |
| HFIHK29 | 855174 | 983 | 97-450 | 2006 | Val-3 to Arg-11, | L0731: 2 and S0194: 1. | | |
| | | | | | Pro-34 to His-47, | | | |
| | | | | | Ser-58 to Leu-68, | | | |
| | | | | | Pro-72 to Trp-77. | | | |
| HFIHF53 | 728259 | 984 | 369-500 | 2007 | Ile-7 to Ile-13. | L0754: 1 and S0194: 1. | | |
| HFIHD20 | 669731 | 985 | 3-338 | 2008 | Arg-6 to Thr-11, | L0605: 1 and S0194: 1. | | |
| | | | | | Gly-27 to Leu-33, | | | |
| | | | | | Lys-52 to Phe-61, | | | |
| | | | | | Gln-86 to Lys-92, | | | |
| | | | | | Asn-102 to Arg-112. | | | |
| HFIDL68 | 928475 | 986 | 2-529 | 2009 | Glu-40 to Lys-46, | AR089: 7, AR061: 4, | | |
| | | | | | Phe-120 to Ser-132. | AR050: 2, AR054: 2, | | |
| | | | | | | AR051: 1 | | |
| | | | | | | S0192: 1 | | |
| HFIDL06 | 837524 | 987 | 50-487 | 2010 | Val-1 to Gly-8, | L0602: 1 and S0192: 1. | | |
| | | | | | Gln-48 to Asp-53, | | | |
| | | | | | Glu-61 to Asp-68, | | | |
| | | | | | Val-88 to Lys-96, | | | |
| | | | | | Asp-102 to Lys-108. | | | |
| HFIBK83 | 939556 | 988 | 2-502 | 2011 | Val-48 to Pro-56, | L0439: 1 and S0192: 1. | | |
| | | | | | Asp-58 to Gln-69. | | | |
| HFIAX78 | 773445 | 989 | 80-217 | 2012 | | S0192: 1 | | |
| HFIAS49 | 722728 | 990 | 357-611 | 2013 | Leu-5 to Lys-11. | L0740: 1 and S0192: 1. | | |
| HFIAL66 | 587837 | 991 | 339-515 | 2014 | | L0740: 1 and S0192: 1. | | |
| HCOKA10 | 907080 | 992 | 605-171 | 2015 | Phe-13 to Thr-22. | AR054: 7, AR061: 2, | | |
| | | | | | | AR089: 1, AR051: 1 | | |
| | | | | | | H0636: 1 | | |
| | 918918 | 1031 | 1663-1220 | 2054 | | | | |
| | 919869 | 1032 | 1-396 | 2055 | Pro-1 to Ser-9, | | | |
| | | | | | Asp-127 to Asn-132. | | | |
| HCDEL02 | 920831 | 993 | 167-292 | 2016 | | H0251: 1 and L0776: | | |
| | | | | | | 1. | | |
| HCDDZ69 | 522220 | 994 | 198-341 | 2017 | | H0251: 1 | | |
| HCDDY54 | 529265 | 995 | 23-148 | 2018 | Gln-12 to Asp-26. | H0251: 1 | | |
| HCDDO80 | 778563 | 996 | 85-402 | 2019 | Tyr-8 to Thr-15. | H0251: 1 and L0596: | | |
| | | | | | | 1. | | |
| HCDCD64 | 863415 | 997 | 23-301 | 2020 | Asp-35 to Cys-43. | H0251: 1 and L0740: | | |
| | | | | | | 1. | | |
| HCDBW41 | 712648 | 998 | 2-217 | 2021 | Pro-2 to Lys-7. | L0439: 3 and H0251: | | |
| | | | | | | 1. | | |
| HCDBO86 | 784617 | 999 | 279-509 | 2022 | Thr-62 to Asn-69, | H0251: 1, L0747: 1, | | |
| | | | | | Cys-71 to Glu-77. | L0756: 1 and L0777: 1. | | |
| HCDAO39 | 704504 | 1000 | 3-260 | 2023 | | H0251: 1 and L0588: | | |
| | | | | | | 1. | | |
| HCDAA68 | 753814 | 1001 | 412-576 | 2024 | Ala-3 to Thr-9, | H0251: 1 and L0748: | | |
| | | | | | Arg-16 to Pro-23. | 1. | | |
| HBSAP57 | 531874 | 1002 | 298-474 | 2025 | Ser-1 to Gly-11, | AR051: 87, AR054: | | |
| | | | | | Pro-42 to Lys-54. | 84, AR050: 83 | | |
| | | | | | | H0381: 1 | | |
| | 533619 | 1033 | 392-216 | 2056 | Ser-1 to Gly-11, | | | |
| | | | | | Pro-42 to Lys-54. | | | |
| HBCKF23 | 675613 | 1003 | 168-425 | 2026 | Gly-9 to His-18. | L0758: 3, S0336: 1 and | | |
| | | | | | | L0779: 1. | | |
| HBCGD25 | 677689 | 1004 | 97-240 | 2027 | Leu-39 to Lys-46. | L0748: 3 and S0334: 1. | | |
| HAOAE95 | 795674 | 1005 | 95-217 | 2028 | Gly-12 to Pro-20. | L0605: 2 and S0314: 1. | | |
| HAOAD27 | 848729 | 1006 | 90-335 | 2029 | | S0314: 1 and L0747: 1. | | |
| HANKG10 | 963926 | 1007 | 34-237 | 2030 | Cys-1 to Phe-6, | S0318: 1, L0766: 1 and | | |
| | | | | | Leu-30 to Gly-38. | L0803: 1. | | |
| HANKB13 | 827062 | 1008 | 2-436 | 2031 | Lys-4 to Gln-16, | S0318: 1, L0766: 1 and | | |
| | | | | | Lys-32 to Lys-39, | L0666: 1. | | |
| | | | | | Met-43 to Asn-48, | | | |
| | | | | | Gln-70 to Leu-76. | | | |
| HAMAC79 | 872774 | 1009 | 337-867 | 2032 | | AR089: 20, AR061: 13 | | |
| | | | | | | H0122: 1 | | |

[0065] The first column in Table 1A provides a unique “Clone ID NO:Z” for a cDNA clone related to each contig sequence disclosed in Table 1A. This clone ID references the cDNA clone which contains at least the 5′ most sequence of the assembled contig, and at least a portion of SEQ ID NO:X was determined by directly sequencing the referenced clone. The reference clone may have more sequence than described in the sequence listing or the clone may have less. In the vast majority of cases, however, the clone is believed to encode a full-length polypeptide. In the case where a clone is not full-length, a full-length cDNA can be obtained by methods known in the art and/or as described elsewhere herein.

[0066] The second column in Table 1A provides a unique “Contig ID” identification for each contig sequence. The third column provides the “SEQ ID NO:X” identifier for each of the musculoskeletal system associated contig polynucleotide sequences disclosed in Table 1A. The fourth column, “ORF (From-To)”, provides the location (i.e., nucleotide position numbers) within the polynucleotide sequence “SEQ ID NO:X” that delineate the preferred open reading frame (ORF) shown in the sequence listing and referenced in Table 1A, column 5, as SEQ ID NO:Y. Where the nucleotide position number “To” is lower than the nucleotide position number “From”, the preferred ORF is the reverse complement of the referenced polynucleotide sequence.

[0067] The fifth column in Table 1A provides the corresponding SEQ ID NO:Y for the polypeptide sequence encoded by the preferred ORF delineated in column 4. In one embodiment, the invention provides an amino acid sequence comprising, or alternatively consisting of, a polypeptide encoded by the portion of SEQ ID NO:X delineated by “ORF (From-To)”. Also provided are polynucleotides encoding such amino acid sequences and the complementary strand thereto.

[0068] Column 6 in Table 1A lists residues comprising epitopes contained in the polypeptides encoded by the preferred ORF (SEQ ID NO:Y), as predicted using the algorithm of Jameson and Wolf, (1988) Comp. Appl. Biosci. 4:181-186. The Jameson-Wolf antigenic analysis was performed using the computer program PROTEAN (Version 3.11 for the Power MacIntosh, DNASTAR, Inc., 1228 South Park Street Madison, Wis.). In specific embodiments, polypeptides of the invention comprise, or alternatively consist of, at least one, two, three, four, five or more of the predicted epitopes as described in Table 1A. It will be appreciated that depending on the analytical criteria used to predict antigenic determinants, the exact address of the determinant may vary slightly.

[0069] Column 7 in Table 1A provides an expression profile and library code: count for each of the contig sequences (SEQ ID NO:X) disclosed in Table 1A, which can routinely be combined with the information provided in Table 4 and used to determine the normal or diseased tissues, cells, and/or cell line libraries which predominantly express the polynucleotides of the invention. The first number in column 7 (preceding the colon), represents the tissue/cell source identifier code corresponding to the code and description provided in Table 4. For those identifier codes in which the first two letters are not “AR”, the second number in column 7 (following the colon) represents the number of times a sequence corresponding to the reference polynucleotide sequence was identified in the tissue/cell source. Those tissue/cell source identifier codes in which the first two letters are “AR” designate information generated using DNA array technology. Utilizing this technology, cDNAs were amplified by PCR and then transferred, in duplicate, onto the array. Gene expression was assayed through hybridization of first strand cDNA probes to the DNA array. cDNA probes were generated from total RNA extracted from a variety of different tissues and cell lines. Probe synthesis was performed in the presence of ³³P dCTP, using oligo(dT) to prime reverse transcription. After hybridization, high stringency washing conditions were employed to remove non-specific hybrids from the array. The remaining signal, emanating from each gene target, was measured using a Phosphorimager. Gene expression was reported as Phosphor Stimulating Luminescence (PSL) which reflects the level of phosphor signal generated from the probe hybridized to each of the gene targets represented on the array. A local background signal subtraction was performed before the total signal generated from each array was used to normalize gene expression between the different hybridizations. The value presented after “[array code]:” represents the mean of the duplicate values, following background subtraction and probe normalization. One of skill in the art could routinely use this information to identify normal and/or diseased tissue(s) which show a predominant expression pattern of the corresponding polynucleotide of the invention or to identify polynucleotides which show predominant and/or specific tissue and/or cell expression. The sequences disclosed herein have been determined to be predominantly expressed in musculoskeletal system tissues, including normal and diseased musculoskeletal system tissues (See Table 1A, column 7 and Table 4).

[0070] Column 8 in Table 1A provides a chromosomal map location for certain polynucleotides of the invention. Chromosomal location was determined by finding exact matches to EST and cDNA sequences contained in the NCBI (National Center for Biotechnology Information) UniGene database. Each sequence in the UniGene database is assigned to a “cluster”; all of the ESTs, cDNAs, and STSs in a cluster are believed to be derived from a single gene. Chromosomal mapping data is often available for one or more sequence(s) in a UniGene cluster; this data (if consistent) is then applied to the cluster as a whole. Thus, it is possible to infer the chromosomal location of a new polynucleotide sequence by determining its identity with a mapped UniGene cluster.

[0071] A modified version of the computer program BLASTN (Altshul et al., J. Mol. Biol. 215:403-410 (1990), and Gish et al., Nat. Genet. 3:266-272 (1993)) was used to search the UniGene database for EST or cDNA sequences that contain exact or near-exact matches to a polynucleotide sequence of the invention (the ‘Query’). A sequence from the UniGene database (the ‘Subject’) was said to be an exact match if it contained a segment of 50 nucleotides in length such that 48 of those nucleotides were in the same order as found in the Query sequence. If all of the matches that met this criteria were in the same UniGene cluster, and mapping data was available for this cluster, it is indicated in Table 1A under the heading “Cytologic Band”. Where a cluster had been further localized to a distinct cytologic band, that band is disclosed; where no banding information was available, but the gene had been localized to a single chromosome, the chromosome is disclosed.

[0072] Once a presumptive chromosomal location was determined for a polynucleotide of the invention, an associated disease locus was identified by comparison with a database of diseases which have been experimentally associated with genetic loci. The database used was the Morbid Map, derived from OMIM™ (supra). If the putative chromosomal location of a polynucleotide of the invention (Query sequence) was associated with a disease in the Morbid Map database, an OMIM reference identification number was noted in column 9, Table 1A, labeled “OMIM Disease Reference(s)”. Table 5 is a key to the OMIM reference identification numbers (column 1), and provides a description of the associated disease in Column 2.

TABLE 1B

| Clone ID | SEQ ID | CONTIG | | SEQ ID | EXON |
|---|---|---|---|---|---|
| NO: Z | NO: X | ID: | BAC ID: A | NO: B | From-To |
| HANGA63 | 11 | 927404 | AL133312 | 2057 | 1-333 |
| HANGA63 | 11 | 927404 | AL135752 | 5058 | 1-333 |
| HANGA63 | 11 | 927404 | AL133312 | 2059 | 1-467 |
| HANGA63 | 11 | 927404 | AL135752 | 2060 | 1-467 |
| HANGA69 | 12 | 718174 | AL353590 | 2061 | 1-446 |
| HANGA85 | 13 | 746265 | AC007705 | 2062 | 1-330 |
| HANGA92 | 14 | 791182 | AL359257 | 2063 | 1-167 |
| HANGA92 | 14 | 791182 | AL359257 | 2064 | 1-825 |
| | | | | | 1179-1523 |
| | | | | | 1777-2115 |
| HANGC05 | 15 | 674059 | AC024377 | 2065 | 1-119 |
| HANGC05 | 15 | 674059 | AC018496 | 2066 | 1-119 |
| HANGC05 | 15 | 674059 | AC024377 | 2067 | 1-202 |
| HANGC05 | 15 | 674059 | AC018496 | 2068 | 1-187 |
| HANGC30 | 18 | 966430 | AC022618 | 2069 | 1-408 |
| HANGC33 | 19 | 702072 | AC069127 | 2070 | 1-272 |
| HANGC84 | 21 | 715991 | AL137178 | 2071 | 1-1034 |
| | | | | | 1132-1714 |
| HANGC84 | 21 | 715991 | AC016847 | 2072 | 1-1034 |
| | | | | | 1132-1714 |
| HANGF36 | 22 | 952583 | AC013496 | 2073 | 1-255 |
| HANGF36 | 22 | 952583 | AC013496 | 2074 | 1-616 |
| HANGF49 | 23 | 722635 | AC013465 | 2075 | 1-469 |
| HANGF49 | 23 | 722635 | AC026298 | 2076 | 1-123 |
| HANGF49 | 23 | 722635 | AC016911 | 2077 | 1-469 |
| HANGF49 | 23 | 722635 | AC016749 | 2078 | 1-123 |
| HANGF49 | 23 | 722635 | AC010080 | 2079 | 1-469 |
| HANGF49 | 23 | 722635 | AC006386 | 2080 | 1-469 |
| HANGF49 | 23 | 722635 | AC026298 | 2081 | 1-399 |
| HANGF49 | 23 | 722635 | AC016749 | 2082 | 1-399 |
| HANGG22 | 24 | 848727 | AL355112 | 2083 | 1-374 |
| HANGG22 | 24 | 848727 | AL355112 | 2084 | 1-147 |
| HANGH48 | 25 | 718759 | AC069530 | 2085 | 1-378 |
| HANGH48 | 25 | 718759 | AC069530 | 2086 | 1-509 |
| HANGH53 | 26 | 727914 | AC073319 | 2087 | 1-440 |
| HANGH66 | 28 | 661513 | AC036194 | 2088 | 1-457 |
| HANGH66 | 28 | 661513 | AC026013 | 2089 | 1-457 |
| HANGH66 | 28 | 661513 | AC025534 | 2090 | 1-457 |
| HANKD09 | 29 | 625167 | AC012521 | 2091 | 1-409 |
| HANKD09 | 29 | 625167 | AC027666 | 2092 | 1-409 |
| HANKD47 | 30 | 719963 | AL355592 | 2093 | 1-464 |
| HANKD83 | 31 | 963964 | AC068969 | 2094 | 1-316 |
| HANKD83 | 31 | 963964 | AC067805 | 2095 | 1-316 |
| HANKG78 | 32 | 710760 | AC006514 | 2096 | 1-385 |
| | | | | | 594-1524 |
| | | | | | 1793-2194 |
| | | | | | 4246-4590 |
| | | | | | 4888-5238 |
| HANKG78 | 32 | 710760 | AC006510 | 2097 | 1-931 |
| | | | | | 1200-1601 |
| HANKG78 | 32 | 710760 | AC006510 | 2098 | 1-379 |
| HANKG90 | 33 | 746282 | AP001644 | 2099 | 1-437 |
| HANKG90 | 33 | 746282 | AC021506 | 2100 | 1-437 |
| HANKH48 | 34 | 721340 | AP001203 | 2101 | 1-382 |
| HANKH56 | 35 | 733063 | AC074293 | 2102 | 1-417 |
| HANKH56 | 35 | 733063 | AC068194 | 2103 | 1-417 |
| HAOAA78 | 37 | 756979 | AC008945 | 2104 | 1-549 |
| HAOAA78 | 37 | 756979 | AC008945 | 2105 | 1-481 |
| HAOAA90 | 38 | 919249 | AC044917 | 2106 | 1-348 |
| HAOAA90 | 38 | 919249 | AP001839 | 2107 | 1-332 |
| HAOAA90 | 38 | 919249 | AC023090 | 2108 | 1-348 |
| HAOAA90 | 38 | 919249 | AC018445 | 2109 | 1-348 |
| HAOAA90 | 38 | 919249 | AC044917 | 2110 | 1-887 |
| HAOAA90 | 38 | 919249 | AP001839 | 2111 | 1-146 |
| | | | | | 303-921 |
| HAOAA90 | 38 | 919249 | AC023090 | 2112 | 1-887 |
| HAOAC05 | 39 | 932017 | AC008279 | 2113 | 1-516 |
| HAOAC05 | 39 | 932017 | AC008279 | 2114 | 1-478 |
| HAOAH38 | 45 | 705946 | AC005036 | 2115 | 1-345 |
| HAOMA13 | 46 | 915881 | AC068969 | 2116 | 1-368 |
| HAOMA13 | 46 | 915881 | AC067805 | 2117 | 1-368 |
| HAOMA13 | 46 | 915881 | AC067805 | 2118 | 1-536 |
| HAOMB64 | 47 | 960293 | AC019144 | 2119 | 1-1138 |
| HAOMB64 | 47 | 960293 | AC019144 | 2120 | 1-319 |
| HAOMB64 | 47 | 960293 | AC019144 | 2121 | 1-455 |
| HAOMC21 | 48 | 670518 | AL354920 | 2122 | 1-788 |
| HAOMC2I | 48 | 670518 | AL354920 | 2123 | 1-317 |
| HAOMC21 | 48 | 670518 | AL354920 | 2124 | 1-1979 |
| | | | | | 3907-4540 |
| | | | | | 5067-5184 |
| | | | | | 6386-6845 |
| HAOME45 | 50 | 705947 | AP001011 | 2125 | 1-1739 |
| HAOME45 | 50 | 705947 | AP000937 | 2126 | 1-1738 |
| HAOME45 | 50 | 705947 | AP000898 | 2127 | 1-1738 |
| | | | | | 1771-4394 |
| HAOME45 | 50 | 705947 | AC015958 | 2128 | 1-1739 |
| | | | | | 1772-4400 |
| HAOME45 | 50 | 705947 | AP000937 | 2129 | 1-415 |
| | | | | | 436-874 |
| HAOME45 | 50 | 705947 | AP001011 | 2130 | 1-415 |
| | | | | | 436-874 |
| HAOME45 | 50 | 705947 | AP000898 | 2131 | 1-415 |
| | | | | | 436-874 |
| HAOME45 | 50 | 705947 | AP000937 | 2132 | 1-665 |
| HAOME45 | 50 | 705947 | AC015958 | 2133 | 1-414 |
| | | | | | 435-873 |
| HBCKE22 | 54 | 674041 | AC016659 | 2134 | 1-562 |
| | | | | | 827-886 |
| | | | | | 4639-5057 |
| | | | | | 6461-6525 |
| | | | | | 6654-7045 |
| | | | | | 7193-7882 |
| | | | | | 8357-8477 |
| | | | | | 11540-11583 |
| | | | | | 11943-12257 |
| | | | | | 13444-13934 |
| | | | | | 14354-14528 |
| | | | | | 15155-15287 |
| HBCKE22 | 54 | 674041 | AC012481 | 2135 | 1-691 |
| HBCKE22 | 54 | 674041 | AC016659 | 2136 | 1-258 |
| HBCKE22 | 54 | 674041 | AC012481 | 2137 | 1-121 |
| | | | | | 3184-3224 |
| | | | | | 3587-3901 |
| | | | | | 5088-5578 |
| | | | | | 5998-6172 |
| | | | | | 6799-6931 |
| HBCKE22 | 54 | 674041 | AC012481 | 2138 | 1-392 |
| HBSAK76 | 57 | 506666 | AC027632 | 2139 | 1-349 |
| HBSAK76 | 57 | 506666 | AC027632 | 2140 | 1-425 |
| HBSAL69 | 58 | 573004 | AC020791 | 2141 | 1-433 |
| HBSAL80 | 59 | 506580 | AC018712 | 2142 | 1-380 |
| HBSAL80 | 59 | 506580 | AC074334 | 2143 | 1-125 |
| HBSAL80 | 59 | 506580 | AC026718 | 2144 | 1-420 |
| HBSAP02 | 62 | 920648 | AC022496 | 2145 | 1-490 |
| HBSAP02 | 62 | 920648 | AC025456 | 2146 | 1-130 |
| | | | | | 236-725 |
| | | | | | 796-1013 |
| | | | | | 2665-2751 |
| | | | | | 3801-4267 |
| | | | | | 5755-6475 |
| | | | | | 7371-7547 |
| | | | | | 9209-9496 |
| | | | | | 9611-10511 |
| | | | | | 11152-11890 |
| | | | | | 11984-12319 |
| | | | | | 12651-12745 |
| | | | | | 16691-17158 |
| | | | | | 17236-17382 |
| | | | | | 22177-22609 |
| HBSAP02 | 62 | 920648 | AC026437 | 2147 | 1-122 |
| | | | | | 228-717 |
| | | | | | 788-1005 |
| | | | | | 2655-2741 |
| | | | | | 3791-4257 |
| | | | | | 5740-6460 |
| | | | | | 7356-7532 |
| | | | | | 9194-9481 |
| | | | | | 9596-10496 |
| | | | | | 11137-11875 |
| | | | | | 11969-12304 |
| | | | | | 12636-12730 |
| | | | | | 16676-17143 |
| | | | | | 17221-17367 |
| | | | | | 22161-22574 |
| | | | | | 29380-29520 |
| | | | | | 36637-36948 |
| | | | | | 37077-37558 |
| | | | | | 38020-38322 |
| | | | | | 39908-40220 |
| | | | | | 41806-41890 |
| | | | | | 42060-43287 |
| | | | | | 43415-44248 |
| | | | | | 44300-44584 |
| | | | | | 44929-45056 |
| | | | | | 45424-45902 |
| | | | | | 46737-46932 |
| | | | | | 47156-49997 |
| HBSAP02 | 62 | 920648 | AC022496 | 2148 | 1-218 |
| HBSAP02 | 62 | 920648 | AC026437 | 2149 | 1-751 |
| HBSAP02 | 62 | 920648 | AC026437 | 2150 | 1-934 |
| HBSAQ64 | 64 | 530344 | AC027573 | 2151 | 1-341 |
| HBSAQ64 | 64 | 530344 | AC073413 | 2152 | 1-341 |
| HBSAQ64 | 64 | 530344 | AC073413 | 2153 | 1-92 |
| HBSDD91 | 67 | 775313 | AC027644 | 2154 | 1-286 |
| | | | | | 361-599 |
| | | | | | 687-919 |
| | | | | | 1726-2633 |
| HBSDD91 | 67 | 775313 | AC027644 | 2155 | 1-234 |
| HCDAA94 | 68 | 661278 | AC026053 | 2156 | 1-259 |
| HCDAA94 | 68 | 661278 | AC022262 | 2157 | 1-274 |
| HCDAA94 | 68 | 661278 | AL020995 | 2158 | 1-259 |
| HCDAA94 | 68 | 661278 | AC022262 | 2159 | 1-526 |
| HCDAA94 | 68 | 661278 | AL020995 | 2160 | 1-526 |
| HCDAG92 | 74 | 724693 | AP001105 | 2161 | 1-496 |
| HCDAG92 | 74 | 724693 | AP001900 | 2162 | 1-496 |
| HCDAG92 | 74 | 724693 | AP001145 | 2163 | 1-496 |
| HCDAG95 | 75 | 533871 | AC018891 | 2164 | 1-441 |
| HCDAG95 | 75 | 533871 | AC018891 | 2165 | 1-327 |
| HCDAH34 | 76 | 533870 | AC010469 | 2166 | 1-483 |
| HCDAH34 | 76 | 533870 | AC026718 | 2167 | 1-483 |
| HCDAH34 | 76 | 533870 | AC010469 | 2168 | 1-122 |
| HCDAH34 | 76 | 533870 | AC010469 | 2169 | 1-272 |
| HCDAJ67 | 77 | 925362 | AL049875 | 2170 | 1-317 |
| HCDAJ67 | 77 | 925362 | AL049875 | 2171 | 1-141 |
| HCDAK93 | 78 | 523648 | AC027474 | 2172 | 1-527 |
| HCDAK93 | 78 | 523648 | AC010332 | 2173 | 1-526 |
| HCDAK93 | 78 | 523648 | AC021112 | 2174 | 1-527 |
| HCDAK93 | 78 | 523648 | AC027474 | 2175 | 1-684 |
| HCDAK93 | 78 | 523648 | AC010332 | 2176 | 1-684 |
| HCDAK93 | 78 | 523648 | AC021112 | 2177 | 1-684 |
| HCDAM34 | 80 | 523607 | AC005969 | 2178 | 1-98 |
| | | | | | 1380-1550 |
| HCDAM34 | 80 | 523607 | AC005969 | 2179 | 1-227 |
| HCDAQ32 | 81 | 530006 | AC068780 | 2180 | 1-285 |
| HCDAO32 | 81 | 530006 | AC073907 | 2181 | 1-285 |
| HCDAO32 | 81 | 530006 | AC068780 | 2182 | 1-136 |
| HCDAO32 | 81 | 530006 | AC073907 | 2183 | 1-297 |
| HCDAT56 | 82 | 533881 | AL109657 | 2184 | 1-664 |
| | | | | | 792-1138 |
| | | | | | 1613-2026 |
| | | | | | 6132-6234 |
| | | | | | 6599-7035 |
| | | | | | 7168-7446 |
| | | | | | 8133-8262 |
| | | | | | 8374-8670 |
| | | | | | 8831-9478 |
| | | | | | 9704-9762 |
| | | | | | 9777-10137 |
| | | | | | 10260-11201 |
| | | | | | 11900-12541 |
| HCDAT56 | 82 | 533881 | AL109657 | 2185 | 1-489 |
| HCDAT56 | 82 | 533881 | AL109657 | 2186 | 1-369 |
| HCDBO13 | 83 | 709590 | AC007411 | 2187 | 1-323 |
| HCDBR39 | 85 | 921893 | AC008594 | 2188 | 1-409 |
| HCDBR39 | 85 | 921893 | AC040160 | 2189 | 1-410 |
| HCDBR39 | 85 | 921893 | AC008594 | 2190 | 1-761 |
| HCDBR39 | 85 | 921893 | AC008594 | 2191 | 1-1026 |
| HCDBR39 | 85 | 921893 | AC040160 | 2192 | 1-1026 |
| HCDBR39 | 85 | 921893 | AC040160 | 2193 | 1-761 |
| HCDBU77 | 86 | 661272 | AL121747 | 2194 | 1-400 |
| | | | | | 540-929 |
| | | | | | 957-1393 |
| | | | | | 1904-2140 |
| | | | | | 3206-3745 |
| | | | | | 4498-4693 |
| | | | | | 4849-5203 |
| | | | | | 6468-6828 |
| | | | | | 7645-8255 |
| | | | | | 8418-8525 |
| | | | | | 9502-10126 |
| HCDBU77 | 86 | 661272 | AL121747 | 2195 | 1-756 |
| HCDBW51 | 87 | 556469 | AL358472 | 2196 | 1-288 |
| HCDBW51 | 87 | 556469 | AL358472 | 2197 | 1-309 |
| HCDBX78 | 89 | 847580 | AC026340 | 2198 | 1-252 |
| HCDBX78 | 89 | 847580 | AC026340 | 2199 | 1-111 |
| HCDCB84 | 90 | 670159 | AL035634 | 2200 | 1-241 |
| HCDCB84 | 90 | 670159 | AL139330 | 2201 | 1-77 |
| | | | | | 563-1013 |
| | | | | | 1219-1674 |
| | | | | | 2670-2885 |
| | | | | | 4767-5013 |
| | | | | | 5856-5969 |
| | | | | | 6030-6407 |
| | | | | | 6602-8576 |
| HCDCB84 | 90 | 670159 | AL035634 | 2202 | 1-451 |
| | | | | | 657-1112 |
| HCDCB84 | 90 | 670159 | AL139330 | 2203 | 1-384 |
| HCDCE62 | 92 | 523582 | AL137065 | 2204 | 1-305 |
| HCDCE62 | 92 | 523582 | AL031177 | 2205 | 1-305 |
| HCDCF11 | 93 | 967768 | AC021163 | 2206 | 1-278 |
| HCDCF11 | 93 | 967768 | AC006942 | 2207 | 1-278 |
| HCDCF11 | 93 | 967768 | AC021163 | 2208 | 1-148 |
| | | | | | 244-287 |
| | | | | | 843-967 |
| HCDCF11 | 93 | 967768 | AC006942 | 2209 | 1-148 |
| | | | | | 244-287 |
| | | | | | 843-967 |
| HCDCF11 | 93 | 967768 | AC006942 | 2210 | 1-476 |
| | | | | | 718-997 |
| HCDCK91 | 95 | 592465 | AC024885 | 2211 | 1-3448 |
| HCDCR26 | 96 | 960048 | AP000087 | 2212 | 1-429 |
| | | | | | 732-1074 |
| | | | | | 1121-1255 |
| | | | | | 3513-3762 |
| HCDCR26 | 96 | 960048 | AP000139 | 2213 | 1-429 |
| | | | | | 732-1074 |
| | | | | | 1121-1255 |
| | | | | | 3513-3762 |
| HCDCR26 | 96 | 960048 | AP000226 | 2214 | 1-429 |
| | | | | | 732-1074 |
| | | | | | 1121-1255 |
| | | | | | 3513-3762 |
| HCDCR26 | 96 | 960048 | AP000226 | 2215 | 1-2571 |
| HCDCR26 | 96 | 960048 | AP000087 | 2216 | 1-2571 |
| HCDCR26 | 96 | 960048 | AP000139 | 2217 | 1-2571 |
| HCDCX68 | 97 | 529778 | AC003692 | 2218 | 1-44 |
| | | | | | 153-684 |
| | | | | | 695-1033 |
| | | | | | 2881-3167 |
| | | | | | 3597-8068 |
| | | | | | 8150-9192 |
| HCDCX68 | 97 | 529778 | AC003692 | 2219 | 1-342 |
| HCDCX68 | 97 | 529778 | AC003692 | 2220 | 1-467 |
| HCDDB62 | 100 | 529890 | AC015589 | 2221 | 1-570 |
| HCDDB62 | 100 | 529890 | AC010328 | 2222 | 1-570 |
| HCDDB62 | 100 | 529890 | AC015589 | 2223 | 1-340 |
| HCDDB62 | 100 | 529890 | AC010328 | 2224 | 1-82 |
| | | | | | 355-795 |
| | | | | | 871-998 |
| | | | | | 1300-1582 |
| | | | | | 1629-2248 |
| | | | | | 2727-2918 |
| | | | | | 4474-4729 |
| | | | | | 4876-6190 |
| | | | | | 6240-9439 |
| HCDDB62 | 100 | 529890 | AC010328 | 2225 | 1-340 |
| HCDDI61 | 101 | 529937 | AC005876 | 2226 | 1-428 |
| HCDDI61 | 101 | 529937 | AL358234 | 2227 | 1-428 |
| HCDDI61 | 101 | 529937 | AL161936 | 2228 | 1-428 |
| HCDDI61 | 101 | 529937 | AC005876 | 2229 | 1-247 |
| HCDDI61 | 101 | 529937 | AL358234 | 2230 | 1-247 |
| HCDDI61 | 101 | 529937 | AL161936 | 2231 | 1-247 |
| HCDDU07 | 102 | 954177 | AC005498 | 2232 | 1-1881 |
| HCDDU07 | 102 | 954177 | AC005498 | 2233 | 1-380 |
| HCDDV90 | 103 | 847575 | AC021553 | 2234 | 1-251 |
| HCDDV90 | 103 | 847575 | AC067837 | 2235 | 1-251 |
| HCDDV90 | 103 | 847575 | AC067837 | 2236 | 1-1510 |
| HCDDV90 | 103 | 847575 | AC067837 | 2237 | 1-450 |
| HCDDY57 | 104 | 556465 | AL354936 | 2238 | 1-273 |
| HCDDY57 | 104 | 556465 | AC021410 | 2239 | 1-273 |
| HCDDY57 | 104 | 556465 | AL354936 | 2240 | 1-186 |
| HCDDY57 | 104 | 556465 | AC021410 | 2241 | 1-153 |
| HCDDZ09 | 105 | 523605 | AC008866 | 2242 | 1-156 |
| HCDDZ09 | 105 | 523605 | AC016641 | 2243 | 1-156 |
| HCDEB49 | 107 | 847572 | AC024998 | 2244 | 1-242 |
| HCDEB49 | 107 | 847572 | AL390122 | 2245 | 1-242 |
| HCDEB49 | 107 | 847572 | AF198096 | 2246 | 1-242 |
| HCDEB49 | 107 | 847572 | AL390122 | 2247 | 1-430 |
| HCDEB49 | 107 | 847572 | AL390122 | 2248 | 1-419 |
| HCDEB49 | 107 | 847572 | AF198096 | 2249 | 1-430 |
| HCDEB49 | 107 | 847572 | AF198096 | 2250 | 1-500 |
| HCDEB78 | 108 | 921710 | AL359513 | 2251 | 1-300 |
| HCDER16 | 111 | 667338 | AC008064 | 2252 | 1-315 |
| HCDER16 | 111 | 667338 | AC008064 | 2253 | 1-415 |
| HCDER16 | 111 | 667338 | AC008064 | 2254 | 1-259 |
| HCDER29 | 112 | 523506 | AC022835 | 2255 | 1-203 |
| HCDER29 | 112 | 523506 | AC012476 | 2256 | 1-234 |
| | | | | | 244-446 |
| | | | | | 460-664 |
| | | | | | 814-913 |
| | | | | | 3082-3278 |
| | | | | | 3691-4090 |
| HCDER29 | 112 | 523506 | AC022835 | 2257 | 1-155 |
| HCDER29 | 112 | 523506 | AC012476 | 2258 | 1-412 |
| HCDET89 | 113 | 524045 | AC009719 | 2259 | 1-323 |
| HCDET89 | 113 | 524045 | AC022939 | 2260 | 1-323 |
| HCDET89 | 113 | 524045 | AC009719 | 2261 | 1-138 |
| HCDET89 | 113 | 524045 | AC009719 | 2262 | 1-308 |
| HCDET89 | 113 | 524045 | AC022939 | 2263 | 1-138 |
| HCDET89 | 113 | 524045 | AC022939 | 2264 | 1-308 |
| HFIAE82 | 116 | 779898 | AC020669 | 2265 | 1-443 |
| HFIAI07 | 118 | 952884 | AC005722 | 2266 | 1-365 |
| | | | | | 1763-1914 |
| | | | | | 2765-3000 |
| | | | | | 3766-3854 |
| | | | | | 4573-5237 |
| | | | | | 6312-7007 |
| | | | | | 7152-7793 |
| | | | | | 8026-8551 |
| | | | | | 8938-9098 |
| | | | | | 9770-10050 |
| | | | | | 11976-12661 |
| | | | | | 12934-13016 |
| | | | | | 13421-13727 |
| | | | | | 14047-14140 |
| | | | | | 14549-14721 |
| | | | | | 15329-15864 |
| | | | | | 16167-16198 |
| | | | | | 21769-21933 |
| | | | | | 22605-22741 |
| | | | | | 22939-23176 |
| | | | | | 24138-24261 |
| | | | | | 24368-24492 |
| | | | | | 26100-26500 |
| | | | | | 26685-28818 |
| HFIAI07 | 118 | 952884 | AC005722 | 2267 | 1-491 |
| HFIAP31 | 119 | 697775 | AL360269 | 2268 | 1-291 |
| HFIAP31 | 119 | 697775 | AL356323 | 2269 | 1-374 |
| HFIAP31 | 119 | 697775 | AC004916 | 2270 | 1-374 |
| HFIAP31 | 119 | 697775 | AC004916 | 2271 | 1-480 |
| HFIAP89 | 120 | 587844 | AC013526 | 2272 | 1-343 |
| HFIAP89 | 120 | 587844 | AC011769 | 2273 | 1-342 |
| HFIAP89 | 120 | 587844 | AC011766 | 2274 | 1-342 |
| HFIAP91 | 121 | 925831 | AC002094 | 2275 | 1-282 |
| | | | | | 780-1066 |
| | | | | | 1693-1777 |
| | | | | | 2672-3234 |
| | | | | | 3779-3876 |
| | | | | | 4254-4331 |
| | | | | | 4547-4658 |
| | | | | | 5768-5907 |
| | | | | | 6777-6804 |
| | | | | | 6988-7438 |
| | | | | | 7930-8074 |
| | | | | | 8084-8109 |
| | | | | | 8407-8492 |
| | | | | | 9334-13211 |
| | | | | | 15125-15331 |
| | | | | | 16116-16166 |
| | | | | | 16244-16336 |
| | | | | | 17085-17261 |
| | | | | | 17834-18163 |
| | | | | | 18315-19249 |
| | | | | | 19368-20067 |
| | | | | | 20077-20493 |
| | | | | | 21715-21833 |
| HFIAP91 | 121 | 925831 | AC002094 | 2276 | 1-1458 |
| | | | | | 1484-1825 |
| | | | | | 2941-3033 |
| | | | | | 3149-3619 |
| | | | | | 4464-4687 |
| HFIAP91 | 121 | 925831 | AC002094 | 2277 | 1-139 |
| | | | | | 960-1288 |
| | | | | | 3094-3333 |
| | | | | | 3487-3622 |
| | | | | | 4951-5037 |
| | | | | | 5249-5369 |
| | | | | | 5403-8947 |
| | | | | | 9834-9970 |
| HFIBI48 | 124 | 587871 | AL162590 | 2278 | 1-574 |
| HFIBI48 | 124 | 587871 | AL161445 | 2279 | 1-574 |
| HFIBI48 | 124 | 587871 | AL162590 | 2280 | 1-697 |
| HFIBI48 | 124 | 587871 | AL162590 | 2281 | 1-326 |
| HFIBI48 | 124 | 587871 | AL161445 | 2282 | 1-326 |
| HFIBI48 | 124 | 587871 | AL161445 | 2283 | 1-697 |
| HFICF01 | 127 | 916103 | AC017083 | 2284 | 1-428 |
| HFIDN81 | 134 | 959050 | AC013705 | 2285 | 1-944 |
| HFIDN81 | 134 | 959050 | AC011644 | 2286 | 1-946 |
| HFIDN81 | 134 | 959050 | AC013705 | 2287 | 1-349 |
| HFIDN81 | 134 | 959050 | AC013705 | 2288 | 1-757 |
| HFIDN81 | 134 | 959050 | AC011644 | 2289 | 1-349 |
| HFIHB16 | 138 | 661971 | AC025919 | 2290 | 1-472 |
| HFIHD91 | 139 | 702324 | AP001901 | 2291 | 1-2143 |
| HFIHD91 | 139 | 702324 | AC016229 | 2292 | 1-2144 |
| HFIHD91 | 139 | 702324 | AP001901 | 2293 | 1-608 |
| HFIHD91 | 139 | 702324 | AC016229 | 2294 | 1-44 |
| | | | | | 1477-1919 |
| | | | | | 2015-4862 |
| HFIHE47 | 140 | 857988 | AC021097 | 2295 | 1-1803 |
| | | | | | 2560-3406 |
| | | | | | 3921-4106 |
| | | | | | 4155-6674 |
| | | | | | 6911-7014 |
| | | | | | 7135-7264 |
| | | | | | 7522-8788 |
| HFIHJ60 | 142 | 740280 | AL132709 | 2296 | 1-763 |
| | | | | | 922-2545 |
| HFIHJ60 | 142 | 740280 | AL132709 | 2297 | 1-383 |
| HFIHL29 | 144 | 690546 | AC067837 | 2298 | 1-384 |
| HFIHL29 | 144 | 690546 | AC021553 | 2299 | 1-384 |
| HFIHL29 | 144 | 690546 | AC067837 | 2300 | 1-450 |
| HFIHZ33 | 146 | 588058 | AC011822 | 2301 | 1-993 |
| | | | | | 1199-1868 |
| HFIHZ33 | 146 | 588058 | AF025422 | 2302 | 1-991 |
| HFIHZ33 | 146 | 588058 | AC011822 | 2303 | 1-534 |
| | | | | | 541-1582 |
| HFIHZ33 | 146 | 588058 | AF025422 | 2304 | 1-534 |
| | | | | | 541-1582 |
| HFIHZ33 | 146 | 588058 | AF025422 | 2305 | 1-670 |
| HFIHZ51 | 147 | 725587 | AC015480 | 2306 | 1-386 |
| HFIIB73 | 148 | 669594 | AL109757 | 2307 | 1-452 |
| HFIIB73 | 148 | 669594 | AL031296 | 2308 | 1-670 |
| | | | | | 1590-2584 |
| | | | | | 3609-3751 |
| | | | | | 4204-4803 |
| | | | | | 4847-5271 |
| | | | | | 9874-10146 |
| | | | | | 11847-12328 |
| | | | | | 12493-13051 |
| | | | | | 13395-13635 |
| | | | | | 15455-15917 |
| | | | | | 17288-17739 |
| | | | | | 18945-19908 |
| | | | | | 21414-22006 |
| | | | | | 27737-27823 |
| | | | | | 35955-36575 |
| | | | | | 36643-37204 |
| | | | | | 37341-37504 |
| | | | | | 39154-39312 |
| | | | | | 41736-42263 |
| | | | | | 47221-47669 |
| | | | | | 47712-48167 |
| | | | | | 50898-51095 |
| | | | | | 51163-51655 |
| | | | | | 51716-52580 |
| | | | | | 52706-58181 |
| HFIIB73 | 148 | 669594 | AL109757 | 2309 | 1-964 |
| HFIIB73 | 148 | 669594 | AL031296 | 2310 | 1-274 |
| HFIIS21 | 149 | 670765 | AL359372 | 2311 | 1-420 |
| | | | | | 908-1805 |
| | | | | | 1962-3333 |
| | | | | | 3335-4572 |
| | | | | | 5795-5879 |
| | | | | | 7151-7262 |
| | | | | | 7320-7927 |
| HFIIS21 | 149 | 670765 | AL359372 | 2312 | 1-709 |
| HFIJF34 | 150 | 703972 | AC020726 | 2313 | 1-462 |
| HFIUE17 | 153 | 855119 | AL121809 | 2314 | 1-576 |
| HFIUE17 | 153 | 855119 | AL133501 | 2315 | 1-577 |
| HFIUE17 | 153 | 855119 | AL121809 | 2316 | 1-374 |
| HFIUE17 | 153 | 855119 | AL121809 | 2317 | 1-67 |
| | | | | | 286-666 |
| | | | | | 3060-3146 |
| | | | | | 3462-3689 |
| | | | | | 4441-4741 |
| | | | | | 8067-8220 |
| | | | | | 9047-9139 |
| | | | | | 9816-10074 |
| | | | | | 11133-11965 |
| | | | | | 14462-14721 |
| | | | | | 15045-15361 |
| | | | | | 15605-16026 |
| | | | | | 17424-17605 |
| | | | | | 17899-18267 |
| | | | | | 18702-18660 |
| HFIUE17 | 153 | 855119 | AL133501 | 2318 | 1-374 |
| HFIUH54 | 154 | 929787 | AC004774 | 2319 | 1-403 |
| HFIUH54 | 154 | 929787 | AC004774 | 2320 | 1-519 |
| HFIUI66 | 155 | 746397 | AC012385 | 2321 | 1-326 |
| HFIUI66 | 155 | 746397 | AC026491 | 2322 | 1-439 |
| | | | | | 1239-1395 |
| | | | | | 1783-2779 |
| | | | | | 2956-3540 |
| | | | | | 3650-3772 |
| | | | | | 3781-4106 |
| | | | | | 6023-6283 |
| | | | | | 6363-7024 |
| | | | | | 7557-7711 |
| | | | | | 10937-11233 |
| | | | | | 12728-12870 |
| | | | | | 13214-13362 |
| | | | | | 13714-15432 |
| | | | | | 16010-16106 |
| HFIUI66 | 155 | 746397 | AC026491 | 2323 | 1-299 |
| HFIUJ95 | 156 | 735969 | AC009280 | 2324 | 1-437 |
| HFIUJ95 | 156 | 735969 | AC009280 | 2325 | 1-296 |
| HFIUO63 | 158 | 691921 | AC012681 | 2326 | 1-969 |
| HFIUO63 | 158 | 691921 | AC012681 | 2327 | 1-614 |
| HFIVB03 | 160 | 924021 | AC017003 | 2328 | 1-335 |
| HFIXC30 | 165 | 692635 | AP002406 | 2329 | 1-418 |
| HFIXC30 | 165 | 692635 | AC010776 | 2330 | 1-418 |
| HFIXC44 | 166 | 839536 | AC036163 | 2331 | 1-588 |
| | | | | | 625-1391 |
| HFIXC44 | 166 | 839536 | AC036163 | 2332 | 1-2530 |
| HFIXK83 | 168 | 767156 | AC007991 | 2333 | 1-400 |
| | | | | | 1386-1821 |
| | | | | | 3975-4075 |
| | | | | | 4188-4312 |
| | | | | | 4711-4794 |
| | | | | | 4915-5054 |
| HFIXK83 | 168 | 767156 | AC007991 | 2334 | 1-114 |
| HFIXK94 | 169 | 943717 | AC073231 | 2335 | 1-430 |
| HFIXK94 | 169 | 943717 | AF045448 | 2336 | 1-430 |
| HFIXK94 | 169 | 943717 | AF064860 | 2337 | 1-430 |
| HFIXK94 | 169 | 943717 | AF121897 | 2338 | 1-430 |
| HFIXK94 | 169 | 943717 | AC073231 | 2339 | 1-527 |
| HFIXK94 | 169 | 943717 | AF045448 | 2340 | 1-49 |
| | | | | | 3630-4025 |
| HFIXK94 | 169 | 943717 | AF045448 | 2341 | 1-528 |
| HFIXK94 | 169 | 943717 | AF064860 | 2342 | 1-528 |
| HFIXK94 | 169 | 943717 | AF064860 | 2343 | 1-49 |
| | | | | | 3630-4025 |
| HFIXK94 | 169 | 943717 | AF121897 | 2344 | 1-528 |
| HFIXK94 | 169 | 943717 | AF121897 | 2345 | 1-49 |
| | | | | | 3630-4025 |
| HFIXM11 | 170 | 966714 | AL354946 | 2346 | 1-677 |
| | | | | | 1412-3002 |
| | | | | | 3013-3365 |
| | | | | | 3460-4359 |
| HFIXM11 | 170 | 943714 | AL136324 | 2347 | 1-677 |
| | | | | | 1412-3003 |
| | | | | | 3014-3366 |
| | | | | | 3461-4360 |
| HFIXM11 | 170 | 943714 | AL136324 | 2348 | 1-418 |
| HFIXM11 | 170 | 943714 | AL354946 | 2349 | 1-418 |
| HFIXV93 | 172 | 597031 | AC010810 | 2350 | 1-452 |
| HFIXV93 | 172 | 597031 | AC016252 | 2351 | 1-3092 |
| | | | | | 3746-3853 |
| | | | | | 6998-7134 |
| | | | | | 7278-7767 |
| | | | | | 8926-9044 |
| | | | | | 9829-9973 |
| HFIXV93 | 172 | 597031 | AC010810 | 2352 | 1-960 |
| HFIXV93 | 172 | 597031 | AC016252 | 2353 | 1-308 |
| HFIXV93 | 172 | 597031 | AC016252 | 2354 | 1-479 |
| HFIXY13 | 173 | 656812 | AC020602 | 2355 | 1-350 |
| HFIXY13 | 173 | 656812 | AC020602 | 2356 | 1-372 |
| HFIXY13 | 173 | 656812 | AC020602 | 2357 | 1-1346 |
| HFIYA86 | 176 | 757155 | AF015722 | 2358 | 1-356 |
| HFIYA86 | 176 | 757155 | AF015720 | 2359 | 1-352 |
| HFIYA86 | 176 | 757155 | AF015722 | 2360 | 1-649 |
| | | | | | 1041-1647 |
| HFIYA86 | 176 | 757155 | AF015720 | 2361 | 1-649 |
| | | | | | 1048-1655 |
| HFIYB24 | 177 | 952847 | AL022724 | 2362 | 1-372 |
| HFIYB24 | 177 | 952847 | AL022724 | 2363 | 1-317 |
| HFIYB40 | 178 | 964251 | AC011940 | 2364 | 1-467 |
| HFIYB40 | 178 | 964251 | AC012207 | 2365 | 1-467 |
| HFIYB40 | 178 | 964251 | AC011940 | 2366 | 1-432 |
| HFIYB40 | 178 | 964251 | AC011940 | 2367 | 1-360 |
| HFIYB40 | 178 | 964251 | AC012207 | 2368 | 1-360 |
| HFIYB40 | 178 | 964251 | AC012207 | 2369 | 1-432 |
| HFIYK01 | 179 | 916125 | AC023112 | 2370 | 1-1779 |
| | | | | | 1794-2622 |
| HFIYK01 | 179 | 916125 | AC023112 | 2371 | 1-742 |
| HFIYO14 | 181 | 657598 | AL359915 | 2372 | 1-540 |
| HFIYO14 | 181 | 657598 | AL359915 | 2373 | 1-328 |
| HFIYO14 | 181 | 657598 | AL359915 | 2374 | 1-141 |
| HFIYP02 | 182 | 919501 | AC025118 | 2375 | 1-367 |
| HFIYP02 | 182 | 919501 | AL137818 | 2376 | 1-179 |
| | | | | | 1123-1340 |
| | | | | | 1965-2331 |
| | | | | | 2735-2862 |
| | | | | | 5533-5858 |
| | | | | | 6030-6163 |
| HFIYP02 | 182 | 919501 | AL137818 | 2377 | 1-167 |
| HFIYV59 | 185 | 861487 | AL031730 | 2378 | 1-134 |
| | | | | | 1650-1936 |
| HFIZH29 | 190 | 953895 | AC024472 | 2379 | 1-410 |
| HFIZH29 | 190 | 953895 | AC026552 | 2380 | 1-410 |
| HFIZH29 | 190 | 953895 | AC010257 | 2381 | 1-410 |
| HFIZM92 | 191 | 791267 | AL049844 | 2382 | 1-3525 |
| | | | | | 3602-4349 |
| | | | | | 4471-5141 |
| | | | | | 5317-7513 |
| HFIZM92 | 191 | 791267 | AL049844 | 2383 | 1-440 |
| HFOXA79 | 192 | 774901 | AC023855 | 2384 | 1-90 |
| | | | | | 326-1081 |
| | | | | | 1429-1924 |
| | | | | | 2176-2273 |
| | | | | | 2445-2800 |
| | | | | | 3200-3301 |
| | | | | | 3374-4826 |
| | | | | | 4855-5109 |
| | | | | | 5264-5930 |
| HFOXA79 | 192 | 774901 | AC004150 | 2385 | 1-448 |
| | | | | | 545-657 |
| | | | | | 996-1130 |
| | | | | | 1337-1559 |
| | | | | | 1863-2108 |
| | | | | | 4233-4445 |
| | | | | | 5134-5423 |
| | | | | | 5604-6004 |
| | | | | | 6095-6263 |
| | | | | | 7089-7233 |
| | | | | | 7673-7809 |
| | | | | | 8154-8277 |
| | | | | | 8976-9025 |
| | | | | | 9178-9286 |
| | | | | | 9464-9847 |
| | | | | | 10011-10070 |
| | | | | | 10156-10247 |
| | | | | | 10481-11236 |
| | | | | | 11584-12079 |
| | | | | | 12331-12431 |
| | | | | | 12600-12955 |
| | | | | | 13356-13457 |
| | | | | | 13530-14982 |
| | | | | | 15011-15265 |
| | | | | | 15420-16086 |
| HFOXA79 | 192 | 774901 | AC023855 | 2386 | 1-421 |
| HFOXA79 | 192 | 774901 | AC004150 | 2387 | 1-263 |
| | | | | | 353-526 |
| | | | | | 634-747 |
| HFOXA79 | 192 | 774901 | AC004150 | 2388 | 1-666 |
| | | | | | 892-1059 |
| | | | | | 1257-1378 |
| | | | | | 1574-1668 |
| | | | | | 2078-2186 |
| | | | | | 2497-3209 |
| | | | | | 4530-4716 |
| | | | | | 5099-5612 |
| | | | | | 5629-5808 |
| HFOXB85 | 193 | 752957 | AL133500 | 2389 | 1-945 |
| | | | | | 1307-1680 |
| | | | | | 1837-2397 |
| HFOXB85 | 193 | 752957 | AL135749 | 2390 | 1-682 |
| | | | | | 859-1679 |
| | | | | | 1836-2396 |
| HFOXC25 | 194 | 677995 | AC020749 | 2391 | 1-351 |
| HFOXC25 | 194 | 677995 | AC020749 | 2392 | 1-1056 |
| HFOXC35 | 195 | 638311 | AL138760 | 2393 | 1-228 |
| | | | | | 255-361 |
| | | | | | 370-683 |
| HFOXC35 | 195 | 638311 | AL138760 | 2394 | 1-442 |
| HFOXL03 | 197 | 923772 | AC024062 | 2395 | 1-468 |
| HFOXL03 | 197 | 923772 | AC019130 | 2396 | 1-468 |
| HFOXL03 | 197 | 923772 | AC024062 | 2397 | 1-423 |
| HFOXL03 | 197 | 923772 | AC019130 | 2398 | 1-423 |
| HFOXM54 | 198 | 587974 | AC046129 | 2399 | 1-435 |
| HFOXM54 | 198 | 587974 | AC016101 | 2400 | 1-435 |
| HFOXM54 | 198 | 587974 | AC064838 | 2401 | 1-435 |
| HFOXM54 | 198 | 587974 | AC046129 | 2402 | 1-750 |
| HFOXM54 | 198 | 587974 | AC016101 | 2403 | 1-750 |
| HFOXM54 | 198 | 587974 | AC064838 | 2404 | 1-750 |
| HFOXN89 | 199 | 587984 | AC034102 | 2405 | 1-128 |
| HFOXN89 | 199 | 587984 | AC025162 | 2406 | 1-109 |
| HFOXN89 | 199 | 587984 | AC034102 | 2407 | 1-128 |
| HFOXN89 | 199 | 587984 | AC025162 | 2408 | 1-128 |
| HFOXN89 | 199 | 587984 | AC034102 | 2409 | 1-2775 |
| | | | | | 2895-3382 |
| | | | | | 3790-4134 |
| | | | | | 4616-4957 |
| HFOXR28 | 201 | 587994 | AC013592 | 2410 | 1-325 |
| HFOXR28 | 201 | 587994 | AC016934 | 2411 | 1-325 |
| HFOXU83 | 204 | 887781 | AL359927 | 2412 | 1-649 |
| HFOXU83 | 204 | 887781 | AC018373 | 2413 | 1-649 |
| HFOXU83 | 204 | 887781 | AL359927 | 2414 | 1-604 |
| HFOXU83 | 204 | 887781 | AC018373 | 2415 | 1-604 |
| HFOXU92 | 205 | 588057 | AC013692 | 2416 | 1-380 |
| HFOXU92 | 205 | 588057 | AC021342 | 2417 | 1-380 |
| HFOXU92 | 205 | 588057 | AC021342 | 2418 | 1-370 |
| HFOXV15 | 206 | 964296 | AC007342 | 2419 | 1-143 |
| | | | | | 238-638 |
| | | | | | 1310-2178 |
| | | | | | 2722-2877 |
| | | | | | 2931-3044 |
| | | | | | 3725-3818 |
| | | | | | 4666-4871 |
| | | | | | 5915-6211 |
| | | | | | 7936-8000 |
| | | | | | 8089-8189 |
| | | | | | 8657-8746 |
| | | | | | 8826-8896 |
| | | | | | 9017-9124 |
| | | | | | 10331-10569 |
| | | | | | 10740-13141 |
| | | | | | 13431-14033 |
| | | | | | 14501-14965 |
| | | | | | 15153-16043 |
| | | | | | 18258-18823 |
| | | | | | 19372-19907 |
| | | | | | 20059-21591 |
| | | | | | 22493-22695 |
| | | | | | 23271-23379 |
| | | | | | 24039-24110 |
| | | | | | 24582-24699 |
| HFOYI36 | 208 | 935532 | AL357565 | 2420 | 1-489 |
| HFOYI36 | 208 | 935532 | AL357565 | 2421 | 1-693 |
| HFOYL77 | 209 | 494844 | AC068103 | 2422 | 1-353 |
| HFOYL77 | 209 | 494844 | AC016487 | 2423 | 1-353 |
| HFOYL77 | 209 | 494844 | AC020669 | 2424 | 1-353 |
| HMUBM26 | 210 | 908912 | AC008555 | 2425 | 1-124 |
| | | | | | 788-1221 |
| | | | | | 1332-2004 |
| | | | | | 2074-4006 |
| HMUBM26 | 210 | 908912 | AC008555 | 2426 | 1-194 |
| HOAAB15 | 213 | 575254 | AC073970 | 2427 | 1-348 |
| HOAAB15 | 213 | 575254 | AC015909 | 2428 | 1-516 |
| | | | | | 865-1153 |
| | | | | | 1381-1669 |
| | | | | | 4707-4818 |
| | | | | | 5309-5534 |
| | | | | | 5726-6148 |
| | | | | | 6454-6533 |
| | | | | | 8810-8836 |
| | | | | | 9053-9813 |
| | | | | | 10575-10603 |
| | | | | | 10889-11099 |
| | | | | | 11988-12127 |
| | | | | | 12668-12869 |
| | | | | | 13224-13274 |
| HOAAB15 | 213 | 575254 | AC073970 | 2429 | 1-289 |
| HOAAB15 | 213 | 575254 | AC015909 | 2430 | 1-106 |
| HOAAB42 | 214 | 530605 | AC008013 | 2431 | 1-106 |
| | | | | | 220-357 |
| | | | | | 575-1050 |
| | | | | | 1060-1459 |
| | | | | | 3153-3870 |
| | | | | | 3965-4359 |
| | | | | | 4392-4496 |
| | | | | | 4756-4977 |
| | | | | | 5025-5078 |
| | | | | | 5198-5418 |
| | | | | | 5593-5895 |
| | | | | | 6301-6763 |
| | | | | | 6941-8173 |
| | | | | | 8913-9547 |
| | | | | | 9927-10355 |
| | | | | | 10651-11058 |
| | | | | | 11461-11749 |
| HOAAB42 | 214 | 530605 | AC009533 | 2432 | 1-221 |
| | | | | | 367-759 |
| | | | | | 1212-1606 |
| | | | | | 3182-3992 |
| | | | | | 4509-4666 |
| | | | | | 4820-4982 |
| | | | | | 5711-5948 |
| | | | | | 7122-7382 |
| | | | | | 7953-8576 |
| | | | | | 8722-9484 |
| | | | | | 9977-10227 |
| | | | | | 10746-10834 |
| | | | | | 11133-11288 |
| | | | | | 11304-11966 |
| | | | | | 12156-12572 |
| | | | | | 14044-14140 |
| | | | | | 14735-15547 |
| | | | | | 15575-16138 |
| | | | | | 16472-16862 |
| | | | | | 17405-17560 |
| | | | | | 18541-18589 |
| | | | | | 18938-19448 |
| | | | | | 20178-20525 |
| | | | | | 21420-21971 |
| | | | | | 22037-22073 |
| | | | | | 22331-22434 |
| | | | | | 22548-22685 |
| | | | | | 22842-23316 |
| | | | | | 23334-23726 |
| | | | | | 25414-26133 |
| | | | | | 26228-26338 |
| | | | | | 26375-26622 |
| | | | | | 26657-26756 |
| | | | | | 27017-27239 |
| | | | | | 27287-27340 |
| | | | | | 27456-27676 |
| | | | | | 27850-28149 |
| | | | | | 28593-28639 |
| | | | | | 28670-29013 |
| | | | | | 29189-29345 |
| | | | | | 29359-30420 |
| HOAAB42 | 214 | 530605 | AC008013 | 2433 | 1-751 |
| | | | | | 869-1288 |
| | | | | | 1741-2134 |
| | | | | | 3713-4192 |
| | | | | | 4219-4525 |
| | | | | | 5032-5188 |
| | | | | | 6221-6459 |
| | | | | | 7627-7887 |
| | | | | | 8458-9081 |
| | | | | | 9227-9966 |
| | | | | | 10464-10713 |
| | | | | | 11232-11320 |
| | | | | | 11620-11777 |
| | | | | | 11791-12453 |
| | | | | | 12643-13059 |
| | | | | | 14536-14632 |
| | | | | | 15693-16508 |
| | | | | | 16536-17099 |
| | | | | | 17433-17823 |
| | | | | | 18365-18520 |
| | | | | | 19494-19542 |
| | | | | | 19895-20386 |
| | | | | | 20452-21075 |
| | | | | | 21128-21475 |
| | | | | | 22370-22928 |
| | | | | | 22994-23030 |
| HOAAB42 | 214 | 530605 | AC008013 | 2434 | 1-418 |
| HOAAB42 | 214 | 530605 | AC009533 | 2435 | 1-636 |
| HOAAB56 | 215 | 507839 | AC026519 | 2436 | 1-363 |
| HOAAB56 | 215 | 507839 | AP001026 | 2437 | 1-363 |
| HOAAB56 | 215 | 507839 | AP001026 | 2438 | 1-89 |
| HOAAB56 | 215 | 507839 | AP001026 | 2439 | 1-419 |
| HOAAC31 | 216 | 693597 | AC069475 | 2440 | 1-557 |
| | | | | | 813-1462 |
| HOAAC31 | 216 | 693597 | AL137060 | 2441 | 1-557 |
| | | | | | 813-1462 |
| HOAAC31 | 216 | 693597 | AC069475 | 2442 | 1-398 |
| HOAAD52 | 218 | 859628 | AC044917 | 2443 | 1-319 |
| HOAAD52 | 218 | 859628 | AC023090 | 2444 | 1-319 |
| HOAAD52 | 218 | 859628 | AP001908 | 2445 | 1-319 |
| HOAAD52 | 218 | 859628 | AC023090 | 2246 | 1-448 |
| HOAAD52 | 218 | 859628 | AP001908 | 2447 | 1-443 |
| HOAAD52 | 218 | 859628 | AC044917 | 2448 | 1-450 |
| HOAAE10 | 219 | 968532 | AC016802 | 2449 | 1-324 |
| HOAAE10 | 219 | 968532 | AC016802 | 2450 | 1-462 |
| HOAAE49 | 221 | 859630 | AL138963 | 2451 | 1-304 |
| HOAAE49 | 221 | 859630 | AL138963 | 2452 | 1-383 |
| HOAAE73 | 222 | 960631 | AC022400 | 2453 | 1-939 |
| | | | | | 945-1386 |
| | | | | | 2105-2440 |
| | | | | | 2574-2794 |
| | | | | | 2935-3532 |
| | | | | | 3940-4305 |
| | | | | | 4483-6016 |
| | | | | | 6421-6829 |
| | | | | | 7089-9122 |
| HOAAE73 | 222 | 960631 | AC021320 | 2454 | 1-462 |
| | | | | | 464-587 |
| | | | | | 1007-1360 |
| | | | | | 1538-2418 |
| | | | | | 2450-3078 |
| | | | | | 3474-3779 |
| | | | | | 3854-4068 |
| | | | | | 4130-6114 |
| HOAAE73 | 222 | 960631 | AC012044 | 2455 | 1-956 |
| | | | | | 1025-1096 |
| | | | | | 1451-1600 |
| | | | | | 1640-2005 |
| | | | | | 3280-3518 |
| | | | | | 3840-4065 |
| | | | | | 4611-4921 |
| | | | | | 5754-6678 |
| | | | | | 7938-8584 |
| | | | | | 8639-8910 |
| | | | | | 10151-10355 |
| | | | | | 11341-11941 |
| | | | | | 12710-13025 |
| | | | | | 15001-15745 |
| | | | | | 15751-16194 |
| | | | | | 16911-17246 |
| | | | | | 17380-17600 |
| | | | | | 17741-18337 |
| | | | | | 18768-19114 |
| | | | | | 19292-20172 |
| | | | | | 20207-20833 |
| | | | | | 21241-21551 |
| | | | | | 21626-21839 |
| | | | | | 21901-23934 |
| HOAAE73 | 222 | 960631 | AC025039 | 2456 | 1-311 |
| HOAAE73 | 222 | 960631 | AC018510 | 2457 | 1-727 |
| | | | | | 747-1177 |
| | | | | | 1908-2243 |
| | | | | | 2377-2597 |
| | | | | | 2739-3200 |
| | | | | | 3202-3325 |
| | | | | | 3745-4098 |
| | | | | | 4276-5156 |
| | | | | | 5188-5816 |
| | | | | | 6212-6517 |
| | | | | | 6592-6806 |
| | | | | | 6868-8900 |
| HOAAE73 | 222 | 960631 | AC021320 | 2458 | 1-221 |
| HOAAE73 | 222 | 960631 | AC022400 | 2459 | 1-413 |
| HOAAE73 | 222 | 960631 | AC012044 | 2460 | 1-1577 |
| | | | | | 1604-2003 |
| | | | | | 2074-2569 |
| | | | | | 3689-4774 |
| | | | | | 4791-5120 |
| | | | | | 5331-5822 |
| | | | | | 5884-10583 |
| | | | | | 10603-10867 |
| | | | | | 11401-12562 |
| HOAAE73 | 222 | 960631 | AC025039 | 2461 | 1-209 |
| HOAAE73 | 222 | 960631 | AC018510 | 2462 | 1-474 |
| HOAAF18 | 223 | 530600 | AC008130 | 2463 | 1-357 |
| HOAAF18 | 223 | 530600 | AC022529 | 2464 | 1-355 |
| HOAAF18 | 223 | 530600 | AC005289 | 2465 | 1-357 |
| HOAAF18 | 223 | 530600 | AC008130 | 2466 | 1-327 |
| HOAAF18 | 223 | 530600 | AC022529 | 2467 | 1-327 |
| HOAAF18 | 223 | 530600 | AC005289 | 2468 | 1-327 |
| HOAAH10 | 224 | 968368 | AC009560 | 2469 | 1-606 |
| HOAAH10 | 224 | 968368 | AC012344 | 2470 | 1-606 |
| HOAAH10 | 224 | 968368 | AC009560 | 2471 | 1-361 |
| HOAAH10 | 224 | 968368 | AC012344 | 2472 | 1-361 |
| HOAAI05 | 225 | 932537 | AC008923 | 2473 | 1-304 |
| HOAAI05 | 225 | 932537 | AC008799 | 2474 | 1-304 |
| HOAAI05 | 225 | 932537 | AC008923 | 2475 | 1-306 |
| | | | | | 609-1254 |
| HOAAI05 | 225 | 932537 | AC008799 | 2476 | 1-306 |
| | | | | | 608-1253 |
| HOAAJ23 | 226 | 531389 | AC025698 | 2477 | 1-299 |
| HOAAJ23 | 226 | 531389 | AC013720 | 2478 | 1-299 |
| HOAAJ23 | 226 | 531389 | AC025698 | 2479 | 1-183 |
| HOAAJ23 | 226 | 531389 | AC013720 | 2480 | 1-105 |
| HOAAK90 | 227 | 527490 | AL359841 | 2481 | 1-285 |
| HOAAK90 | 227 | 527490 | AL390314 | 2482 | 1-285 |
| HOAAK90 | 227 | 527490 | AC025122 | 2483 | 1-285 |
| HOAAK90 | 227 | 527490 | AL390314 | 2484 | 1-185 |
| HOAAK90 | 227 | 527490 | AL359841 | 2485 | 1-129 |
| HOAAK90 | 227 | 527490 | AL390314 | 2486 | 1-129 |
| HOAAK90 | 227 | 527490 | AC025122 | 2487 | 1-129 |
| HOAAK90 | 227 | 527490 | AC025122 | 2488 | 1-185 |
| HOAAR14 | 229 | 526530 | AC073119 | 2489 | 1-270 |
| HOAAR14 | 229 | 526530 | AC027262 | 2490 | 1-270 |
| HOAAR14 | 229 | 526530 | AC073119 | 2491 | 1-540 |
| HOAAR14 | 229 | 526530 | AC027262 | 2492 | 1-273 |
| HOAAR14 | 229 | 526530 | AC073119 | 2493 | 1-273 |
| HOAAR14 | 229 | 526530 | AC027262 | 2494 | 1-540 |
| HOAAV23 | 230 | 527489 | AC034291 | 2495 | 1-301 |
| HOAAV23 | 230 | 527489 | AC034291 | 2496 | 1-422 |
| HOAAW21 | 231 | 527487 | AL357873 | 2497 | 1-362 |
| HOABA93 | 234 | 792929 | AC013335 | 2498 | 1-203 |
| HOABA93 | 234 | 792929 | AC013774 | 2499 | 1-203 |
| HOABR40 | 238 | 531051 | AC018603 | 2500 | 1-364 |
| HOABR40 | 238 | 531051 | AC018603 | 2501 | 1-504 |
| HOABR40 | 238 | 531051 | AC018603 | 2502 | 1-166 |
| HOEAK21 | 239 | 954961 | AC073936 | 2503 | 1-411 |
| HOEAY14 | 240 | 659258 | AC011597 | 2504 | 1-352 |
| HOEAY14 | 240 | 659258 | AC067726 | 2505 | 1-352 |
| HOEAY14 | 240 | 659258 | AC074266 | 2506 | 1-352 |
| HOEAY14 | 240 | 659258 | AC011597 | 2507 | 1-251 |
| HOEAY14 | 240 | 659258 | AC067726 | 2508 | 1-180 |
| HOEAY14 | 240 | 659258 | AC074266 | 2509 | 1-252 |
| HOEBO31 | 242 | 693689 | AL158165 | 2510 | 1-1964 |
| | | | | | 2375-2812 |
| | | | | | 3098-3532 |
| | | | | | 3563-3705 |
| HOEBO31 | 242 | 693689 | AL158165 | 2511 | 1-432 |
| HOEBO31 | 242 | 693689 | AL158165 | 2512 | 1-324 |
| HOECN79 | 244 | 723113 | AC015671 | 2513 | 1-719 |
| HOECN79 | 244 | 723113 | AL157936 | 2514 | 1-719 |
| HOECN79 | 244 | 723113 | AC015671 | 2515 | 1-315 |
| HOECN79 | 244 | 723113 | AL157936 | 2516 | 1-635 |
| HOEDD83 | 247 | 578934 | AC013746 | 2517 | 1-484 |
| HOEDK10 | 248 | 915054 | AC012531 | 2518 | 1-90 |
| | | | | | 532-796 |
| HOEDK10 | 248 | 915054 | AC015947 | 2519 | 1-75 |
| | | | | | 547-793 |
| | | | | | 1103-1159 |
| | | | | | 1234-1498 |
| | | | | | 1641-2181 |
| | | | | | 2468-2930 |
| HOEDK10 | 248 | 915054 | AC012531 | 2520 | 1-610 |
| | | | | | 2290-3222 |
| HOEEB63 | 252 | 745039 | AC010319 | 2521 | 1-135 |
| | | | | | 225-514 |
| | | | | | 639-710 |
| | | | | | 1067-1542 |
| | | | | | 2023-2119 |
| | | | | | 2159-2299 |
| HOEEB63 | 252 | 745039 | AC010319 | 2522 | 1-323 |
| | | | | | 1105-1205 |
| | | | | | 1282-1400 |
| HOEEB63 | 252 | 745039 | AC010319 | 2523 | 1-104 |
| HOEEQ17 | 255 | 663719 | AC074333 | 2524 | 1-458 |
| HOEFL91 | 257 | 790134 | AL049830 | 2525 | 1-123 |
| | | | | | 262-720 |
| HOEFL91 | 257 | 790134 | AL049830 | 2526 | 1-1002 |
| | | | | | 1026-1232 |
| | | | | | 4208-4825 |
| | | | | | 4861-5260 |
| | | | | | 5409-5634 |
| | | | | | 5942-6155 |
| | | | | | 8211-8327 |
| | | | | | 8673-8926 |
| | | | | | 9876-10034 |
| | | | | | 10125-10164 |
| | | | | | 11131-11196 |
| | | | | | 11675-11807 |
| | | | | | 12890-13048 |
| | | | | | 15640-16084 |
| HOEFL91 | 257 | 790134 | AL049830 | 2527 | 1-110 |
| HOEFS83 | 259 | 615154 | AC007643 | 2528 | 1-471 |
| HOEFS83 | 259 | 615154 | AL353719 | 2529 | 1-2879 |
| | | | | | 3337-3596 |
| | | | | | 4213-4851 |
| | | | | | 5160-5630 |
| | | | | | 5674-5732 |
| | | | | | 6291-6472 |
| | | | | | 6504-6660 |
| HOEFS83 | 259 | 615154 | AL133353 | 2530 | 1-200 |
| | | | | | 456-609 |
| | | | | | 5860-5998 |
| | | | | | 6526-6629 |
| | | | | | 8425-8724 |
| | | | | | 9151-9625 |
| | | | | | 12117-12252 |
| | | | | | 15026-15571 |
| | | | | | 15654-16121 |
| | | | | | 16221-16852 |
| | | | | | 19264-19592 |
| | | | | | 21596-21794 |
| | | | | | 22707-22795 |
| | | | | | 23248-23407 |
| | | | | | 23487-23890 |
| | | | | | 25183-26429 |
| | | | | | 26561-27890 |
| | | | | | 28380-28908 |
| | | | | | 28953-29430 |
| | | | | | 29490-32385 |
| | | | | | 32577-35455 |
| | | | | | 36789-37427 |
| | | | | | 37736-38206 |
| | | | | | 38250-38308 |
| | | | | | 38867-39048 |
| | | | | | 39075-39236 |
| | | | | | 39491-39811 |
| | | | | | 39971-40302 |
| | | | | | 40401-40871 |
| | | | | | 41105-41186 |
| | | | | | 41719-41801 |
| | | | | | 43440-43567 |
| | | | | | 43732-44141 |
| | | | | | 44689-44855 |
| | | | | | 46395-46619 |
| | | | | | 47357-46743 |
| | | | | | 47700-47887 |
| | | | | | 48174-48294 |
| | | | | | 48469-48728 |
| | | | | | 50284-50469 |
| | | | | | 52382-52845 |
| HOEFS83 | 259 | 615154 | AC007643 | 2531 | 1-639 |
| HOEFS83 | 259 | 615154 | AL353719 | 2532 | 1-321 |
| HOEFS83 | 259 | 615154 | AC007643 | 2533 | 1-182 |
| HOEFS83 | 259 | 615154 | AL353719 | 2534 | 1-2069 |
| HOEFS83 | 259 | 615154 | AL133353 | 2535 | 1-303 |
| HOEFS83 | 259 | 615154 | AL133353 | 2536 | 1-222 |
| | | | | | 225-361 |
| | | | | | 2796-2928 |
| | | | | | 4044-4119 |
| | | | | | 5719-5962 |
| | | | | | 7512-7571 |
| | | | | | 10952-11165 |
| | | | | | 11840-11870 |
| | | | | | 15055-15191 |
| | | | | | 17157-17497 |
| | | | | | 18170-18193 |
| | | | | | 19594-20180 |
| | | | | | 20819-21289 |
| | | | | | 21499-22434 |
| | | | | | 22520-23934 |
| HOEJE18 | 260 | 666349 | AC025788 | 2537 | 1-325 |
| HOEJE18 | 260 | 666349 | AC026250 | 2538 | 1-325 |
| HOEKH88 | 263 | 924112 | AL355924 | 2539 | 1-200 |
| | | | | | 253-1224 |
| | | | | | 1241-1709 |
| HOEKP79 | 265 | 963337 | AC007643 | 2540 | 1-471 |
| HOEKP79 | 265 | 963337 | AL133353 | 2541 | 1-464 |
| | | | | | 2377-2562 |
| | | | | | 4118-4377 |
| | | | | | 4552-4672 |
| | | | | | 4959-5146 |
| | | | | | 5203-5489 |
| | | | | | 6227-6451 |
| | | | | | 7991-8157 |
| | | | | | 8705-9114 |
| | | | | | 9279-9406 |
| | | | | | 11045-11127 |
| | | | | | 11660-11741 |
| | | | | | 11975-12445 |
| | | | | | 12544-12875 |
| | | | | | 13035-13355 |
| | | | | | 13610-13771 |
| | | | | | 13798-13979 |
| | | | | | 14538-14596 |
| | | | | | 14640-15110 |
| | | | | | 15419-16057 |
| | | | | | 17391-20269 |
| | | | | | 20461-23356 |
| | | | | | 23416-23893 |
| | | | | | 23938-24466 |
| | | | | | 24956-26285 |
| | | | | | 26417-27663 |
| | | | | | 28956-29359 |
| | | | | | 29439-29598 |
| | | | | | 30051-30139 |
| | | | | | 31052-31250 |
| | | | | | 33254-33582 |
| | | | | | 35994-36625 |
| | | | | | 36725-37192 |
| | | | | | 37275-37820 |
| | | | | | 40594-40729 |
| | | | | | 43221-43695 |
| | | | | | 44122-44421 |
| | | | | | 46217-46320 |
| | | | | | 46848-46986 |
| | | | | | 52237-52390 |
| | | | | | 52646-52845 |
| HOEKP79 | 265 | 963337 | AC007643 | 2542 | 1-332 |
| HOEKP79 | 265 | 963337 | AL133353 | 2543 | 1-303 |
| HOEKP79 | 265 | 963337 | AL133353 | 2544 | 1-1415 |
| | | | | | 1501-2436 |
| | | | | | 2646-3116 |
| | | | | | 3755-4341 |
| | | | | | 5742-5765 |
| | | | | | 6438-6778 |
| | | | | | 8744-8880 |
| | | | | | 12065-12095 |
| | | | | | 12770-12983 |
| | | | | | 16364-16423 |
| | | | | | 17973-18216 |
| | | | | | 19816-19891 |
| | | | | | 21007-21139 |
| | | | | | 23574-23710 |
| | | | | | 23713-23934 |
| HOEMK02 | 267 | 918364 | AC044789 | 2545 | 1-720 |
| HOEMQ65 | 268 | 922789 | AC019142 | 2546 | 1-435 |
| HOEMQ65 | 268 | 922789 | AC019142 | 2547 | 1-461 |
| HOEMQ65 | 268 | 922789 | AC019142 | 2548 | 1-422 |
| HOEOE25 | 269 | 907806 | AC018850 | 2549 | 1-599 |
| HOEOE25 | 269 | 907806 | AC012342 | 2550 | 1-599 |
| HOEOE25 | 269 | 907806 | AC018850 | 2551 | 1-197 |
| HOEOE25 | 269 | 907806 | AC012342 | 2552 | 1-198 |
| HOHAE68 | 273 | 781448 | AC023504 | 2553 | 1-1578 |
| HOHBE48 | 275 | 588317 | AC023449 | 2554 | 1-385 |
| HOHBE48 | 275 | 588317 | AC023449 | 2555 | 1-219 |
| HOHBE48 | 275 | 588317 | AC023449 | 2556 | 1-322 |
| HOHBL11 | 277 | 966720 | AC020708 | 2557 | 1-477 |
| HOHBO79 | 279 | 588271 | AC022677 | 2558 | 1-439 |
| HOHBO79 | 279 | 588271 | AL136126 | 2559 | 1-439 |
| HOHBO79 | 279 | 588271 | AC022677 | 2560 | 1-131 |
| HOHBO79 | 279 | 588271 | AC022677 | 2561 | 1-359 |
| HOHBO79 | 279 | 588271 | AL136126 | 2562 | 1-131 |
| HOHBO79 | 279 | 588271 | AL136126 | 2563 | 1-351 |
| HOHBY75 | 282 | 840109 | AC009708 | 2564 | 1-616 |
| HOHBY75 | 282 | 840109 | AC021004 | 2565 | 1-1236 |
| HOHBY75 | 282 | 840109 | AC021004 | 2566 | 1-47 |
| | | | | | 2450-2628 |
| | | | | | 4538-5196 |
| HOHCH04 | 283 | 859047 | AC024677 | 2567 | 1-27 |
| | | | | | 1762-1878 |
| | | | | | 2480-3110 |
| | | | | | 3124-3541 |
| | | | | | 3681-3783 |
| HOHCH04 | 283 | 859047 | AC027166 | 2568 | 1-631 |
| HOHCH04 | 283 | 859047 | AL355492 | 2569 | 1-27 |
| | | | | | 1762-1878 |
| | | | | | 2480-3110 |
| | | | | | 3124-3541 |
| | | | | | 3681-3783 |
| HOHCH04 | 283 | 859047 | AC024677 | 2570 | 1-327 |
| HOHCH04 | 283 | 859047 | AC027166 | 2571 | 1-418 |
| HOHCH04 | 283 | 859047 | AL355492 | 2572 | 1-83 |
| | | | | | 1649-1839 |
| | | | | | 5074-5151 |
| HOHCI05 | 284 | 935123 | AL356427 | 2573 | 1-393 |
| HOHCI05 | 284 | 935123 | AL121931 | 2574 | 1-393 |
| HOHCO85 | 287 | 751299 | AL354664 | 2575 | 1-149 |
| | | | | | 867-1007 |
| | | | | | 3589-3733 |
| | | | | | 3850-4492 |
| | | | | | 4600-4734 |
| | | | | | 4976-5005 |
| HOHCO85 | 287 | 751299 | AL353703 | 2576 | 1-149 |
| | | | | | 867-1007 |
| | | | | | 3588-3732 |
| | | | | | 3849-4491 |
| | | | | | 4599-4733 |
| | | | | | 4976-5005 |
| HOHCO85 | 287 | 751299 | AL096771 | 2577 | 1-149 |
| | | | | | 867-1007 |
| | | | | | 3589-3733 |
| | | | | | 3850-4492 |
| | | | | | 4600-4734 |
| | | | | | 4976-5005 |
| HOHCO85 | 287 | 751299 | AL354664 | 2578 | 1-588 |
| HOHCO85 | 287 | 751299 | AL353703 | 2579 | 1-588 |
| HOHCO85 | 287 | 751299 | AL096771 | 2580 | 1-588 |
| HOHCQ76 | 289 | 825236 | AL161454 | 2581 | 1-698 |
| HOHCQ76 | 289 | 825236 | AL161454 | 2582 | 1-499 |
| | | | | | 1477-1593 |
| | | | | | 2237-2547 |
| HOHCQ77 | 290 | 661480 | AP000274 | 2583 | 1-381 |
| HOHCQ77 | 290 | 661480 | AP000104 | 2584 | 1-381 |
| HOHCQ77 | 290 | 661480 | AP000180 | 2585 | 1-381 |
| HOHCQ77 | 290 | 661480 | AP000274 | 2586 | 1-888 |
| HOHCQ77 | 290 | 661480 | AP000104 | 2587 | 1-888 |
| HOHCQ77 | 290 | 661480 | AP000180 | 2588 | 1-888 |
| HOHCV83 | 291 | 735685 | AC010321 | 2589 | 1-425 |
| HOHCV83 | 291 | 735685 | AC010321 | 2590 | 1-114 |
| HOHCW02 | 292 | 919142 | AC036174 | 2591 | 1-299 |
| HOHCW02 | 292 | 919142 | AC036174 | 2592 | 1-210 |
| HOHCW02 | 292 | 919142 | AC036174 | 2593 | 1-88 |
| HOHDB32 | 294 | 698781 | AC016724 | 2594 | 1-308 |
| HOHDF40 | 296 | 710748 | AL139021 | 2595 | 1-162 |
| | | | | | 4326-4476 |
| | | | | | 6562-6730 |
| | | | | | 6974-7075 |
| | | | | | 9334-9459 |
| | | | | | 12688-12802 |
| | | | | | 13427-13516 |
| | | | | | 13743-13821 |
| HOHDF40 | 296 | 710748 | AL135752 | 2596 | 1-162 |
| | | | | | 766-1091 |
| | | | | | 4330-4480 |
| | | | | | 6567-6735 |
| | | | | | 6972-7127 |
| | | | | | 7762-7921 |
| | | | | | 9338-9463 |
| | | | | | 12686-12800 |
| | | | | | 13414-13546 |
| | | | | | 13741-13819 |
| HOHDF53 | 297 | 727620 | AL355052 | 2597 | 1-479 |
| HOHDI48 | 298 | 966379 | AF233070 | 2598 | 1-264 |
| HOHDI48 | 298 | 966379 | AF233070 | 2599 | 1-952 |
| HOHEN50 | 303 | 662365 | AL161784 | 2600 | 1-165 |
| HOHEN50 | 303 | 662365 | AC011969 | 2601 | 1-165 |
| HOHEN50 | 303 | 662365 | AC006558 | 2602 | 1-165 |
| HOHEN50 | 303 | 662365 | AL161784 | 2603 | 1-311 |
| HOHEN50 | 303 | 662365 | AC011969 | 2604 | 1-311 |
| HOHEN50 | 303 | 662365 | AC011969 | 2605 | 1-44 |
| | | | | | 1982-2321 |
| | | | | | 2357-3841 |
| | | | | | 3894-4365 |
| | | | | | 4783-5157 |
| HOHEN50 | 303 | 662365 | AC006558 | 2606 | 1-312 |
| HOHEN50 | 303 | 662365 | AC006558 | 2607 | 1-44 |
| | | | | | 2087-2223 |
| | | | | | 2263-2345 |
| | | | | | 2381-2834 |
| | | | | | 3157-3876 |
| | | | | | 3929-4400 |
| | | | | | 4822-5199 |
| HOSBV22 | 309 | 780092 | AL354751 | 2608 | 1-772 |
| HOSBV22 | 309 | 780092 | AL354751 | 2609 | 1-363 |
| HOSBV22 | 309 | 780092 | AL354751 | 2610 | 1-104 |
| HOSCM15 | 312 | 921336 | AC023283 | 2611 | 1-1174 |
| HOSCM15 | 312 | 921336 | AC023283 | 2612 | 1-248 |
| | | | | | 328-619 |
| HOSCM15 | 312 | 921336 | AC023283 | 2613 | 1-679 |
| HOSDE63 | 314 | 580959 | AC073611 | 2614 | 1-214 |
| | | | | | 411-670 |
| HOSDE63 | 314 | 580959 | AC021103 | 2615 | 1-477 |
| | | | | | 3144-3537 |
| HOSDE63 | 314 | 580959 | AC073611 | 2616 | 1-358 |
| | | | | | 742-1100 |
| | | | | | 1213-2219 |
| | | | | | 2906-2963 |
| | | | | | 3180-3361 |
| HOSDE63 | 314 | 580959 | AC021103 | 2617 | 1-311 |
| HOSDN27 | 316 | 530459 | AL121894 | 2618 | 1-718 |
| HOSDN27 | 316 | 530459 | AL121894 | 2619 | 1-1248 |
| HOSEB61 | 317 | 741812 | AL049781 | 2620 | 1-1283 |
| HOSEB61 | 317 | 741812 | AL049781 | 2621 | 1-309 |
| HOSEM84 | 318 | 831049 | AC021980 | 2622 | 1-509 |
| | | | | | 614-987 |
| | | | | | 1027-2228 |
| | | | | | 2279-3074 |
| | | | | | 3162-3379 |
| HOSEM84 | 318 | 831049 | AC007383 | 2623 | 1-1268 |
| | | | | | 3461-3535 |
| | | | | | 3629-3768 |
| | | | | | 4716-4911 |
| | | | | | 7009-7195 |
| | | | | | 7458-7577 |
| | | | | | 9862-10536 |
| | | | | | 13314-13528 |
| | | | | | 13695-13799 |
| | | | | | 13862-14171 |
| | | | | | 15401-15594 |
| | | | | | 17534-17648 |
| | | | | | 18187-18300 |
| | | | | | 18863-18991 |
| | | | | | 19607-19754 |
| | | | | | 20941-21056 |
| | | | | | 21814-21953 |
| | | | | | 23800-24012 |
| | | | | | 24451-24585 |
| | | | | | 24674-24759 |
| | | | | | 25941-26016 |
| | | | | | 26734-26846 |
| | | | | | 27836-28282 |
| | | | | | 28454-28791 |
| | | | | | 28794-28910 |
| | | | | | 29003-29585 |
| | | | | | 30139-30525 |
| | | | | | 30540-30606 |
| | | | | | 30873-31831 |
| | | | | | 32925-33206 |
| | | | | | 35019-35447 |
| | | | | | 35904-36391 |
| | | | | | 36475-36983 |
| | | | | | 37087-37460 |
| | | | | | 37500-38466 |
| | | | | | 38662-38692 |
| | | | | | 38752-39547 |
| | | | | | 39635-39852 |
| HOSEM84 | 318 | 831049 | AC021980 | 2624 | 1-444 |
| HOSEM84 | 318 | 831049 | AC021980 | 2625 | 1-443 |
| HOSEM84 | 318 | 831049 | AC007383 | 2626 | 1-2585 |
| HOSFO57 | 319 | 736034 | AC073334 | 2627 | 1-325 |
| HOSFO57 | 319 | 736034 | AC073334 | 2628 | 1-562 |
| HOSFO57 | 319 | 736034 | AC073334 | 2629 | 1-95 |
| | | | | | 232-346 |
| HOSFY79 | 321 | 774052 | AC018977 | 2630 | 1-401 |
| HOSFY79 | 321 | 774052 | AC018977 | 2631 | 1-2343 |
| HOSFZ39 | 322 | 705351 | AC055117 | 2632 | 1-411 |
| HOSFZ39 | 322 | 705351 | AC 55117 | 2633 | 1-245 |
| HOSGH28 | 323 | 686649 | AC068531 | 2634 | 1-2365 |
| | | | | | 2457-2668 |
| | | | | | 2911-3285 |
| | | | | | 3553-3980 |
| | | | | | 4160-4543 |
| HOSGH28 | 323 | 686649 | AC008630 | 2635 | 1-139 |
| | | | | | 1963-1988 |
| | | | | | 2524-4898 |
| | | | | | 4990-5210 |
| | | | | | 5444-5815 |
| | | | | | 6084-6515 |
| HOSGH28 | 323 | 686649 | AC068531 | 2636 | 1-141 |
| HOSGH28 | 323 | 686649 | AC008630 | 2637 | 1-423 |
| HOSGJ17 | 324 | 508870 | AC068234 | 2638 | 1-1143 |
| | | | | | 2745-3406 |
| HOSGJ17 | 324 | 508870 | AC068234 | 2639 | 1-333 |
| HOSNO86 | 326 | 858938 | AC009644 | 2640 | 1-176 |
| | | | | | 2355-3224 |
| HOSNO86 | 326 | 858938 | AP000904 | 2641 | 1-176 |
| | | | | | 2354-3223 |
| HOSNO86 | 326 | 858938 | AP002811 | 2642 | 1-176 |
| | | | | | 2354-3223 |
| HOSOE05 | 327 | 930946 | AC024400 | 2643 | 1-482 |
| HOSOE05 | 327 | 930946 | AC022059 | 2644 | 1-479 |
| HOSOE05 | 327 | 930946 | AC006512 | 2645 | 1-247 |
| | | | | | 2812-2918 |
| | | | | | 3488-3953 |
| | | | | | 3964-4527 |
| | | | | | 4683-5151 |
| | | | | | 5330-9121 |
| | | | | | 9884-10335 |
| | | | | | 10748-10781 |
| | | | | | 10960-11055 |
| | | | | | 11323-12111 |
| | | | | | 12127-12791 |
| | | | | | 12911-13262 |
| | | | | | 13266-13791 |
| | | | | | 14696-14866 |
| | | | | | 15107-15207 |
| | | | | | 16551-16955 |
| | | | | | 17174-17614 |
| | | | | | 18504-18749 |
| | | | | | 19392-19660 |
| | | | | | 19720-20075 |
| | | | | | 20785-21233 |
| | | | | | 21290-21733 |
| | | | | | 23618-23649 |
| | | | | | 23982-24188 |
| | | | | | 24481-24573 |
| | | | | | 24741-25003 |
| | | | | | 26591-26705 |
| | | | | | 26738-27249 |
| | | | | | 28479-28858 |
| | | | | | 29065-31669 |
| | | | | | 31926-32887 |
| | | | | | 33667-34293 |
| | | | | | 35229-35682 |
| | | | | | 38114-38771 |
| HOSOE05 | 327 | 930946 | AC022059 | 2646 | 1-338 |
| | | | | | 1107-1723 |
| HOSOE05 | 327 | 930946 | AC006512 | 2647 | 1-818 |
| | | | | | 963-1440 |
| | | | | | 1469-1958 |
| | | | | | 2220-3076 |
| | | | | | 3455-3663 |
| | | | | | 3931-4285 |
| | | | | | 4549-4632 |
| | | | | | 4696-5069 |
| | | | | | 5245-5337 |
| | | | | | 5461-5775 |
| HOSOE05 | 327 | 930946 | AC006512 | 2648 | 1-738 |
| HRDAB60 | 329 | 509428 | AC073285 | 2649 | 1-460 |
| HRDAB60 | 329 | 509428 | AC008082 | 2650 | 1-460 |
| HRDAF69 | 331 | 956269 | AL022320 | 2651 | 1-175 |
| | | | | | 2123-2610 |
| | | | | | 2802-2918 |
| | | | | | 5337-5521 |
| | | | | | 5927-6085 |
| | | | | | 7196-7332 |
| | | | | | 8400-8509 |
| | | | | | 8805-8995 |
| | | | | | 11185-11337 |
| HRDAF69 | 331 | 956269 | AL022320 | 2652 | 1-227 |
| HRDAF69 | 331 | 956269 | AL022320 | 2653 | 1-157 |
| HRDAF90 | 332 | 531026 | AL353141 | 2654 | 1-311 |
| HRDAF90 | 332 | 531026 | AL353141 | 2655 | 1-314 |
| HRDBA76 | 334 | 534304 | AL160281 | 2656 | 1-654 |
| HRDBA76 | 334 | 534304 | Z98304 | 2657 | 1-654 |
| HRDBA76 | 334 | 534304 | AL160281 | 2658 | 1-323 |
| HRDBA76 | 334 | 534304 | AL160281 | 2659 | 1-339 |
| HRDBA76 | 334 | 534304 | Z98304 | 2660 | 1-323 |
| HRDBA76 | 334 | 534304 | Z98304 | 2661 | 1-339 |
| HRDBC02 | 335 | 921144 | AL137780 | 2662 | 1-120 |
| | | | | | 179-1066 |
| | | | | | 1899-2055 |
| | | | | | 2150-2610 |
| | | | | | 4802-5459 |
| | | | | | 5700-5854 |
| | | | | | 5982-6112 |
| HRDBC02 | 335 | 921144 | AL354820 | 2663 | 1-120 |
| | | | | | 179-1066 |
| | | | | | 1899-2055 |
| | | | | | 2150-2610 |
| | | | | | 4802-5459 |
| | | | | | 5700-5854 |
| | | | | | 5982-6112 |
| HRDBC30 | 336 | 530858 | AL136173 | 2664 | 1-315 |
| | | | | | 396-1061 |
| HRDBC30 | 336 | 530858 | AL136173 | 2665 | 1-75 |
| | | | | | 1756-2079 |
| | | | | | 2376-2736 |
| | | | | | 3583-4171 |
| HRDBC30 | 336 | 530858 | AL136173 | 2666 | 1-117 |
| HRDBC52 | 337 | 867169 | AC068528 | 2667 | 1-301 |
| HRDBE07 | 339 | 954289 | AC024583 | 2668 | 1-276 |
| | | | | | 456-663 |
| | | | | | 1014-1459 |
| | | | | | 1945-2257 |
| | | | | | 2609-2739 |
| | | | | | 5806-6010 |
| | | | | | 7308-7659 |
| | | | | | 8014-8242 |
| | | | | | 9821-9982 |
| | | | | | 10722-10844 |
| | | | | | 10921-11553 |
| | | | | | 12075-12213 |
| | | | | | 12336-12424 |
| | | | | | 13519-14781 |
| HRDBE07 | 339 | 954289 | AC023629 | 2669 | 1-369 |
| HRDBE07 | 339 | 954289 | AC022107 | 2670 | 1-276 |
| | | | | | 456-663 |
| | | | | | 1014-1460 |
| | | | | | 1961-2263 |
| | | | | | 2561-2691 |
| | | | | | 3029-3584 |
| | | | | | 3903-4218 |
| | | | | | 5757-5961 |
| | | | | | 7262-7613 |
| | | | | | 7968-8207 |
| HRDBE07 | 339 | 954289 | AC023629 | 2671 | 1-294 |
| HRDBE07 | 339 | 954289 | AC024583 | 2672 | 1-105 |
| HRDBE07 | 339 | 954289 | AC022107 | 2673 | 1-105 |
| HRDBE07 | 339 | 954289 | AC023629 | 2674 | 1-276 |
| | | | | | 457-665 |
| HRDBE19 | 341 | 534495 | AC016581 | 2675 | 1-472 |
| HRDBE19 | 341 | 534495 | AC008935 | 2676 | 1-472 |
| HRDBE41 | 342 | 530856 | AC006138 | 2677 | 1-2049 |
| | | | | | 2103-2296 |
| | | | | | 2446-2562 |
| | | | | | 2812-2888 |
| | | | | | 3066-3445 |
| | | | | | 3609-3858 |
| | | | | | 3955-4116 |
| | | | | | 4190-4339 |
| | | | | | 4598-5041 |
| | | | | | 5181-5479 |
| | | | | | 5520-5869 |
| | | | | | 6069-6244 |
| | | | | | 6382-6463 |
| | | | | | 7442-7493 |
| | | | | | 7906-8006 |
| | | | | | 8104-8360 |
| | | | | | 8381-8519 |
| | | | | | 8678-9386 |
| | | | | | 9440-9543 |
| HRDBE41 | 342 | 530856 | AB023049 | 2678 | 1-2642 |
| | | | | | 2696-2889 |
| | | | | | 3039-3155 |
| | | | | | 3405-3481 |
| | | | | | 3659-4038 |
| | | | | | 4202-4451 |
| | | | | | 4548-4709 |
| | | | | | 4783-4932 |
| | | | | | 5191-5634 |
| | | | | | 5773-6073 |
| | | | | | 6113-6462 |
| | | | | | 6662-6837 |
| | | | | | 6975-7056 |
| | | | | | 8035-8086 |
| | | | | | 8500-8600 |
| | | | | | 8698-8954 |
| | | | | | 8975-9113 |
| | | | | | 9272-9980 |
| | | | | | 10034-10137 |
| | | | | | 13874-14412 |
| | | | | | 15839-16314 |
| | | | | | 16629-17195 |
| | | | | | 18035-18278 |
| | | | | | 18755-18802 |
| | | | | | 19686-19796 |
| | | | | | 19902-20001 |
| | | | | | 20116-20184 |
| | | | | | 20235-20526 |
| | | | | | 20771-20927 |
| | | | | | 21443-21561 |
| | | | | | 23024-23093 |
| | | | | | 24623-25138 |
| | | | | | 25146-25453 |
| | | | | | 25695-26591 |
| HRDBE41 | 342 | 530856 | AC006138 | 2679 | 1-388 |
| HRDBE41 | 342 | 530856 | AB023049 | 2680 | 1-149 |
| | | | | | 617-675 |
| | | | | | 791-885 |
| | | | | | 1009-1078 |
| | | | | | 1188-1302 |
| | | | | | 1484-1797 |
| | | | | | 2714-2955 |
| | | | | | 3680-3955 |
| | | | | | 4502-4651 |
| | | | | | 4802-5433 |
| | | | | | 6327-6574 |
| | | | | | 6847-6963 |
| | | | | | 7884-8446 |
| | | | | | 9168-9385 |
| | | | | | 9477-9730 |
| | | | | | 9987-10023 |
| | | | | | 11007-11124 |
| | | | | | 11660-12154 |
| | | | | | 12622-12937 |
| | | | | | 13533-13581 |
| | | | | | 13608-13983 |
| | | | | | 14317-14874 |
| | | | | | 14882-15823 |
| | | | | | 16071-17843 |
| | | | | | 18385-18504 |
| | | | | | 19059-19134 |
| | | | | | 19207-20247 |
| HRDBE41 | 342 | 530856 | AB023049 | 2681 | 1-103 |
| HRDBG59 | 343 | 507381 | AL138803 | 2682 | 1-313 |
| HRDBG59 | 343 | 507381 | AL121905 | 2683 | 1-313 |
| HRDBG59 | 343 | 507381 | AL138803 | 2684 | 1-123 |
| HRDBG59 | 343 | 507381 | AL138803 | 2685 | 1-193 |
| HRDBG59 | 343 | 507381 | AL121905 | 2686 | 1-104 |
| HRDBJ28 | 345 | 925457 | AC073334 | 2687 | 1-347 |
| HRDBJ28 | 345 | 925457 | AC073334 | 2688 | 1-131 |
| HRDBL61 | 347 | 575229 | AL359977 | 2689 | 1-937 |
| HRDBL61 | 347 | 575229 | AL359977 | 2690 | 1-306 |
| | | | | | 2924-3292 |
| | | | | | 3699-4656 |
| HRDBL75 | 348 | 524423 | AC020557 | 2691 | 1-83 |
| | | | | | 1023-1263 |
| HRDBL75 | 348 | 524423 | AP001620 | 2692 | 1-83 |
| | | | | | 1023-1263 |
| HRDBL75 | 348 | 524423 | AC020557 | 2693 | 1-285 |
| HRDBL75 | 348 | 524423 | AP001620 | 2694 | 1-285 |
| HRDBQ18 | 350 | 954274 | U53331 | 2695 | 1-86 |
| | | | | | 1346-1623 |
| | | | | | 1706-2191 |
| | | | | | 4151-4593 |
| | | | | | 4667-4762 |
| | | | | | 5022-5343 |
| | | | | | 5875-6206 |
| | | | | | 9831-10269 |
| | | | | | 10732-10901 |
| | | | | | 11640-11747 |
| | | | | | 12310-12703 |
| | | | | | 14008-14301 |
| | | | | | 14840-15086 |
| | | | | | 16199-16673 |
| | | | | | 17070-17190 |
| | | | | | 17916-17996 |
| HRDBQ18 | 350 | 954274 | U53331 | 2696 | 1-139 |
| HRDBQ38 | 351 | 533939 | AC021305 | 2697 | 1-1626 |
| HRDBQ38 | 351 | 533939 | AC023188 | 2698 | 1-148 |
| | | | | | 201-668 |
| | | | | | 732-1141 |
| | | | | | 1534-2038 |
| | | | | | 3506-5131 |
| | | | | | 5587-5713 |
| | | | | | 6756-6945 |
| | | | | | 7208-7408 |
| | | | | | 7818-7942 |
| | | | | | 8257-8658 |
| | | | | | 9327-9745 |
| | | | | | 10707-10838 |
| HRDBQ38 | 351 | 533939 | AF267168 | 2699 | 1-1626 |
| HRDBQ38 | 351 | 533939 | AC021305 | 2700 | 1-499 |
| HRDBQ38 | 351 | 533939 | AC023188 | 2701 | 1-427 |
| HRDBQ38 | 351 | 533939 | AF267168 | 2702 | 1-168 |
| HRDBQ38 | 351 | 533939 | AF267168 | 2703 | 1-190 |
| HRDBQ82 | 353 | 533947 | AC008596 | 2704 | 1-574 |
| HRDBQ82 | 353 | 533947 | AC008431 | 2705 | 1-574 |
| HRDBQ82 | 353 | 533947 | AC018752 | 2706 | 1-574 |
| HRDBQ82 | 353 | 533947 | AC008596 | 2707 | 1-459 |
| HRDBQ82 | 353 | 533947 | AC008431 | 2708 | 1-459 |
| HRDBQ82 | 353 | 533947 | AC018752 | 2709 | 1-459 |
| HRDBR35 | 355 | 867167 | AL137072 | 2710 | 1-445 |
| HRDBR35 | 355 | 867167 | AL137072 | 2711 | 1-378 |
| | | | | | 417-818 |
| | | | | | 867-1335 |
| HRDCA61 | 358 | 921128 | AL161775 | 2712 | 1-675 |
| HRDCA61 | 358 | 921128 | AL157877 | 2713 | 1-718 |
| | | | | | 1161-1617 |
| | | | | | 1682-2115 |
| | | | | | 2257-2695 |
| | | | | | 3740-4120 |
| | | | | | 4204-4329 |
| | | | | | 5302-5537 |
| | | | | | 6599-7016 |
| | | | | | 7601-7779 |
| | | | | | 7869-9425 |
| | | | | | 9638-10313 |
| | | | | | 10567-11108 |
| | | | | | 11241-11965 |
| | | | | | 12442-12570 |
| | | | | | 13069-13267 |
| | | | | | 13683-13945 |
| | | | | | 15087-15281 |
| | | | | | 15761-16052 |
| | | | | | 17071-17217 |
| | | | | | 17533-17737 |
| | | | | | 19140-19633 |
| | | | | | 19690-19820 |
| HRDCA61 | 358 | 921128 | AL157877 | 2714 | 1-103 |
| HRDCB18 | 359 | 968554 | AC009152 | 2715 | 1-330 |
| HRDCD12 | 360 | 921796 | AC068195 | 2716 | 1-497 |
| HRDDN54 | 364 | 932764 | AC004853 | 2717 | 1-318 |
| HRDDY26 | 366 | 526783 | AL035669 | 2718 | 1-516 |
| | | | | | 736-1331 |
| | | | | | 1746-2303 |
| | | | | | 3453-4698 |
| | | | | | 4716-5032 |
| | | | | | 6454-6957 |
| | | | | | 7257-7792 |
| | | | | | 8310-8674 |
| | | | | | 8721-8935 |
| | | | | | 9029-9968 |
| HRDDY26 | 366 | 526783 | AL035669 | 2719 | 1-157 |
| HRDDZ76 | 368 | 574324 | AC002210 | 2720 | 1-117 |
| HRDDZ76 | 368 | 574324 | AC004227 | 2721 | 1-117 |
| HRDDZ76 | 368 | 574324 | AC004227 | 2722 | 1-986 |
| HRDEB78 | 369 | 526861 | AC053519 | 2723 | 1-322 |
| HRDEB78 | 369 | 526861 | AC053519 | 2724 | 1-193 |
| HRDED92 | 371 | 936045 | AL136418 | 2725 | 1-108 |
| | | | | | 203-380 |
| | | | | | 2017-2151 |
| | | | | | 2671-2870 |
| | | | | | 4311-5010 |
| | | | | | 5613-6100 |
| | | | | | 6341-6502 |
| | | | | | 6658-6926 |
| | | | | | 7119-7469 |
| | | | | | 7746-8431 |
| | | | | | 8470-8794 |
| | | | | | 9256-9503 |
| | | | | | 9582-10158 |
| | | | | | 10571-10704 |
| | | | | | 10849-11637 |
| | | | | | 12112-12236 |
| | | | | | 13750-13906 |
| | | | | | 16846-16981 |
| | | | | | 17153-17729 |
| | | | | | 18146-18931 |
| | | | | | 19273-19326 |
| | | | | | 19553-19737 |
| | | | | | 20127-20336 |
| | | | | | 20424-20467 |
| HRDED92 | 371 | 936045 | AL139054 | 2726 | 1-108 |
| | | | | | 203-380 |
| | | | | | 2017-2151 |
| | | | | | 2671-2870 |
| | | | | | 4311-5010 |
| | | | | | 5613-6100 |
| | | | | | 6341-6502 |
| | | | | | 6658-6926 |
| | | | | | 7119-7469 |
| | | | | | 7746-8431 |
| | | | | | 8470-8794 |
| | | | | | 9256-9503 |
| | | | | | 9582-10158 |
| | | | | | 10571-10704 |
| | | | | | 10849-11637 |
| | | | | | 12112-12236 |
| | | | | | 13750-13906 |
| | | | | | 16846-16981 |
| | | | | | 17153-17729 |
| | | | | | 18146-18931 |
| | | | | | 19273-19326 |
| | | | | | 19553-19737 |
| | | | | | 20127-20336 |
| | | | | | 20424-20467 |
| HRDED92 | 371 | 936045 | AL136418 | 2727 | 1-121 |
| | | | | | 402-727 |
| | | | | | 1924-1974 |
| HRDED92 | 371 | 936045 | AL139054 | 2728 | 1-121 |
| | | | | | 402-727 |
| | | | | | 1924-1974 |
| HRDEJ76 | 373 | 574335 | AL160282 | 2729 | 1-483 |
| HRDEJ76 | 373 | 574335 | AL160282 | 2730 | 1-36 |
| | | | | | 98-230 |
| | | | | | 529-1060 |
| HRDEJ76 | 373 | 574335 | AL160282 | 2731 | 1-323 |
| HRDEL91 | 375 | 790374 | AL034553 | 2732 | 1-289 |
| HRDEL91 | 375 | 790374 | AL034553 | 2733 | 1-312 |
| HRDEL91 | 375 | 790374 | AL034553 | 2734 | 1-265 |
| HRDEO12 | 376 | 867140 | AC018519 | 2735 | 1-349 |
| HRDEO12 | 376 | 867140 | AC018519 | 2736 | 1-425 |
| HRDEO76 | 377 | 952894 | AC011787 | 2737 | 1-610 |
| HRDEO76 | 377 | 952894 | AC022467 | 2738 | 1-617 |
| HRDEP31 | 378 | 766222 | AC016493 | 2739 | 1-434 |
| HRDEP31 | 378 | 766222 | AC023577 | 2740 | 1-216 |
| HRDEQ30 | 380 | 506774 | AC026051 | 2741 | 1-571 |
| HRDEQ30 | 380 | 506774 | AC026051 | 2742 | 1-335 |
| HRDEQ30 | 380 | 506774 | AC026051 | 2743 | 1-383 |
| HRDEQ96 | 381 | 507543 | AL391069 | 2744 | 1-794 |
| HRDEQ96 | 381 | 507543 | AL158846 | 2745 | 1-794 |
| HRDEQ96 | 381 | 507543 | AL391069 | 2746 | 1-465 |
| HRDEQ96 | 381 | 507543 | AL158846 | 2747 | 1-465 |
| HRDES52 | 382 | 867115 | AL356785 | 2748 | 1-228 |
| | | | | | 283-429 |
| | | | | | 1240-1597 |
| | | | | | 1870-2461 |
| HRDES65 | 383 | 526823 | AC008610 | 2749 | 1-417 |
| HRDES65 | 383 | 526823 | AC008610 | 2750 | 1-293 |
| HRDET91 | 385 | 827084 | AL354659 | 2751 | 1-429 |
| HRDET91 | 385 | 827084 | AC009420 | 2752 | 1-430 |
| HRDEU33 | 386 | 572905 | AC015467 | 2753 | 1-305 |
| HRDEU33 | 386 | 572905 | AC011927 | 2754 | 1-305 |
| HRDEU33 | 386 | 572905 | AC027542 | 2755 | 1-304 |
| HRDEU33 | 386 | 572905 | AC011927 | 2756 | 1-213 |
| HRDEU33 | 386 | 572905 | AC015467 | 2757 | 1-213 |
| HRDEU33 | 386 | 572905 | AC027542 | 2758 | 1-213 |
| HRDEU42 | 387 | 881296 | AL133411 | 2759 | 1-349 |
| HRDEU42 | 387 | 881296 | AL133411 | 2760 | 1-522 |
| HRDEU43 | 388 | 765813 | AC023817 | 2761 | 1-969 |
| | | | | | 1121-5132 |
| | | | | | 5167-12104 |
| HRDEU43 | 388 | 765813 | AL161433 | 2762 | 1-155 |
| HRDEU43 | 388 | 765813 | AC011244 | 2763 | 1-1453 |
| HRDEU43 | 388 | 765813 | AC044800 | 2764 | 1-1833 |
| | | | | | 1988-7642 |
| HRDEU43 | 388 | 765813 | AC011244 | 2765 | 1-299 |
| | | | | | 1027-1436 |
| | | | | | 1568-2015 |
| | | | | | 2133-2823 |
| | | | | | 2887-3398 |
| | | | | | 3894-3979 |
| | | | | | 4893-5014 |
| | | | | | 5145-5614 |
| | | | | | 5696-7528 |
| | | | | | 7544-7570 |
| | | | | | 7688-15819 |
| HRDEU43 | 388 | 765813 | AC010237 | 2766 | 1-216 |
| | | | | | 1036-2484 |
| | | | | | 2512-3057 |
| HRDEU43 | 388 | 765813 | AL161433 | 2767 | 1-216 |
| | | | | | 1038-3049 |
| HRDEU43 | 388 | 765813 | AC068735 | 2768 | 1-456 |
| HRDEU43 | 388 | 765813 | AC021725 | 2769 | 1-458 |
| HRDEU43 | 388 | 765813 | AL009030 | 2770 | 1-744 |
| HRDEU43 | 388 | 765813 | AL161433 | 2771 | 1-216 |
| | | | | | 1038-3049 |
| HRDEU43 | 388 | 765813 | AL135916 | 2772 | 1-462 |
| HRDEU43 | 388 | 765813 | AL133255 | 2773 | 1-462 |
| HRDEU43 | 388 | 765813 | AL157879 | 2774 | 1-1453 |
| HRDEU43 | 388 | 765813 | AL021368 | 2775 | 1-462 |
| HRDEU43 | 388 | 765813 | AC011244 | 2776 | 1-130 |
| HRDEU43 | 388 | 765813 | AC044800 | 2777 | 1-468 |
| HRDEU43 | 388 | 765813 | AC023817 | 2778 | 1-1118 |
| HRDEU43 | 388 | 765813 | AL161433 | 2779 | 1-213 |
| HRDEU43 | 388 | 765813 | AC011244 | 2780 | 1-1398 |
| HRDEU43 | 388 | 765813 | AC010237 | 2781 | 1-596 |
| HRDEU43 | 388 | 765813 | AL161433 | 2782 | 1-596 |
| HRDEU43 | 388 | 765813 | AC068735 | 2783 | 1-659 |
| HRDEU43 | 388 | 765813 | AC044800 | 2784 | 1-101 |
| HRDEU43 | 388 | 765813 | AC021725 | 2785 | 1-679 |
| HRDEU43 | 388 | 765813 | AL009030 | 2786 | 1-116 |
| HRDEU43 | 388 | 765813 | AL161433 | 2787 | 1-596 |
| HRDEU43 | 388 | 765813 | AL161433 | 2788 | 1-213 |
| HRDEU43 | 388 | 765813 | AL135916 | 2789 | 1-664 |
| HRDEU43 | 388 | 765813 | AL161433 | 2790 | 1-213 |
| HRDEU43 | 388 | 765813 | AL133255 | 2791 | 1-2680 |
| | | | | | 2909-4366 |
| | | | | | 4651-5785 |
| | | | | | 5798-8014 |
| | | | | | 8020-11469 |
| HRDEU43 | 388 | 765813 | AL133255 | 2792 | 1-672 |
| HRDEU43 | 388 | 765813 | AL157879 | 2793 | 1-11071 |
| HRDEU43 | 388 | 765813 | AL021368 | 2794 | 1-104 |
| HRDEU43 | 388 | 765813 | AL021368 | 2795 | 1-664 |
| HRDEU61 | 389 | 575566 | AC040909 | 2796 | 1-403 |
| HRDEU61 | 389 | 575566 | AC020596 | 2797 | 1-426 |
| HRDEU78 | 390 | 573031 | AC004031 | 2798 | 1-1144 |
| HRDEU78 | 390 | 573031 | AC004031 | 2799 | 1-93 |
| | | | | | 2963-3611 |
| | | | | | 4073-4400 |
| | | | | | 5450-5677 |
| | | | | | 6354-6505 |
| | | | | | 7666-7726 |
| | | | | | 8063-8297 |
| | | | | | 8342-9068 |
| | | | | | 10411-10884 |
| | | | | | 11187-11272 |
| | | | | | 11986-12402 |
| | | | | | 13606-13851 |
| | | | | | 15238-15358 |
| | | | | | 16262-16453 |
| | | | | | 16496-16995 |
| | | | | | 17115-18395 |
| | | | | | 18440-19183 |
| HRDEU78 | 390 | 573031 | AC004031 | 2800 | 1-322 |
| HRDEW90 | 395 | 574288 | AC003077 | 2801 | 1-487 |
| HRDEW90 | 395 | 574288 | AC003077 | 2802 | 1-104 |
| | | | | | 456-579 |
| | | | | | 905-971 |
| | | | | | 1038-1354 |
| | | | | | 2379-2754 |
| | | | | | 2874-2985 |
| | | | | | 5130-5202 |
| | | | | | 6952-7023 |
| HRDEW90 | 395 | 574288 | AC003077 | 2803 | 1-317 |
| HRDEZ60 | 399 | 919386 | AL358781 | 2804 | 1-179 |
| | | | | | 427-883 |
| | | | | | 2033-2343 |
| | | | | | 2644-3466 |
| | | | | | 3901-6513 |
| | | | | | 6897-7077 |
| | | | | | 7651-7777 |
| | | | | | 8930-9046 |
| | | | | | 9640-9732 |
| HRDEZ60 | 399 | 919386 | AL160276 | 2805 | 1-146 |
| | | | | | 567-729 |
| | | | | | 776-1286 |
| | | | | | 1630-2424 |
| | | | | | 2523-2979 |
| | | | | | 4129-4439 |
| | | | | | 4740-5562 |
| | | | | | 5997-8610 |
| | | | | | 8991-9174 |
| | | | | | 9748-9874 |
| | | | | | 11027-11143 |
| | | | | | 11737-11830 |
| | | | | | 12258-12386 |
| | | | | | 12685-12776 |
| | | | | | 14133-14662 |
| | | | | | 15697-15794 |
| | | | | | 17888-17983 |
| | | | | | 19086-19125 |
| HRDEZ60 | 399 | 919386 | AL160276 | 2806 | 1-106 |
| HRDEZ64 | 400 | 536668 | AC023671 | 2807 | 1-372 |
| HRDFB47 | 402 | 508001 | AC020913 | 2808 | 1-688 |
| HRDFB47 | 402 | 508001 | AC020913 | 2809 | 1-696 |
| HRDFB47 | 402 | 508001 | AC020913 | 2810 | 1-325 |
| HRDFB78 | 403 | 589478 | AC015962 | 2811 | 1-233 |
| | | | | | 310-395 |
| | | | | | 960-1280 |
| | | | | | 1557-2072 |
| | | | | | 2206-2494 |
| | | | | | 2569-2818 |
| | | | | | 2979-3097 |
| | | | | | 3255-3441 |
| | | | | | 3612-4965 |
| | | | | | 5079-5476 |
| HRDFB78 | 403 | 589478 | AP002393 | 2812 | 1-234 |
| | | | | | 311-396 |
| | | | | | 961-1281 |
| | | | | | 1558-2073 |
| | | | | | 2207-2495 |
| | | | | | 2570-2819 |
| | | | | | 2980-3098 |
| | | | | | 3256-3442 |
| | | | | | 3613-4965 |
| | | | | | 5079-5476 |
| HRDFB78 | 403 | 589478 | AP002393 | 2813 | 1-128 |
| HRDFC68 | 404 | 574205 | AC031980 | 2814 | 1-1179 |
| HRDFC68 | 404 | 574205 | AL109851 | 2815 | 1-1179 |
| HRDFC68 | 404 | 574205 | AL109851 | 2816 | 1-357 |
| HRDFE73 | 405 | 574142 | AL121586 | 2817 | 1-454 |
| HRDFE73 | 405 | 574142 | AL139226 | 2818 | 1-452 |
| HRDFE74 | 406 | 765750 | AL117382 | 2819 | 1-2573 |
| HRDFE74 | 406 | 765750 | AL117382 | 2820 | 1-473 |
| | | | | | 547-956 |
| HRDFG25 | 409 | 574433 | AL157392 | 2821 | 1-132 |
| | | | | | 790-1110 |
| | | | | | 1296-1868 |
| HRDFG25 | 409 | 574433 | AL157392 | 2822 | 1-265 |
| HRDFG37 | 410 | 792517 | AC011922 | 2823 | 1-342 |
| HRDFG37 | 410 | 792517 | AC011922 | 2824 | 1-125 |
| | | | | | 2864-3688 |
| | | | | | 3709-4369 |
| HRDFG46 | 411 | 574439 | AL162711 | 2825 | 1-474 |
| HRDFG46 | 411 | 574439 | AL356752 | 2826 | 1-474 |
| HRDFG46 | 411 | 574439 | AC011695 | 2827 | 1-474 |
| HRDFG46 | 411 | 574439 | AL162711 | 2828 | 1-342 |
| HRDFG46 | 411 | 574439 | AL162711 | 2829 | 1-87 |
| HRDFG46 | 411 | 574439 | AL356752 | 2830 | 1-364 |
| HRDFG46 | 411 | 574439 | AC011695 | 2831 | 1-87 |
| HRDFG46 | 411 | 574439 | AL356752 | 2832 | 1-87 |
| HRDFG46 | 411 | 574439 | AC011695 | 2833 | 1-364 |
| HRDFH14 | 412 | 575578 | AC018665 | 2834 | 1-158 |
| HRDFH14 | 412 | 575578 | AC015801 | 2835 | 1-63 |
| | | | | | 453-778 |
| | | | | | 4523-4680 |
| | | | | | 5968-6112 |
| | | | | | 6637-6754 |
| | | | | | 7236-7304 |
| | | | | | 8220-8263 |
| | | | | | 8968-9017 |
| | | | | | 10646-10836 |
| | | | | | 10839-11211 |
| | | | | | 11761-11922 |
| | | | | | 12118-12230 |
| | | | | | 12547-13142 |
| | | | | | 13423-13926 |
| | | | | | 14192-14430 |
| | | | | | 14653-15104 |
| | | | | | 15264-15377 |
| | | | | | 15434-15969 |
| | | | | | 16518-16631 |
| | | | | | 16642-16758 |
| | | | | | 17442-17552 |
| | | | | | 18028-18204 |
| | | | | | 18449-18511 |
| | | | | | 19115-20053 |
| | | | | | 21297-21423 |
| HRDFH14 | 412 | 575578 | AC018665 | 2836 | 1-130 |
| HRDFH14 | 412 | 575578 | AC015801 | 2837 | 1-417 |
| HRDFH24 | 413 | 575245 | AL139013 | 2838 | 1-781 |
| HRDFH24 | 413 | 575245 | AL354953 | 2839 | 1-781 |
| | | | | | 852-1127 |
| | | | | | 1213-1311 |
| | | | | | 1403-1624 |
| | | | | | 1958-2075 |
| | | | | | 2167-2363 |
| | | | | | 2673-2786 |
| | | | | | 4006-4467 |
| | | | | | 4806-4837 |
| HRDFH24 | 413 | 575245 | AL139013 | 2840 | 1-276 |
| HRDFH25 | 414 | 953882 | AL136304 | 2841 | 1-292 |
| | | | | | 646-1026 |
| | | | | | 1500-1664 |
| HRDFH25 | 414 | 953882 | AL136304 | 2842 | 1-499 |
| HRDFH25 | 414 | 953882 | AL136304 | 2843 | 1-125 |
| HRDFH39 | 415 | 574558 | AC005079 | 2844 | 1-58 |
| | | | | | 168-398 |
| | | | | | 2136-2596 |
| | | | | | 4009-4424 |
| | | | | | 6946-7338 |
| | | | | | 7495-7617 |
| | | | | | 9290-9470 |
| | | | | | 12597-12947 |
| | | | | | 14399-14487 |
| | | | | | 17529-17581 |
| | | | | | 18389-18476 |
| | | | | | 19225-19699 |
| | | | | | 20108-20419 |
| | | | | | 21692-22122 |
| | | | | | 23411-23477 |
| | | | | | 25014-25104 |
| | | | | | 26516-26877 |
| | | | | | 27011-27457 |
| | | | | | 28855-28909 |
| | | | | | 29092-29282 |
| | | | | | 31251-31492 |
| | | | | | 31992-32485 |
| HRDFH39 | 415 | 574558 | AC005079 | 2845 | 1-2954 |
| HRDFH39 | 415 | 574558 | AC005079 | 2846 | 1-444 |
| HRDFI13 | 417 | 574561 | AC023876 | 2847 | 1-412 |
| HRDFJ71 | 418 | 574553 | AP001091 | 2848 | 1-446 |
| HRDFJ71 | 418 | 574553 | AP001091 | 2849 | 1-154 |
| | | | | | 245-346 |
| | | | | | 386-510 |
| | | | | | 519-903 |
| | | | | | 1419-1506 |
| HRDFM18 | 421 | 574435 | AL356321 | 2850 | 1-470 |
| HRDFM18 | 421 | 574435 | AC011692 | 2851 | 1-470 |
| HRDFM18 | 421 | 574435 | AL356321 | 2852 | 1-716 |
| HRDFM18 | 421 | 574435 | AC011692 | 2853 | 1-716 |
| HRDFQ64 | 423 | 733847 | AC025796 | 2854 | 1-273 |
| HRDFQ64 | 423 | 733847 | AC018638 | 2855 | 1-1347 |
| | | | | | 1588-1655 |
| | | | | | 1847-2885 |
| | | | | | 2995-3729 |
| | | | | | 3747-4192 |
| | | | | | 5291-5467 |
| | | | | | 5607-6427 |
| | | | | | 6453-6942 |
| | | | | | 7170-8109 |
| | | | | | 8162-8361 |
| | | | | | 8634-9418 |
| | | | | | 9463-11111 |
| | | | | | 11143-12777 |
| | | | | | 12930-15535 |
| HRDFQ64 | 423 | 733847 | AC005627 | 2856 | 1-1382 |
| | | | | | 1388-1474 |
| | | | | | 1510-1578 |
| | | | | | 1768-2801 |
| | | | | | 2912-3644 |
| | | | | | 3666-4106 |
| | | | | | 5212-5388 |
| | | | | | 5528-6348 |
| | | | | | 6373-6862 |
| | | | | | 7090-8029 |
| | | | | | 8082-8281 |
| | | | | | 8506-9338 |
| | | | | | 9383-11944 |
| | | | | | 11951-12483 |
| | | | | | 12512-12708 |
| | | | | | 13012-15362 |
| HRDFQ64 | 423 | 733847 | AC004987 | 2857 | 1-1363 |
| | | | | | 1369-1455 |
| | | | | | 1491-1558 |
| | | | | | 1757-2707 |
| | | | | | 2907-3642 |
| | | | | | 3660-4103 |
| | | | | | 5231-5407 |
| | | | | | 5547-6368 |
| | | | | | 6393-6885 |
| | | | | | 7114-7573 |
| | | | | | 7669-7881 |
| | | | | | 8109-8308 |
| | | | | | 8581-9173 |
| | | | | | 9404-11821 |
| HRDFQ64 | 423 | 733847 | AC018638 | 2858 | 1-946 |
| HRDFQ64 | 423 | 733847 | AC005627 | 2859 | 1-312 |
| HRDFQ64 | 423 | 733847 | AC005627 | 2860 | 1-210 |
| | | | | | 234-933 |
| | | | | | 942-1762 |
| | | | | | 2071-2302 |
| | | | | | 4137-5246 |
| | | | | | 5292-5549 |
| HRDFQ64 | 423 | 733847 | AC004987 | 2861 | 1-2357 |
| HRDFQ64 | 423 | 733847 | AC004987 | 2862 | 1-1370 |
| HRDFQ75 | 424 | 525524 | AL136332 | 2863 | 1-303 |
| | | | | | 455-868 |
| | | | | | 1310-1564 |
| | | | | | 2130-2482 |
| | | | | | 3623-3828 |
| HRDFQ75 | 424 | 525524 | AL132987 | 2864 | 1-302 |
| | | | | | 454-867 |
| | | | | | 1309-1563 |
| | | | | | 2129-2481 |
| | | | | | 3054-3086 |
| | | | | | 3756-3807 |
| HRDFQ75 | 424 | 525524 | AL136332 | 2865 | 1-163 |
| HRDFQ75 | 424 | 525524 | AL136332 | 2866 | 1-458 |
| HRDFQ75 | 424 | 525524 | AL132987 | 2867 | 1-163 |
| HRDFQ75 | 424 | 525524 | AL132987 | 2868 | 1-458 |
| HRDFU48 | 429 | 573030 | AC010193 | 2869 | 1-335 |
| HRDFU48 | 429 | 573030 | AC013252 | 2870 | 1-335 |
| HRDFU48 | 429 | 573030 | AC010193 | 2871 | 1-366 |
| HRDFU48 | 429 | 573030 | AC013252 | 2872 | 1-366 |
| HSHAX53 | 430 | 518795 | AC068497 | 2873 | 1-297 |
| | | | | | 898-1324 |
| HSHAX53 | 430 | 518795 | AC073936 | 2874 | 1-298 |
| HSHAX53 | 430 | 518795 | AC074283 | 2875 | 1-298 |
| HSHAX53 | 430 | 518795 | AC074283 | 2876 | 1-352 |
| HSHAX53 | 430 | 518795 | AC074283 | 2877 | 1-213 |
| HSHBV66 | 431 | 523348 | AC020921 | 2878 | 1-345 |
| HSHBV66 | 431 | 523348 | AC008908 | 2879 | 1-335 |
| HSHBV66 | 431 | 523348 | AC007554 | 2880 | 1-345 |
| HSHBV67 | 432 | 529483 | AL353777 | 2881 | 1-315 |
| HSHBV67 | 432 | 529483 | AL353777 | 2882 | 1-515 |
| HSHCF34 | 433 | 529313 | AL162404 | 2883 | 1-237 |
| HSHCF34 | 433 | 529313 | AC025990 | 2884 | 1-237 |
| HSHCF34 | 433 | 529313 | AL035415 | 2885 | 1-237 |
| HSHCF34 | 433 | 529313 | AL162404 | 2886 | 1-106 |
| HSHCF34 | 433 | 529313 | AC025990 | 2887 | 1-106 |
| HSHCF34 | 433 | 529313 | AL035415 | 2888 | 1-104 |
| HSHCF34 | 433 | 529313 | AL162404 | 2889 | 1-119 |
| HSHCF34 | 433 | 529313 | AC025990 | 2890 | 1-104 |
| HSKCS36 | 434 | 529163 | AC020884 | 2891 | 1-239 |
| HSKCT33 | 435 | 866514 | AC024714 | 2892 | 1-375 |
| HSKCT33 | 435 | 866514 | AC024714 | 2893 | 1-250 |
| HSKEK63 | 439 | 744336 | AL356734 | 2894 | 1-376 |
| HSKEK63 | 439 | 744336 | AL355388 | 2895 | 1-376 |
| HSKEK63 | 439 | 744336 | AL355388 | 2896 | 1-138 |
| HSKEM02 | 440 | 969071 | AL360170 | 2897 | 1-51 |
| | | | | | 4919-5083 |
| | | | | | 6145-6269 |
| | | | | | 6769-6852 |
| | | | | | 7424-7601 |
| HSKEM02 | 440 | 969071 | AL133355 | 2898 | 1-51 |
| | | | | | 4919-5083 |
| | | | | | 6145-6269 |
| | | | | | 6769-6852 |
| | | | | | 7424-7601 |
| HSKET11 | 441 | 967000 | AC022123 | 2899 | 1-433 |
| HSKET11 | 441 | 967000 | AC073689 | 2900 | 1-823 |
| HSKIT38 | 444 | 855173 | AL159994 | 2901 | 1-613 |
| HSKIT38 | 444 | 855173 | AL159994 | 2902 | 1-389 |
| HSKJS05 | 445 | 930979 | AC036191 | 2903 | 1-109 |
| | | | | | 274-433 |
| | | | | | 756-1187 |
| | | | | | 1853-2201 |
| | | | | | 2902-4963 |
| HSKKD70 | 446 | 916984 | AC020886 | 2904 | 1-592 |
| HSKKD70 | 446 | 916984 | AC008792 | 2905 | 1-569 |
| HSKKL06 | 447 | 934040 | AC006184 | 2906 | 1-659 |
| HSKKL06 | 447 | 934040 | AC006184 | 2907 | 1-562 |
| HSKWA56 | 449 | 916496 | AL357565 | 2908 | 1-437 |
| HSKWA56 | 449 | 916496 | AL357565 | 2909 | 1-529 |
| HSKWA56 | 449 | 916496 | AL357565 | 2910 | 1-101 |
| HSKXG06 | 452 | 935455 | AF189005 | 2911 | 1-385 |
| HSKXG06 | 452 | 935455 | AC027698 | 2912 | 1-385 |
| HSKXG06 | 452 | 935455 | AF189005 | 2913 | 1-442 |
| HSKXG06 | 452 | 935455 | AC027698 | 2914 | 1-442 |
| HSKXJ15 | 453 | 866373 | AL354751 | 2915 | 1-1031 |
| HSKXJ15 | 453 | 866373 | AC018554 | 2916 | 1-1046 |
| HSKXJ15 | 453 | 866373 | AL158080 | 2917 | 1-1051 |
| HSKXJ15 | 453 | 866373 | AL355148 | 2918 | 1-1051 |
| HSKXJ15 | 453 | 866373 | AL117340 | 2919 | 1-1051 |
| HSKXJ15 | 453 | 866373 | AC018554 | 2920 | 1-825 |
| HSKXJ15 | 453 | 866373 | AL354751 | 2921 | 1-455 |
| HSKXJ15 | 453 | 866373 | AL158080 | 2922 | 1-442 |
| HSKXJ15 | 453 | 866373 | AL158080 | 2923 | 1-722 |
| HSKXJ15 | 453 | 866373 | AL355148 | 2924 | 1-442 |
| HSKXJ15 | 453 | 866373 | AL355148 | 2925 | 1-722 |
| HSKXJ15 | 453 | 866373 | AL117340 | 2926 | 1-442 |
| HSKXJ15 | 453 | 866373 | AL117340 | 2927 | 1-722 |
| HSKXP58 | 455 | 955073 | AC007336 | 2928 | 1-424 |
| | | | | | 790-845 |
| | | | | | 2072-2312 |
| | | | | | 3699-3937 |
| | | | | | 4799-4957 |
| | | | | | 6084-6219 |
| | | | | | 6394-6569 |
| | | | | | 9325-9508 |
| | | | | | 10439-10620 |
| | | | | | 12486-12768 |
| | | | | | 13934-14087 |
| | | | | | 17716-17856 |
| | | | | | 19078-19243 |
| | | | | | 23566-23682 |
| | | | | | 24537-24930 |
| | | | | | 25444-25739 |
| | | | | | 26129-27483 |
| HSKXP58 | 455 | 955073 | AC007336 | 2929 | 1-265 |
| HSKYG66 | 457 | 698007 | AC062036 | 2930 | 1-507 |
| HSKYG66 | 457 | 698007 | AC062036 | 2931 | 1-286 |
| HSKYG66 | 457 | 698007 | AC062036 | 2932 | 1-360 |
| HSKYH52 | 458 | 466574 | AC021437 | 2933 | 1-31 |
| | | | | | 476-587 |
| | | | | | 1937-2394 |
| | | | | | 2732-3167 |
| | | | | | 3483-3664 |
| HSKYH52 | 458 | 466574 | AC021437 | 2934 | 1-282 |
| HSKYH52 | 458 | 466574 | AC021437 | 2935 | 1-333 |
| HSKYJ96 | 459 | 921032 | AC024502 | 2936 | 1-356 |
| HSKYJ96 | 459 | 921032 | AC024502 | 2937 | 1-885 |
| | | | | | 1599-2695 |
| | | | | | 2850-3162 |
| HSKZE12 | 460 | 970639 | AC023121 | 2938 | 1-129 |
| HSKZE12 | 460 | 970639 | AC023121 | 2939 | 1-211 |
| HSKZE12 | 460 | 970639 | AC023121 | 2940 | 1-144 |
| HSKZE32 | 461 | 959400 | AC012522 | 2941 | 1-905 |
| | | | | | 1075-1401 |
| | | | | | 1439-1665 |
| | | | | | 1702-2222 |
| | | | | | 2472-3734 |
| HSKZE32 | 461 | 959400 | AC006254 | 2942 | 1-216 |
| | | | | | 836-937 |
| | | | | | 1568-1787 |
| | | | | | 2544-2645 |
| | | | | | 2727-2779 |
| | | | | | 2799-3098 |
| | | | | | 5623-5715 |
| | | | | | 5962-6414 |
| | | | | | 7005-9162 |
| | | | | | 9332-9658 |
| | | | | | 9696-9922 |
| | | | | | 9959-10479 |
| | | | | | 10729-11991 |
| HSKZE32 | 461 | 959400 | AC012522 | 2943 | 1-322 |
| HSKZE32 | 461 | 959400 | AC012522 | 2944 | 1-1087 |
| HSKZE32 | 461 | 959400 | AC006254 | 2945 | 1-322 |
| HSLAB77 | 462 | 772652 | AC007392 | 2946 | 1-308 |
| HSLAB77 | 462 | 772652 | AC007392 | 2947 | 1-241 |
| HSLAB77 | 462 | 772652 | AC007392 | 2948 | 1-486 |
| HSLBW19 | 464 | 671738 | AC008443 | 2949 | 1-58 |
| | | | | | 372-819 |
| | | | | | 1181-1503 |
| | | | | | 1878-2106 |
| | | | | | 2630-5031 |
| HSLBW19 | 464 | 671738 | AL161615 | 2950 | 1-323 |
| HSLBW19 | 464 | 671738 | AC008620 | 2951 | 1-558 |
| | | | | | 2623-2750 |
| | | | | | 3090-3275 |
| | | | | | 3856-3989 |
| | | | | | 6489-6581 |
| | | | | | 6895-7342 |
| | | | | | 7704-8026 |
| | | | | | 8401-8629 |
| | | | | | 9153-11553 |
| HSLBW19 | 464 | 671738 | AL161615 | 2952 | 1-448 |
| HSLBW19 | 464 | 671738 | AC008443 | 2953 | 1-446 |
| HSLBW19 | 464 | 671738 | AC008620 | 2954 | 1-446 |
| HSLBX08 | 465 | 959911 | Z95152 | 2955 | 1-208 |
| | | | | | 419-902 |
| | | | | | 2123-2193 |
| | | | | | 5253-5361 |
| | | | | | 5517-5547 |
| | | | | | 5983-6029 |
| | | | | | 6154-6270 |
| | | | | | 6376-6450 |
| | | | | | 6770-7028 |
| | | | | | 7865-7945 |
| | | | | | 7967-8279 |
| | | | | | 8378-8555 |
| | | | | | 8794-9615 |
| HSLBX08 | 465 | 959911 | Z95152 | 2956 | 1-903 |
| HSLBX20 | 466 | 574004 | AC005922 | 2957 | 1-113 |
| | | | | | 538-968 |
| | | | | | 2413-2534 |
| HSLBX20 | 466 | 574004 | AC005922 | 2958 | 1-26 |
| | | | | | 2837-2907 |
| | | | | | 3657-3743 |
| | | | | | 4961-5086 |
| | | | | | 5993-6112 |
| HSLBX20 | 466 | 574004 | AC005922 | 2959 | 1-476 |
| HSLBZ91 | 467 | 573987 | AC016527 | 2960 | 1-304 |
| HSLCB15 | 468 | 693455 | AL022169 | 2961 | 1-1057 |
| | | | | | 1142-1998 |
| HSLCB15 | 468 | 693455 | AL022169 | 2962 | 1-273 |
| HSLCJ46 | 469 | 529622 | AL096677 | 2963 | 1-35 |
| | | | | | 175-254 |
| | | | | | 1355-1678 |
| | | | | | 3882-3987 |
| | | | | | 4912-4963 |
| | | | | | 5142-5217 |
| HSLCJ46 | 469 | 529622 | AL390037 | 2964 | 1-35 |
| | | | | | 175-254 |
| | | | | | 1355-1678 |
| | | | | | 3885-3982 |
| | | | | | 4912-4963 |
| | | | | | 5142-5217 |
| HSLCJ46 | 469 | 529622 | AL096677 | 2965 | 1-80 |
| | | | | | 2735-3511 |
| | | | | | 3742-4196 |
| | | | | | 5721-6250 |
| HSLCJ46 | 469 | 529622 | AL096677 | 2966 | 1-714 |
| HSLCJ46 | 469 | 529622 | AL390037 | 2967 | 1-714 |
| HSLCJ46 | 469 | 529622 | AL390037 | 2968 | 1-80 |
| | | | | | 3123-3512 |
| | | | | | 3603-4197 |
| | | | | | 5722-6251 |
| HSLCJ47 | 470 | 908627 | AL159994 | 2969 | 1-696 |
| HSLCJ47 | 470 | 908627 | AL159994 | 2970 | 1-241 |
| HSLCL38 | 471 | 951028 | AC024580 | 2971 | 1-246 |
| HSLCP75 | 472 | 529631 | AC074334 | 2972 | 1-139 |
| | | | | | 258-583 |
| HSLDA25 | 474 | 679301 | AC022123 | 2973 | 1-548 |
| HSLDB29 | 475 | 866340 | AC005517 | 2974 | 1-428 |
| HSLDB29 | 475 | 866340 | AC005517 | 2975 | 1-422 |
| HSLDB29 | 475 | 866340 | AC005517 | 2976 | 1-384 |
| HSLDC06 | 476 | 936010 | AC015589 | 2977 | 1-1110 |
| HSLDC06 | 476 | 936010 | AC010328 | 2978 | 1-1110 |
| HSLDC06 | 476 | 936010 | AC015589 | 2979 | 1-320 |
| HSLDC06 | 476 | 936010 | AC010328 | 2980 | 1-320 |
| HSLDG13 | 477 | 913664 | AC074219 | 2981 | 1-333 |
| | | | | | 477-952 |
| HSLDI16 | 478 | 574014 | AC009690 | 2982 | 1-1003 |
| HSLDI16 | 478 | 574014 | AC009690 | 2983 | 1-262 |
| HSLDI16 | 478 | 574014 | AC009690 | 2984 | 1-87 |
| HSLDJ94 | 480 | 753657 | AC068584 | 2985 | 1-554 |
| HSLDJ94 | 480 | 753657 | AC021215 | 2986 | 1-554 |
| HSLDJ94 | 480 | 753657 | AC068584 | 2987 | 1-883 |
| | | | | | 906-1442 |
| | | | | | 2137-2360 |
| | | | | | 2379-3586 |
| HSLDJ94 | 480 | 753657 | AC021215 | 2988 | 1-883 |
| | | | | | 906-1442 |
| | | | | | 1625-2050 |
| | | | | | 2136-2359 |
| | | | | | 2378-3585 |
| | | | | | 3764-4356 |
| | | | | | 4418-5605 |
| | | | | | 5759-6797 |
| | | | | | 7466-7550 |
| HSLDJ94 | 480 | 753657 | AC068584 | 2989 | 1-464 |
| HSLDJ94 | 480 | 753657 | AC021215 | 2990 | 1-464 |
| HSLDM32 | 482 | 699486 | AC074220 | 2991 | 1-366 |
| HSLDM79 | 483 | 526740 | AC018550 | 2992 | 1-342 |
| HSLDM79 | 483 | 526740 | AC034250 | 2993 | 1-433 |
| HSLDM79 | 483 | 526740 | AC020764 | 2994 | 1-433 |
| HSLDM79 | 483 | 526740 | AC020764 | 2995 | 1-257 |
| HSLEC36 | 488 | 936003 | AP000822 | 2996 | 1-407 |
| HSLEC36 | 488 | 936003 | AC008102 | 2997 | 1-413 |
| HSLEC36 | 488 | 936003 | AP000822 | 2998 | 1-390 |
| HSLEC36 | 488 | 936003 | AC008102 | 2999 | 1-390 |
| HSLEC36 | 488 | 936003 | AC008102 | 3000 | 1-254 |
| HSLED42 | 490 | 572860 | AC074219 | 3001 | 1-439 |
| HSLED42 | 490 | 572860 | AC074334 | 3002 | 1-366 |
| HSLEJ22 | 495 | 572863 | AC023237 | 3003 | 1-408 |
| HSLEJ22 | 495 | 572863 | AC023499 | 3004 | 1-408 |
| HSLEJ22 | 495 | 572863 | AC023237 | 3005 | 1-214 |
| HSLEJ22 | 495 | 572863 | AC023499 | 3006 | 1-214 |
| HSLEJ22 | 495 | 572863 | AC023237 | 3007 | 1-231 |
| HSLEJ22 | 495 | 572863 | AC023499 | 3008 | 1-231 |
| HSLEL46 | 496 | 573212 | AC073743 | 3009 | 1-176 |
| HSLEL46 | 496 | 573212 | AC020850 | 3010 | 1-281 |
| HSLEL46 | 496 | 573212 | AC073683 | 3011 | 1-276 |
| | | | | | 426-672 |
| HSLEL46 | 496 | 573212 | AC078911 | 3012 | 1-276 |
| HSLEL46 | 496 | 573212 | AC024582 | 3013 | 1-161 |
| | | | | | 173-284 |
| | | | | | 432-678 |
| HSLEL46 | 496 | 573212 | AC073683 | 3014 | 1-198 |
| HSLEL46 | 496 | 573212 | AC078911 | 3015 | 1-196 |
| HSLEL46 | 496 | 573212 | AC073743 | 3016 | 1-196 |
| HSLEL46 | 496 | 573212 | AC020850 | 3017 | 1-198 |
| HSLEL46 | 496 | 573212 | AC024582 | 3018 | 1-199 |
| HSLFM86 | 500 | 785489 | AC016160 | 3019 | 1-448 |
| HSLFM86 | 500 | 785489 | AC074220 | 3020 | 1-445 |
| HSLFM86 | 500 | 785489 | AC009031 | 3021 | 1-429 |
| HSLFM86 | 500 | 785489 | AC074220 | 3022 | 1-151 |
| HSLFS42 | 501 | 948740 | AC009844 | 3023 | 1-377 |
| HSLFS42 | 501 | 948740 | AC020850 | 3024 | 1-378 |
| HSLFS42 | 501 | 948740 | AC020873 | 3025 | 1-587 |
| HSLFS45 | 502 | 717782 | AC068768 | 3026 | 1-375 |
| HSLFS45 | 502 | 717782 | AC068768 | 3027 | 1-37 |
| | | | | | 165-259 |
| | | | | | 346-389 |
| HSLFS45 | 502 | 717782 | AC068768 | 3028 | 1-202 |
| HSLFT76 | 503 | 725788 | AC008693 | 3029 | 1-615 |
| HSLFT76 | 503 | 725788 | AC022123 | 3030 | 1-886 |
| HSLFU01 | 505 | 916448 | AC078912 | 3031 | 1-412 |
| HSLFU01 | 505 | 916448 | AC010357 | 3032 | 1-415 |
| HSLFU01 | 505 | 916448 | AC010357 | 3033 | 1-276 |
| HSLGD23 | 506 | 675872 | AC026761 | 3034 | 1-452 |
| HSLGD23 | 506 | 675872 | AC068494 | 3035 | 1-451 |
| HSLGD23 | 506 | 675872 | AC022123 | 3036 | 1-429 |
| HSLGK79 | 508 | 774049 | AC019047 | 3037 | 1-391 |
| HSLGK79 | 508 | 774049 | AC019047 | 3038 | 1-386 |
| HSLGX20 | 510 | 669648 | AP001524 | 3039 | 1-147 |
| | | | | | 1158-1621 |
| HSLGX20 | 510 | 669648 | AP001524 | 3040 | 1-147 |
| HSLHP20 | 513 | 669210 | AC020791 | 3041 | 1-427 |
| HSLHP20 | 513 | 669210 | AC020791 | 3042 | 1-89 |
| HSLIG54 | 515 | 713982 | AC025152 | 3043 | 1-439 |
| | | | | | 454-684 |
| HSLII61 | 516 | 918071 | AC017074 | 3044 | 1-1642 |
| | | | | | 1831-2269 |
| | | | | | 2356-3482 |
| HSLII61 | 516 | 918071 | AC017074 | 3045 | 1-378 |
| HSLII61 | 516 | 918071 | AC017074 | 3046 | 1-221 |
| HSLIJ57 | 517 | 659533 | AC068497 | 3047 | 1-506 |
| HSLIJ57 | 517 | 659533 | AC015817 | 3048 | 1-512 |
| HSLJB11 | 518 | 966227 | Z83844 | 3049 | 1-372 |
| | | | | | 1469-1781 |
| | | | | | 2529-2839 |
| | | | | | 3496-3656 |
| | | | | | 3731-3846 |
| | | | | | 4787-4930 |
| | | | | | 5149-5433 |
| | | | | | 6116-6202 |
| | | | | | 7067-9372 |
| HSLJB11 | 518 | 966227 | Z83844 | 3050 | 1-351 |
| HSLJB11 | 518 | 966227 | Z83844 | 3051 | 1-274 |
| HSLJQ31 | 526 | 961447 | AC008821 | 3052 | 1-557 |
| HSLJQ31 | 526 | 961447 | AC008511 | 3053 | 1-164 |
| | | | | | 351-836 |
| | | | | | 1683-2140 |
| | | | | | 2279-2469 |
| | | | | | 3331-3887 |
| | | | | | 4692-5352 |
| | | | | | 6418-7193 |
| | | | | | 8506-8604 |
| | | | | | 8913-9207 |
| | | | | | 9220-9522 |
| | | | | | 9781-10147 |
| | | | | | 10996-16123 |
| HSLJQ31 | 526 | 961447 | AC008821 | 3054 | 1-661 |
| HSLJW53 | 527 | 866261 | AP001495 | 3055 | 1-712 |
| HSLJW53 | 527 | 866261 | AC021527 | 3056 | 1-290 |
| | | | | | 1054-1348 |
| | | | | | 1697-2100 |
| | | | | | 2242-2953 |
| | | | | | 3485-3866 |
| | | | | | 4447-4756 |
| | | | | | 5347-5572 |
| HSLJW53 | 527 | 866261 | AP001031 | 3057 | 1-392 |
| HSLJW53 | 527 | 866261 | AC021527 | 3058 | 1-284 |
| | | | | | 862-894 |
| HSLJW53 | 527 | 866261 | AP001495 | 3059 | 1-404 |
| HSLJW53 | 527 | 866261 | AP001031 | 3060 | 1-403 |
| HSLJW53 | 527 | 866261 | AP001031 | 3061 | 1-121 |
| HSRAX95 | 529 | 747078 | AL132868 | 3062 | 1-125 |
| | | | | | 590-843 |
| | | | | | 1027-1154 |
| | | | | | 1675-2044 |
| | | | | | 2100-2449 |
| | | | | | 3073-3176 |
| | | | | | 4083-4263 |
| | | | | | 4616-4769 |
| | | | | | 4903-5110 |
| | | | | | 5987-7410 |
| | | | | | 8391-8663 |
| | | | | | 8964-9308 |
| | | | | | 9955-10064 |
| | | | | | 10564-10943 |
| | | | | | 11465-11991 |
| | | | | | 12772-13089 |
| | | | | | 13198-13772 |
| | | | | | 14016-14322 |
| | | | | | 14947-15596 |
| | | | | | 15607-16408 |
| | | | | | 17561-17863 |
| | | | | | 22453-23182 |
| | | | | | 23786-23925 |
| | | | | | 24209-24324 |
| | | | | | 25277-25604 |
| | | | | | 26333-26753 |
| | | | | | 27095-31132 |
| HSRAX95 | 529 | 747078 | AL132868 | 3063 | 1-791 |
| | | | | | 881-981 |
| | | | | | 1133-1401 |
| | | | | | 2093-2207 |
| | | | | | 3061-3150 |
| | | | | | 3393-3470 |
| | | | | | 3557-3687 |
| | | | | | 4140-4397 |
| | | | | | 5208-5297 |
| | | | | | 6997-7258 |
| | | | | | 8272-8678 |
| | | | | | 8835-8894 |
| HSRAX95 | 529 | 747078 | AL132868 | 3064 | 1-513 |
| HSRDK92 | 534 | 838033 | AC074012 | 3065 | 1-148 |
| | | | | | 1201-1273 |
| HSRDK92 | 534 | 838033 | AC024085 | 3066 | 1-148 |
| | | | | | 1201-1273 |
| HSRDM42 | 536 | 523843 | AC024704 | 3067 | 1-632 |
| HSRDM42 | 536 | 523843 | AC016683 | 3068 | 1-632 |
| HSRDM42 | 536 | 523843 | AC024704 | 3069 | 1-331 |
| HSRDM42 | 536 | 523843 | AC016683 | 3070 | 1-331 |
| HSRDN23 | 537 | 530334 | AC021300 | 3071 | 1-607 |
| HSRDN23 | 537 | 530334 | AC005703 | 3072 | 1-607 |
| HSRDN23 | 537 | 530334 | AC021300 | 3073 | 1-208 |
| HSRDN23 | 537 | 530334 | AC021300 | 3074 | 1-390 |
| HSRDN23 | 537 | 530334 | AC005703 | 3075 | 1-734 |
| HSRDN23 | 537 | 530334 | AC005703 | 3076 | 1-208 |
| HSRDQ89 | 538 | 780221 | AP001319 | 3077 | 1-471 |
| | | | | | 761-1159 |
| | | | | | 2076-2471 |
| | | | | | 3129-4172 |
| | | | | | 5710-6153 |
| HSRDQ89 | 538 | 780221 | AP000485 | 3078 | 1-471 |
| HSRDQ89 | 538 | 780221 | AP000485 | 3079 | 1-399 |
| HSRDQ89 | 538 | 780221 | AP001319 | 3080 | 1-790 |
| HSRDQ89 | 538 | 780221 | AP000485 | 3081 | 1-789 |
| HSRDS77 | 539 | 530289 | AC002059 | 3082 | 1-244 |
| HSRDS77 | 539 | 530289 | AC000026 | 3083 | 1-244 |
| HSRDS77 | 539 | 530289 | AC002059 | 3084 | 1-934 |
| HSRDS77 | 539 | 530289 | AC000026 | 3085 | 1-934 |
| HSRDS77 | 539 | 530289 | AC002059 | 3086 | 1-359 |
| | | | | | 574-891 |
| | | | | | 1253-1789 |
| | | | | | 1912-2029 |
| | | | | | 2681-2847 |
| HSRDS77 | 539 | 530289 | AC000026 | 3087 | 1-359 |
| | | | | | 574-678 |
| | | | | | 798-891 |
| | | | | | 1253-1789 |
| | | | | | 1912-2029 |
| | | | | | 2681-2847 |
| HSREB43 | 540 | 524678 | AC060805 | 3088 | 1-276 |
| HSREB43 | 540 | 524678 | AL356440 | 3089 | 1-276 |
| HSREB43 | 540 | 524678 | AC069107 | 3090 | 1-276 |
| HSREB43 | 540 | 524678 | AL356440 | 3091 | 1-476 |
| HSREB43 | 540 | 524678 | AC069107 | 3092 | 1-463 |
| HSREB43 | 540 | 524678 | AC060805 | 3093 | 1-248 |
| HSREB43 | 540 | 524678 | AL356440 | 3094 | 1-248 |
| HSREB43 | 540 | 524678 | AC069107 | 3095 | 1-248 |
| HSRED45 | 542 | 530233 | AP000442 | 3096 | 1-110 |
| | | | | | 1671-1833 |
| | | | | | 2258-2541 |
| | | | | | 2656-3699 |
| | | | | | 3792-3942 |
| | | | | | 4306-6277 |
| HSREG49 | 545 | 723267 | AC018729 | 3097 | 1-217 |
| HSREG49 | 545 | 723267 | AC019250 | 3098 | 1-217 |
| HSREG49 | 545 | 723267 | AC007734 | 3099 | 1-219 |
| HSREG49 | 545 | 723267 | AC024119 | 3100 | 1-217 |
| HSREG49 | 545 | 723267 | AL049715 | 3101 | 1-217 |
| HSREG49 | 545 | 723267 | AC019250 | 3102 | 1-390 |
| HSREG49 | 545 | 723267 | AC007734 | 3103 | 1-468 |
| HSREG49 | 545 | 723267 | AC019250 | 3104 | 1-468 |
| HSREG49 | 545 | 723267 | AC024119 | 3105 | 1-468 |
| HSREG49 | 545 | 723267 | AC024119 | 3106 | 1-390 |
| HSREG49 | 545 | 723267 | AL049715 | 3107 | 1-468 |
| HSREG49 | 545 | 723267 | AL049715 | 3108 | 1-390 |
| HSRFD34 | 547 | 575288 | AP001780 | 3109 | 1-145 |
| HSRFD34 | 547 | 575288 | AL391069 | 3110 | 1-170 |
| HSRFD34 | 547 | 575288 | AC073120 | 3111 | 1-301 |
| HSRFD34 | 547 | 575288 | AL359892 | 3112 | 1-583 |
| | | | | | 1605-1880 |
| | | | | | 2039-2153 |
| | | | | | 2927-3485 |
| | | | | | 3613-3918 |
| | | | | | 4038-4641 |
| | | | | | 4679-5013 |
| | | | | | 5296-5749 |
| HSRFD34 | 547 | 575288 | AL353759 | 3113 | 1-442 |
| | | | | | 642-976 |
| | | | | | 1259-1712 |
| HSRFD34 | 547 | 575288 | AL359892 | 3114 | 1-100 |
| HSRFD34 | 547 | 575288 | AL353759 | 3115 | 1-306 |
| HSRFD34 | 547 | 575288 | AL359892 | 3116 | 1-384 |
| HSRFD34 | 547 | 575288 | AL353759 | 3117 | 1-1110 |
| HSRFD47 | 548 | 973782 | AL138891 | 3118 | 1-514 |
| HSRFD47 | 548 | 973782 | AC002418 | 3119 | 1-513 |
| HSRFD47 | 548 | 973782 | AC004386 | 3120 | 1-513 |
| HSRFD47 | 548 | 973782 | AL138891 | 3121 | 1-324 |
| HSRFD47 | 548 | 973782 | AL138891 | 3122 | 1-259 |
| HSRFD47 | 548 | 973782 | AC002418 | 3123 | 1-247 |
| HSRFD47 | 548 | 973782 | AC002418 | 3124 | 1-324 |
| HSRFD47 | 548 | 973782 | AC004386 | 3125 | 1-326 |
| HSRFE58 | 549 | 556519 | AL359317 | 3126 | 1-361 |
| HSRFE58 | 549 | 556519 | AL359317 | 3127 | 1-469 |
| HSRFG30 | 551 | 920265 | AC074389 | 3128 | 1-301 |
| HSRFG30 | 551 | 920265 | AC074389 | 3129 | 1-134 |
| HSRFR21 | 552 | 529767 | AC068147 | 3130 | 1-530 |
| | | | | | 887-1024 |
| | | | | | 1825-1890 |
| | | | | | 1972-2110 |
| | | | | | 2349-3981 |
| HSRFR21 | 552 | 529767 | AL355075 | 3131 | 1-530 |
| | | | | | 887-1024 |
| | | | | | 1825-1890 |
| | | | | | 1972-2110 |
| | | | | | 2349-3981 |
| HSRFR21 | 552 | 529767 | AC068147 | 3132 | 1-312 |
| HSRFR21 | 552 | 529767 | AL355075 | 3133 | 1-37 |
| | | | | | 3559-3797 |
| | | | | | 4958-5393 |
| | | | | | 5832-6145 |
| HSRFZ71 | 553 | 557976 | AC012321 | 3134 | 1-371 |
| HSRFZ71 | 553 | 557976 | AC009032 | 3135 | 1-424 |
| HSRFZ71 | 553 | 557976 | AC012321 | 3136 | 1-183 |
| HSRFZ71 | 553 | 557976 | AC009032 | 3137 | 1-117 |
| HSRGA32 | 554 | 529726 | AC023038 | 3138 | 1-651 |
| | | | | | 2271-3138 |
| HSRGE47 | 556 | 974539 | AC073835 | 3139 | 1-618 |
| HSRGE47 | 556 | 974539 | AC067884 | 3140 | 1-618 |
| HSRGE47 | 556 | 974539 | AL035404 | 3141 | 1-618 |
| HSRGE47 | 556 | 974539 | AL033526 | 3142 | 1-618 |
| HSRGE47 | 556 | 974539 | AC073835 | 3143 | 1-498 |
| HSRGE47 | 556 | 974539 | AC067884 | 3144 | 1-498 |
| HSRGE47 | 556 | 974539 | AC073835 | 3145 | 1-115 |
| HSRGE47 | 556 | 974539 | AC067884 | 3146 | 1-105 |
| HSRGE47 | 556 | 974539 | AL035404 | 3147 | 1-112 |
| HSRGE47 | 556 | 974539 | AL035404 | 3148 | 1-498 |
| HSRGE47 | 556 | 974539 | AL033526 | 3149 | 1-542 |
| HSRGE47 | 556 | 974539 | AL033526 | 3150 | 1-498 |
| HSRGG66 | 557 | 556518 | AL359317 | 3151 | 1-361 |
| HSRGG66 | 557 | 556518 | AL359317 | 3152 | 1-469 |
| HSRGK48 | 558 | 535012 | AC021704 | 3153 | 1-333 |
| | | | | | 585-958 |
| | | | | | 1261-2724 |
| | | | | | 3008-5183 |
| HSRGK48 | 558 | 535012 | AP000926 | 3154 | 1-1742 |
| HSRGK48 | 558 | 535012 | AC021704 | 3155 | 1-216 |
| HSRGK48 | 558 | 535012 | AP000926 | 3156 | 1-133 |
| HSRGK48 | 558 | 535012 | AC021704 | 3157 | 1-302 |
| HSRGQ30 | 559 | 534479 | AC019290 | 3158 | 1-958 |
| | | | | | 1145-1459 |
| | | | | | 2194-2545 |
| | | | | | 5158-5806 |
| | | | | | 5881-6559 |
| | | | | | 6817-7280 |
| | | | | | 9590-11032 |
| | | | | | 15003-15425 |
| | | | | | 15440-16134 |
| | | | | | 16243-17784 |
| HSRGQ30 | 559 | 534479 | AC019290 | 3159 | 1-861 |
| HSRGQ30 | 559 | 534479 | AC019290 | 3160 | 1-106 |
| HSRGS08 | 560 | 960211 | AC025237 | 3161 | 1-313 |
| HSRGS08 | 560 | 960211 | AC068820 | 3162 | 1-294 |
| HSRGS08 | 560 | 960211 | AC007512 | 3163 | 1-313 |
| HSRGS08 | 560 | 960211 | AC025237 | 3164 | 1-170 |
| HSRGV79 | 561 | 921005 | AL358572 | 3165 | 1-347 |
| HSRGV79 | 561 | 921005 | AL358572 | 3166 | 1-272 |
| HSRGW30 | 562 | 529624 | AC048334 | 3167 | 1-443 |
| HSRGW30 | 562 | 529624 | AC048334 | 3168 | 1-590 |
| HSRGZ32 | 563 | 699561 | AC025360 | 3169 | 1-357 |
| HSRGZ32 | 563 | 699561 | AC025360 | 3170 | 1-357 |
| HSRGZ32 | 563 | 699561 | AL357392 | 3171 | 1-297 |
| | | | | | 1639-2093 |
| | | | | | 2352-2848 |
| | | | | | 4569-4713 |
| | | | | | 4984-5109 |
| | | | | | 11452-11932 |
| | | | | | 13121-13288 |
| | | | | | 13549-13645 |
| | | | | | 13652-13839 |
| | | | | | 15524-15838 |
| | | | | | 16857-18913 |
| | | | | | 20337-21103 |
| | | | | | 21352-21708 |
| | | | | | 22110-22238 |
| | | | | | 22247-22869 |
| | | | | | 22965-23776 |
| | | | | | 23788-23974 |
| | | | | | 24046-24148 |
| | | | | | 26447-27494 |
| | | | | | 30722-30802 |
| | | | | | 31268-31671 |
| | | | | | 32004-32170 |
| | | | | | 32357-32872 |
| | | | | | 33172-33626 |
| | | | | | 34576-34976 |
| | | | | | 34979-35314 |
| | | | | | 35835-35960 |
| | | | | | 37121-37649 |
| | | | | | 38879-38931 |
| | | | | | 39519-39903 |
| | | | | | 41171-41423 |
| | | | | | 42238-42335 |
| | | | | | 42757-42896 |
| | | | | | 43312-43990 |
| | | | | | 44539-44733 |
| | | | | | 45461-46240 |
| HSRGZ32 | 563 | 699561 | AL136373 | 3172 | 1-357 |
| | | | | | 759-1545 |
| HSRGZ32 | 563 | 699561 | AL357392 | 3173 | 1-1942 |
| HSRGZ32 | 563 | 699561 | AL136373 | 3174 | 1-767 |
| HSRGZ32 | 563 | 699561 | AL136373 | 3175 | 1-812 |
| HSRHA45 | 564 | 974551 | AP002474 | 3176 | 1-293 |
| | | | | | 1734-2394 |
| HSRHA45 | 564 | 974551 | AC017100 | 3177 | 1-293 |
| | | | | | 1736-2380 |
| HSRHA45 | 564 | 974551 | AC017100 | 3178 | 1-295 |
| HSSAE47 | 565 | 720685 | AL354800 | 3179 | 1-399 |
| HSSAE47 | 565 | 720685 | AL354800 | 3180 | 1-2674 |
| HSSAF46 | 566 | 508117 | AL389915 | 3181 | 1-340 |
| HSSAV18 | 569 | 508832 | AC022827 | 3182 | 1-255 |
| HSSAV18 | 569 | 508832 | AC021755 | 3183 | 1-241 |
| HSSAV18 | 569 | 508832 | AC025429 | 3184 | 1-254 |
| HSSAV18 | 569 | 508832 | AC022827 | 3185 | 1-223 |
| HSSAV18 | 569 | 508832 | AC025429 | 3186 | 1-223 |
| HSSBO48 | 571 | 871217 | AC021150 | 3187 | 1-361 |
| | | | | | 534-773 |
| HSSBO48 | 571 | 871217 | AC010868 | 3188 | 1-652 |
| HSSBO59 | 572 | 707683 | AC010494 | 3189 | 1-6900 |
| | | | | | 7239-7739 |
| HSSBO59 | 572 | 707683 | AC010494 | 3190 | 1-88 |
| HSSDJ02 | 574 | 871226 | AL035681 | 3191 | 1-339 |
| | | | | | 570-635 |
| HSSDJ02 | 574 | 871226 | AL035681 | 3192 | 1-274 |
| HSSDR63 | 577 | 537329 | AC027775 | 3193 | 1-344 |
| HSSDR63 | 577 | 537329 | AC006071 | 3194 | 1-1724 |
| | | | | | 27970-28313 |
| HSSDR63 | 577 | 537329 | AC002092 | 3195 | 1-344 |
| HSSDR63 | 577 | 537329 | AC027775 | 3196 | 1-131 |
| | | | | | 463-743 |
| | | | | | 2009-2872 |
| HSSDR63 | 577 | 537329 | AC006071 | 3197 | 1-366 |
| | | | | | 595-1143 |
| | | | | | 1448-1878 |
| HSSDR63 | 577 | 537329 | AC006071 | 3198 | 1-181 |
| | | | | | 496-644 |
| | | | | | 3728-3863 |
| | | | | | 26357-26487 |
| | | | | | 26819-27099 |
| | | | | | 28365-29228 |
| HSSDR63 | 577 | 537329 | AC002092 | 3199 | 1-108 |
| | | | | | 437-717 |
| | | | | | 1984-2853 |
| HSSED56 | 579 | 625572 | AC016217 | 3200 | 1-472 |
| HSSED56 | 579 | 625572 | AC074059 | 3201 | 1-466 |
| HSSED56 | 579 | 625572 | AC074059 | 3202 | 1-357 |
| HSSEF29 | 580 | 689837 | AC008871 | 3203 | 1-570 |
| HSSEF29 | 580 | 689837 | AC034207 | 3204 | 1-570 |
| HSSEF29 | 580 | 689837 | AC008871 | 3205 | 1-279 |
| HSSEF29 | 580 | 689837 | AC008871 | 3206 | 1-760 |
| HSSEF29 | 580 | 689837 | AC034207 | 3207 | 1-760 |
| HSSEF29 | 580 | 689837 | AC034207 | 3208 | 1-276 |
| HSSEK75 | 581 | 766507 | AC024895 | 3209 | 1-422 |
| HSSEK75 | 581 | 766507 | AC024895 | 3210 | 1-116 |
| HSSFF80 | 585 | 753589 | AC008969 | 3211 | 1-514 |
| | | | | | 1300-1805 |
| | | | | | 2627-2795 |
| | | | | | 3012-3127 |
| | | | | | 3212-3649 |
| | | | | | 3737-4319 |
| HSSFF80 | 585 | 753589 | AC008969 | 3212 | 1-372 |
| HSSFQ43 | 586 | 715318 | AC007367 | 3213 | 1-405 |
| HSSFQ43 | 586 | 715318 | AC007367 | 3214 | 1-179 |
| HSSFR41 | 587 | 707006 | AC022554 | 3215 | 1-352 |
| HSSFR41 | 587 | 707006 | AC022554 | 3216 | 1-201 |
| | | | | | 593-712 |
| | | | | | 1881-2119 |
| HSSGC66 | 590 | 319740 | AL138932 | 3217 | 1-741 |
| HSSGC66 | 590 | 319740 | AL138932 | 3218 | 1-90 |
| | | | | | 595-734 |
| | | | | | 881-1278 |
| | | | | | 1536-1738 |
| HSSGC72 | 591 | 760648 | AC024698 | 3219 | 1-336 |
| HSSGD37 | 592 | 739505 | AL049569 | 3220 | 1-82 |
| | | | | | 275-341 |
| | | | | | 1841-1977 |
| | | | | | 2063-2139 |
| | | | | | 2194-2691 |
| | | | | | 5080-5358 |
| | | | | | 5882-5991 |
| | | | | | 6077-6125 |
| | | | | | 6212-6453 |
| | | | | | 7213-7705 |
| | | | | | 8540-8750 |
| | | | | | 9481-9914 |
| | | | | | 9974-10134 |
| | | | | | 10248-10369 |
| | | | | | 10517-10947 |
| | | | | | 11237-11378 |
| | | | | | 12087-12252 |
| | | | | | 12375-12492 |
| | | | | | 12604-12686 |
| | | | | | 13449-13596 |
| | | | | | 13860-14052 |
| | | | | | 14140-14239 |
| | | | | | 15107-15333 |
| | | | | | 15420-15572 |
| | | | | | 15744-15914 |
| | | | | | 16014-16419 |
| | | | | | 16727-16993 |
| | | | | | 19574-19616 |
| HSSGD37 | 592 | 739505 | AL049569 | 3221 | 1-66 |
| | | | | | 84-587 |
| | | | | | 615-747 |
| | | | | | 1028-1293 |
| HSSGD37 | 592 | 739505 | AL049569 | 3222 | 1-44 |
| | | | | | 726-974 |
| | | | | | 3244-3325 |
| | | | | | 4341-4452 |
| | | | | | 4637-4911 |
| | | | | | 5009-5327 |
| | | | | | 5626-6112 |
| | | | | | 6215-6292 |
| | | | | | 6536-7067 |
| HSSGH47 | 593 | 720367 | AC022702 | 3223 | 1-363 |
| HSSGH47 | 593 | 720367 | AC022702 | 3224 | 1-519 |
| HSSGH47 | 593 | 720367 | AC022702 | 3225 | 1-317 |
| | | | | | 1555-1819 |
| HSSGI20 | 594 | 668919 | AC021706 | 3226 | 1-347 |
| HSSGI20 | 594 | 668919 | AL136450 | 3227 | 1-347 |
| HSSGI20 | 594 | 668919 | AC021706 | 3228 | 1-464 |
| HSSGI20 | 594 | 668919 | AL136450 | 3229 | 1-464 |
| HSSGI75 | 595 | 767325 | AL139383 | 3230 | 1-360 |
| HSSGI75 | 595 | 767325 | AL138999 | 3231 | 1-360 |
| HSSGK96 | 597 | 960636 | AC020917 | 3232 | 1-388 |
| HSSGK96 | 597 | 960636 | AC020917 | 3233 | 1-149 |
| HSSGL78 | 599 | 788924 | AC005841 | 3234 | 1-3246 |
| | | | | | 4046-4159 |
| | | | | | 5174-5965 |
| | | | | | 7066-7244 |
| | | | | | 7431-7504 |
| | | | | | 8084-8427 |
| | | | | | 8694-8902 |
| | | | | | 9077-9497 |
| | | | | | 9523-9904 |
| | | | | | 10260-10424 |
| | | | | | 11181-11505 |
| | | | | | 11877-12297 |
| | | | | | 12756-12874 |
| | | | | | 14112-14459 |
| | | | | | 14847-14996 |
| | | | | | 15082-15195 |
| | | | | | 16726-17286 |
| HSSGL78 | 599 | 788924 | AC005841 | 3235 | 1-693 |
| HSSGM62 | 600 | 707685 | AC064828 | 3236 | 1-65 |
| | | | | | 2182-2642 |
| | | | | | 3222-3329 |
| | | | | | 3645-3854 |
| | | | | | 4263-4601 |
| | | | | | 5303-7155 |
| | | | | | 8825-9100 |
| | | | | | 9711-9935 |
| | | | | | 10619-10701 |
| | | | | | 11474-11616 |
| | | | | | 11874-12030 |
| | | | | | 13114-13218 |
| | | | | | 13874-14248 |
| | | | | | 14325-14414 |
| | | | | | 14931-15123 |
| | | | | | 15201-15745 |
| HSSGM62 | 600 | 707685 | AC064828 | 3237 | 1-224 |
| HSSGN47 | 601 | 707003 | AC022315 | 3238 | 1-62 |
| | | | | | 305-1003 |
| HSSGN47 | 601 | 707003 | AC022315 | 3239 | 1-426 |
| HSSHA92 | 602 | 792714 | AC023063 | 3240 | 1-724 |
| | | | | | 973-1276 |
| | | | | | 1397-2502 |
| | | | | | 2614-3602 |
| | | | | | 3807-4452 |
| | | | | | 5922-6379 |
| | | | | | 6627-7572 |
| | | | | | 7734-8858 |
| | | | | | 9293-9552 |
| | | | | | 9731-9814 |
| | | | | | 9877-10090 |
| | | | | | 10212-11155 |
| | | | | | 11222-12167 |
| HSSHA92 | 602 | 792714 | AC023063 | 3241 | 1-141 |
| HSSJV60 | 606 | 970749 | AL390920 | 3242 | 1-431 |
| HSSJV60 | 606 | 970749 | AL390920 | 3243 | 1-583 |
| HSSKB40 | 607 | 711130 | Z83844 | 3244 | 1-372 |
| | | | | | 1469-1781 |
| | | | | | 2529-2839 |
| | | | | | 3496-3656 |
| | | | | | 3731-3846 |
| | | | | | 4787-4930 |
| | | | | | 5149-5433 |
| | | | | | 6116-6202 |
| | | | | | 7067-9372 |
| HSSKB40 | 607 | 711130 | Z83844 | 3245 | 1-351 |
| HSSKB40 | 607 | 711130 | Z83844 | 3246 | 1-274 |
| HSSMT78 | 608 | 712468 | AP001473 | 3247 | 1-138 |
| | | | | | 675-1422 |
| | | | | | 1573-1870 |
| HSSMT78 | 608 | 712468 | AP001101 | 3248 | 1-748 |
| | | | | | 899-1196 |
| | | | | | 1239-1713 |
| HSSMT78 | 608 | 712468 | AP001473 | 3249 | 1-259 |
| HYBAE74 | 609 | 925074 | AC006121 | 3250 | 1-76 |
| | | | | | 283-455 |
| | | | | | 1081-2096 |
| | | | | | 2241-2468 |
| | | | | | 3824-3881 |
| | | | | | 4776-4998 |
| | | | | | 5882-6048 |
| | | | | | 7438-7572 |
| | | | | | 8605-8867 |
| | | | | | 8905-9483 |
| | | | | | 9616-9748 |
| | | | | | 10809-11421 |
| | | | | | 12429-12580 |
| | | | | | 12991-13310 |
| | | | | | 14224-14404 |
| | | | | | 15332-16217 |
| | | | | | 18288-18453 |
| | | | | | 18666-19007 |
| | | | | | 19613-20374 |
| | | | | | 20936-21073 |
| | | | | | 21639-22085 |
| | | | | | 22088-22332 |
| | | | | | 22816-22950 |
| | | | | | 24715-24977 |
| | | | | | 25733-26161 |
| | | | | | 26930-27124 |
| | | | | | 27348-27453 |
| | | | | | 28458-28682 |
| | | | | | 28764-28863 |
| | | | | | 31423-31717 |
| | | | | | 32555-32715 |
| | | | | | 32956-33127 |
| | | | | | 33269-33545 |
| | | | | | 33919-34319 |
| | | | | | 36103-38140 |
| HYBAE74 | 609 | 925074 | AL109797 | 3251 | 1-76 |
| | | | | | 283-455 |
| | | | | | 1081-2096 |
| | | | | | 2241-2468 |
| | | | | | 2777-2914 |
| | | | | | 3824-3881 |
| | | | | | 4776-4998 |
| | | | | | 5882-6048 |
| | | | | | 7438-7572 |
| | | | | | 8605-8867 |
| | | | | | 8905-9483 |
| | | | | | 9614-9744 |
| | | | | | 10810-11422 |
| | | | | | 12430-12580 |
| | | | | | 12992-13311 |
| | | | | | 14225-14405 |
| | | | | | 15333-16218 |
| | | | | | 18289-18454 |
| | | | | | 18667-19008 |
| | | | | | 19614-20375 |
| | | | | | 20937-21074 |
| | | | | | 21640-22086 |
| | | | | | 22089-22333 |
| | | | | | 22817-22951 |
| | | | | | 25734-26162 |
| | | | | | 26931-27125 |
| | | | | | 27349-27454 |
| | | | | | 28228-28352 |
| | | | | | 28459-28683 |
| | | | | | 28765-28864 |
| | | | | | 31425-31718 |
| | | | | | 32476-32792 |
| | | | | | 32957-33128 |
| | | | | | 33270-33546 |
| | | | | | 33920-34321 |
| | | | | | 35214-35796 |
| | | | | | 36099-38136 |
| HYBAE74 | 609 | 925074 | AL109797 | 3252 | 1-108 |
| HYBAE74 | 609 | 925074 | AL109797 | 3253 | 1-112 |
| HYBAG11 | 610 | 967880 | AC018381 | 3254 | 1-203 |
| HYBAG11 | 610 | 967880 | AC007734 | 3255 | 1-203 |
| HYBAG11 | 610 | 967880 | AL049715 | 3256 | 1-490 |
| HYBAG11 | 610 | 967880 | AC024119 | 3257 | 1-204 |
| HYBAG11 | 610 | 967880 | AC007734 | 3258 | 1-446 |
| HYBAG11 | 610 | 967880 | AL049715 | 3259 | 1-444 |
| HYBAG11 | 610 | 967880 | AL049715 | 3260 | 1-2160 |
| HYBAG11 | 610 | 967880 | AC024119 | 3261 | 1-444 |
| HYBAU83 | 611 | 732419 | AL353793 | 3262 | 1-133 |
| HYBAY40 | 613 | 531202 | AC022364 | 3263 | 1-385 |
| HYBBB24 | 614 | 584989 | AC024906 | 3264 | 1-488 |
| HYBBI18 | 615 | 584991 | AC073460 | 3265 | 1-339 |
| HYBBI18 | 615 | 584991 | AL354945 | 3266 | 1-339 |
| HYBBI18 | 615 | 584991 | AL355292 | 3267 | 1-339 |
| HYBBI18 | 615 | 584991 | AL355292 | 3268 | 1-784 |
| HYBBI18 | 615 | 584991 | AL354945 | 3269 | 1-192 |
| | | | | | 214-889 |
| HYBBI18 | 615 | 584991 | AL355292 | 3270 | 1-192 |
| | | | | | 214-889 |
| HYBBJ30 | 616 | 693345 | AC011973 | 3271 | 1-2411 |
| HYBBJ30 | 616 | 693345 | AC016999 | 3272 | 1-2448 |
| HYBBJ30 | 616 | 693345 | AC011973 | 3273 | 1-1242 |
| HYBBJ30 | 616 | 693345 | AC016999 | 3274 | 1-777 |
| HYBBL17 | 617 | 691328 | AC027074 | 3275 | 1-1214 |
| | | | | | 1541-2851 |
| HYBBL17 | 617 | 691328 | AC027074 | 3276 | 1-503 |
| HYBAY92 | 620 | 792923 | AC006095 | 3277 | 1-443 |
| | | | | | 460-925 |
| HYBAY92 | 620 | 792923 | AC012470 | 3278 | 1-443 |
| | | | | | 460-925 |
| HYBAW03 | 621 | 925068 | AP001628 | 3279 | 1-339 |
| HYBAW03 | 621 | 925068 | AP001628 | 3280 | 1-78 |
| | | | | | 88-287 |
| HYBAW03 | 621 | 925068 | AP001628 | 3281 | 1-1050 |
| HYBAF63 | 624 | 745585 | AC022188 | 3282 | 1-616 |
| HYBAF63 | 624 | 745585 | AC022188 | 3283 | 1-523 |
| HSSMZ93 | 625 | 530752 | AL365272 | 3284 | 1-593 |
| HSSMZ93 | 625 | 530752 | AL035696 | 3285 | 1-593 |
| HSSMW90 | 627 | 975081 | AL360017 | 3286 | 1-734 |
| | | | | | 1885-2084 |
| | | | | | 2683-2777 |
| | | | | | 2921-2978 |
| HSSMW90 | 627 | 975081 | AC026576 | 3287 | 1-734 |
| | | | | | 1885-2084 |
| | | | | | 2683-2777 |
| | | | | | 2921-2978 |
| HSSMW90 | 627 | 975081 | AL035413 | 3288 | 1-734 |
| | | | | | 1876-2075 |
| | | | | | 2674-2768 |
| | | | | | 2912-2969 |
| HSSMT76 | 628 | 928421 | AC023864 | 3289 | 1-142 |
| HSSMT76 | 628 | 928421 | AC010550 | 3290 | 1-127 |
| HSSMT76 | 628 | 928421 | AL117190 | 3291 | 1-102 |
| | | | | | 2590-2699 |
| | | | | | 2915-9959 |
| | | | | | 10043-10287 |
| | | | | | 13264-13656 |
| | | | | | 15305-15737 |
| | | | | | 17026-17496 |
| | | | | | 18233-18688 |
| | | | | | 19340-19416 |
| | | | | | 19587-21391 |
| | | | | | 21539-24538 |
| | | | | | 25521-25888 |
| | | | | | 26530-28357 |
| | | | | | 29835-30529 |
| | | | | | 30546-31506 |
| | | | | | 33033-34910 |
| HSSMT76 | 628 | 928421 | AC023864 | 3292 | 1-3115 |
| | | | | | 3220-4704 |
| HSSMT76 | 628 | 928421 | AL117190 | 3293 | 1-441 |
| HSSMT70 | 629 | 530758 | AC018546 | 3294 | 1-735 |
| HSSMT70 | 629 | 530758 | AC018546 | 3295 | 1-189 |
| HSSMP20 | 630 | 854092 | AC022784 | 3296 | 1-377 |
| HSSJP81 | 633 | 911334 | AC023133 | 3297 | 1-126 |
| | | | | | 276-308 |
| | | | | | 1686-1833 |
| | | | | | 4690-4918 |
| | | | | | 5836-6297 |
| | | | | | 6805-7376 |
| | | | | | 8288-8522 |
| | | | | | 8528-9952 |
| | | | | | 10213-10496 |
| | | | | | 10505-11457 |
| | | | | | 11505-13731 |
| | | | | | 14167-14297 |
| | | | | | 14407-14572 |
| | | | | | 15189-15243 |
| | | | | | 16434-16536 |
| | | | | | 17286-17446 |
| | | | | | 18631-18739 |
| | | | | | 19790-19945 |
| | | | | | 20293-20475 |
| | | | | | 20724-20848 |
| | | | | | 21136-21270 |
| | | | | | 22395-22470 |
| | | | | | 24078-24251 |
| | | | | | 24582-24791 |
| | | | | | 24797-25044 |
| | | | | | 26412-26845 |
| | | | | | 26967-27066 |
| | | | | | 27787-28134 |
| | | | | | 28454-28520 |
| | | | | | 29195-30013 |
| HSSJK65 | 635 | 747891 | AC024293 | 3298 | 1-911 |
| HSSJK65 | 635 | 747891 | AC024293 | 3299 | 1-83 |
| HSSJK65 | 635 | 747891 | AC024293 | 3300 | 1-369 |
| HSSJH78 | 636 | 773558 | AC025637 | 3301 | 1-136 |
| | | | | | 557-2246 |
| | | | | | 2282-2427 |
| | | | | | 2717-2843 |
| | | | | | 2949-3739 |
| | | | | | 3823-4409 |
| | | | | | 4880-6134 |
| HSSJH78 | 636 | 773558 | AC024225 | 3302 | 1-1255 |
| HSSJH78 | 636 | 773558 | AC055707 | 3303 | 1-489 |
| HSSJH78 | 636 | 773558 | AC024225 | 3304 | 1-177 |
| HSSJH78 | 636 | 773558 | AC055707 | 3305 | 1-177 |
| HSSJH78 | 636 | 773558 | AC025637 | 3306 | 1-177 |
| HSSJH78 | 636 | 773558 | AC024225 | 3307 | 1-145 |
| | | | | | 433-559 |
| | | | | | 665-1455 |
| | | | | | 1539-2125 |
| HSSJA08 | 637 | 959336 | AC026543 | 3308 | 1-1000 |
| | | | | | 1171-1630 |
| | | | | | 2138-2439 |
| | | | | | 2590-3651 |
| HSSJA08 | 637 | 959336 | AC058799 | 3309 | 1-673 |
| HSSJA08 | 637 | 959336 | AC026543 | 3310 | 1-451 |
| HSSGJ84 | 639 | 781975 | AC023014 | 3311 | 1-65 |
| | | | | | 1437-1596 |
| | | | | | 1951-2373 |
| | | | | | 2381-2579 |
| | | | | | 2587-2748 |
| | | | | | 3063-3531 |
| | | | | | 3761-5598 |
| | | | | | 5758-6269 |
| | | | | | 6338-7043 |
| | | | | | 8097-8460 |
| | | | | | 9089-9348 |
| | | | | | 9365-10612 |
| HSSGJ84 | 639 | 781975 | AL161635 | 3312 | 1-469 |
| HSSGJ84 | 639 | 781975 | AL139400 | 3313 | 1-65 |
| | | | | | 1437-1596 |
| | | | | | 1960-2372 |
| | | | | | 2380-2578 |
| | | | | | 2586-2747 |
| | | | | | 3062-3530 |
| | | | | | 3760-5597 |
| | | | | | 5757-6268 |
| | | | | | 6337-7352 |
| | | | | | 8100-8463 |
| | | | | | 9091-9350 |
| | | | | | 9367-10614 |
| HSSGJ84 | 639 | 781975 | AC023014 | 3314 | 1-195 |
| HSSGJ84 | 639 | 781975 | AC023014 | 3315 | 1-1632 |
| HSSGJ84 | 639 | 781975 | AL161635 | 3316 | 1-162 |
| HSSGJ84 | 639 | 781975 | AL139400 | 3317 | 1-195 |
| HSSGJ84 | 639 | 781975 | AL139400 | 3318 | 1-1632 |
| HSSFW84 | 643 | 781973 | AC004590 | 3319 | 1-126 |
| | | | | | 4595-5120 |
| | | | | | 5544-5846 |
| HSSFW84 | 643 | 781973 | AC021491 | 3320 | 1-126 |
| | | | | | 4596-5122 |
| | | | | | 5546-5848 |
| HSSFW84 | 643 | 781973 | AC004590 | 3321 | 1-363 |
| | | | | | 528-624 |
| | | | | | 1405-1605 |
| | | | | | 1762-2101 |
| | | | | | 3675-4861 |
| | | | | | 4937-5153 |
| | | | | | 5209-5321 |
| | | | | | 5476-6047 |
| | | | | | 6368-6572 |
| | | | | | 6665-6815 |
| | | | | | 6882-7049 |
| | | | | | 7237-7358 |
| | | | | | 7400-7575 |
| | | | | | 7693-7815 |
| | | | | | 8090-8192 |
| | | | | | 8405-8680 |
| HSSFW84 | 643 | 781973 | AC021491 | 3322 | 1-363 |
| | | | | | 528-624 |
| | | | | | 1403-1603 |
| | | | | | 1760-2099 |
| | | | | | 3673-4859 |
| | | | | | 4935-5151 |
| | | | | | 5207-5319 |
| | | | | | 5474-6045 |
| | | | | | 6366-6570 |
| | | | | | 6663-6813 |
| | | | | | 6880-7047 |
| | | | | | 7235-7356 |
| | | | | | 7398-7573 |
| | | | | | 7691-7813 |
| | | | | | 8088-8190 |
| | | | | | 8403-8677 |
| HSSFU84 | 644 | 888462 | Z82214 | 3323 | 1-554 |
| HSSFU84 | 644 | 888462 | Z82214 | 3324 | 1-468 |
| HSSFU84 | 644 | 888462 | Z82214 | 3325 | 1-37 |
| | | | | | 826-1969 |
| | | | | | 3475-3813 |
| HSSFN08 | 645 | 959735 | AF031078 | 3326 | 1-1820 |
| HSSFN08 | 645 | 959735 | AF030876 | 3327 | 1-1820 |
| HSSFN08 | 645 | 959735 | AF031075 | 3328 | 1-1820 |
| HSSFN08 | 645 | 959735 | AF031078 | 3329 | 1-171 |
| HSSFN08 | 645 | 959735 | AF031078 | 3330 | 1-403 |
| HSSFN08 | 645 | 959735 | AF030876 | 3331 | 1-171 |
| HSSFN08 | 645 | 959735 | AF031075 | 3332 | 1-171 |
| HSSFN08 | 645 | 959735 | AF030876 | 3333 | 1-403 |
| HSSFN08 | 645 | 959735 | AF031075 | 3334 | 1-403 |
| HSSFK90 | 646 | 788687 | Z93014 | 3335 | 1-587 |
| HSSFK90 | 646 | 788687 | AL121601 | 3336 | 1-368 |
| | | | | | 1848-2434 |
| HSSFK90 | 646 | 788687 | AL121601 | 3337 | 1-617 |
| HSSFB73 | 647 | 955200 | AC022222 | 3338 | 1-504 |
| HSSFB73 | 647 | 955200 | AC007537 | 3339 | 1-374 |
| HSSFB73 | 647 | 955200 | AC007537 | 3340 | 1-288 |
| HSSEU40 | 648 | 891055 | AL137253 | 3341 | 1-1147 |
| HSSEU40 | 648 | 891055 | AL356299 | 3342 | 1-994 |
| HSSEU40 | 648 | 891055 | AL137253 | 3343 | 1-276 |
| HSSEU40 | 648 | 891055 | AL356299 | 3344 | 1-276 |
| HSSEU40 | 648 | 891055 | AL356299 | 3345 | 1-125 |
| HSSEP69 | 649 | 871211 | AC069454 | 3346 | 1-380 |
| HSSEP69 | 649 | 871211 | AC069454 | 3347 | 1-498 |
| HSSEG25 | 651 | 679351 | Z83845 | 3348 | 1-504 |
| | | | | | 658-707 |
| | | | | | 1786-3045 |
| | | | | | 3351-4099 |
| HSSEG25 | 651 | 679351 | Z83845 | 3349 | 1-134 |
| | | | | | 492-798 |
| | | | | | 1739-1873 |
| | | | | | 2345-2537 |
| | | | | | 2704-2846 |
| | | | | | 3729-3841 |
| | | | | | 4515-4623 |
| | | | | | 6820-6962 |
| | | | | | 8496-8600 |
| | | | | | 9505-10043 |
| | | | | | 10660-10776 |
| | | | | | 11694-11920 |
| | | | | | 13014-13175 |
| | | | | | 14177-14195 |
| | | | | | 14510-16877 |
| HSSEG25 | 651 | 679351 | Z83845 | 3350 | 1-684 |
| HSSDH37 | 656 | 575460 | AC012645 | 3351 | 1-198 |
| | | | | | 3475-3669 |
| | | | | | 3852-3972 |
| | | | | | 4235-4359 |
| | | | | | 4732-4864 |
| | | | | | 5008-5124 |
| | | | | | 5225-5405 |
| | | | | | 5625-5969 |
| | | | | | 6143-6258 |
| | | | | | 6374-6421 |
| | | | | | 6906-7032 |
| | | | | | 7306-8679 |
| | | | | | 8955-8999 |
| | | | | | 9225-9361 |
| | | | | | 9451-9491 |
| | | | | | 9590-9712 |
| | | | | | 9797-9886 |
| | | | | | 10489-10631 |
| | | | | | 10718-11123 |
| | | | | | 11611-11742 |
| | | | | | 12900-13178 |
| | | | | | 13587-13646 |
| | | | | | 13755-13808 |
| HSSDH37 | 656 | 575460 | AC012645 | 3352 | 1-102 |
| HSSDH37 | 656 | 575460 | AC012645 | 3353 | 1-377 |
| HSSCC14 | 658 | 600216 | AC010203 | 3354 | 1-1677 |
| | | | | | 2250-3207 |
| | | | | | 3870-4245 |
| | | | | | 4249-5488 |
| | | | | | 6198-6240 |
| | | | | | 6837-6924 |
| | | | | | 7178-7390 |
| | | | | | 7472-7755 |
| | | | | | 7836-8511 |
| | | | | | 10534-10971 |
| | | | | | 11857-12094 |
| | | | | | 13226-13689 |
| | | | | | 13754-15275 |
| | | | | | 16452-16747 |
| HSSCC14 | 658 | 600216 | AC010203 | 3355 | 1-48 |
| | | | | | 239-1330 |
| HSSCC14 | 658 | 600216 | AC010203 | 3356 | 1-101 |
| HSSAZ04 | 659 | 933015 | AC027783 | 3357 | 1-1623 |
| HSSAZ04 | 659 | 933015 | AC027576 | 3358 | 1-3083 |
| | | | | | 3314-3536 |
| | | | | | 3565-4033 |
| HSSAZ04 | 659 | 933015 | AC005768 | 3359 | 1-1734 |
| HSSAZ04 | 659 | 933015 | AC027783 | 3360 | 1-1467 |
| HSSAZ04 | 659 | 933015 | AC027576 | 3361 | 1-759 |
| HSSAZ04 | 659 | 933015 | AC027576 | 3362 | 1-300 |
| HSSAZ04 | 659 | 933015 | AC005768 | 3363 | 1-460 |
| | | | | | 824-1439 |
| | | | | | 3142-3504 |
| | | | | | 3774-6883 |
| HSSAZ04 | 659 | 933015 | AC005768 | 3364 | 1-1314 |
| | | | | | 1545-1767 |
| | | | | | 1796-2264 |
| HSSAY34 | 660 | 703345 | AL138932 | 3365 | 1-2635 |
| HSSAY34 | 660 | 703345 | AL138932 | 3366 | 1-308 |
| HSSAJ89 | 662 | 875882 | AP002776 | 3367 | 1-1505 |
| | | | | | 1576-1638 |
| | | | | | 1725-2468 |
| | | | | | 2580-2670 |
| | | | | | 2740-2899 |
| | | | | | 3033-3576 |
| | | | | | 3635-4235 |
| HSSAJ89 | 662 | 875882 | AP001885 | 3368 | 1-160 |
| | | | | | 294-837 |
| | | | | | 896-1496 |
| HSSAJ89 | 662 | 875882 | AP001885 | 3369 | 1-91 |
| HSRAY10 | 665 | 961237 | AC021441 | 3370 | 1-696 |
| HSRAY10 | 665 | 961237 | AC009908 | 3371 | 1-696 |
| HSRAS82 | 666 | 780222 | U73168 | 3372 | 1-66 |
| | | | | | 273-3210 |
| | | | | | 3587-3673 |
| | | | | | 3859-5330 |
| | | | | | 5564-5736 |
| | | | | | 6777-6884 |
| | | | | | 7014-7581 |
| | | | | | 8079-8158 |
| | | | | | 8239-8314 |
| | | | | | 9254-9356 |
| | | | | | 9595-10142 |
| | | | | | 10389-10474 |
| | | | | | 10689-11491 |
| | | | | | 11670-12184 |
| | | | | | 12238-13548 |
| | | | | | 13949-14101 |
| | | | | | 14179-14873 |
| | | | | | 15079-15168 |
| | | | | | 15181-15801 |
| | | | | | 15905-16167 |
| | | | | | 16535-16718 |
| | | | | | 16934-18966 |
| HSRAS82 | 666 | 780222 | U73168 | 3373 | 1-1130 |
| HSRAF70 | 667 | 524680 | AC053513 | 3374 | 1-28 |
| | | | | | 1617-1660 |
| | | | | | 3033-3127 |
| | | | | | 4677-4779 |
| | | | | | 5039-6378 |
| | | | | | 8362-8557 |
| | | | | | 10265-11200 |
| | | | | | 14774-14940 |
| | | | | | 18361-18501 |
| | | | | | 20445-20509 |
| | | | | | 20542-20996 |
| | | | | | 21185-21285 |
| | | | | | 21764-21855 |
| | | | | | 22332-22430 |
| | | | | | 23457-23543 |
| | | | | | 23635-24413 |
| | | | | | 24752-25169 |
| | | | | | 27477-27906 |
| | | | | | 28690-29213 |
| | | | | | 29550-30031 |
| | | | | | 32052-32497 |
| | | | | | 32648-33369 |
| | | | | | 34122-34768 |
| | | | | | 35360-36282 |
| | | | | | 39205-39354 |
| | | | | | 43359-44706 |
| HSRAD72 | 669 | 539530 | AC048337 | 3375 | 1-110 |
| | | | | | 147-669 |
| HSRAD72 | 669 | 539530 | AC048337 | 3376 | 1-176 |
| HSRAD65 | 670 | 871268 | AF128834 | 3377 | 1-979 |
| | | | | | 1451-1781 |
| | | | | | 1817-2962 |
| HSRAD65 | 670 | 871268 | AF128834 | 3378 | 1-195 |
| | | | | | 1123-1226 |
| | | | | | 1250-1367 |
| | | | | | 2556-2701 |
| HSRAD65 | 670 | 871268 | AF128834 | 3379 | 1-784 |
| HSRAD53 | 671 | 525490 | AL353672 | 3380 | 1-316 |
| HSRAD53 | 671 | 525490 | AC026573 | 3381 | 1-316 |
| HSRAD53 | 671 | 525490 | AL353588 | 3382 | 1-316 |
| HSRAD53 | 671 | 525490 | AL353672 | 3383 | 1-523 |
| HSRAD53 | 671 | 525490 | AC026573 | 3384 | 1-526 |
| HSRAD53 | 671 | 525490 | AL353588 | 3385 | 1-526 |
| HSRAD31 | 673 | 524845 | AC073662 | 3386 | 1-247 |
| HSRAD31 | 673 | 524845 | AP001965 | 3387 | 1-247 |
| HSRAD31 | 673 | 524845 | AC073662 | 3388 | 1-1268 |
| HSRAD31 | 673 | 524845 | AP001965 | 3389 | 1-1268 |
| HSRAD10 | 674 | 968614 | AC018804 | 3390 | 1-814 |
| | | | | | 1343-1452 |
| | | | | | 1467-1598 |
| | | | | | 2200-2386 |
| | | | | | 2433-2474 |
| | | | | | 4962-5052 |
| | | | | | 6603-6691 |
| | | | | | 7946-8094 |
| | | | | | 8249-8326 |
| | | | | | 8703-8816 |
| | | | | | 8926-8978 |
| | | | | | 9101-9255 |
| | | | | | 9847-10219 |
| | | | | | 10951-11510 |
| | | | | | 11979-12884 |
| | | | | | 14012-14140 |
| | | | | | 14282-14371 |
| | | | | | 17152-17200 |
| HSRAD10 | 674 | 968614 | AC018804 | 3391 | 1-899 |
| | | | | | 1121-1456 |
| HSRAB87 | 676 | 823174 | AP000729 | 3392 | 1-324 |
| HSRAB82 | 677 | 522945 | AL031733 | 3393 | 1-390 |
| HSRAB82 | 677 | 522945 | AL031733 | 3394 | 1-342 |
| HSRAB76 | 678 | 508105 | AL359476 | 3395 | 1-1292 |
| HSRAB76 | 678 | 508105 | AL356216 | 3396 | 1-286 |
| | | | | | 1366-2105 |
| | | | | | 2178-2289 |
| | | | | | 2920-4211 |
| | | | | | 4585-4674 |
| HSRAB76 | 678 | 508105 | AL356216 | 3397 | 1-121 |
| HSRAB76 | 678 | 508105 | AL359476 | 3398 | 1-286 |
| | | | | | 1364-2103 |
| | | | | | 2176-2286 |
| HSRAB36 | 679 | 522946 | AC011332 | 3399 | 1-379 |
| HSRAB36 | 679 | 522946 | AC005352 | 3400 | 1-379 |
| HSRAB36 | 679 | 522946 | AC011332 | 3401 | 1-329 |
| HSRAB36 | 679 | 522946 | AC005352 | 3402 | 1-329 |
| HSRAB36 | 679 | 522946 | AC005352 | 3403 | 1-189 |
| HSRAB34 | 680 | 706996 | AC068641 | 3404 | 1-298 |
| | | | | | 389-1077 |
| | | | | | 1855-2384 |
| | | | | | 3111-3469 |
| | | | | | 3930-4264 |
| | | | | | 4638-4788 |
| | | | | | 6878-6963 |
| | | | | | 7577-7613 |
| | | | | | 8676-8837 |
| | | | | | 10894-11198 |
| | | | | | 12629-13341 |
| | | | | | 13502-13744 |
| | | | | | 15053-15295 |
| HSRAB34 | 680 | 706996 | AC068641 | 3405 | 1-558 |
| HSRAB08 | 681 | 960411 | AC011406 | 3406 | 1-210 |
| HSRAB08 | 681 | 960411 | AC011406 | 3407 | 1-534 |
| HSRAA64 | 684 | 955314 | AL132838 | 3408 | 1-756 |
| HSRAA64 | 684 | 955314 | AC005924 | 3409 | 1-756 |
| HSRAA51 | 685 | 522834 | AC024243 | 3410 | 1-345 |
| HSRAA51 | 685 | 522834 | AC024243 | 3411 | 1-356 |
| HSRAA24 | 688 | 795855 | AP000437 | 3412 | 1-2275 |
| HSRAA24 | 688 | 795855 | AC006410 | 3413 | 1-174 |
| | | | | | 873-953 |
| | | | | | 1050-1077 |
| | | | | | 1669-3953 |
| HSRAA24 | 688 | 795855 | AP000437 | 3414 | 1-575 |
| HSRAA24 | 688 | 795855 | AC006410 | 3415 | 1-448 |
| | | | | | 911-1015 |
| HSRAA23 | 689 | 524795 | AC021586 | 3416 | 1-410 |
| HSLKB37 | 691 | 929743 | AL161799 | 3417 | 1-718 |
| HSLKB37 | 691 | 929743 | AL161799 | 3418 | 1-431 |
| HSLKB37 | 691 | 929743 | AL161799 | 3419 | 1-456 |
| HSLKA06 | 692 | 934638 | AP000594 | 3420 | 1-330 |
| | | | | | 693-1279 |
| | | | | | 1618-3031 |
| HSLKA06 | 692 | 934638 | AO001879 | 3421 | 1-330 |
| | | | | | 693-1279 |
| | | | | | 1618-3065 |
| HSLKA06 | 692 | 934638 | AP002500 | 3422 | 1-330 |
| | | | | | 693-1279 |
| | | | | | 1618-3063 |
| HSLKA06 | 692 | 934638 | AP000594 | 3423 | 1-129 |
| HSLKA06 | 692 | 934638 | AP001879 | 3424 | 1-436 |
| HSLKA06 | 692 | 934638 | AP001879 | 3425 | 1-129 |
| HSLKA06 | 692 | 934638 | AP002500 | 3426 | 1-129 |
| HSLKA06 | 692 | 934638 | AP002500 | 3427 | 1-436 |
| HSLJF33 | 694 | 938811 | AC022123 | 3428 | 1-577 |
| | | | | | 587-898 |
| HSLJF33 | 694 | 938811 | AC008602 | 3429 | 1-577 |
| HSLJD02 | 695 | 965826 | AC025288 | 3430 | 1-904 |
| HSLIJ48 | 696 | 721248 | AL138792 | 3431 | 1-2086 |
| HSLIJ48 | 696 | 721248 | AL138792 | 3432 | 1-280 |
| HSLIG07 | 697 | 952493 | AL355520 | 3433 | 1-39 |
| | | | | | 3561-3618 |
| | | | | | 7841-7949 |
| | | | | | 10375-11270 |
| | | | | | 11589-11678 |
| | | | | | 15048-15690 |
| | | | | | 16028-16134 |
| | | | | | 18215-18476 |
| | | | | | 20699-20733 |
| | | | | | 23616-23861 |
| | | | | | 30319-35764 |
| HSLIG07 | 697 | 952493 | AL355520 | 3434 | 1-386 |
| HSLIG07 | 697 | 952493 | AL355520 | 3435 | 1-437 |
| HSLHZ82 | 700 | 779067 | AC026149 | 3436 | 1-537 |
| HSLHZ82 | 700 | 779067 | AC026149 | 3437 | 1-625 |
| HSLHG49 | 703 | 722570 | AC019335 | 3438 | 1-442 |
| HSLHG49 | 703 | 722570 | AC008716 | 3439 | 1-442 |
| HSLHG49 | 703 | 722570 | AC019335 | 3440 | 1-309 |
| | | | | | 863-1408 |
| HSLHG49 | 703 | 722570 | AC019335 | 3441 | 1-302 |
| | | | | | 1212-1582 |
| HSLHG49 | 703 | 722570 | AC008716 | 3442 | 1-309 |
| | | | | | 863-1408 |
| HSLHG49 | 703 | 722570 | AC008716 | 3443 | 1-302 |
| | | | | | 1212-1582 |
| HSLHC40 | 704 | 710681 | AF233070 | 3444 | 1-434 |
| HSLHC40 | 704 | 710681 | AF233070 | 3445 | 1-373 |
| HSLGN78 | 709 | 773565 | AC019171 | 3446 | 1-127 |
| | | | | | 342-897 |
| | | | | | 1993-2259 |
| | | | | | 3055-3372 |
| | | | | | 3423-4048 |
| | | | | | 4089-4277 |
| | | | | | 4324-6037 |
| | | | | | 6069-8876 |
| | | | | | 9013-9740 |
| | | | | | 9791-9906 |
| | | | | | 10195-10899 |
| | | | | | 11064-13605 |
| HSLGN78 | 709 | 773565 | AC019171 | 3447 | 1-2093 |
| HSLGN78 | 709 | 773565 | AC019171 | 3448 | 1-739 |
| | | | | | 2715-2831 |
| | | | | | 3005-3561 |
| HSLGN52 | 710 | 466026 | AC023339 | 3449 | 1-63 |
| | | | | | 297-528 |
| | | | | | 1493-1596 |
| | | | | | 1818-2263 |
| | | | | | 3318-3424 |
| | | | | | 3727-3831 |
| | | | | | 3969-5442 |
| | | | | | 6232-6460 |
| | | | | | 6510=6993 |
| | | | | | 7378-7695 |
| | | | | | 7872-7910 |
| | | | | | 8145-8265 |
| | | | | | 8574-8985 |
| | | | | | 9173-9375 |
| HSLGK46 | 711 | 719031 | AC009185 | 3450 | 1-155 |
| | | | | | 997-1253 |
| | | | | | 2053-2148 |
| | | | | | 3496-4043 |
| | | | | | 7024-7126 |
| | | | | | 9004-9098 |
| | | | | | 10407-10717 |
| | | | | | 10930-11047 |
| HSLGK46 | 711 | 719031 | AC009185 | 3451 | 1-534 |
| HSLGK23 | 713 | 675266 | AC013713 | 3452 | 1-764 |
| HSLGK23 | 713 | 675266 | AL157820 | 3453 | 1-443 |
| HSLGK23 | 713 | 675266 | AC013713 | 3454 | 1-1289 |
| | | | | | 2601-3182 |
| | | | | | 3702-4241 |
| | | | | | 6170-8487 |
| HSLGK23 | 713 | 675266 | AL157820 | 3455 | 1-514 |
| HSLGI76 | 715 | 770035 | AC068404 | 3456 | 1-659 |
| | | | | | 762-1460 |
| HSLGI76 | 715 | 770035 | AC068404 | 3457 | 1-405 |
| HSLGH70 | 717 | 871888 | AL133330 | 3458 | 1-5227 |
| HSLGH70 | 717 | 871888 | AL133330 | 3459 | 1-619 |
| HSLGG79 | 719 | 775146 | AC003086 | 3460 | 1-403 |
| | | | | | 677-1512 |
| HSLGG79 | 719 | 775146 | AC003086 | 3461 | 1-399 |
| HSLGA79 | 720 | 774051 | AC016961 | 3462 | 1-505 |
| HSLGA79 | 720 | 774051 | AC016961 | 3463 | 1-291 |
| HSLGA79 | 720 | 774051 | AC016961 | 3464 | 1-148 |
| HSLGA24 | 722 | 955333 | AC074219 | 3465 | 1-807 |
| HSLFU18 | 723 | 666405 | AC008154 | 3466 | 1-3538 |
| HSLFU18 | 723 | 666405 | AC018646 | 3467 | 1-2673 |
| HSLFU18 | 723 | 666405 | AC008154 | 3468 | 1-116 |
| | | | | | 3689-3797 |
| | | | | | 4628-4674 |
| | | | | | 7369-7452 |
| | | | | | 7659-7721 |
| | | | | | 9183-9329 |
| | | | | | 9883-10172 |
| | | | | | 11683-12183 |
| | | | | | 13014-13093 |
| | | | | | 14304-14396 |
| | | | | | 14402-15694 |
| | | | | | 15738-16337 |
| HSLFT29 | 724 | 680451 | AC022123 | 3469 | 1-584 |
| HSLFI01 | 726 | 876881 | AL049611 | 3470 | 1-1354 |
| | | | | | 1780-1884 |
| | | | | | 2174-2318 |
| | | | | | 3163-3327 |
| | | | | | 4645-10514 |
| HSLFI01 | 726 | 876881 | AL049611 | 3471 | 1-617 |
| HSLFI01 | 726 | 876881 | AL049611 | 3472 | 1-89 |
| | | | | | 350-654 |
| HSLDW24 | 729 | 779689 | AC073992 | 3473 | 1-860 |
| HSLDW24 | 729 | 779689 | AC005082 | 3474 | 1-846 |
| | | | | | 1190-1616 |
| | | | | | 1818-2495 |
| | | | | | 2513-2795 |
| | | | | | 3162-3896 |
| | | | | | 4168-6088 |
| | | | | | 7406-7663 |
| | | | | | 7675-7765 |
| | | | | | 8981-9162 |
| | | | | | 10202-11061 |
| | | | | | 11082-11558 |
| | | | | | 11572-12787 |
| | | | | | 12822-12981 |
| | | | | | 13008-13158 |
| | | | | | 13466-13960 |
| | | | | | 15708-15956 |
| | | | | | 17748-17924 |
| | | | | | 18094-18231 |
| | | | | | 18295-18381 |
| | | | | | 18409-18765 |
| | | | | | 18804-19172 |
| HSLDW24 | 729 | 779689 | AC073992 | 3475 | 1-1701 |
| HSLDW24 | 729 | 779689 | AC073992 | 3476 | 1-182 |
| HSLDW24 | 729 | 779689 | AC005082 | 3477 | 1-232 |
| HSLDR18 | 731 | 578926 | AC022123 | 3478 | 1-417 |
| HSLDR05 | 732 | 932128 | AC020850 | 3479 | 1-900 |
| HSLDR05 | 732 | 932128 | AC009091 | 3480 | 1-390 |
| HSLDP66 | 733 | 866331 | AC004796 | 3481 | 1-580 |
| HSLDP66 | 733 | 866331 | AC004796 | 3482 | 1-345 |
| HSLDP66 | 733 | 866331 | AC004796 | 3483 | 1-309 |
| HSLDO01 | 734 | 916969 | AC023093 | 3484 | 1-413 |
| HSLDO01 | 734 | 916969 | AC023093 | 3485 | 1-502 |
| HSLCX61 | 738 | 742031 | AC016582 | 3486 | 1-38 |
| | | | | | 1536-1812 |
| | | | | | 3968-4394 |
| | | | | | 5807-5918 |
| | | | | | 6477-6925 |
| | | | | | 7509-8029 |
| | | | | | 8979-9149 |
| | | | | | 9479-9566 |
| HSLCX61 | 738 | 742031 | AC007676 | 3487 | 1-38 |
| | | | | | 1534-1744 |
| | | | | | 3974-4400 |
| | | | | | 5302-5403 |
| | | | | | 5813-5924 |
| | | | | | 6483-6932 |
| | | | | | 7515-8035 |
| | | | | | 8957-9127 |
| | | | | | 9457-9544 |
| | | | | | 10602-10844 |
| | | | | | 12165-12320 |
| | | | | | 14170-14513 |
| | | | | | 14771-14943 |
| | | | | | 15727-15963 |
| | | | | | 19812-20009 |
| | | | | | 21301-21954 |
| | | | | | 24254-24543 |
| | | | | | 25372-25657 |
| | | | | | 30663-30778 |
| | | | | | 31145-31617 |
| | | | | | 31632-31805 |
| | | | | | 34572-34953 |
| | | | | | 38596-38886 |
| | | | | | 39180-39558 |
| | | | | | 39601-41424 |
| | | | | | 43326-43518 |
| HSLCX61 | 738 | 742031 | AC016582 | 3488 | 1-271 |
| HSLCX61 | 738 | 742031 | AC007676 | 3489 | 1-685 |
| HSLCX61 | 738 | 742031 | AC007676 | 3490 | 1-271 |
| HSKZE91 | 741 | 790166 | AC055855 | 3491 | 1-2128 |
| HSKYG48 | 742 | 721631 | AC027228 | 3492 | 1-260 |
| | | | | | 548-710 |
| | | | | | 759-1145 |
| | | | | | 2793-2897 |
| | | | | | 2990-3131 |
| | | | | | 3303-3809 |
| | | | | | 5167-5262 |
| | | | | | 6266-6427 |
| | | | | | 6512-6629 |
| | | | | | 9491-9709 |
| | | | | | 10402-13824 |
| HSKYG48 | 742 | 721631 | AC027228 | 3493 | 1-125 |
| HSKJR15 | 745 | 866396 | AC015844 | 3494 | 1-134 |
| | | | | | 226-628 |
| | | | | | 700-974 |
| | | | | | 1061-1542 |
| HSKJC88 | 746 | 866402 | AL161627 | 3495 | 1-557 |
| HSKJC88 | 746 | 866402 | AL161627 | 3496 | 1-1635 |
| | | | | | 2670-5996 |
| HSKJC88 | 746 | 866402 | AL161627 | 3497 | 1-352 |
| HSKII90 | 747 | 788894 | AC013764 | 3498 | 1-643 |
| HSKII90 | 747 | 788894 | AC013764 | 3499 | 1-550 |
| HSKHZ47 | 748 | 720286 | AC007228 | 3500 | 1-1190 |
| HSKHZ47 | 748 | 720286 | AC007228 | 3501 | 1-589 |
| HSKHZ47 | 748 | 720286 | AC007228 | 3502 | 1-481 |
| HSKHP10 | 750 | 964568 | AL109928 | 3503 | 1-187 |
| | | | | | 303-387 |
| | | | | | 1815-3282 |
| | | | | | 3290-6558 |
| HSKHP10 | 750 | 964568 | AL109928 | 3504 | 1-363 |
| HSKDC06 | 753 | 935452 | AL138767 | 3505 | 1-884 |
| | | | | | 905-1284 |
| | | | | | 1325-4776 |
| | | | | | 4912-5745 |
| | | | | | 5809-6106 |
| | | | | | 6202-6417 |
| HSKDC06 | 753 | 935452 | AL157893 | 3506 | 1-4395 |
| HSKDC06 | 753 | 935452 | AL132656 | 3507 | 1-885 |
| | | | | | 906-1285 |
| | | | | | 1326-4773 |
| | | | | | 4909-5744 |
| HSKDC06 | 753 | 935452 | AL138767 | 3508 | 1-1087 |
| HSKDC06 | 753 | 935452 | AL157893 | 3509 | 1-307 |
| HSKDC06 | 753 | 935452 | AL157893 | 3510 | 1-380 |
| HSKDC06 | 753 | 935452 | AL132656 | 3511 | 1-1077 |
| HSKDC06 | 753 | 935452 | AL132656 | 3512 | 1-327 |
| HSKCR54 | 754 | 922730 | AC027641 | 3513 | 1-237 |
| | | | | | 357-615 |
| | | | | | 944-1561 |
| | | | | | 1577-2998 |
| | | | | | 3073-3185 |
| | | | | | 3211-3347 |
| | | | | | 4175-4715 |
| HSKCR54 | 754 | 922730 | AC027641 | 3514 | 1-216 |
| HSKCR54 | 754 | 922730 | AC027641 | 3515 | 1-216 |
| | | | | | 224-383 |
| HSKCD43 | 755 | 714389 | AC009282 | 3516 | 1-857 |
| | | | | | 1029-2227 |
| HSKCD43 | 755 | 714389 | AL390208 | 3517 | 1-115 |
| | | | | | 1487-1848 |
| | | | | | 1851-2468 |
| | | | | | 2968-3545 |
| | | | | | 4003-4349 |
| | | | | | 4917-5481 |
| | | | | | 5616-5922 |
| | | | | | 5999-6459 |
| | | | | | 7710-7823 |
| | | | | | 7875-8320 |
| | | | | | 9771-9966 |
| | | | | | 11924-12801 |
| | | | | | 12973-14171 |
| HSKCD43 | 755 | 714389 | AL133266 | 3518 | 1-66 |
| | | | | | 856-1060 |
| | | | | | 1675-1854 |
| | | | | | 3226-3587 |
| | | | | | 3590-4207 |
| | | | | | 5831-6177 |
| | | | | | 6745-7309 |
| | | | | | 7444-7750 |
| | | | | | 7827-8287 |
| | | | | | 9537-9650 |
| | | | | | 9702-10147 |
| | | | | | 11599-11794 |
| | | | | | 13752-14628 |
| | | | | | 14800-15998 |
| HSKCD43 | 755 | 714389 | AL158137 | 3519 | 1-857 |
| | | | | | 1029-2227 |
| HSKBW62 | 757 | 521937 | AC023959 | 3520 | 1-329 |
| HSKBW62 | 757 | 521937 | AC011885 | 3521 | 1-329 |
| HSKBW62 | 757 | 521937 | AC013434 | 3522 | 1-329 |
| HSKAE10 | 760 | 968508 | AC015962 | 3523 | 1-697 |
| HSKAE10 | 760 | 968508 | AP002393 | 3524 | 1-697 |
| HSJAY64 | 763 | 866540 | AC011462 | 3525 | 1-1998 |
| | | | | | 2010-2673 |
| | | | | | 3157-3587 |
| | | | | | 3611-3907 |
| | | | | | 4926-5714 |
| | | | | | 5719-6572 |
| | | | | | 8490-8910 |
| | | | | | 11142-11596 |
| | | | | | 12706-13113 |
| | | | | | 13191-13317 |
| | | | | | 13415-13541 |
| | | | | | 15366-15613 |
| HSJAY64 | 763 | 866540 | AC011462 | 3526 | 1-467 |
| HSJAY64 | 763 | 866540 | AC011462 | 3527 | 1-384 |
| | | | | | 472-794 |
| HSCAF60 | 770 | 537444 | AL080250 | 3528 | 1-2220 |
| HSCAF60 | 770 | 537444 | AL080250 | 3529 | 1-487 |
| HRDFU03 | 771 | 924698 | AC026290 | 3530 | 1-365 |
| HRDFU03 | 771 | 924698 | AC048338 | 3531 | 1-365 |
| HRDFU03 | 771 | 924698 | AC026290 | 3532 | 1-521 |
| HRDFU03 | 771 | 924698 | AC048338 | 3533 | 1-521 |
| HRDFH46 | 772 | 590391 | AL355773 | 3534 | 1-854 |
| | | | | | 2013-2134 |
| | | | | | 2650-3156 |
| | | | | | 3284-3379 |
| | | | | | 3563-3826 |
| | | | | | 4498-4620 |
| | | | | | 5597-5673 |
| | | | | | 7008-7286 |
| | | | | | 7721-8002 |
| | | | | | 8099-8648 |
| | | | | | 9030-9519 |
| HRDFH46 | 772 | 590391 | AL138499 | 3535 | 1-74 |
| | | | | | 1171-1414 |
| | | | | | 2003-2145 |
| | | | | | 5281-5390 |
| | | | | | 6571-6708 |
| | | | | | 7273-8042 |
| | | | | | 8498-8581 |
| | | | | | 9242-9411 |
| | | | | | 9823-9893 |
| | | | | | 11229-11269 |
| | | | | | 11959-12050 |
| | | | | | 12418-12490 |
| | | | | | 12981-13017 |
| | | | | | 13172-13255 |
| | | | | | 13739-13807 |
| | | | | | 16333-16490 |
| | | | | | 16856-16966 |
| | | | | | 17025-17457 |
| | | | | | 19018-19053 |
| | | | | | 19571-19708 |
| | | | | | 19739-20018 |
| | | | | | 20071-20166 |
| | | | | | 20847-20919 |
| | | | | | 21057-21542 |
| | | | | | 21820-21861 |
| | | | | | 22375-22563 |
| | | | | | 22606-22687 |
| | | | | | 23332-23536 |
| | | | | | 23934-23974 |
| | | | | | 24441-25133 |
| | | | | | 25607-26151 |
| | | | | | 27567-27728 |
| | | | | | 28089-28180 |
| | | | | | 30591-30662 |
| | | | | | 31711-31750 |
| | | | | | 32025-32303 |
| | | | | | 32728-33189 |
| | | | | | 33569-33660 |
| | | | | | 34582-35243 |
| | | | | | 36002-36089 |
| | | | | | 37700-38027 |
| | | | | | 38479-39379 |
| | | | | | 39447-39994 |
| | | | | | 39996-40412 |
| | | | | | 40939-41175 |
| | | | | | 42777-42859 |
| | | | | | 43613-43709 |
| | | | | | 43834-43926 |
| | | | | | 44676-44750 |
| | | | | | 44978-45061 |
| | | | | | 45219-45304 |
| | | | | | 45604-46116 |
| | | | | | 46592-46981 |
| | | | | | 47116-47969 |
| | | | | | 49128-49249 |
| | | | | | 49765-50272 |
| | | | | | 50400-50495 |
| | | | | | 50679-50942 |
| | | | | | 51613-51736 |
| | | | | | 52713-52789 |
| | | | | | 54124-54402 |
| | | | | | 54837-55118 |
| | | | | | 55215-55764 |
| | | | | | 56143-56632 |
| HRDFH46 | 772 | 590391 | AL138499 | 3536 | 1-386 |
| | | | | | 635-1149 |
| HRDFG13 | 773 | 925350 | Z99716 | 3537 | 1-55 |
| | | | | | 126-186 |
| | | | | | 610-963 |
| | | | | | 1193-1368 |
| | | | | | 2995-3327 |
| HRDFG13 | 773 | 925350 | Z99716 | 3538 | 1-135 |
| HRDFD56 | 775 | 733556 | AC026198 | 3539 | 1-768 |
| HRDFD56 | 775 | 733556 | AC007174 | 3540 | 1-768 |
| HRDFD56 | 775 | 733556 | AC018812 | 3541 | 1-768 |
| HRDFD56 | 775 | 733556 | AC020752 | 3542 | 1-768 |
| HRDFD56 | 775 | 733556 | AC022012 | 3543 | 1-768 |
| HRDFD56 | 775 | 733556 | AC020750 | 3544 | 1-768 |
| HRDFD56 | 775 | 733556 | AC022002 | 3545 | 1-768 |
| HRDFD56 | 775 | 733556 | AC026198 | 3546 | 1-384 |
| HRDFD56 | 775 | 733556 | AC007174 | 3547 | 1-384 |
| HRDFD56 | 775 | 733556 | AC018812 | 3548 | 1-384 |
| HRDFD56 | 775 | 733556 | AC020752 | 3549 | 1-384 |
| HRDFD56 | 775 | 733556 | AC022012 | 3550 | 1-384 |
| HRDFD56 | 775 | 733556 | AC020750 | 3551 | 1-384 |
| HRDFD56 | 775 | 733556 | AC022002 | 3552 | 1-384 |
| HRDFA03 | 776 | 867122 | AC010240 | 3553 | 1-980 |
| HRDFA03 | 776 | 867122 | AC010240 | 3554 | 1-451 |
| HRDFA03 | 776 | 867122 | AC010240 | 3555 | 1-239 |
| HRDEZ73 | 777 | 774414 | AL049868 | 3556 | 1-937 |
| | | | | | 1243-1407 |
| | | | | | 1844-2172 |
| | | | | | 2181-2679 |
| | | | | | 2706-3392 |
| | | | | | 3539-4236 |
| HRDEZ73 | 777 | 774414 | AL359704 | 3557 | 1-938 |
| | | | | | 1244-1408 |
| | | | | | 1845-2173 |
| | | | | | 2182-2680 |
| | | | | | 2707-3393 |
| | | | | | 3540-4237 |
| HRDEZ73 | 777 | 774414 | AL391095 | 3558 | 1-938 |
| | | | | | 1244-1408 |
| | | | | | 1845-2173 |
| | | | | | 2182-2680 |
| | | | | | 2707-3393 |
| | | | | | 3540-4237 |
| HRDEZ73 | 777 | 774414 | AL049868 | 3559 | 1-397 |
| HRDEZ73 | 777 | 774414 | AL359704 | 3560 | 1-397 |
| HRDEZ73 | 777 | 774414 | AL391095 | 3561 | 1-397 |
| HRDEP20 | 781 | 690456 | AC008663 | 3562 | 1-461 |
| | | | | | 3399-3527 |
| | | | | | 4652-5129 |
| | | | | | 5447-6031 |
| | | | | | 6123-6401 |
| | | | | | 6651-7418 |
| | | | | | 8095-9142 |
| HRDEP20 | 781 | 690456 | AC008663 | 3563 | 1-101 |
| HRDEP20 | 781 | 690456 | AC008663 | 3564 | 1-130 |
| HRDEK53 | 782 | 867137 | AC004832 | 3565 | 1-195 |
| | | | | | 1361-1748 |
| | | | | | 1778-1875 |
| | | | | | 1957-2456 |
| | | | | | 3189-3274 |
| | | | | | 6415-7628 |
| | | | | | 8053-8458 |
| | | | | | 8539-8677 |
| | | | | | 8730-9585 |
| | | | | | 10648-10979 |
| | | | | | 12618-12793 |
| | | | | | 13105-14385 |
| | | | | | 14859-16433 |
| | | | | | 16517-17216 |
| HRDEK53 | 782 | 867137 | AC005585 | 3566 | 1-195 |
| | | | | | 1361-1748 |
| | | | | | 1778-1875 |
| | | | | | 1957-2456 |
| | | | | | 3189-3274 |
| | | | | | 6415-7628 |
| | | | | | 8053-8458 |
| | | | | | 8539-8677 |
| | | | | | 8730-9585 |
| | | | | | 10648-10979 |
| | | | | | 13105-14385 |
| | | | | | 14859-16434 |
| | | | | | 16518-17217 |
| HRDEK53 | 782 | 867137 | AC004832 | 3567 | 1-694 |
| HRDEK53 | 782 | 867137 | AC004832 | 3568 | 1-546 |
| HRDEK53 | 782 | 867137 | AC005585 | 3569 | 1-694 |
| HRDEK53 | 782 | 867137 | AC005585 | 3570 | 1-546 |
| HRDDU41 | 786 | 712572 | AC016197 | 3571 | 1-351 |
| HRDDU41 | 786 | 712572 | AC022022 | 3572 | 1-351 |
| HRDDU41 | 786 | 712572 | AC016197 | 3573 | 1-247 |
| HRDDU41 | 786 | 712572 | AC016197 | 3574 | 1-171 |
| HRDDU41 | 786 | 712572 | AC022022 | 3575 | 1-247 |
| HRDDU41 | 786 | 712572 | AC022022 | 3576 | 1-171 |
| HRDDR39 | 787 | 867151 | AP001150 | 3577 | 1-601 |
| HRDDR39 | 787 | 867151 | AP001150 | 3578 | 1-217 |
| | | | | | 379-588 |
| | | | | | 1680-1812 |
| | | | | | 2108-2969 |
| HRDBH52 | 790 | 728715 | AP001544 | 3579 | 1-573 |
| HRDBH52 | 790 | 728715 | AP001548 | 3580 | 1-573 |
| HRDBH52 | 790 | 728715 | AC073440 | 3581 | 1-573 |
| HRDBH52 | 790 | 728715 | AP001399 | 3582 | 1-573 |
| HRDBH52 | 790 | 728715 | AP001548 | 3583 | 1-490 |
| HRDBH52 | 790 | 728715 | AP001544 | 3584 | 1-490 |
| HRDBH52 | 790 | 728715 | AC073440 | 3585 | 1-490 |
| HRDBH52 | 790 | 728715 | AP001399 | 3586 | 1-490 |
| HRDAB42 | 791 | 800333 | AC023502 | 3587 | 1-435 |
| HRDAB42 | 791 | 800333 | AC022383 | 3588 | 1-864 |
| HRDAB42 | 791 | 800333 | AC022384 | 3589 | 1-861 |
| HRDAB42 | 791 | 800333 | AC008032 | 3590 | 1-864 |
| HRDAB42 | 791 | 800333 | AC008032 | 3591 | 1-101 |
| HRDAB42 | 791 | 800333 | AC008032 | 3592 | 1-282 |
| HOSOW01 | 792 | 914804 | AC015585 | 3593 | 1-927 |
| | | | | | 954-1515 |
| HOSOW01 | 792 | 914804 | AC017101 | 3594 | 1-927 |
| | | | | | 954-1515 |
| HOSOW01 | 792 | 914804 | AC017026 | 3595 | 1-927 |
| | | | | | 954-1515 |
| HOSOW01 | 792 | 914804 | AC015585 | 3596 | 1-1422 |
| HOSOW01 | 792 | 914804 | AC017026 | 3597 | 1-1657 |
| HOSMP95 | 794 | 948496 | AC004500 | 3598 | 1-886 |
| | | | | | 1535-1939 |
| | | | | | 2922-3397 |
| | | | | | 3427-3540 |
| | | | | | 4001-4264 |
| | | | | | 4464-5586 |
| | | | | | 7800-7945 |
| | | | | | 7959-8108 |
| HOSMP95 | 794 | 948496 | AC004500 | 3599 | 1-226 |
| HOSMP95 | 794 | 948496 | AC004500 | 3600 | 1-56 |
| | | | | | 310-377 |
| | | | | | 1495-1589 |
| HOSFV77 | 796 | 856933 | AC025008 | 3601 | 1-3255 |
| HOSFV77 | 796 | 856933 | AL035411 | 3602 | 1-4240 |
| HOSFV77 | 796 | 856933 | AL035411 | 3603 | 1-227 |
| HOSFL07 | 799 | 953183 | AC016695 | 3604 | 1-2306 |
| HOSFL07 | 799 | 953183 | AC018640 | 3605 | 1-2311 |
| HOSFL07 | 799 | 953183 | AC009244 | 3606 | 1-2312 |
| HOSFL07 | 799 | 953183 | AC016695 | 3607 | 1-496 |
| HOSFL07 | 799 | 953183 | AC018640 | 3608 | 1-105 |
| HOSFL07 | 799 | 953183 | AC018640 | 3609 | 1-496 |
| HOSFL07 | 799 | 953183 | AC009244 | 3610 | 1-496 |
| HOSFI46 | 801 | 719021 | AC069073 | 3611 | 1-808 |
| HOSFI46 | 801 | 719021 | AC069073 | 3612 | 1-192 |
| HOSDR12 | 804 | 971169 | AL161740 | 3613 | 1-130 |
| | | | | | 1984-2058 |
| HOSDR12 | 804 | 971169 | AL161740 | 3614 | 1-220 |
| HOSDQ78 | 805 | 858983 | AC006474 | 3615 | 1-418 |
| | | | | | 552-1799 |
| HOSDQ78 | 805 | 858983 | AC006474 | 3616 | 1-384 |
| HOSDA04 | 808 | 951842 | AC012408 | 3617 | 1-2186 |
| HOSBY89 | 813 | 787182 | AC025800 | 3618 | 1-37 |
| | | | | | 980-2429 |
| HOSBY89 | 813 | 787182 | AC011773 | 3619 | 1-66 |
| | | | | | 1045-1184 |
| | | | | | 1559-3179 |
| | | | | | 3239-3435 |
| | | | | | 3586-3922 |
| | | | | | 3925-4354 |
| | | | | | 4655-6627 |
| | | | | | 7796-7829 |
| | | | | | 8768-9128 |
| | | | | | 9311-9788 |
| | | | | | 10585-10851 |
| | | | | | 11117-11429 |
| | | | | | 12515-12583 |
| | | | | | 15318-15475 |
| | | | | | 15541-15633 |
| | | | | | 16787-16951 |
| | | | | | 17797-17908 |
| HOSBY89 | 813 | 787182 | AC025800 | 3620 | 1-42 |
| | | | | | 604-718 |
| | | | | | 2247-2564 |
| | | | | | 3873-4140 |
| HOSBY89 | 813 | 787182 | AC011773 | 3621 | 1-42 |
| | | | | | 2263-2579 |
| | | | | | 3892-4159 |
| HOSBX46 | 814 | 719414 | AL049781 | 3622 | 1-842 |
| | | | | | 1381-2554 |
| | | | | | 5735-5992 |
| | | | | | 6879-7259 |
| | | | | | 7587-9210 |
| HOSBX46 | 814 | 719414 | AL049781 | 3623 | 1-649 |
| HOSBX46 | 814 | 719414 | AL049781 | 3624 | 1-201 |
| HOSBX34 | 815 | 706769 | AC008009 | 3625 | 1-4301 |
| | | | | | 4410-5419 |
| HOSBX34 | 815 | 706769 | AC008009 | 3626 | 1-74 |
| | | | | | 485-636 |
| | | | | | 859-951 |
| | | | | | 1364-1487 |
| | | | | | 3436-3606 |
| | | | | | 4185-4714 |
| | | | | | 5900-5979 |
| | | | | | 9956-10067 |
| | | | | | 11481-11963 |
| | | | | | 13607-13693 |
| | | | | | 15019-15227 |
| | | | | | 20188-21030 |
| | | | | | 21682-22252 |
| | | | | | 22277-22497 |
| | | | | | 22593-24241 |
| | | | | | 24399-24692 |
| | | | | | 25134-26128 |
| | | | | | 27449-27554 |
| | | | | | 27875-29607 |
| HOSBX34 | 815 | 706769 | AC008009 | 3627 | 1-1004 |
| | | | | | 1875-2197 |
| | | | | | 2217-2290 |
| | | | | | 3235-3317 |
| | | | | | 3705-4524 |
| | | | | | 4663-5005 |
| | | | | | 5891-6065 |
| HOSBO34 | 817 | 706770 | AC018606 | 3628 | 1-680 |
| | | | | | 1108-2215 |
| HOSBO34 | 817 | 706770 | AC018606 | 3629 | 1-111 |
| HOSBM55 | 818 | 732550 | AB014087 | 3630 | 1-1183 |
| HOSBM55 | 818 | 732550 | AC004188 | 3631 | 1-1183 |
| HOSBM55 | 818 | 732550 | AB014087 | 3632 | 1-427 |
| HOSBM55 | 818 | 732550 | AC004188 | 3633 | 1-521 |
| HOSBM55 | 818 | 732550 | AC004188 | 3634 | 1-427 |
| HOSAY52 | 819 | 728759 | AL049781 | 3635 | 1-842 |
| | | | | | 1381-2554 |
| | | | | | 5735-5992 |
| | | | | | 6879-7259 |
| | | | | | 7587-9210 |
| HOSAY52 | 819 | 728759 | AL049781 | 3636 | 1-649 |
| HOSAY52 | 819 | 728759 | AL049781 | 3637 | 1-201 |
| HOSAL10 | 821 | 968710 | AC015655 | 3638 | 1-709 |
| HOSAL10 | 821 | 968710 | AC025545 | 3639 | 1-465 |
| | | | | | 616-1158 |
| HOSAL10 | 821 | 968710 | AC069523 | 3640 | 1-791 |
| | | | | | 942-1485 |
| HOSAL10 | 821 | 968710 | AC025545 | 3641 | 1-259 |
| HOSAL10 | 821 | 968710 | AC069523 | 3642 | 1-258 |
| HOSAL10 | 821 | 968710 | AC069523 | 3643 | 1-50 |
| | | | | | 978-1336 |
| | | | | | 4572-4971 |
| | | | | | 5922-6284 |
| HOSAH30 | 823 | 693406 | AL139162 | 3644 | 1-1851 |
| HOSAH30 | 823 | 693406 | AC073638 | 3645 | 1-1371 |
| | | | | | 1464-3286 |
| | | | | | 3846-4478 |
| | | | | | 5145-5389 |
| | | | | | 6355-6441 |
| | | | | | 6990-7453 |
| | | | | | 7636-8097 |
| | | | | | 8679-9009 |
| | | | | | 9507-9558 |
| HOSAH30 | 823 | 693406 | AL139162 | 3646 | 1-503 |
| HOSAH30 | 823 | 693406 | AC073638 | 3647 | 1-1605 |
| HOSAF19 | 824 | 672078 | AC069222 | 3648 | 1-576 |
| | | | | | 755-1350 |
| HOSAF19 | 824 | 672078 | AC022883 | 3649 | 1-576 |
| | | | | | 755-1350 |
| HOSAF19 | 824 | 672078 | AC024938 | 3650 | 1-576 |
| | | | | | 755-1350 |
| HOSAF19 | 824 | 672078 | AC022883 | 3651 | 1-450 |
| HOSAF19 | 824 | 672078 | AC069222 | 3652 | 1-450 |
| HOSAF19 | 824 | 672078 | AC024938 | 3653 | 1-450 |
| HOHEN28 | 825 | 686034 | AC021923 | 3654 | 1-194 |
| | | | | | 1261-1657 |
| | | | | | 1673-1825 |
| | | | | | 5781-6120 |
| | | | | | 7234-7599 |
| | | | | | 8092-8247 |
| | | | | | 8353-8637 |
| | | | | | 8801-10463 |
| | | | | | 10487-11027 |
| HOHEN28 | 825 | 686034 | AC018790 | 3655 | 1-194 |
| | | | | | 1261-1657 |
| | | | | | 1673-1825 |
| | | | | | 5781-6120 |
| | | | | | 7234-7599 |
| | | | | | 8092-8247 |
| | | | | | 8353-8637 |
| | | | | | 8801-10463 |
| | | | | | 10487-11027 |
| HOHEN28 | 825 | 686034 | AC018790 | 3656 | 1-99 |
| HOHEG71 | 826 | 760051 | AC023120 | 3657 | 1-2351 |
| | | | | | 2406-3121 |
| | | | | | 3186-3327 |
| | | | | | 5228-5903 |
| | | | | | 6301-6724 |
| | | | | | 6756-7347 |
| | | | | | 8157-8780 |
| | | | | | 8929-9270 |
| | | | | | 9943-10371 |
| | | | | | 10549-11021 |
| | | | | | 11844-12347 |
| | | | | | 17147-17451 |
| | | | | | 17563-17662 |
| | | | | | 18026-18260 |
| | | | | | 18456-18609 |
| | | | | | 19490-19959 |
| | | | | | 25372-25481 |
| | | | | | 26563-26665 |
| | | | | | 27439-27568 |
| | | | | | 27673-27966 |
| | | | | | 29690-29884 |
| | | | | | 33065-33887 |
| | | | | | 33968-34187 |
| | | | | | 35050-35109 |
| | | | | | 35958-36256 |
| | | | | | 37813-37925 |
| HOHEG71 | 826 | 760051 | AC023120 | 3658 | 1-1768 |
| HOHEG71 | 826 | 760051 | AC023120 | 3659 | 1-518 |
| HOHDF94 | 827 | 793970 | AF260011 | 3660 | 1-392 |
| | | | | | 1316-1511 |
| | | | | | 3951-4175 |
| | | | | | 4406-4711 |
| | | | | | 5372-5546 |
| | | | | | 5952-6147 |
| | | | | | 6232-6688 |
| | | | | | 7555-8129 |
| | | | | | 9753-10326 |
| | | | | | 12106-12182 |
| | | | | | 12272-12752 |
| | | | | | 13231-13444 |
| HOHDF94 | 827 | 793970 | AF260011 | 3661 | 1-25 |
| | | | | | 165-266 |
| | | | | | 531-2938 |
| HOHCG79 | | 859029 | AC044820 | 3662 | 1-604 |
| | | | | | 2939-3404 |
| | | | | | 4741-5741 |
| HOHCG79 | 831 | 859029 | AC018590 | 3663 | 1-465 |
| HOHCG79 | 831 | 859029 | AC044820 | 3664 | 1-377 |
| HOHCG79 | 831 | 859029 | AC018590 | 3665 | 1-1001 |
| HOHBZ27 | 833 | 588364 | AL109966 | 3666 | 1-2391 |
| HOHBZ27 | 833 | 588364 | AL109966 | 3667 | 1-763 |
| HOHBS10 | 836 | 964324 | AC009088 | 3668 | 1-409 |
| HOHBS10 | 836 | 964324 | AC009088 | 3669 | 1-266 |
| HOHBS10 | 836 | 964324 | AC009088 | 3670 | 1-377 |
| | | | | | 765-1140 |
| | | | | | 1231-1302 |
| | | | | | 1394-1850 |
| | | | | | 1926-2050 |
| | | | | | 2098-2221 |
| | | | | | 2408-3127 |
| | | | | | 3583-4516 |
| HOHBP36 | 837 | 708158 | AC013451 | 3671 | 1-602 |
| HOHBP36 | 837 | 708158 | AC013451 | 3672 | 1-281 |
| HOHBL35 | 839 | 973238 | AC055749 | 3373 | 1-521 |
| HOHBL35 | 839 | 973238 | AC023296 | 3674 | 1-521 |
| HOHBI84 | 840 | 782908 | AL359678 | 3675 | 1-306 |
| HOHBI84 | 840 | 782908 | AL359678 | 3676 | 1-84 |
| HOHBB90 | 841 | 588308 | AL035455 | 3677 | 1-74 |
| | | | | | 680-1053 |
| | | | | | 3541-3691 |
| | | | | | 3707-4349 |
| | | | | | 5188-5434 |
| | | | | | 6048-7834 |
| HOHBB90 | 841 | 588308 | AL354834 | 3678 | 1-74 |
| | | | | | 680-1053 |
| | | | | | 3541-3691 |
| | | | | | 3707-4349 |
| | | | | | 5188-5434 |
| | | | | | 6050-7836 |
| HOHBB90 | 841 | 588308 | AL035455 | 3679 | 1-402 |
| HOHBB90 | 841 | 588308 | AL035455 | 3680 | 1-919 |
| HOHBB90 | 841 | 588308 | AL354834 | 3681 | 1-402 |
| HOHAV60 | 842 | 489007 | AC007279 | 3682 | 1-75 |
| | | | | | 501-565 |
| | | | | | 911-1115 |
| | | | | | 1230-1298 |
| | | | | | 1921-2242 |
| | | | | | 2324-2419 |
| | | | | | 2650-2943 |
| | | | | | 3316-3483 |
| | | | | | 4338-4457 |
| HOHAV60 | 842 | 489007 | AC007279 | 3683 | 1-278 |
| HOHAV60 | 842 | 489007 | AC007279 | 3684 | 1-508 |
| HOHAT59 | 843 | 867949 | AC018545 | 3685 | 1-442 |
| HOHAT59 | 843 | 867949 | AC018545 | 3686 | 1-113 |
| HOHAQ65 | 845 | 859057 | AC005042 | 3687 | 1-517 |
| HOHAQ65 | 845 | 859057 | AC005042 | 3688 | 1-373 |
| HOEOA28 | 849 | 859156 | AC002519 | 3689 | 1-77 |
| | | | | | 1106-2134 |
| | | | | | 2298-2635 |
| | | | | | 2641-3321 |
| | | | | | 4046-4668 |
| | | | | | 5189-6072 |
| HOEOA28 | 849 | 859156 | AC002519 | 3690 | 1-1570 |
| HOENH06 | 850 | 934095 | AL050306 | 3691 | 1-1099 |
| | | | | | 1852-2331 |
| HOENH06 | 850 | 934095 | AL050306 | 3692 | 1-530 |
| HOENH06 | 850 | 934095 | AL050306 | 3693 | 1-657 |
| HOELI08 | 851 | 958181 | AC011973 | 3694 | 1-34 |
| | | | | | 56-1333 |
| HOELI08 | 851 | 958181 | AC016999 | 3695 | 1-34 |
| | | | | | 52-1332 |
| HOELI08 | 851 | 958181 | AC011973 | 3696 | 1-277 |
| HOELI08 | 851 | 958181 | AC016999 | 3697 | 1-280 |
| HOEEX37 | 852 | 708728 | AC007285 | 3698 | 1-804 |
| | | | | | 2127-2267 |
| | | | | | 3871-4235 |
| | | | | | 4812-5113 |
| | | | | | 7562-7921 |
| | | | | | 10731-11065 |
| | | | | | 11792-14461 |
| | | | | | 14687-16100 |
| HOEEX37 | 852 | 708728 | AC007285 | 3699 | 1-415 |
| HOECF70 | 856 | 573426 | AL357134 | 3700 | 1-461 |
| | | | | | 2473-2733 |
| | | | | | 3125-3433 |
| | | | | | 4108-4457 |
| | | | | | 5818-5948 |
| | | | | | 6438-6525 |
| | | | | | 6727-7121 |
| | | | | | 7632-7791 |
| HOECF70 | 856 | 573426 | AL357134 | 3701 | 1-550 |
| HOECF70 | 856 | 573426 | AL357134 | 3702 | 1-290 |
| HOACG06 | 858 | 954572 | AC008414 | 3703 | 1-51 |
| | | | | | 569-1079 |
| | | | | | 1980-2133 |
| | | | | | 3558-3656 |
| | | | | | 4387-4484 |
| | | | | | 4587-4769 |
| | | | | | 4787-5117 |
| | | | | | 5819-6270 |
| | | | | | 6420-6609 |
| | | | | | 6704-6770 |
| | | | | | 7446-7635 |
| | | | | | 8689-10494 |
| HOACG06 | 858 | 954572 | AC016564 | 3704 | 1-511 |
| HOACG06 | 858 | 954572 | AC008485 | 3705 | 1-51 |
| | | | | | 569-1079 |
| | | | | | 1981-2134 |
| | | | | | 3558-3666 |
| | | | | | 4399-4504 |
| | | | | | 4601-4784 |
| | | | | | 5010-5135 |
| | | | | | 5837-5946 |
| HOABW12 | 862 | 968797 | AC011489 | 3706 | 1-381 |
| HOABW12 | 862 | 968797 | AC011489 | 3707 | 1-489 |
| | | | | | 1702-1734 |
| | | | | | 2236-2554 |
| | | | | | 2757-3239 |
| | | | | | 4609-4999 |
| | | | | | 5125-5159 |
| HOABW12 | 862 | 968797 | AC011489 | 3708 | 1-309 |
| HOABG91 | 863 | 811156 | AC021573 | 3709 | 1-460 |
| | | | | | 719-769 |
| HOABG91 | 863 | 811156 | AC021573 | 3710 | 1-104 |
| HOABF65 | 864 | 888203 | AL356274 | 3711 | 1-402 |
| HOABF65 | 864 | 888203 | AC055748 | 3712 | 1-402 |
| HOAAX37 | 867 | 708718 | AC027082 | 3713 | 1-1259 |
| | | | | | 1518-1999 |
| | | | | | 3241-3674 |
| | | | | | 4056-4328 |
| | | | | | 4693-5098 |
| | | | | | 5853-6779 |
| HOAAX37 | 867 | 708718 | AL121985 | 3714 | 1-1259 |
| | | | | | 1518-1999 |
| | | | | | 3241-3674 |
| | | | | | 4056-4328 |
| | | | | | 4693-5098 |
| | | | | | 5853-6779 |
| HOAAX37 | 867 | 708718 | AC027082 | 3715 | 1-408 |
| HOAAX37 | 867 | 708718 | AL121985 | 3716 | 1-408 |
| HOAAW02 | 869 | 920869 | AC021215 | 3717 | 1-435 |
| | | | | | 440-949 |
| HOAAV77 | 870 | 772512 | AL121997 | 3718 | 1-409 |
| HOAAV77 | 870 | 772512 | AL121997 | 3719 | 1-91 |
| | | | | | 2824-3176 |
| | | | | | 3245-3444 |
| | | | | | 3852-3982 |
| | | | | | 4333-4864 |
| HOAAV77 | 870 | 772512 | AL121997 | 3720 | 1-147 |
| | | | | | 621-1118 |
| HOAAM67 | 872 | 751947 | AC012580 | 3721 | 1-378 |
| HOAAM67 | 872 | 751947 | AL133502 | 3722 | 1-378 |
| HOAAM67 | 872 | 751947 | AC012580 | 3723 | 1-495 |
| HOAAM67 | 872 | 751947 | AL133502 | 3724 | 1-575 |
| HOAAM67 | 872 | 751947 | AC012580 | 3725 | 1-575 |
| HOAAM67 | 872 | 751947 | AL133502 | 3726 | 1-495 |
| HOAAK71 | 873 | 761445 | AL020991 | 3727 | 1-33 |
| | | | | | 4960-5158 |
| | | | | | 6138-6263 |
| | | | | | 7108-7229 |
| | | | | | 9543-9988 |
| | | | | | 10472-10659 |
| | | | | | 13310-13494 |
| | | | | | 15235-15405 |
| | | | | | 15620-16560 |
| | | | | | 16591-16788 |
| | | | | | 16873-17205 |
| | | | | | 17324-17495 |
| | | | | | 21634-22394 |
| | | | | | 22406-22487 |
| | | | | | 22651-22786 |
| HOAAK71 | 873 | 761445 | AL020991 | 3728 | 1-1630 |
| | | | | | 2519-3035 |
| | | | | | 3135-3457 |
| | | | | | 4050-4123 |
| | | | | | 4811-4958 |
| | | | | | 5219-5669 |
| | | | | | 6291-6373 |
| | | | | | 7336-7544 |
| HOAAH77 | 876 | 772514 | AC064860 | 3729 | 1-3600 |
| HOAAH77 | 876 | 772514 | AC010134 | 3730 | 1-3600 |
| HOAAH77 | 876 | 772514 | AC064860 | 3731 | 1-544 |
| HOAAH77 | 876 | 772514 | AC010134 | 3732 | 1-544 |
| HOAAH41 | 877 | 712601 | AC013285 | 3733 | 1-489 |
| HOAAH41 | 877 | 712601 | AC024603 | 3734 | 1-489 |
| HMUBZ11 | 878 | 966856 | AL356420 | 3735 | 1-476 |
| HMUBZ11 | 878 | 966856 | AL157386 | 3736 | 1-476 |
| HMUBZ11 | 878 | 966856 | AL121928 | 3737 | 1-476 |
| HMUBZ11 | 878 | 966856 | AL356420 | 3738 | 1-417 |
| HMUBZ11 | 878 | 966856 | AL356420 | 3739 | 1-292 |
| HMUBZ11 | 878 | 966856 | AL157386 | 3740 | 1-417 |
| HMUBZ11 | 878 | 966856 | AL157386 | 3741 | 1-287 |
| HMUBZ11 | 878 | 966856 | AL121928 | 3742 | 1-144 |
| HMUBZ11 | 878 | 966856 | AL121928 | 3743 | 1-417 |
| HMUBY20 | 880 | 669581 | AC026495 | 3744 | 1-433 |
| HMUBY20 | 880 | 669581 | AC026495 | 3745 | 1-425 |
| HMUBY20 | 880 | 669581 | AC026495 | 3746 | 1-1055 |
| HMUBV40 | 881 | 837969 | AL136087 | 3747 | 1-105 |
| | | | | | 465-969 |
| | | | | | 4861-4970 |
| HMUBV40 | 881 | 837969 | AL136087 | 3748 | 1-462 |
| HMUBV40 | 881 | 837969 | AL136087 | 3749 | 1-165 |
| HMUBR94 | 882 | 793261 | AL359264 | 3750 | 1-340 |
| | | | | | 1138-2277 |
| | | | | | 2905-3562 |
| HUMBQ01 | 884 | 918052 | AC023648 | 3751 | 1-381 |
| HUMBQ01 | 884 | 918052 | AC008121 | 3752 | 1-381 |
| HUMBQ01 | 884 | 918052 | AC023648 | 3753 | 1-2005 |
| HUMBQ01 | 884 | 918052 | AC008121 | 3754 | 1-2005 |
| HUMBQ01 | 884 | 918052 | AC023648 | 3755 | 1-5671 |
| HUMBQ01 | 884 | 918052 | AC008121 | 3756 | 1-5676 |
| HMUBP74 | 885 | 765502 | AC011553 | 3757 | 1-610 |
| | | | | | 699-939 |
| | | | | | 1219-1553 |
| HMUBN05 | 888 | 932057 | AC023534 | 3758 | 1-1710 |
| HMUBN05 | 888 | 932057 | AC023534 | 3759 | 1-774 |
| HMUBN05 | 888 | 932057 | AC023534 | 3760 | 1-1423 |
| HMUBM89 | 889 | 786082 | AL138898 | 3761 | 1-976 |
| HMUBM85 | 890 | 784295 | AL139253 | 3762 | 1-495 |
| HMUBM85 | 890 | 784295 | AL358492 | 3763 | 1-495 |
| HMUBM85 | 890 | 784295 | AL139253 | 3764 | 1-292 |
| HMUBM85 | 890 | 784295 | AL358492 | 3765 | 1-299 |
| HMUBM23 | 891 | 675296 | AC069198 | 3766 | 1-334 |
| HMUBM23 | 891 | 675296 | AC069198 | 3767 | 1-253 |
| | | | | | 1480-1581 |
| | | | | | 1922-2067 |
| HMUBM21 | 892 | 861218 | AP001447 | 3768 | 1-682 |
| HMUBM21 | 892 | 861218 | AC023532 | 3769 | 1-682 |
| HMUBM21 | 892 | 861218 | AP000571 | 3770 | 1-101 |
| | | | | | 236-917 |
| | | | | | 1917-1982 |
| | | | | | 3068-3361 |
| | | | | | 5001-5308 |
| | | | | | 5847-5967 |
| | | | | | 6768-6892 |
| HMUBM21 | 892 | 861218 | AP001447 | 3771 | 1-478 |
| HMUBM21 | 892 | 861218 | AC023532 | 3772 | 1-478 |
| HMUBM01 | 893 | 916291 | AC023855 | 3773 | 1-1257 |
| | | | | | 3192-3270 |
| | | | | | 3630-3976 |
| | | | | | 4242-4343 |
| | | | | | 4840-5519 |
| | | | | | 6021-6104 |
| | | | | | 6317-6420 |
| | | | | | 6782-6893 |
| | | | | | 6977-7017 |
| HMUBM01 | 893 | 916291 | AC004596 | 3774 | 1-192 |
| | | | | | 639-819 |
| | | | | | 2985-3379 |
| | | | | | 5817-7073 |
| | | | | | 9010-9088 |
| | | | | | 9448-9794 |
| | | | | | 10658-11337 |
| | | | | | 12600-12711 |
| | | | | | 12795-12835 |
| | | | | | 13418-13458 |
| | | | | | 15232-15558 |
| | | | | | 15880-15985 |
| | | | | | 16696-16987 |
| | | | | | 18333-18617 |
| | | | | | 18987-19269 |
| | | | | | 19915-20522 |
| HMUBM01 | 893 | 916291 | AC004596 | 3775 | 1-87 |
| HMUBL79 | 894 | 774904 | AC005586 | 3776 | 1-554 |
| HMUBL79 | 894 | 774904 | AC005586 | 3777 | 1-816 |
| HMUBL79 | 894 | 774904 | AC005586 | 3778 | 1-1171 |
| HMUBL25 | 895 | 678011 | AC004051 | 3779 | 1-665 |
| HMUBL25 | 895 | 678011 | AC004051 | 3780 | 1-439 |
| HMUBI26 | 896 | 424764 | AC016922 | 3781 | 1-545 |
| HMUBI26 | 896 | 424764 | AC016922 | 3782 | 1-490 |
| HMUBI26 | 896 | 424764 | AC016922 | 3783 | 1-1159 |
| HMUBH84 | 897 | 782971 | AL353147 | 3784 | 1-108 |
| | | | | | 1271-1606 |
| | | | | | 6082-6170 |
| | | | | | 6275-6854 |
| HMUBH84 | 897 | 782971 | AL353147 | 3785 | 1-337 |
| HMUBC76 | 898 | 769968 | AC040984 | 3786 | 1-479 |
| HMUBC76 | 898 | 769968 | AL133327 | 3787 | 1-480 |
| HMUBC76 | 898 | 769968 | AL133327 | 3788 | 1-613 |
| HMUBC76 | 898 | 769968 | AL133327 | 3789 | 1-545 |
| HMUBA75 | 899 | 767192 | AC073215 | 3790 | 1-43 |
| | | | | | 178-631 |
| | | | | | 4480-5300 |
| | | | | | 5346-9872 |
| | | | | | 10120-10587 |
| | | | | | 10955-11119 |
| HMUBA75 | 899 | 767192 | AC007250 | 3791 | 1-43 |
| | | | | | 178-631 |
| | | | | | 4479-5299 |
| | | | | | 5345-9871 |
| | | | | | 10119-10586 |
| | | | | | 10957-11121 |
| HMUBA75 | 899 | 767192 | AC073215 | 3792 | 1-274 |
| HMUBA75 | 899 | 767192 | AC007250 | 3793 | 1-274 |
| HMUBA61 | 900 | 741710 | AC067992 | 3794 | 1-96 |
| | | | | | 245-337 |
| | | | | | 889-1827 |
| | | | | | 1921-2211 |
| | | | | | 2213-2561 |
| | | | | | 2581-3014 |
| | | | | | 4496-7045 |
| HMUBA61 | 900 | 741710 | AC067992 | 3795 | 1-258 |
| HMUBA61 | 900 | 741710 | AC067992 | 3796 | 1-4074 |
| HMUAT71 | 901 | 772958 | AC006165 | 3797 | 1-153 |
| | | | | | 256-1782 |
| | | | | | 1869-2685 |
| | | | | | 2766-3299 |
| | | | | | 3543-3990 |
| | | | | | 4755-4931 |
| | | | | | 5175-5337 |
| | | | | | 5807-6087 |
| | | | | | 6226-6455 |
| | | | | | 7594-8044 |
| | | | | | 8215-8373 |
| | | | | | 9157-9392 |
| | | | | | 9509-9883 |
| | | | | | 11475-11999 |
| | | | | | 12043-13604 |
| | | | | | 13610-13734 |
| | | | | | 13800-14134 |
| | | | | | 14501-15266 |
| HMUAT71 | 901 | 772958 | AB023051 | 3798 | 1-153 |
| | | | | | 256-1782 |
| | | | | | 1869-2685 |
| | | | | | 2766-3299 |
| | | | | | 3543-3990 |
| | | | | | 4755-4931 |
| | | | | | 5175-5337 |
| | | | | | 5811-6091 |
| | | | | | 6230-6459 |
| | | | | | 7598-8048 |
| | | | | | 8219-8377 |
| | | | | | 9162-9397 |
| | | | | | 9514-9888 |
| | | | | | 11480-12004 |
| | | | | | 12048-13609 |
| | | | | | 13615-13739 |
| | | | | | 13805-14139 |
| | | | | | 14506-15271 |
| HMUAT71 | 901 | 772958 | AC006165 | 3799 | 1-1342 |
| | | | | | 1447-1578 |
| HMUAT71 | 901 | 772958 | AC006165 | 3800 | 1-2094 |
| | | | | | 2393-2516 |
| | | | | | 2641-2911 |
| | | | | | 3529-3786 |
| | | | | | 4862-5131 |
| HMUAT71 | 901 | 772958 | AB023051 | 3801 | 1-1342 |
| | | | | | 1447-1578 |
| HMUAT71 | 901 | 772958 | AB023051 | 3802 | 1-2094 |
| | | | | | 2393-2516 |
| | | | | | 2641-2911 |
| | | | | | 3529-3786 |
| | | | | | 4862-5139 |
| HFOZA47 | 904 | 909372 | AL133243 | 3803 | 1-502 |
| | | | | | 891-997 |
| | | | | | 3296-3521 |
| | | | | | 5357-6137 |
| | | | | | 7436-7920 |
| | | | | | 8616-8765 |
| | | | | | 9182-9311 |
| | | | | | 10530-11068 |
| | | | | | 11184-11626 |
| | | | | | 12025-14398 |
| | | | | | 14692-15155 |
| | | | | | 15250-15383 |
| | | | | | 15828-15994 |
| | | | | | 17708-19731 |
| | | | | | 19976-20476 |
| | | | | | 21720-21860 |
| HFOZA47 | 904 | 909372 | AL133243 | 3804 | 1-428 |
| HFOZA47 | 904 | 909372 | AL133243 | 3805 | 1-1592 |
| HFOYW76 | 905 | 769894 | AL121926 | 3806 | 1-37 |
| | | | | | 2244-2601 |
| | | | | | 3232-3454 |
| | | | | | 3491-3871 |
| | | | | | 4270-4412 |
| | | | | | 6007-7043 |
| | | | | | 11144-11328 |
| | | | | | 11354-11854 |
| | | | | | 13821-14176 |
| | | | | | 16051-16149 |
| | | | | | 17699-18165 |
| | | | | | 18180-18878 |
| HFOYW76 | 905 | 769894 | AL121926 | 3807 | 1-176 |
| HFOYW76 | 905 | 769894 | AL121926 | 3808 | 1-156 |
| | | | | | 159-551 |
| HFOYV08 | 906 | 959038 | Z98048 | 3809 | 1-924 |
| HFOYV08 | 906 | 959038 | Z98048 | 3810 | 1-2141 |
| | | | | | 2561-2701 |
| | | | | | 2941-3483 |
| | | | | | 3789-4096 |
| | | | | | 4140-5159 |
| | | | | | 5304-6198 |
| | | | | | 6305-6424 |
| | | | | | 8034-8140 |
| | | | | | 8775-9044 |
| | | | | | 11025-11657 |
| | | | | | 14599-15000 |
| | | | | | 16088-16163 |
| | | | | | 18758-18801 |
| | | | | | 18856-19427 |
| | | | | | 20301-20375 |
| | | | | | 23760-23837 |
| | | | | | 24870-24955 |
| | | | | | 25120-25391 |
| | | | | | 26285-26348 |
| | | | | | 27214-28161 |
| | | | | | 28757-29091 |
| | | | | | 31718-32125 |
| HFOYV08 | 906 | 959038 | Z98048 | 3811 | 1-507 |
| HFOYN65 | 908 | 747740 | AL358152 | 3812 | 1-1355 |
| | | | | | 1765-2516 |
| HFOYN65 | 908 | 747740 | AL358152 | 3813 | 1-984 |
| HFOYN65 | 908 | 747740 | AL358152 | 3814 | 1-293 |
| HFOYN01 | 909 | 854780 | AC027228 | 3815 | 1-454 |
| | | | | | 469-1300 |
| | | | | | 1311-1530 |
| | | | | | 3141-3500 |
| | | | | | 3595-4461 |
| | | | | | 5573-5640 |
| | | | | | 6780-6854 |
| | | | | | 6924-7105 |
| HFOYN01 | 909 | 854780 | AC027228 | 3816 | 1-538 |
| HFOYM48 | 910 | 721455 | AC000076 | 3817 | 1-615 |
| HFOYM48 | 910 | 721455 | AC000076 | 3818 | 1-1684 |
| HFOYM48 | 910 | 721455 | AC000076 | 3819 | 1-38 |
| | | | | | 63-269 |
| | | | | | 319-413 |
| | | | | | 415-847 |
| | | | | | 2369-3063 |
| | | | | | 3084-5496 |
| HFOYK21 | 912 | 670653 | AC010895 | 3820 | 1-1048 |
| HFOYK21 | 912 | 670653 | AC010895 | 3821 | 1-381 |
| HFOYH01 | 915 | 916055 | AC008397 | 3822 | 1-1320 |
| HFOYH01 | 915 | 916055 | AC008397 | 3823 | 1-658 |
| | | | | | 739-3456 |
| HFOYA17 | 919 | 662642 | AC008602 | 3824 | 1-348 |
| HFOYA17 | 919 | 662642 | AC008602 | 3825 | 1-113 |
| HFOXW67 | 920 | 494854 | AC024606 | 3826 | 1-1234 |
| HFOXW67 | 920 | 494854 | AC024606 | 3827 | 1-508 |
| HFOXV94 | 921 | 794175 | AC005328 | 3828 | 1-191 |
| | | | | | 282-1004 |
| HFOXV94 | 921 | 794175 | AC005328 | 3829 | 1-347 |
| HFOXV94 | 921 | 794175 | AC005328 | 3830 | 1-913 |
| HFOXT35 | 923 | 707088 | AL354890 | 3831 | 1-527 |
| HFOXT35 | 923 | 707088 | AL354890 | 3832 | 1-270 |
| HFOXS42 | 924 | 713514 | AC015559 | 3833 | 1-739 |
| HFOXS42 | 924 | 713514 | AC015559 | 3834 | 1-831 |
| HFOXO57 | 925 | 928171 | AL022165 | 3835 | 1-4237 |
| HFOXO57 | 925 | 928171 | AL022165 | 3836 | 1-601 |
| HFOXO57 | 925 | 928171 | AL022165 | 3837 | 1-229 |
| HFOXM53 | 927 | 587972 | AC011314 | 3838 | 1-563 |
| HFOXM53 | 927 | 587972 | AC010742 | 3839 | 1-563 |
| | | | | | 692-1031 |
| HFOXM53 | 927 | 587972 | AC011314 | 3840 | 1-247 |
| HFOXM53 | 927 | 587972 | AC010742 | 3841 | 1-247 |
| HFOXM53 | 927 | 587972 | AC010742 | 3842 | 1-307 |
| HFOXK96 | 929 | 732057 | AC004918 | 3843 | 1-70 |
| | | | | | 582-1137 |
| | | | | | 2262-2357 |
| | | | | | 2561-7148 |
| | | | | | 7282-10885 |
| HFOXK96 | 929 | 732057 | AC004918 | 3844 | 1-269 |
| HFOXK96 | 929 | 732057 | AC004918 | 3845 | 1-2013 |
| HFOXK42 | 930 | 587960 | AC006487 | 3846 | 1-385 |
| | | | | | 925-963 |
| | | | | | 1241-1694 |
| | | | | | 1773-1934 |
| | | | | | 2006-2474 |
| HFOXK42 | 930 | 587960 | AC006487 | 3847 | 1-1810 |
| HFOXK42 | 930 | 587960 | AC006487 | 3848 | 1-406 |
| HFOXF91 | 931 | 790103 | AC027731 | 3849 | 1-1854 |
| | | | | | 2517-2610 |
| | | | | | 2974-3261 |
| | | | | | 3694-5322 |
| HFOXF91 | 931 | 790103 | AL355880 | 3850 | 1-1856 |
| | | | | | 2517-2610 |
| | | | | | 2974-3261 |
| | | | | | 3694-5322 |
| | | | | | 9187-9303 |
| | | | | | 9508-9667 |
| | | | | | 10248-10546 |
| | | | | | 11270-11400 |
| | | | | | 14251-14404 |
| | | | | | 14486-14589 |
| | | | | | 16590-16688 |
| | | | | | 17066-17146 |
| HFOXF91 | 931 | 790103 | AL034379 | 3851 | 1-146 |
| | | | | | 669-818 |
| | | | | | 2394-2571 |
| | | | | | 2805-3392 |
| | | | | | 3477-3584 |
| | | | | | 3993-4434 |
| | | | | | 4623-4804 |
| | | | | | 5144-5315 |
| | | | | | 7457-7544 |
| | | | | | 7619-7747 |
| | | | | | 8093-10079 |
| | | | | | 10742-10835 |
| | | | | | 11199-11486 |
| | | | | | 11919-13547 |
| | | | | | 17412-17528 |
| | | | | | 17733-17892 |
| | | | | | 18473-18771 |
| | | | | | 19495-19625 |
| | | | | | 22477-22630 |
| | | | | | 24816-24914 |
| | | | | | 25282-25405 |
| | | | | | 25841-26405 |
| | | | | | 26938-27002 |
| | | | | | 29800-30272 |
| | | | | | 30380-30568 |
| HFOXF91 | 931 | 790103 | AC027731 | 3852 | 1-129 |
| HFOXF91 | 931 | 790103 | AL355880 | 3853 | 1-110 |
| HFOXF91 | 931 | 790103 | AL034379 | 3854 | 1-392 |
| HFOXD78 | 933 | 856499 | AC010794 | 3855 | 1-3291 |
| HFOXD78 | 933 | 856499 | AC009985 | 3856 | 1-3291 |
| HFOXD78 | 933 | 856499 | AC010794 | 3857 | 1-92 |
| HFOXD78 | 933 | 856499 | AC010794 | 3858 | 1-4024 |
| | | | | | 4342-4788 |
| | | | | | 6234-6476 |
| | | | | | 6856-7117 |
| | | | | | 7574-7852 |
| HFOXD78 | 933 | 856499 | AC009985 | 3859 | 1-4023 |
| | | | | | 4341-4787 |
| | | | | | 6219-6532 |
| | | | | | 6855-7116 |
| | | | | | 7573-7851 |
| HFOXB33 | 934 | 701719 | AL049775 | 3860 | 1-633 |
| HFOXB33 | 934 | 701719 | AL049775 | 3861 | 1-734 |
| HFIZP86 | 937 | 785341 | AC013644 | 3862 | 1-1064 |
| HFIZP86 | 937 | 785341 | AC055747 | 3863 | 1-1617 |
| HFIZP86 | 937 | 785341 | AC013644 | 3864 | 1-611 |
| HFIZP86 | 937 | 785341 | AC055747 | 3865 | 1-147 |
| HFIZP86 | 937 | 785341 | AC055747 | 3866 | 1-611 |
| HFIYX08 | 939 | 958977 | AL158813 | 3867 | 1-446 |
| HFIYX08 | 939 | 958977 | AL096678 | 3868 | 1-446 |
| HFIYX08 | 939 | 958977 | AL158813 | 3869 | 1-233 |
| HFIYX08 | 939 | 958977 | AK158813 | 3870 | 1-528 |
| HFIYX08 | 939 | 958977 | AL096678 | 3871 | 1-233 |
| HFIYX08 | 939 | 958977 | AL096678 | 3872 | 1-528 |
| HFIYW79 | 940 | 858618 | AC025840 | 3873 | 1-240 |
| | | | | | 265-775 |
| | | | | | 2493-2540 |
| HFIYW79 | 940 | 858618 | AC008723 | 3874 | 1-798 |
| | | | | | 1753-1907 |
| | | | | | 2217-2531 |
| | | | | | 3008-3156 |
| HFIYW79 | 940 | 858618 | AC008723 | 3875 | 1-951 |
| | | | | | 1396-1557 |
| | | | | | 5031-5131 |
| | | | | | 7701-7878 |
| | | | | | 8580-8685 |
| | | | | | 8771-8930 |
| | | | | | 8966-9330 |
| | | | | | 9366-9665 |
| | | | | | 13147-13262 |
| | | | | | 16273-16490 |
| | | | | | 17741-17892 |
| | | | | | 18390-18570 |
| | | | | | 18692-18768 |
| | | | | | 20484-20585 |
| | | | | | 20675-20764 |
| | | | | | 20927-21397 |
| | | | | | 22110-22308 |
| | | | | | 22665-22845 |
| | | | | | 24200-24245 |
| | | | | | 25983-26076 |
| | | | | | 26511-26819 |
| | | | | | 27138-27218 |
| | | | | | 27987-28086 |
| | | | | | 30157-30255 |
| | | | | | 30579-31026 |
| | | | | | 31198-31314 |
| HFIYS11 | 941 | 966702 | AC058804 | 3876 | 1-491 |
| HFIYS11 | 941 | 966702 | AC058804 | 3877 | 1-508 |
| HFIYN50 | 942 | 724175 | AC026028 | 3878 | 1-577 |
| HFIYN50 | 942 | 724175 | AL353708 | 3879 | 1-456 |
| | | | | | 936-1243 |
| | | | | | 1296-2012 |
| HFIYN50 | 942 | 724175 | AL359853 | 3880 | 1-456 |
| | | | | | 936-1243 |
| | | | | | 1296-2012 |
| HFIYN50 | 942 | 724175 | AC026028 | 3881 | 1-423 |
| HFIYN50 | 942 | 724175 | AL359853 | 3882 | 1-2482 |
| | | | | | 2605-3854 |
| HFIYN50 | 942 | 724175 | AL359853 | 3883 | 1-423 |
| HFIYJ92 | 943 | 791305 | AC000016 | 3884 | 1-65 |
| | | | | | 793-4089 |
| HFIYJ92 | 943 | 791305 | AC000016 | 3885 | 1-140 |
| HFIXR93 | 947 | 894013 | AL157824 | 3886 | 1-33 |
| | | | | | 5109-7241 |
| | | | | | 7282-11311 |
| HFIXR93 | 947 | 894013 | AC012151 | 3887 | 1-68 |
| | | | | | 2079-2213 |
| | | | | | 2879-2965 |
| | | | | | 3114-3257 |
| | | | | | 4198-4337 |
| | | | | | 6080-6204 |
| | | | | | 8566-8644 |
| | | | | | 13691-19866 |
| HFIXR68 | 948 | 752858 | AC019198 | 3888 | 1-1725 |
| | | | | | 2960-3425 |
| HFIXR68 | 948 | 752858 | AC015982 | 3889 | 1-1725 |
| | | | | | 2960-3438 |
| | | | | | 5180-5529 |
| | | | | | 5615-5769 |
| | | | | | 6070-6262 |
| | | | | | 6580-7062 |
| HFIXR68 | 948 | 752858 | AC019198 | 3890 | 1-593 |
| HFIXR68 | 948 | 752858 | AC015982 | 3891 | 1-593 |
| HFIXP31 | 949 | 697759 | AC009761 | 3892 | 1-420 |
| | | | | | 661-1011 |
| | | | | | 1193-2688 |
| HFIXP31 | 949 | 697759 | AC009761 | 3893 | 1-369 |
| | | | | | 518-912 |
| HFIXP04 | 950 | 839910 | AC009311 | 3894 | 1-564 |
| HFIXP04 | 950 | 839910 | AC009311 | 3895 | 1-319 |
| HFIXP04 | 950 | 839910 | AC009311 | 3896 | 1-183 |
| HFIVS08 | 955 | 959272 | AC007032 | 3897 | 1-163 |
| | | | | | 511-831 |
| | | | | | 1581-1856 |
| | | | | | 1918-2584 |
| | | | | | 2587-2776 |
| | | | | | 3944-4761 |
| | | | | | 4855-7799 |
| | | | | | 7849-8034 |
| | | | | | 8580-8847 |
| | | | | | 9303-10448 |
| | | | | | 11604-12183 |
| | | | | | 12772-13476 |
| | | | | | 13563-13793 |
| | | | | | 14201-14557 |
| | | | | | 14872-17303 |
| | | | | | 17312-17604 |
| | | | | | 17739-18258 |
| | | | | | 18373-19256 |
| | | | | | 20321-20694 |
| | | | | | 20846-22055 |
| | | | | | 22122-22853 |
| | | | | | 22866-23293 |
| | | | | | 23557-24012 |
| | | | | | 24021-24459 |
| | | | | | 25225-28897 |
| HFIVS08 | 955 | 959272 | AC007032 | 3898 | 1-445 |
| HFIVS08 | 955 | 959272 | AC007032 | 3899 | 1-449 |
| HFIUZ63 | 956 | 745033 | AC016065 | 3900 | 1-1167 |
| | | | | | 1243-2315 |
| | | | | | 2390-2968 |
| HFIUZ63 | 956 | 745033 | AC018398 | 3901 | 1-1167 |
| | | | | | 1243-2314 |
| | | | | | 2389-2967 |
| HFIUV58 | 958 | 735350 | AC063952 | 3902 | 1-1120 |
| HFIUV58 | 958 | 735350 | AC063952 | 3903 | 1-1755 |
| HFIUV18 | 959 | 787095 | AC024064 | 3904 | 1-1333 |
| HFIUV18 | 959 | 787095 | AC024064 | 3905 | 1-161 |
| HFIUM33 | 960 | 702319 | AC073108 | 3906 | 1-595 |
| HFIUM33 | 960 | 702319 | AL161642 | 3907 | 1-562 |
| HFIUM33 | 960 | 702319 | AC004980 | 3908 | 1-457 |
| HFIUM33 | 960 | 702319 | AC073108 | 3909 | 1-113 |
| HFIUM33 | 960 | 702319 | AL161642 | 3910 | 1-101 |
| HFIUM33 | 960 | 702319 | AC073108 | 3911 | 1-101 |
| HFIUM33 | 960 | 702319 | AL161642 | 3912 | 1-1274 |
| | | | | | 1766-2280 |
| | | | | | 2300-2807 |
| | | | | | 2837-3110 |
| HFIUM33 | 960 | 702319 | AC004980 | 3913 | 1-101 |
| HFIUM33 | 960 | 702319 | AC004980 | 3914 | 1-1274 |
| | | | | | 1766-2280 |
| | | | | | 2300-2807 |
| | | | | | 2837-3110 |
| HFIUH65 | 961 | 747836 | AC022400 | 3915 | 1-1987 |
| HFIUH65 | 961 | 747836 | AC037447 | 3916 | 1-1922 |
| HFIUH65 | 961 | 747836 | AC022400 | 3917 | 1-621 |
| | | | | | 646-1082 |
| | | | | | 1155-1312 |
| HFIUH65 | 961 | 747836 | AC037447 | 3918 | 1-621 |
| | | | | | 646-1082 |
| | | | | | 1155-1312 |
| HFIUD47 | 962 | 720254 | AC018927 | 3919 | 1-1277 |
| HFIUD47 | 962 | 720254 | AC027797 | 3920 | 1-1277 |
| HFIUD47 | 962 | 720254 | AC018927 | 3921 | 1-518 |
| HFIUD47 | 962 | 720254 | AC027797 | 3922 | 1-517 |
| HFITH46 | 963 | 718078 | AC009220 | 3923 | 1-460 |
| | | | | | 670-783 |
| | | | | | 1321-1430 |
| | | | | | 4578-4950 |
| | | | | | 5053-5122 |
| | | | | | 8113-8243 |
| | | | | | 11039-11159 |
| | | | | | 11712-11992 |
| | | | | | 12016-12129 |
| | | | | | 12648-12771 |
| HFITH46 | 963 | 718078 | AC009220 | 3924 | 1-122 |
| HFIJF58 | 966 | 735927 | AL049780 | 3925 | 1-860 |
| HFIJF58 | 966 | 735927 | AC006530 | 3926 | 1-860 |
| HFIJF58 | 966 | 735927 | AL049780 | 3927 | 1-1091 |
| HFIJF58 | 966 | 735927 | AL049780 | 3928 | 1-589 |
| HFIJF58 | 966 | 735927 | AC006530 | 3929 | 1-802 |
| HFIJF58 | 966 | 735927 | AC006530 | 3930 | 1-1090 |
| HFIIR63 | 969 | 744994 | AL354797 | 3931 | 1-693 |
| | | | | | 700-1411 |
| HFIIR63 | 969 | 744994 | AC068485 | 3932 | 1-693 |
| | | | | | 700-1411 |
| HFIIR63 | 969 | 744994 | AC013740 | 3933 | 1-4690 |
| | | | | | 6959-7154 |
| | | | | | 7209-7389 |
| | | | | | 7431-7731 |
| | | | | | 11120-11377 |
| | | | | | 12689-12782 |
| | | | | | 13980-14669 |
| | | | | | 27508-27734 |
| | | | | | 30606-31559 |
| | | | | | 31691-32383 |
| | | | | | 32390-33101 |
| | | | | | 33665-33950 |
| | | | | | 35646-35944 |
| | | | | | 36682-36970 |
| | | | | | 37681-38105 |
| | | | | | 38961-39244 |
| | | | | | 42417-42581 |
| | | | | | 43432-43781 |
| | | | | | 45418-45605 |
| | | | | | 46318-46443 |
| | | | | | 46498-46727 |
| HFIIR63 | 969 | 744994 | AL354797 | 3934 | 1-954 |
| HFIIR63 | 969 | 744994 | AL354797 | 3935 | 1-286 |
| HFIIR63 | 969 | 744994 | AC068485 | 3936 | 1-286 |
| HFIIR63 | 969 | 744994 | AC068485 | 3937 | 1-954 |
| HFIIR63 | 969 | 744994 | AC013740 | 3938 | 1-345 |
| | | | | | 615-1006 |
| HFIIR63 | 969 | 744994 | AC013740 | 3939 | 1-231 |
| HFIIK75 | 971 | 767222 | AC016722 | 3940 | 1-701 |
| | | | | | 1766-2718 |
| HFIIK75 | 971 | 767222 | AC016722 | 3941 | 1-717 |
| HFIIK07 | 973 | 953034 | AC016394 | 3942 | 1-588 |
| | | | | | 595-1084 |
| | | | | | 1098-1581 |
| HFIIK07 | 973 | 953034 | AC068557 | 3943 | 1-588 |
| | | | | | 595-1083 |
| | | | | | 1097-1580 |
| HFIIK07 | 973 | 953034 | AC016394 | 3944 | 1-558 |
| | | | | | 652-915 |
| | | | | | 1677-5669 |
| | | | | | 5844-5990 |
| | | | | | 6502-6754 |
| | | | | | 7996-8461 |
| | | | | | 8748-8832 |
| | | | | | 9129-9877 |
| HFIIK07 | 973 | 953034 | AC068557 | 3945 | 1-558 |
| | | | | | 652-915 |
| | | | | | 1677-5156 |
| HFIIJ14 | 974 | 839523 | AP001973 | 3946 | 1-102 |
| HFIIJ14 | 974 | 839523 | AL355880 | 3947 | 1-34 |
| HFIHW16 | 976 | 858594 | AC025891 | 3948 | 1-2095 |
| HFIHW16 | 976 | 858594 | AC016173 | 3949 | 1-2712 |
| HFIHW16 | 976 | 858594 | AP001600 | 3950 | 1-2711 |
| HFIHW16 | 976 | 858594 | AC016173 | 3951 | 1-509 |
| HFIHW16 | 976 | 858594 | AC016173 | 3952 | 1-463 |
| HFIHW16 | 976 | 858594 | AP001600 | 3953 | 1-509 |
| HFIHW16 | 976 | 858594 | AP001600 | 3954 | 1-187 |
| | | | | | 869-1287 |
| | | | | | 2982-3157 |
| | | | | | 3423-3674 |
| | | | | | 8406-8868 |
| HFIHW11 | 977 | 947856 | AF254981 | 3955 | 1-57 |
| | | | | | 1142-1260 |
| HFIHW11 | 977 | 947856 | AC023188 | 3956 | 1-85 |
| | | | | | 326-439 |
| | | | | | 1924-2100 |
| | | | | | 3184-3563 |
| HFIHW11 | 977 | 947856 | AC023188 | 3957 | 1-204 |
| | | | | | 939-1163 |
| HFIHW11 | 977 | 947856 | AC023188 | 3958 | 1-475 |
| HFIHV56 | 978 | 470954 | AC022930 | 3959 | 1-121 |
| | | | | | 959-1377 |
| | | | | | 2087-2219 |
| | | | | | 3018-3826 |
| | | | | | 3852-4165 |
| | | | | | 4657-4767 |
| | | | | | 5284-5392 |
| | | | | | 5999-6311 |
| | | | | | 6327-6368 |
| | | | | | 6940-7299 |
| | | | | | 7610-8439 |
| HFIHV56 | 978 | 470954 | AF238376 | 3960 | 1-623 |
| | | | | | 721-864 |
| | | | | | 1041-1249 |
| | | | | | 1439-1558 |
| | | | | | 2395-2813 |
| | | | | | 3523-3655 |
| | | | | | 4454-5262 |
| | | | | | 5288-5601 |
| | | | | | 6093-6203 |
| | | | | | 6720-6828 |
| | | | | | 7435-7747 |
| | | | | | 7763-7804 |
| | | | | | 8376-8481 |
| | | | | | 9046-9875 |
| HFIHV56 | 978 | 470954 | AF238376 | 3961 | 1-147 |
| | | | | | 342-408 |
| HFIHU76 | 979 | 769948 | AC006995 | 3962 | 1-509 |
| HFIHU76 | 979 | 769948 | AC005098 | 3963 | 1-509 |
| HFIHU76 | 979 | 769948 | AC004166 | 3964 | 1-509 |
| HFIHU76 | 979 | 769948 | AC004883 | 3965 | 1-509 |
| HFIHU76 | 979 | 769948 | AC006995 | 3966 | 1-89 |
| HFIHU76 | 979 | 769948 | AC006995 | 3967 | 1-159 |
| HFIHU76 | 979 | 769948 | AC005098 | 3968 | 1-114 |
| | | | | | 553-988 |
| | | | | | 1601-1926 |
| | | | | | 2188-2470 |
| | | | | | 3568-3753 |
| | | | | | 4168-4600 |
| | | | | | 5038-5080 |
| | | | | | 5881-5976 |
| | | | | | 6271-6358 |
| | | | | | 7128-8058 |
| | | | | | 8786-10907 |
| HFIHU76 | 979 | 769948 | AC005098 | 3969 | 1-160 |
| HFIHU76 | 979 | 769948 | AC004166 | 3970 | 1-77 |
| | | | | | 541-951 |
| | | | | | 1564-1889 |
| | | | | | 2151-2235 |
| | | | | | 3531-3716 |
| | | | | | 4131-4563 |
| | | | | | 4702-4802 |
| | | | | | 5001-5043 |
| | | | | | 5844-5939 |
| | | | | | 6234-6321 |
| | | | | | 7115-7476 |
| | | | | | 7548-8020 |
| | | | | | 8745-10867 |
| HFIHU76 | 979 | 769948 | AC004166 | 3971 | 1-163 |
| HFIHU76 | 979 | 769948 | AC004883 | 3972 | 1-114 |
| | | | | | 459-988 |
| | | | | | 1151-1251 |
| | | | | | 1601-1926 |
| | | | | | 2188-2470 |
| | | | | | 3568-3753 |
| | | | | | 4168-4600 |
| | | | | | 5038-5080 |
| | | | | | 5881-5976 |
| | | | | | 6271-6358 |
| | | | | | 7585-7796 |
| | | | | | 7819-9872 |
| | | | | | 10597-12718 |
| HFIHU76 | 979 | 769948 | AC004883 | 3973 | 1-163 |
| HFIHS86 | 980 | 785419 | AL158814 | 3974 | 1-1188 |
| HFIHS86 | 980 | 785419 | AL035694 | 3975 | 1-3503 |
| HFIHS86 | 980 | 785419 | AL035694 | 3976 | 1-131 |
| | | | | | 3726-4036 |
| | | | | | 9191-9552 |
| | | | | | 10640-12003 |
| HFIHK29 | 983 | 855174 | AC012040 | 3977 | 1-1468 |
| HFIHK29 | 983 | 855174 | AC026464 | 3978 | 1-146 |
| | | | | | 2144-2248 |
| | | | | | 3425-4485 |
| | | | | | 4538-6005 |
| | | | | | 8727-8898 |
| | | | | | 9137-9222 |
| | | | | | 12214-12317 |
| | | | | | 12384-12622 |
| | | | | | 12696-12797 |
| | | | | | 13071-13110 |
| | | | | | 13572-15071 |
| HFIHK29 | 983 | 855174 | AC026474 | 3979 | 1-146 |
| | | | | | 2144-2248 |
| | | | | | 3425-4485 |
| | | | | | 4538-6005 |
| | | | | | 9143-9228 |
| | | | | | 12383-12621 |
| | | | | | 12695-12796 |
| | | | | | 13070-13109 |
| | | | | | 13571-15070 |
| HFIHK29 | 983 | 855174 | AC026464 | 3980 | 1-568 |
| HFIHK29 | 983 | 855174 | AC012040 | 3981 | 1-146 |
| | | | | | 2144-2248 |
| | | | | | 3425-4485 |
| HFIHK29 | 983 | 855174 | AC026474 | 3982 | 1-568 |
| HFIAL66 | 991 | 587837 | AC012306 | 3983 | 1-565 |
| HCDEL02 | 993 | 920831 | AC061980 | 3984 | 1-628 |
| HCDEL02 | 993 | 920831 | AL159167 | 3985 | 1-1093 |
| | | | | | 1477-1978 |
| HCDEL02 | 993 | 920831 | AC061980 | 3986 | 1-410 |
| HCDEL02 | 993 | 920831 | AL159167 | 3987 | 1-410 |
| HCDEL02 | 993 | 920831 | AL159167 | 3988 | 1-389 |
| HCDDZ69 | 994 | 522220 | AC002310 | 3989 | 1-256 |
| | | | | | 411-537 |
| | | | | | 2216-2825 |
| | | | | | 2858-3950 |
| | | | | | 4039-4108 |
| | | | | | 4429-4979 |
| | | | | | 5008-5410 |
| | | | | | 5591-5625 |
| | | | | | 5641-7301 |
| | | | | | 7793-8106 |
| | | | | | 8114-8234 |
| | | | | | 11769-12452 |
| HCDDZ69 | 994 | 522220 | AC002310 | 3990 | 1-329 |
| HCDDZ69 | 994 | 522220 | AC002310 | 3991 | 1-1402 |
| | | | | | 1469-3065 |
| HCDDY54 | 995 | 529265 | AC012488 | 3992 | 1-341 |
| HCDDY54 | 995 | 529265 | AC012488 | 3993 | 1-361 |
| HCDDO80 | 996 | 778563 | AC025165 | 3994 | 1-746 |
| HCDDO80 | 996 | 778563 | AC025165 | 3995 | 1-302 |
| HCDCD64 | 997 | 863415 | AC022197 | 3996 | 1-190 |
| HCDCD64 | 997 | 863415 | AC022197 | 3997 | 1-619 |
| HCDBW41 | 998 | 712648 | AP001325 | 3998 | 1-390 |
| HCDBO86 | 999 | 784617 | AC073487 | 3999 | 1-375 |
| | | | | | 893-4326 |
| | | | | | 4474-5168 |
| | | | | | 5186-6317 |
| | | | | | 6538-6708 |
| | | | | | 6755-7192 |
| | | | | | 7587-9453 |
| HCDBO86 | 999 | 784617 | AC023055 | 4000 | 1-246 |
| | | | | | 485-1179 |
| | | | | | 1198-2329 |
| | | | | | 2550-2720 |
| | | | | | 2767-3204 |
| | | | | | 3603-5469 |
| HCDBO86 | 999 | 784617 | AC073487 | 4001 | 1-646 |
| HCDBO86 | 999 | 784617 | AC023055 | 4002 | 1-428 |
| HCDBO86 | 999 | 784617 | AC023055 | 4003 | 1-245 |
| HCDAA68 | 1001 | 753814 | AL353776 | 4004 | 1-560 |
| HCDAA68 | 1001 | 753814 | AL353776 | 4005 | 1-455 |
| HCDAA68 | 1001 | 753814 | AL353776 | 4006 | 1-130 |
| HBCKF23 | 1003 | 675613 | AC055747 | 4007 | 1-533 |
| | | | | | 1236-1544 |
| | | | | | 1697-1786 |
| HBCGD25 | 1004 | 677689 | AC023947 | 4008 | 1-691 |
| HBCGD25 | 1004 | 677689 | AC016946 | 4009 | 1-691 |
| HBCGD25 | 1004 | 677689 | AC022664 | 4010 | 1-691 |
| HBCGD25 | 1004 | 677689 | AC023947 | 4011 | 1-423 |
| HBCGD25 | 1004 | 677689 | AC016946 | 4012 | 1-423 |
| HBCGD25 | 1004 | 677689 | AC022664 | 4013 | 1-423 |
| HBCGD25 | 1004 | 677689 | AC016946 | 4014 | 1-100 |
| HAOAE95 | 1005 | 795674 | AC025225 | 4015 | 1-469 |
| | | | | | 511-892 |
| | | | | | 1010-2004 |
| HAOAE95 | 1005 | 795674 | AL034417 | 4016 | 1-469 |
| | | | | | 511-892 |
| | | | | | 1010-2004 |
| HAOAE95 | 1005 | 795674 | AC025225 | 4017 | 1-696 |
| HAOAE95 | 1005 | 795674 | AC025225 | 4018 | 1-430 |
| HAOAE95 | 1005 | 795674 | AL034417 | 4019 | 1-696 |
| HAOAE95 | 1005 | 795674 | AL034417 | 4020 | 1-430 |
| HAOAD27 | 1006 | 848729 | AL096776 | 4021 | 1-114 |
| | | | | | 1783-2276 |
| | | | | | 4713-5206 |
| | | | | | 7371-10780 |
| HAOAD27 | 1006 | 848729 | AL096776 | 4022 | 1-418 |
| HANKG10 | 1007 | 963926 | AL353705 | 4023 | 1-565 |
| HANKG10 | 1007 | 963926 | AL353594 | 4024 | 1-565 |
| HANKG10 | 1007 | 963926 | AL353705 | 4025 | 1-405 |
| HANKG10 | 1007 | 963926 | AL353594 | 4026 | 1-405 |
| HANKB13 | 1008 | 827062 | AC023963 | 4027 | 1-139 |
| | | | | | 1779-1929 |
| | | | | | 2453-2599 |
| HANKB13 | 1008 | 827062 | AC023963 | 4028 | 1-610 |
| HANKB13 | 1008 | 827062 | AC023963 | 4029 | 1-349 |
| HAMAC79 | 1009 | 872774 | AC019066 | 4030 | 1-1701 |
| HAMAC79 | 1009 | 872774 | AC019066 | 4031 | 1-203 |

[0073] Table 1B summarizes additional polynucleotides encompassed by the invention (including cDNA clones related to the sequences (Clone ID NO:Z), contig sequences (contig identifier (Contig ID:) contig nucleotide sequence identifiers (SEQ ID NO:X)), and genomic sequences (SEQ ID NO:B). The first column provides a unique clone identifier, “Clone ID NO:Z”, for a cDNA clone related to each contig sequence. The second column provides the sequence identifier, “SEQ ID NO:X”, for each contig sequence. The third column provides a unique contig identifier, “Contig ID:” for each contig sequence. The fourth column, provides a BAC identifier “BAC ID NO:A” for the BAC clone referenced in the corresponding row of the table. The fifth column provides the nucleotide sequence identifier, “SEQ ID NO:B” for a fragment of the BAC clone identified in column four of the corresponding row of the table. The sixth column, “Exon From-To”, provides the location (i.e., nucleotide position numbers) within the polynucleotide sequence of SEQ ID NO:B which delineate certain polynucleotides of the invention that are also exemplary members of polynucleotide sequences that encode polypeptides of the invention (e.g., polypeptides containing amino acid sequences encoded by the polynucleotide sequences delineated in column six, and fragments and variants thereof).

TABLE 2

| | | SEQ | | | | Score/ | | |
|---|---|---|---|---|---|---|---|---|
| Clone ID | Contig | ID | Analysis | | PFam/NR | Percent | NT | NT |
| NO: Z | ID: | NO: X | Method | PFam/NR Description | Accession Number | Identity | From | To |
| HANGC59 | 653577 | 20 | HMMER 1.8 | PFAM: Core histones | PF00125 | 11.44 | 96 | 164 |
| | | | | H2A, H2B, H3 and H4 | | | | |
| HAOAE53 | 964029 | 41 | HMMER 1.8 | PFAM: Zinc finger, | PF00098 | 6.5 | 136 | 168 |
| | | | | CCHC class | | | | |
| HAOAE56 | 767915 | 42 | blastx.2 | (AF098066) squamous | gb\|AAF00087.1\|AF | 88% | 1 | 228 |
| | | | | cell carcinoma antigen | 098066_1 | | | |
| | | | | recognized by T cell | | | | |
| | | | | [Homo sapiens] | | | | |
| HBCKE78 | 746109 | 55 | blastx.2 | (AF038606) contains | gb\|AAB92026.1\| | 43% | 55 | 225 |
| | | | | similarity to cyto- | | | | |
| | | | | skeletal keratin | | | | |
| | | | | [Caenorhabditis elegans] | | | | |
| HBFMC73 | 764150 | 56 | blastx.2 | (AK000496) unnamed | dbj\|BAA91205.1\| | 66% | 210 | 22 |
| | | | | protein product [Homo | 100% | 23 | 3 | |
| | | | | sapiens] | | | | |
| HBSAL69 | 573004 | 58 | blastx.2 | 23 kD protein | gb\|AAA61994.1\| | 71% | 423 | 130 |
| | | | | [Escherichia coli] | 100% | 103 | 2 | |
| | | | | | | 60% | 422 | 366 |
| HBSAL80 | 506580 | 59 | blastx.2 | No definition line found | gb\|AAB18589.1\| | 86% | 378 | 82 |
| | | | | [Escherichia coli] | | | | |
| HBSAM48 | 727635 | 61 | blastx.2 | Pyruvate formate-lyase | dbj\|BAA35637.1\| | 87% | 56 | 322 |
| | | | | 1 activating enzyme (EC | | | | |
| | | | | 1.97.1.4). [Escherichia | | | | |
| | | | | coli] | | | | |
| HBSAP73 | 764589 | 63 | blastx.2 | homoserine kinase | gb\|AAA20618.1\| | 99% | 467 | 3 |
| | | | | [Escherichia coli] | | | | |
| HBSDB50 | 571365 | 65 | HMMER | PFAM: TCP-1/cpn60 | PF00118 | 89.7 | 2 | 226 |
| | | | | 2.1.1 | chaperonin family | | | |
| | | | blastx.2 | groEL protein (AA 1- | emb\|CAA30698.1\| | 79% | 2 | 301 |
| | | | | 548) [Eseherichia coil] | | | | |
| HBSDB63 | 745211 | 66 | blastx.2 | (AF090895) PRO0117 | gb\|AAF24019.1\|AF | 68% | 224 | 93 |
| | | | | [Homo sapiens] | 090895 1 | 71% | 91 | 71 |
| HCDAE77 | 533925 | 70 | blastx.2 | (AC006539) | gb\|AAD14470.1\| | 48% | 59 | 238 |
| | | | | BC394982 [Homo | | 46% | 59 | 232 |
| | | | | sapiens] | 45% | 59 | 238 | |
| | | | | | | 48% | 62 | 223 |
| | | | | | | 47% | 62 | 238 |
| | | | | | | 40% | 59 | 238 |
| | | | | | | 45% | 59 | 238 |
| | | | | | | 42% | 62 | 238 |
| | | | | | | 39% | 59 | 217 |
| | | | | | | 35% | 11 | 238 |
| | | | | | | 37% | 7 | 69 |
| | | | | | | 35% | 4 | 69 |
| | | | | | | 40% | 4 | 69 |
| | | | | | | 63% | 4 | 36 |
| | | | | | | 37% | 241 | 309 |
| HFICA06 | 934675 | 125 | blastx.14 | NADH:ubiquinone | gi\|1946692\|gb\|AAB | 82% | 122 | 172 |
| | | | | oxidoreductase MLRQ | 52726.1\| | 33% | 2 | 127 |
| | | | | subunit [Homo sapiens] | | 66% | 302 | 355 |
| HFIHE47 | 857988 | 140 | blastx.2 | weak similarity to ATP | gb\|AAA50619.1\| | 27% | 733 | 1644 |
| | | | | synthase B chain | | 37% | 403 | 687 |
| | | | | [Caenorhabditis elegans] | | | | |
| HFIHF63 | 944246 | 141 | HMMER | PFAM: Immunoglobulin | PF00047 | 22.4 | 92 | 364 |
| | | | | 2.1.1 | domain | | | |
| HFITZ24 | 677144 | 152 | HMMER 1.8 | PFAM: Zinc finger, | PF00096 | 4.13 | 55 | 99 |
| | | | | C2H2 type | | | | |
| HFIYL01 | 919416 | 180 | blastx.14 | NADH:ubiquinone | gi\|1946692\|gb\|AAB | 71% | 173 | 277 |
| | | | | oxidoreductase MLRQ | 52726.1\| | 38% | 53 | 178 |
| | | | | subunit [Homo sapiens] | | | | |
| | 908912 | 210 | HMMER | PFAM: Zinc finger, | PF00096 | 119.7 | 269 | 337 |
| HMUBM26 | | | 2.1.1 | C2H2 type | | | | |
| | | | blastx.2 | zinc finger protein | gb\|AAA93261.1\| | 61% | 2 | 508 |
| | | | | C2H2-25 [Homo | | 62% | 2 | 460 |
| | | | | sapiens] | | 60% | 8 | 460 |
| | | | | | | 60% | 8 | 460 |
| | | | | | | 59% | 8 | 460 |
| | | | | | | 59% | 8 | 460 |
| | | | | | | 61% | 8 | 436 |
| | | | | | | 50% | 29 | 460 |
| | | | | | | 51% | 167 | 460 |
| | | | | | | 40% | 251 | 460 |
| | | | | | | 28% | 254 | 478 |
| | | | | | | 83% | 511 | 564 |
| | | | | | | 72% | 511 | 564 |
| | | | | | | 72% | 511 | 564 |
| | | | | | | 66% | 511 | 564 |
| | | | | | | 64% | 511 | 561 |
| | | | | | | 61% | 511 | 564 |
| | | | | | | 68% | 511 | 558 |
| | | | | | | 68% | 456 | 512 |
| | | | | | | 63% | 456 | 512 |
| | | | | | | 63% | 456 | 512 |
| | | | | | | 50% | 511 | 564 |
| | | | | | | 61% | 511 | 564 |
| | | | | | | 68% | 456 | 512 |
| | | | | | | 57% | 456 | 512 |
| | | | | | | 57% | 456 | 512 |
| | | | | | | 63% | 456 | 512 |
| | | | | | | 57% | 456 | 512 |
| | | | | | | 47% | 456 | 512 |
| | | | | | | 55% | 459 | 512 |
| HOEAK21 | 954961 | 239 | blastx.14 | similar to Azorhizobium | gi\|396396\|gb\|AAC4 | 85% | 327 | 187 |
| | | | | caulinodans hypoth. | 3155.1\| | | | |
| | | | | protein, 1 | | | | |
| HOEJG04 | 859251 | 261 | HMMER | PFAM: Pyruvate | PF01855 | 227.6 | 3 | 431 |
| | | | 2.1.1 | flavodoxin/ferredoxin | | | | |
| | | | | oxidoreductase (N | | | | |
| | | | | terminus) | | | | |
| HOEMK02 | 918364 | 267 | blastx.14 | Periplasmic chaperone | gi\|4062507\|db\|BA | 100% | 79 | 2 |
| | | | | focC protein | A35694.1\| | | | |
| | | | | [Escherichia coli] | | | | |
| HOEOE25 | 907806 | 269 | HMMER 1.8 | PFAM: Zinc finger, | PF00097 | 41.99 | 59 | 208 |
| | | | | C3HC4 type (RING | | | | |
| | | | | finger) | | | | |
| | | | blastx.2 | (AJ224819) tumor | emb\|CAA12136.1\| | 41% | 32 | 625 |
| | | | | suppressor [Homo | | | | |
| | | | | sapiens] | | | | |
| HRDAF69 | 956269 | 331 | blastx.14 | (AB012223) ORF2 | gi\|2981631\|dbj\|BA | 42% | 4 | 171 |
| | | | | [Canis familiaris] | A25253.1 | | | |
| HRDBM42 | 530849 | 349 | HMMER 1.8 | PFAM: Helix-loop-helix | PF00010 | 8.1 | 139 | 246 |
| | | | | DNA-binding domain | | | | |
| HRDBT72 | 507847 | 356 | HMMER 1.8 | PFAM: Zinc-binding | PF00099 | 7.31 | 295 | 324 |
| | | | | metalloprotease domain | I | | | |
| HSKET11 | 967000 | 441 | blastx.14 | alternate name ygiP; | gi\|1203799\|gb\|AAA | 96% | 2 | 343 |
| | | | | ORE_310 [Escherichia | 89140.1\| | 100% | 331 | 363 |
| | | | | coli] | | | | |
| HSKHS71 | 911592 | 443 | HMMER | PFAM: Ank repeat | PF00023 | 63.1 | 94 | 192 |
| | | | 2.1.1 | | | | | |
| | | | blastx.14 | contains 10 ankyrin-like | gi\|2447128\|gb\|AAC | 42% | 106 | 366 |
| | | | | repeats; similar to | 96986.11 | 36% | 97 | 357 |
| | | | | human 1 [Paramecium | | 35% | 103 | 372 |
| | | | | bursaria Chlorella virus | | 35% | 100 | 372 |
| | | | | 1] | 38% | 103 357 | | |
| | | | | | | 31% | 103 | 366 |
| | | | | | | 40% | 196 | 381 |
| | | | | | | 35% | 1 | 84 |
| HSKKD70 | 916984 | 446 | blastx.14 | ORE_f268a | gi\|537144\|gb\|AAA9 | 93% | 420 | 1 |
| | | | | [Escherichia coli] | 7199.1 | | | |
| HSLBZ91 | 573987 | 467 | HMMER | PFAM: Domain of | PF00990 | 78.1 | 6 | 254 |
| | | | 2.1.1 | unknown function | | | | |
| HSLCJ47 | 908627 | 470 | blastx.14 | basonuclin [Homo | gi\|179337\|gb\|AAA3 | 54% | 263 | 361 |
| | | | | sapiens] | 5584.1\| | | | |
| HSLCL38 | 951028 | 471 | blastx.14 | 3-oxoacyl-[acyl-carrier- | gi\|4062664\|dbj\|BA | 88% | 41 | 202 |
| | | | | protein] synthase (EC | A35903.1\| | 100% | 3 | 41 |
| | | | | 2.3.1.41) II [Escherichia | | | | |
| | | | | coli] | | | | |
| HSLDG13 | 913664 | 477 | blastx.14 | melibiose carrier | gi\|146804\|gb\|AAA2 | 96% | 274 | 2 |
| | | | | [Escherichia coli] | 4148.1\| | 66% | 314 | 270 |
| HSLDP16 | 573210 | 484 | HMMER | PFAM: 6,7-dimethyl-8- | PF00885 | 184.6 | 8 | 271 |
| | | | 2.1.1 | ribityllumazine synthase | | | | |
| HSLEC25 | 572859 | 487 | HMMER | PFAM: Methylmalonyl- | PF01642 | 20 | 8 | 76 |
| | | | 2.1.1 | CoA mutase | | | | |
| HSLED38 | 709381 | 489 | HMMER | PFAM: Fructose-1-6- | PF00316 | 47.3 | 369 | 473 |
| | | | 2.1.1 | bisphosphatase | | | | |
| HSLEG74 | 825500 | 493 | HMMER 1.8 | PFAM: Bacterial mutT | PF00293 | 2.42 | 30 | 98 |
| | | | | protein | | | | |
| HSLFS42 | 948740 | 501 | blastx.14 | RhsE protein | gi\|1742368\|dbj\|BA | 100% | 34 | 300 |
| | | | | (fragment). [Eseherichia | A15087.1\|100% | 2 | 34 | |
| | | | | coli] | | | | |
| HSLFU01 | 916448 | 505 | blastx.14 | Rod protein FlgC | gi\|4062651\|dbj\|BA | 89% | 259 | 5 |
| | | | | [Escherichia coli] | A35882.1\| | 100% | 383 | 261 |
| | | | | | | 100% | 408 | 385 |
| HSLIJ57 | 659533 | 517 | HMMER | PFAM: Pyridoxal- | PF00278 | 94 | 150 | 365 |
| | | | 2.1.1 | dependent | | | | |
| | | | | decarboxylase | | | | |
| HSLJN49 | 920062 | 523 | blastx.14 | Spermidine/putrescine | gi\|1651552\|dbj\|BA | 98% | 246 | 1 |
| | | | | transport system | A35945.1\| | 80% | 427 | 245 |
| | | | | permease protein PotB. | | | | |
| | | | | [Escherichia coli] | | | | |
| HSSAN96 | 936108 | 567 | blastx.14 | (AF000531) Tat protein | gi\|2245487\|gb\|AAB | 63% | 246 | 214 |
| | | | | [Human | 62530.1\| | 63% | 56 | 24 |
| | | | | immunodeficiency virus | | 30% | 108 | 49 |
| | | | | type 1] | | | | |
| HSSBO48 | 871217 | 571 | HMMER 1.8 | PFAM: Sugar(and | PF00083 | 9.8 | 26 | 232 |
| | | | | other) transporters | | | | |
| HSSEU93 | 911261 | 583 | blastx.14 | (AJ007012) Fish protein | gi\|3702174\|emb\|CA | 65% | 66 | 212 |
| | | | | [Mus musculus] | A07416.1J | 39% | 69 | 212 |
| | | | | | | 53% | 191 | 229 |
| | | | | | | 54% | 208 | 240 |
| HSSAA15 | 965347 | 664 | blastx.14 | SM-20 [Rattus | gi\|469478\|gb\|AAA1 | 77% | 111 | 434 |
| | | | | norvegicus] | 9321.1\| | | | |
| HSRAA8O | 937640 | 683 | HMMER 1.8 | PFAM: Reverse | PF00078 | 20.88 | 11 | 130 |
| | | | | transcriptase (RNA- | | | | |
| | | | | dependent DNA | | | | |
| | | | | polymerase) | | | | |
| | | | blastx.14 | (AF080232) polymerase | gi\|3600069\|gb\|AAC | 65% | 17 | 325 |
| | | | | [Human endogenous | 63292.1\| | | | |
| | | | | retrovirus K] | | | | |
| HSLKB62 | 905738 | 690 | HMMER | PEAM: | PF00912 | 310.2 | 344 | 850 |
| | | | 2.1.1 | Transglycosylase | | | | |
| | | | blastx.14 | ORE_f242 [Escherichia | gi\|606147\|gb\|AAA5 | 93% | 290 | 937 |
| | | | | coil] | 8010.1\| | | | |
| HSLJF33 | 938811 | 694 | blastx.2 | (AE000391) putative | gb\|AAC76123.1\| | 84% | 3 | 527 |
| | | | | transport protein | | | | |
| | | | | [Escherichia coil] | | | | |
| HSLJD02 | 965826 | 695 | HMMER 1.8 | PFAM: Sugar (and | PF00083 | 19.53 | 464 | 874 |
| | | | | other) transporters | | | | |
| | | | blastx.2 | UhpC protein | gb\|AAA24722.1\| | 100% | 56 | 907 |
| | | | | [Escherichia coil] | | | | |
| HSLHZ10 | 963808 | 701 | blastx.14 | Hypothetical 17.3 kd | gi\|4902983\|dbj\|BA | 97% | 308 | 180 |
| | | | | protein in alpA-gabD | A77917.1\| | 100% | 178 | 128 |
| | | | | intergenic region (o152). | | | | |
| | | | | [Escherichia coil] | | | | |
| HSLHV27 | 964075 | 702 | HMMER | PFAM: NADH- | PF00361 | 115.1 | 917 | 615 |
| | | | 2.1.1 | Ubiquinone/plastoquino | | | | |
| | | | | ne (complex I), various | | | | |
| | | | | chains | | | | |
| | | | blastx.2 | NADH dehydrogenase I, | emb\|CAA48371.1\| | 99% | 91 | 954 |
| | | | | subunit nuoL | | | | |
| | | | | [Escherichia coli] | | | | |
| HSLGO19 | 668634 | 708 | HMMER 1.8 | PFAM: Basic region | PF00170 | 17.19 | 265 | 372 |
| | | | | plus leucine zipper | | | | |
| | | | | transcription factors | | | | |
| HSLGA24 | 955333 | 722 | HMMER | PFAM: Mur ligase | PF01225 | 119.9 | 772 | 386 |
| | | | 2.1.1 | family | | | | |
| | | | blastx.2 | UDP-MurNac-tripeptide | dbj\|BAA01350.1\| | 91% | 33 | 476 |
| | | | | synthetase (MurE) | 99% | 434 | 805 | |
| | | | | [Escherichia coli] | | | | |
| HSLFT29 | 680451 | 724 | HMMER 1.8 | PFAM: Sigma-70 | PF00140 | 224.55 | 1 | 399 |
| | | | | factors | | | | |
| HSLDT25 | 949079 | 730 | HMMER | PFAM: FecCD transport | PF01032 | 86.6 | 1331 | 921 |
| | | | 2.1.1 | family | | | | |
| | | | blastx.2 | ferrichrome-iron | gb\|AAB08583.1\| | 92% | 32 | 712 |
| | | | | transport protein FhuB | | 97% | 661 | 1026 |
| | | | | [Escherichia coli] | | 35% | 673 | 1011 |
| | | | | | | 28% | 101 | 613 |
| | | | | | | 69% | 3 | 41 |
| HSLDR05 | 932128 | 732 | blastx.14 | UhpC protein | gi\|148114\|gb\|AAA2 | 97% | 98 | 220 |
| | | | | [Escherichia coli] | 4722.1\| | 100% | 3 | 95 |
| | | | | | | 42% | 127 | 168 |
| HSLCX61 | 742031 | 738 | HMMER | PFAM: KRAB box | PF01352 | 49.2 | 373 | 474 |
| | | | 2.1.1 | | | | | |
| HSLCF96 | 637670 | 739 | HMMER 1.8 | PFAM: Sugar (and | PF00083 | 10.78 | 415 | 576 |
| | | | | other) transporters | | | | |
| | | | blastx.2 | (AE000352) putative | gb\|AAC75728.1\| | 94% | 415 | 1179 |
| | | | | transport protein | | 100% | 297 | 413 |
| | | | | [Escherichia coli] | | 70% | 1101 | 1211 |
| | | | | | | 20% | 409 | 600 |
| | | | | | | 26% | 1021 | 1179 |
| HSLCF96 | 954777 | 1016 | HMMER 1.8 | PFAM: Sugar (and | PF00083 | 30.03 | 1296 | 1015 |
| | | | | other) transporters | | | | |
| | | | blastx.2 | (AE000352) putative | gb\|AAC75728.1\| | 96% | 303 | 1127 |
| | | | | transport protein | | 91% | 1147 | 1215 |
| | | | | [Escherichia coli] | | | | |
| HSKKE11 | 965857 | 744 | blastx.14 | cDNA EST | gi\|3877299\|emb\|CA | 88% | 117 | 245 |
| | | | | EMBL:D70203 comes | A93496.1\| | 62% | 28 | 75 |
| | | | | from this gene; cDNA | | 100% | 3 | 26 |
| | | | | EST 11 yk403g7.5 | | | | |
| | | | | comes from this gene; | | | | |
| | | | | cDNA EST | | | | |
| | | | | EMBL:C08962 comes | | | | |
| | | | | from | | | | |
| HSKHT93 | 957866 | 749 | blastx.14 | (AF117815) | gi\|4235630\|gb\|AAD | 80% | 275 | 364 |
| | | | | molybdopterin synthase | 13296.1\| | | | |
| | | | | small subunit [Homo | | | | |
| | | | | sapiens] | | | | |
| HSKEH21 | 941976 | 752 | blastx.14 | diacylglycerol kinase eta | gi\|1401232\|gb\|AAC | 87% | 8 | 703 |
| | | | | [Cricetinae gen. sp.] | 52714.1\| | | | |
| HSKCR54 | 922730 | 754 | HMMER | PFAM: Ribosomal | PF01196 | 29.6 | 260 | 394 |
| | | | 2.1.1 | proteinLl7 | | | | |
| HSKBW86 | 785783 | 756 | HMMER | PFAM: Bacterial | PF01103 | 75.2 | 1 | 165 |
| | | | 2.1.1 | surface antigen | | | | |
| HSHCL04 | 840406 | 765 | blastx.2 | (AF118082) PRO1902 | gb\|AAF22026.1\|AF | 70% | 651 | 559 |
| | | | | [Homo sapiens] | 118094_21 | 61% | 326 | 273 |
| HOSMP95 | 948496 | 794 | blastx.14 | unknown [Mus | gi\|1490330\|emb\|CA | 77% | 3 | 146 |
| | | | | musculus] | B01546.1\| | | | |
| HOSCV06 | 960555 | 809 | blastx.2 | (AL133104) | emb\|CAB61411.1\| | 100% | 45 | 191 |
| | | | | hypothetical protein | | | | |
| | | | | [Homo sapiens] | | | | |
| HOHAV60 | 489007 | 842 | HMMER 1.8 | PFAM: PH (pleckstrin | PF00169 | 15.98 | 111 | 212 |
| | | | | homology) domain | | | | |
| HOHAI11 | 965035 | 1026 | blastx.14 | 10- | gi\|908915\|gb\|AAA7 | 69% | 102 | 422 |
| | | | | formyltetrahydrofolate | 0429.1\| | 100% | 431 | 448 |
| | | | | dehydrogenase [Rattus | | | | |
| | | | | norvegicus] | | | | |
| HOEEU57 | 932562 | 853 | HMMER | PFAM: MYND finger | PF01753 | 45.6 | 139 | 255 |
| | | | 2.1.1 | | | | | |
| | | | blastx.14 | skm-BOP2 [Mus | gi\|5870834\|gb\|AAC | 39% | 76 | 279 |
| | | | | musculus] | 53022.2\| | 41% | 556 | 750 |
| | | | | | | 22% | 289 | 552 |
| HOABG91 | 811156 | 863 | HMMER 1.8 | PFAM: Low-density | PF00058 | 23.5 | 46 | 174 |
| | | | | lipoprotein receptor | | | | |
| | | | | domain class B | | | | |
| HFOZC29 | 923288 | 903 | blastx.14 | coatomer [Bos taurus] | gi\|441486\|emb\|CA | 87% | 568 | 422 |
| | | | | | A53539.1\| | | | |
| HFOYG86 | 955554 | 1029 | blastx.2 | G protein-coupled | emb\|CAA80651.1\| | 31% | 8 | 727 |
| | | | | receptor [Lymnaea | | | | |
| | | | | stagnalis] | | | | |
| HFOXL88 | 909839 | 928 | blastx.14 | (AC004084) similar to | gi\|2822157\|gb\|AAB | 97% | 305 | 171 |
| | | | | GTPase-activating | 97935.1\| | 100% | 425 | 303 |
| | | | | proteins; 1 | 72% | 180 | 148 | |
| | | | | | | 83% | 411 | 394 |
| HFIXP31 | 697759 | 949 | HMMER | PFAM: BTB/POZ | PF00651 | 49.8 | 9 | 146 |
| | | | 2.1.1 | domain | | | | |
| HFIHW91 | 907618 | 975 | HMMER | PFAM: ADP- | PF00025 | 82.4 | 222 | 500 |
| | | | 2.1.1 | ribosylation factor | | | | |
| | | | | family | | | | |
| | | | blastx.14 | GTP-binding protein | gi\|290213\|gb\|AAA7 | 31% | 288 | 488 |
| | | | | [Drosophila | 4629.1\| | 54% | 222 | 287 |
| | | | | melanogaster] | | | | |
| HFIHW11 | 947856 | 977 | blastx.14 | Similarity to Yeast | gi\|4008355\|emb\|CA | 81% | 3 | 146 |
| | | | | TAT-binding homolog 7 | A92596.1\| | | | |
| | | | | 111 EMB | | | | |
| HFIDL68 | 928475 | 986 | HMMER 1.8 | PFAM: 7 | PF00001 | 50.42 | 8 | 319 |
| | | | | transmembrane receptor | | | | |
| | | | | (rhodopsin family) | | | | |
| | | | blastx.2 | G protein-coupled | emb\|CAA80651.1\| | 41% | 11 | 340 |
| | | | | receptor [Lymnaea | | | | |
| | | | | stagnalis] | | | | |
| HFIBK83 | 939556 | 988 | blastx.14 | contains similarity to | gi\|1519671\|gb\|AAB | 38% | 20 | 289 |
| | | | | ATP/GTP-binding site | 07572.1\| | | | |
| | | | | motif (PS:PS00017) | | | | |
| | | | | [Caenorhabditis elegans] | | | | |
| HCOKA10 | 907080 | 992 | HMMER | PEAM: Ribosomal | PF01199 | 229.8 | 509 | 213 |
| | | | 2.1.1 | protein L34e | | | | |
| | | | blastx.2 | ribosomal protein L34 | gb\|AAC41916.1\| | 98% | 521 | 216 |
| | | | | [Homo sapiens] | | | | |
| HCOKA10 | 918918 | 1031 | HMMER | PFAM: Small cytokines | PF00048 | 124.2 | 1447 | 1238 |
| | | | 2.1.1 | (intecrine/chemokine), | | | | |
| | | | | interleukin-8 like | | | | |
| | | | blastx.14 | granulocyte chemotactic | pir\|B54188\|B54188 | 100% | 1444 | 1223 |
| | | | | protein, GCP-2-bovine | | | | |
| HCOKA10 | 919869 | 1032 | HMMER | PFAM: Small cytokines | PF00048 | 124.2 | 169 | 378 |
| | | | 2.1.1 | (intecrine/chemokine), | | | | |
| | | | | interleukin-8 like | | | | |

[0074] Table 2 further characterizes certain encoded polypeptides of the invention, by providing the results of comparisons to protein and protein family databases. The first column provides a unique clone identifier, “Clone ID NO:”, corresponding to a cDNA clone disclosed in Table 1A. The second column provides the unique contig indentifier, “Contig ID:” which allows correlation with the information in Table 1A. The third column provides the sequence identifier, “SEQ ID NO:X”, for the contig polynucleotide sequences. The fourth column provides the analysis method by which the homology/identity disclosed in the row was determined. The fifth column provides a description of PFam/NR hits having significant matches identified by each analysis. Column six provides the accession number of the PFam/NR hit disclosed in the fifth column. Column seven, “Score/Percent Identity”, provides a quality score or the percent identity, of the hit disclosed in column five. Comparisons were made between polypeptides encoded by polynucleotides of the invention and a non-redundant protein database (herein referred to as “NR”), or a database of protein families (herein referred to as “PFam”), as described below.

[0075] The NR database, which comprises the NBRF PIR database, the NCBI GenPept database, and the SIB SwissProt and TrEMBL databases, was made non-redundant using the computer program nrdb2 (Warren Gish, Washington University in Saint Louis). Each of the polynucleotides shown in Table 1A, column 3 (e.g., SEQ ID NO:X or the ‘Query’ sequence) was used to search against the NR database. The computer program BLASTX was used to compare a 6-frame translation of the Query sequence to the NR database (for information about the BLASTX algorithm please see Altshul et al., J. Mol. Biol. 215:403-410 (1990), and Gish et al., Nat. Genet. 3:266-272 (1993)). A description of the sequence that is most similar to the Query sequence (the highest scoring ‘Subject’) is shown in column five of Table 2 and the database accession number for that sequence is provided in column six. The highest scoring ‘Subject’ is reported in Table 2 if (a) the estimated probability that the match occurred by chance alone is less than 1.0e−07, and (b) the match was not to a known repetitive element. BLASTX returns alignments of short polypeptide segments of the Query and Subject sequences which share a high degree of similarity; these segments are known as High-Scoring Segment Pairs or HSPs. Table 2 reports the degree of similarity between the Query and the Subject for each HSP as a percent identity in Column 7. The percent identity is determined by dividing the number of exact matches between the two aligned sequences in the HSP, dividing by the number of Query amino acids in the HSP and multiplying by 100. The polynucleotides of SEQ ID NO:X which encode the polypeptide sequence that generates an HSP are delineated by columns 8 and 9 of Table 2.

[0076] The PFam database, PFam version 5.2, (Sonnhammer et al., Nucl. Acids Res., 26:320-322, (1998)) consists of a series of multiple sequence alignments; one alignment for each protein family. Each multiple sequence alignment is converted into a probability model called a Hidden Markov Model, or HMM, that represents the position-specific variation among the sequences that make up the multiple sequence alignment (see, e.g., R. Durbin et al., Biological sequence analysis: probabilistic models of proteins and nucleic acids, Cambridge University Press, 1998 for the theory of HMMs). The program HMMER version 1.8 (Sean Eddy, Washington University in Saint Louis) was used to compare the predicted protein sequence for each Query sequence (SEQ ID NO:Y in Table 1A) to each of the HMMs derived from PFam version 5.2. A HMM derived from PFam version 5.2 was said to be a significant match to a polypeptide of the invention if the score returned by HMMER 1.8 was greater than 0.8 times the HMMER 1.8 score obtained with the most distantly related known member of that protein family. The description of the PFam family which shares a significant match with a polypeptide of the invention is listed in column 5 of Table 2, and the database accession number of the PFam hit is provided in column 6. Column 7 provides the score returned by HMMER version 1.8 for the alignment. Columns 8 and 9 delineate the polynucleotides of SEQ ID NO:X which encode the polypeptide sequence which shows a significant match to a PFam protein family.

[0077] As mentioned, columns 8 and 9 in Table 2, “NT From” and “NT To”, delineate the polynucleotides of “SEQ ID NO:X” that encode a polypeptide having a significant match to the PFam/NR database as disclosed in the fifth column of Table 2. In one embodiment, the invention provides a protein comprising, or alternatively consisting of, a polypeptide encoded by the polynucleotides of SEQ ID NO:X delineated in columns 8 and 9 of Table 2. Also provided are polynucleotides encoding such proteins, and the complementary strand thereto.

[0078] The nucleotide sequence SEQ ID NO:X and the translated SEQ ID NO:Y are sufficiently accurate and otherwise suitable for a variety of uses well known in the art and described further below. For instance, the nucleotide sequences of SEQ ID NO:X are useful for designing nucleic acid hybridization probes that will detect nucleic acid sequences contained in SEQ ID NO:X or the cDNA contained in Clone ID NO:Z. These probes will also hybridize to nucleic acid molecules in biological samples, thereby enabling immediate applications in chromosome mapping, linkage analysis, tissue identification and/or typing, and a variety of forensic and diagnostic methods of the invention. Similarly, polypeptides identified from SEQ ID NO:Y may be used to generate antibodies which bind specifically to these polypeptides, or fragments thereof, and/or to the polypeptides encoded by the cDNA clones identified in, for example, Table 1A.

[0079] Nevertheless, DNA sequences generated by sequencing reactions can contain sequencing errors. The errors exist as misidentified nucleotides, or as insertions or deletions of nucleotides in the generated DNA sequence. The erroneously inserted or deleted nucleotides cause frame shifts in the reading frames of the predicted amino acid sequence. In these cases, the predicted amino acid sequence diverges from the actual amino acid sequence, even though the generated DNA sequence may be greater than 99.9% identical to the actual DNA sequence (for example, one base insertion or deletion in an open reading frame of over 1000 bases).

[0080] Accordingly, for those applications requiring precision in the nucleotide sequence or the amino acid sequence, the present invention provides not only the generated nucleotide sequence identified as SEQ ID NO:X, and a predicted translated amino acid sequence identified as SEQ ID NO:Y, but also a sample of plasmid DNA containing cDNA Clone ID NO:Z deposited with the ATCC (deposited with the ATCC on Oct. 5, 2000, and receiving ATCC designation numbers PTA 2574 and PTA 2575; deposited with the ATCC on Jan. 5, 2001, having the depositor reference numbers TS-1, TS-2, AC-1, and AC-2; and/or as set forth, for example, in Table 1A, 6 and 7). The nucleotide sequence of each deposited clone can readily be determined by sequencing the deposited clone in accordance with known methods. Further, techniques known in the art can be used to verify the nucleotide sequences of SEQ ID NO:X.

[0081] The predicted amino acid sequence can then be verified from such deposits. Moreover, the amino acid sequence of the protein encoded by a particular clone can also be directly determined by peptide sequencing or by expressing the protein in a suitable host cell containing the deposited human cDNA, collecting the protein, and determining its sequence.

[0082] RACE Protocol for Recovery of Full-length Genes

[0083] Partial cDNA clones can be made full-length by utilizing the rapid amplification of cDNA ends (RACE) procedure described in Frohman, M. A., et al., Proc. Nat'l. Acad. Sci. USA, 85:8998-9002 (1988). A cDNA clone missing either the 5′ or 3′ end can be reconstructed to include the absent base pairs extending to the translational start or stop codon, respectively. In some cases, cDNAs are missing the start codon of translation. The following briefly describes a modification of this original 5′ RACE procedure. Poly A+ or total RNA is reverse transcribed with Superscript II (Gibco/BRL) and an antisense or complementary primer specific to the cDNA sequence. The primer is removed from the reaction with a Microcon Concentrator (Amicon). The first-strand cDNA is then tailed with dATP and terminal deoxynucleotide transferase (Gibco/BRL). Thus, an anchor sequence is produced which is needed for PCR amplification. The second strand is synthesized from the dA-tail in PCR buffer, Taq DNA polymerase (Perkin-Elmer Cetus), an oligo-dT primer containing three adjacent restriction sites (XhoI, SalI and ClaI) at the 5′ end and a primer containing just these restriction sites. This double-stranded cDNA is PCR amplified for 40 cycles with the same primers as well as a nested cDNA-specific antisense primer. The PCR products are size-separated on an ethidium bromide-agarose gel and the region of gel containing cDNA products the predicted size of missing protein-coding DNA is removed. cDNA is purified from the agarose with the Magic PCR Prep kit (Promega), restriction digested with XhoI or SalI, and ligated to a plasmid such as pBluescript SKII (Stratagene) at XhoI and EcoRV sites. This DNA is transformed into bacteria and the plasmid clones sequenced to identify the correct protein-coding inserts. Correct 5′ ends are confirmed by comparing this sequence with the putatively identified homologue and overlap with the partial cDNA clone. Similar methods known in the art and/or commercial kits are used to amplify and recover 3′ ends.

[0084] Several quality-controlled kits are commercially available for purchase. Similar reagents and methods to those above are supplied in kit form from Gibco/BRL for both 5′ and 3′ RACE for recovery of full length genes. A second kit is available from Clontech which is a modification of a related technique, SLIC (single-stranded ligation to single-stranded cDNA), developed by Dumas et al., Nucleic Acids Res., 19:5227-32 (1991). The major differences in procedure are that the RNA is alkaline hydrolyzed after reverse transcription and RNA ligase is used to join a restriction site-containing anchor primer to the first-strand cDNA. This obviates the necessity for the dA-tailing reaction which results in a polyT stretch that is difficult to sequence past.

[0085] An alternative to generating 5′ or 3′ cDNA from RNA is to use cDNA library double-stranded DNA. An asymmetric PCR-amplified antisense cDNA strand is synthesized with an antisense cDNA-specific primer and a plasmid-anchored primer. These primers are removed and a symmetric PCR reaction is performed with a nested cDNA-specific antisense primer and the plasmid-anchored primer.

[0086] RNA Ligase Protocol for Generating the 5′ or 3′ End Sequences to Obtain Full Length Genes

[0087] Once a gene of interest is identified, several methods are available for the identification of the 5′ or 3′ portions of the gene which may not be present in the original cDNA plasmid. These methods include, but are not limited to, filter probing, clone enrichment using specific probes and protocols similar and identical to 5′ and 3′ RACE. While the full length gene may be present in the library and can be identified by probing, a useful method for generating the 5′ or 3′ end is to use the existing sequence information from the original cDNA to generate the missing information. A method similar to 5′ RACE is available for generating the missing 5′ end of a desired full-length gene. (This method was published by Fromont-Racine et al., Nucleic Acids Res., 21(7):1683-1684 (1993)). Briefly, a specific RNA oligonucleotide is ligated to the 5′ ends of a population of RNA presumably containing full-length gene RNA transcript. A primer set containing a primer specific to the ligated RNA oligonucleotide and a primer specific to a known sequence of the gene of interest, is used to PCR amplify the 5′ portion of the desired full length gene which may then be sequenced and used to generate the full length gene. This method starts with total RNA isolated from the desired source, poly A RNA may be used but is not a prerequisite for this procedure. The RNA preparation may then be treated with phosphatase if necessary to eliminate 5′ phosphate groups on degraded or damaged RNA, which may interfere with the later RNA ligase step. The phosphatase, if used, is then inactivated and the RNA is treated with tobacco acid pyrophosphatase in order to remove the cap structure present at the 5′ ends of messenger RNAs. This reaction leaves a 5′ phosphate group at the 5′ end of the cap cleaved RNA which can then be ligated to an RNA oligonucleotide using T4 RNA ligase. This modified RNA preparation can then be used as a template for first strand cDNA synthesis using a gene specific oligonucleotide. The first strand synthesis reaction can then be used as a template for PCR amplification of the desired 5′ end using a primer specific to the ligated RNA oligonucleotide and a primer specific to the known sequence of the musculoskeletal system antigen of interest. The resultant product is then sequenced and analyzed to confirm that the 5′ end sequence belongs to the relevant musculoskeletal system antigen.

[0088] The present invention also relates to vectors or plasmids, which include such DNA sequences, as well as the use of the DNA sequences. The material deposited with the ATCC (deposited with the ATCC on Oct. 5, 2000, and receiving ATCC designation numbers PTA 2574 and PTA 2575; deposited with the ATCC on Jan. 5, 2001, having the depositor reference numbers TS-1, TS-2, AC-1, and AC-2; and/or as set forth, for example, in Table 1A, 6 and 7) is a mixture of cDNA clones derived from a variety of human tissue and cloned in either a plasmid vector or a phage vector, as shown, for example, in Table 7. These deposits are referred to as “the deposits” herein. The tissues from which some of the clones were derived are listed in Table 7, and the vector in which the corresponding cDNA is contained is also indicated in Table 7. The deposited material includes cDNA clones corresponding to SEQ ID NO:X described, for example, in Table 1A (Clone ID NO:Z). A clone which is isolatable from the ATCC Deposits by use of a sequence listed as SEQ ID NO:X, may include the entire coding region of a human gene or in other cases such clone may include a substantial portion of the coding region of a human gene. Furthermore, although the sequence listing may in some instances list only a portion of the DNA sequence in a clone included in the ATCC Deposits, it is well within the ability of one skilled in the art to sequence the DNA included in a clone contained in the ATCC Deposits by use of a sequence (or portion thereof) described in, for example Tables 1A or 2 by procedures hereinafter further described, and others apparent to those skilled in the art.

[0089] Also provided in Table 7 is the name of the vector which contains the cDNA clone. Each vector is routinely used in the art. The following additional information is provided for convenience.

[0090] Vectors Lambda Zap (U.S. Pat. Nos. 5,128,256 and 5,286,636), Uni-Zap XR (U.S. Pat. Nos. 5,128,256 and 5,286,636), Zap Express (U.S. Pat. Nos. 5,128,256 and 5,286,636), pBluescript (pBS) (Short, J. M. et al., Nucleic Acids Res. 16:7583-7600 (1988); Alting-Mees, M. A. and Short, J. M., Nucleic Acids Res. 17:9494 (1989)) and pBK (Alting-Mees, M. A. et al., Strategies 5:58-61 (1992)) are commercially available from Stratagene Cloning Systems, Inc., 11011 N. Torrey Pines Road, La Jolla, Calif., 92037. pBS contains an ampicillin resistance gene and pBK contains a neomycin resistance gene. Phagemid pBS may be excised from the Lambda Zap and Uni-Zap XR vectors, and phagemid pBK may be excised from the Zap Express vector. Both phagemids may be transformed into E. coli strain XL-1 Blue, also available from Stratagene.

[0091] Vectors pSport1, pCMVSport 1.0, pCMVSport 2.0 and pCMVSport 3.0, were obtained from Life Technologies, Inc., P. O. Box 6009, Gaithersburg, Md. 20897. All Sport vectors contain an ampicillin resistance gene and may be transformed into E. coli strain DH10B, also available from Life Technologies. See, for instance, Gruber, C. E., et al., Focus 15:59- (1993). Vector lafmid BA (Bento Soares, Columbia University, New York, N.Y.) contains an ampicillin resistance gene and can be transformed into E. coli strain XL-1 Blue. Vector pCR®2.1, which is available from Invitrogen, 1600 Faraday Avenue, Carlsbad, Calif. 92008, contains an ampicillin resistance gene and may be transformed into E. coli strain DH10B, available from Life Technologies. See, for instance, Clark, J. M., Nuc. Acids Res. 16:9677-9686 (1988) and Mead, D. et al., Bio/Technology 9: (1991).

[0092] The present invention also relates to the genes corresponding to SEQ ID NO:X, SEQ ID NO:Y, and/or the deposited clone (Clone ID NO:Z). The corresponding gene can be isolated in accordance with known methods using the sequence information disclosed herein. Such methods include preparing probes or primers from the disclosed sequence and identifying or amplifying the corresponding gene from appropriate sources of genomic material.

[0093] Also provided in the present invention are allelic variants, orthologs, and/or species homologs. Procedures known in the art can be used to obtain full-length genes, allelic variants, splice variants, full-length coding portions, orthologs, and/or species homologs of musculoskeletal system associated genes corresponding to SEQ ID NO:X or the complement thereof, polypeptides encoded by SEQ ID NO:X or the complement thereof, and/or the cDNA contained in Clone ID NO:Z, using information from the sequences disclosed herein or the clones deposited with the ATCC. For example, allelic variants and/or species homologs may be isolated and identified by making suitable probes or primers from the sequences provided herein and screening a suitable nucleic acid source for allelic variants and/or the desired homologue.

[0094] The polypeptides of the invention can be prepared in any suitable manner. Such polypeptides include isolated naturally occurring polypeptides, recombinantly produced polypeptides, synthetically produced polypeptides, or polypeptides produced by a combination of these methods. Means for preparing such polypeptides are well understood in the art.

[0095] The polypeptides may be in the form of the secreted protein, including the mature form, or may be a part of a larger protein, such as a fusion protein (see below). It is often advantageous to include an additional amino acid sequence which contains secretory or leader sequences, pro-sequences, sequences which aid in purification, such as multiple histidine residues, or an additional sequence for stability during recombinant production.

[0096] The polypeptides of the present invention are preferably provided in an isolated form, and preferably are substantially purified. A recombinantly produced version of a polypeptide, including the secreted polypeptide, can be substantially purified using techniques described herein or otherwise known in the art, such as, for example, by the one-step method described in Smith and Johnson, Gene 67:31-40 (1988). Polypeptides of the invention also can be purified from natural, synthetic or recombinant sources using techniques described herein or otherwise known in the art, such as, for example, antibodies of the invention raised against the musculoskeletal system polypeptides of the present invention in methods which are well known in the art.

[0097] The present invention provides a polynucleotide comprising, or alternatively consisting of, the nucleic acid sequence of SEQ ID NO:X, and/or the cDNA sequence contained in Clone ID NO:Z. The present invention also provides a polypeptide comprising, or alternatively, consisting of, the polypeptide sequence of SEQ ID NO:Y, a polypeptide encoded by SEQ ID NO:X or a complement thereof, a polypeptide encoded by the cDNA contained in Clone ID NO:Z, and/or the polypeptide sequence encoded by a nucleotide sequence in SEQ ID NO:B as defined in column 6 of Table 1B. Polynucleotides encoding a polypeptide comprising, or alternatively consisting of the polypeptide sequence of SEQ ID NO:Y, a polypeptide encoded by SEQ ID NO:X, a polypeptide encoded by the cDNA contained in Clone ID NO:Z and/or a polypeptide sequence encoded by a nucleotide sequence in SEQ ID NO:B as defined in column 6 of Table 1B are also encompassed by the invention. The present invention further encompasses a polynucleotide comprising, or alternatively consisting of, the complement of the nucleic acid sequence of SEQ ID NO:X, a nucleic acid sequence encoding a polypeptide encoded by the complement of the nucleic acid sequence of SEQ ID NO:X, and/or the cDNA contained in Clone ID NO:Z.

[0098] Moreover, representative examples of polynucleotides of the invention comprise, or alternatively consist of, one, two, three, four, five, six, seven, eight, nine, ten, or more of the sequences delineated in Table 1B column 6, or any combination thereof. Additional, representative examples of polynucleotides of the invention comprise, or alternatively consist of, one, two, three, four, five, six, seven, eight, nine, ten, or more of the complementary strand(s) of the sequences delineated in Table 1B column 6, or any combination thereof. In further embodiments, the above-described polynucleotides of the invention comprise, or alternatively consist of, sequences delineated in Table 1B, column 6, and have a nucleic acid sequence which is different from that of the BAC fragment having the sequence disclosed in SEQ ID NO:B (see Table 1B, column 5). In additional embodiments, the above-described polynucleotides of the invention comprise, or alternatively consist of, sequences delineated in Table 1B, column 6, and have a nucleic acid sequence which is different from that published for the BAC clone identified as BAC ID NO:A (see Table 1B, column 4). In additional embodiments, the above-described polynucleotides of the invention comprise, or alternatively consist of, sequences delineated in Table 1B, column 6, and have a nucleic acid sequence which is different from that contained in the BAC clone identified as BAC ID NO:A (see Table 1B, column 4). Polypeptides encoded by these polynucleotides, other polynucleotides that encode these polypeptides, and antibodies that bind these polypeptides are also encompassed by the invention. Additionally, fragments and variants of the above-described polynucleotides and polypeptides are also encompassed by the invention.

[0099] Further, representative examples of polynucleotides of the invention comprise, or alternatively consist of, one, two, three, four, five, six, seven, eight, nine, ten, or more of the sequences delineated in column 6 of Table 1B which correspond to the same Clone ID NO:Z (see Table 1B, column 1), or any combination thereof. Additional, representative examples of polynucleotides of the invention comprise, or alternatively consist of, one, two, three, four, five, six, seven, eight, nine, ten, or more of the complementary strand(s) of the sequences delineated in column 6 of Table 1B which correspond to the same Clone ID NO:Z (see Table 1B, column 1), or any combination thereof. In further embodiments, the above-described polynucleotides of the invention comprise, or alternatively consist of, sequences delineated in column 6 of Table 1B which correspond to the same Clone ID NO:Z (see Table 1B, column 1) and have a nucleic acid sequence which is different from that of the BAC fragment having the sequence disclosed in SEQ ID NO:B (see Table 1B, column 5). In additional embodiments, the above-described polynucleotides of the invention comprise, or alternatively consist of, sequences delineated in column 6 of Table 1B which correspond to the same Clone ID NO:Z (see Table 1B, column 1) and have a nucleic acid sequence which is different from that published for the BAC clone identified as BAC ID NO:A (see Table 1B, column 4). In additional embodiments, the above-described polynucleotides of the invention comprise, or alternatively consist of, sequences delineated in column 6 of Table 1B which correspond to the same Clone ID NO:Z (see Table 1B, column 1) and have a nucleic acid sequence which is different from that contained in the BAC clone identified as BAC ID NO:A (see Table 1B, column 4). Polypeptides encoded by these polynucleotides, other polynucleotides that encode these polypeptides, and antibodies that bind these polypeptides are also encompassed by the invention. Additionally, fragments and variants of the above-described polynucleotides and polypeptides are also encompassed by the invention.

[0100] Further, representative examples of polynucleotides of the invention comprise, or alternatively consist of, one, two, three, four, five, six, seven, eight, nine, ten, or more of the sequences delineated in column 6 of Table 1B which correspond to the same contig sequence identifer SEQ ID NO:X (see Table 1B, column 2), or any combination thereof. Additional, representative examples of polynucleotides of the invention comprise, or alternatively consist of, one, two, three, four, five, six, seven, eight, nine, ten, or more of the complementary strand(s) of the sequences delineated in column 6 of Table 1B which correspond to the same contig sequence identifer SEQ ID NO:X (see Table 1B, column 2), or any combination thereof. In further embodiments, the above-described polynucleotides of the invention comprise, or alternatively consist of, sequences delineated in column 6 of Table 1 B which correspond to the same contig sequence identifer SEQ ID NO:X (see Table 1B, column 2) and have a nucleic acid sequence which is different from that of the BAC fragment having the sequence disclosed in SEQ ID NO:B (see Table 1B, column 5). In additional embodiments, the above-described polynucleotides of the invention comprise, or alternatively consist of, sequences delineated in column 6 of Table 1B which correspond to the same contig sequence identifer SEQ ID NO:X (see Table 1B, column 2) and have a nucleic acid sequence which is different from that published for the BAC clone identified as BAC ID NO:A (see Table 1B, column 4). In additional embodiments, the above-described polynucleotides of the invention comprise, or alternatively consist of, sequences delineated in column 6 of Table 1B which correspond to the same contig sequence identifer SEQ ID NO:X (see Table 1B, column 2) and have a nucleic acid sequence which is different from that contained in the BAC clone identified as BAC ID NO:A (See Table 1B, column 4). Polypeptides encoded by these polynucleotides, other polynucleotides that encode these polypeptides, and antibodies that bind these polypeptides are also encompassed by the invention. Additionally, fragments and variants of the above-described polynucleotides and polypeptides are also encompassed by the invention.

[0101] Moreover, representative examples of polynucleotides of the invention comprise, or alternatively consist of, one, two, three, four, five, six, seven, eight, nine, ten, or more of the sequences delineated in the same row of Table 1B column 6, or any combination thereof. Additional, representative examples of polynucleotides of the invention comprise, or alternatively consist of, one, two, three, four, five, six, seven, eight, nine, ten, or more of the complementary strand(s) of the sequences delineated in the same row of Table 1B column 6, or any combination thereof. In preferred embodiments, the polynucleotides of the invention comprise, or alternatively consist of, one, two, three, four, five, six, seven, eight, nine, ten, or more of the complementary strand(s) of the sequences delineated in the same row of Table 1B column 6, wherein sequentially delineated sequences in the table (i.e. corresponding to those exons located closest to each other) are directly contiguous in a 5′ to 3′ orientation. In further embodiments, above-described polynucleotides of the invention comprise, or alternatively consist of, sequences delineated in the same row of Table 1B, column 6, and have a nucleic acid sequence which is different from that of the BAC fragment having the sequence disclosed in SEQ ID NO:B (see Table 1B, column 5). In additional embodiments, the above-described polynucleotides of the invention comprise, or alternatively consist of, sequences delineated in the same row of Table 1 B, column 6, and have a nucleic acid sequence which is different from that published for the BAC clone identified as BAC ID NO:A (see Table 1B, column 4). In additional embodiments, the above-described polynucleotides of the invention comprise, or alternatively consist of, sequences delineated in the same row of Table 1B, column 6, and have a nucleic acid sequence which is different from that contained in the BAC clone identified as BAC ID NO:A (see Table 1B, column 4). Polypeptides encoded by these polynucleotides, other polynucleotides that encode these polypeptides, and antibodies that bind these polypeptides are also encompassed by the invention.

[0102] In additional specific embodiments, polynucleotides of the invention comprise, or alternatively consist of, one, two, three, four, five, six, seven, eight, nine, ten, or more of the sequences delineated in column 6 of Table 1B, and the polynucleotide sequence of SEQ ID NO:X (e.g., as defined in Table 1B, column 2) or fragments or variants thereof. Polypeptides encoded by these polynucleotides, other polynucleotides that encode these polypeptides, and antibodies that bind these polypeptides are also encompassed by the invention.

[0103] In additional specific embodiments, polynucleotides of the invention comprise, or alternatively consist of, one, two, three, four, five, six, seven, eight, nine, ten, or more of the sequences delineated in column 6 of Table 1B which correspond to the same Clone ID NO:Z (see Table 1B, column 1), and the polynucleotide sequence of SEQ ID NO:X (e.g., as defined in Table 1A or 1B) or fragments or variants thereof. In preferred embodiments, the delineated sequence(s) and polynucleotide sequence of SEQ ID NO:X correspond to the same Clone ID NO:Z. Polypeptides encoded by these polynucleotides, other polynucleotides that encode these polypeptides, and antibodies that bind these polypeptides are also encompassed by the invention.

[0104] In further specific embodiments, polynucleotides of the invention comprise, or alternatively consist of, one, two, three, four, five, six, seven, eight, nine, ten, or more of the sequences delineated in the same row of column 6 of Table 1B, and the polynucleotide sequence of SEQ ID NO:X (e.g., as defined in Table 1A or 1B) or fragments or variants thereof. In preferred embodiments, the delineated sequence(s) and polynucleotide sequence of SEQ ID NO:X correspond to the same row of column 6 of Table 1B. Polypeptides encoded by these polynucleotides, other polynucleotides that encode these polypeptides, and antibodies that bind these polypeptides are also encompassed by the invention.

[0105] In additional specific embodiments, polynucleotides of the invention comprise, or alternatively consist of a polynucleotide sequence in which the 3′ 10 polynucleotides of one of the sequences delineated in column 6 of Table 1B and the 5′ 10 polynucleotides of the sequence of SEQ ID NO:X are directly contiguous. Nucleic acids which hybridize to the complement of these 20 contiguous polynucleotides under stringent hybridization conditions or alternatively, under lower stringency conditions, are also encompassed by the invention. Polypeptides encoded by these polynucleotides and/or nucleic acids, other polynucleotides and/or nucleic acids that encode these polypeptides, and antibodies that bind these polypeptides are also encompassed by the invention. Additionally, fragments and variants of the above-described polynucleotides, nucleic acids, and polypeptides are also encompassed by the invention.

[0106] In additional specific embodiments, polynucleotides of the invention comprise, or alternatively consist of, a polynucleotide sequence in which the 3′ 10 polynucleotides of one of the sequences delineated in column 6 of Table 1 B and the 5′ 10 polynucleotides of a fragment or variant of the sequence of SEQ ID NO:X are directly contiguous Nucleic acids which hybridize to the complement of these 20 contiguous polynucleotides under stringent hybridization conditions or alternatively, under lower stringency conditions, are also encompassed by the invention. Polypeptides encoded by these polynucleotides and/or nucleic acids, other polynucleotides and/or nucleic acids encoding these polypeptides, and antibodies that bind these polypeptides are also encompassed by the invention. Additionally, fragments and variants of the above-described polynucleotides, nucleic acids, and polypeptides are also encompassed by the invention.

[0107] In specific embodiments, polynucleotides of the invention comprise, or alternatively consist of, a polynucleotide sequence in which the 3′ 10 polynucleotides of the sequence of SEQ ID NO:X and the 5′ 10 polynucleotides of the sequence of one of the sequences delineated in column 6 of Table 1B are directly contiguous. Nucleic acids which hybridize to the complement of these 20 contiguous polynucleotides under stringent hybridization conditions or alternatively, under lower stringency conditions, are also encompassed by the invention. Polypeptides encoded by these polynucleotides and/or nucleic acids, other polynucleotides and/or nucleic acids encoding these polypeptides, and antibodies that bind these polypeptides are also encompassed by the invention. Additionally, fragments and variants of the above-described polynucleotides, nucleic acids, and polypeptides are also encompassed by the invention.

[0108] In specific embodiments, polynucleotides of the invention comprise, or alternatively consist of, a polynucleotide sequence in which the 3′ 10 polynucleotides of a fragment or variant of the sequence of SEQ ID NO:X and the 5′ 10 polynucleotides of the sequence of one of the sequences delineated in column 6 of Table 1B are directly contiguous. Nucleic acids which hybridize to the complement of these 20 contiguous polynucleotides under stringent hybridization conditions or alternatively, under lower stringency conditions, are also encompassed by the invention. Polypeptides encoded by these polynucleotides and/or nucleic acids, other polynucleotides and/or nucleic acids encoding these polypeptides, and antibodies that bind these polypeptides are also encompassed by the invention. Additionally, fragments and variants of the above-described polynucleotides, nucleic acids, and polypeptides, are also encompassed by the invention.

[0109] In further specific embodiments, polynucleotides of the invention comprise, or alternatively consist of, a polynucleotide sequence in which the 3′ 10 polynucleotides of one of the sequences delineated in column 6 of Table 1B and the 5′ 10 polynucleotides of another sequence in column 6 are directly contiguous. Nucleic acids which hybridize to the complement of these 20 contiguous polynucleotides under stringent hybridization conditions or alternatively, under lower stringency conditions, are also encompassed by the invention. Polypeptides encoded by these polynucleotides and/or nucleic acids, other polynucleotides and/or nucleic acids encoding these polypeptides, and antibodies that bind these polypeptides are also encompassed by the invention. Additionally, fragments and variants of the abovedescribed polynucleotides, nucleic acids, and polypeptides are also encompassed by the invention.

[0110] In specific embodiments, polynucleotides of the invention comprise, or alternatively consist of, a polynucleotide sequence in which the 3′ 10 polynucleotides of one of the sequences delineated in column 6 of Table 1B and the 5′ 10 polynucleotides of another sequence in column 6 corresponding to the same Clone ID NO:Z (see Table 1B, column 1) are directly contiguous. Nucleic acids which hybridize to the complement of these 20 lower stringency conditions, are also encompassed by the invention. Polypeptides encoded by these polynucleotides and/or nucleic acids, other polynucleotides and/or nucleic acids encoding these polypeptides, and antibodies that bind these polypeptides are also encompassed by the invention. Additionally, fragments and variants of the above-described polynucleotides, nucleic acids, and polypeptides are also encompassed by the invention.

[0111] In specific embodiments, polynucleotides of the invention comprise, or alternatively consist of, a polynucleotide sequence in which the 3′ 10 polynucleotides of one sequence in column 6 corresponding to the same contig sequence identifer SEQ ID NO:X (see Table 1B, column 2) are directly contiguous. Nucleic acids which hybridize to the complement of these 20 contiguous polynucleotides under stringent hybridization conditions or alternatively, under lower stringency conditions, are also encompassed by the invention. Polypeptides encoded by these polynucleotides and/or nucleic acids, other polynucleotides and/or nucleic acids encoding these polypeptides, and antibodies that bind these polypeptides are also encompassed by the invention. Additionally, fragments and variants of the above-described polynucleotides, nucleic acids, and polypeptides are also encompassed by the invention.

[0112] In specific embodiments, polynucleotides of the invention comprise, or alternatively consist of a polynucleotide sequence in which the 3′ 10 polynucleotides of one of the sequences delineated in column 6 of Table 1B and the 5′ 10 polynucleotides of another sequence in column 6 corresponding to the same row are directly contiguous. In preferred embodiments, the 3′ 10 polynucleotides of one of the sequences delineated in column 6 of Table 1B is directly contiguous with the 5′ 10 polynucleotides of the next sequential exon delineated in Table 1B, column 6. Nucleic acids which hybridize to the complement of these 20 contiguous polynucleotides under stringent hybridization conditions or alternatively, under lower stringency conditions, are also encompassed by the invention. Polypeptides encoded by these polynucleotides and/or nucleic acids, other polynucleotides and/or nucleic acids encoding these polypeptides, and antibodies that bind these polypeptides are also encompassed by the invention. Additionally, fragments and variants of the above-described polynucleotides, nucleic acids, and polypeptides are also encompassed by the invention.

[0113] Many polynucleotide sequences, such as EST sequences, are publicly available and accessible through sequence databases and may have been publicly available prior to conception of the present invention. Preferably, such related polynucleotides are specifically excluded from the scope of the present invention. Accordingly, for each contig sequence (SEQ ID NO:X) listed in the third column of Table 1A, preferably excluded are one or more polynucleotides comprising a nucleotide sequence described by the general formula of a-b, where a is any integer between 1 and the final nucleotide minus 15 of SEQ ID NO:X, b is an integer of 15 to the final nucleotide of SEQ ID NO:X, where both a and b correspond to the positions of nucleotide residues shown in SEQ ID NO:X, and where b is greater than or equal to a +14. More specifically, preferably excluded are one or more polynucleotides comprising a nucleotide sequence described by the general formula of a-b, where a and b are integers as defined in columns 4 and 5, respectively, of Table 3. In specific embodiments, the polynucleotides of the invention do not consist of at least one, two, three, four, five, ten, or more of the specific polynucleotide sequences referenced by the Genbank Accession No. as disclosed in column 6 of Table 3 (including for example, published sequence in connection with a particular BAC clone). In further embodiments, preferably excluded from the invention are the specific polynucleotide sequence(s) contained in the clones corresponding to at least one, two, three, four, five, ten, or more of the available material having the accession numbers identified in the sixth column of this Table (including for example, the actual sequence contained in an identified BAC clone). In no way is this listing meant to encompass all of the sequences which may be excluded by the general formula, it is just a representative example. All references available through these accessions are hereby incorporated by reference in their entirety.

TABLE 3

| | SEQ | | | | |
|---|---|---|---|---|---|
| Clone ID | ID | | EST Disclaimer | | |
| NO: Z | NO: X | Contig ID: | Range of a | Range of b | Accession #'s |
| HANGA63 | 11 | 927404 | 1-248 | 15-262 | AL133312. |
| HANGA69 | 12 | 718174 | 1-431 | 15-445 | |
| HANGA85 | 13 | 746265 | 1-305 | 15-319 | |
| HANGA92 | 14 | 791182 | 1-134 | 15-148 | |
| HANGC05 | 15 | 674059 | 1-144 | 15-158 | |
| HANGC07 | 16 | 952586 | 1-212 | 15-226 | |
| HANGC14 | 17 | 952581 | 1-246 | 15-260 | |
| HANGC30 | 18 | 966430 | 1-324 | 15-338 | |
| HANGC33 | 19 | 702072 | 1-237 | 15-251 | |
| HANGC59 | 20 | 653577 | 1-167 | 15-181 | AI128945, AA181985, AI051473, AI811806, AI742394, AI796471, AA047524, |
| | | | | | AW168284, AA644217, AA461312, AA223990, AI702471, AA449477, AI344611, |
| | | | | | AI084340, AA047404, AI982714, AI655453, AI609227, AI953345, AI918075, |
| | | | | | AI074844, AI948767, AI823646, AI125444, Z40657, AI942374, AA773940, |
| | | | | | AW303808, AA996094, AW235687, AI718217, AW081809, AW339488, R97621, |
| | | | | | AA678046, AA569360, AI581387, AI245396, T80973, AL121270, AI671642, |
| | | | | | AI499483, AL045163, AA809974, AW020592, AL039276, AA715307, AI863629, |
| | | | | | AI624543, AW189802, AA425228, AA975588, AL045620, AW084056, AI923509, |
| | | | | | AA748353, AI064830, AL121328, AA525540, AA768725, AI890507, AA761557, |
| | | | | | N72726, AI343091, AI364788, AW117882, AL119748, AI805774, F37323, |
| | | | | | AI289791, AL043152, AL045500, AI557808, AI432644, AI702065, AI273179, |
| | | | | | AW087445, AI494201, AA641818, AI624279, AI927233, AI312325, AL110402, |
| | | | | | AI269862, AW161202, AI307604, AW019988, AW020419, AI433157, AI648567, |
| | | | | | AI690946, AI554821, AW151136, N99180, AW081349, AA848069, AI539771, |
| | | | | | AI537677, AI636581, AW410430, AI500659, AI866465, AI815232, AI801325, |
| | | | | | AW082113, AL045413, AI500523, AI538850, AI431307, AI887775, AI582932, |
| | | | | | AI590043, AI872423, AI284517, AI923989, AI866786, AI500706, AI445237, |
| | | | | | AI491776, AW151138, AI521560, AI889189, AI500662, AW172723, AI582912, |
| | | | | | AI539800, AI284509, AI889168, AI440263, AI538885, AI866573, AI633493, |
| | | | | | AI434256, AI866469, AI805769, AI434242, AI888661, AW196105, AI500714, |
| | | | | | AI284513, AI888118, AI285439, AI859991, AI436429, AI355779, AI889147, |
| | | | | | AI623736, AI371228, AI581033, AI491710, AI440252, AI860003, AI610557, |
| | | | | | AW162194, AI242736, AW075382, AI828574, AI887499, AW151979, AI539781, |
| | | | | | AI539707, AW071377, AI866820, AI885949, AI285419, AW089557, AI559957, |
| | | | | | AI521571, AI469775, AI866581, AL048644, AI567953, AI815150, AI446495, |
| | | | | | AL042595, AL042745, AW023351, AA743430, AW162189, AL047422, H41759, |
| | | | | | AI348897, AI433037, AI633125, AL041150, AI475817, AI612750, AL037582, |
| | | | | | AL037602, AL043981, AI909696, AI345688, AA460184, R75918, AI867068, |
| | | | | | AL043168, AW197139, AI525669, AI431316, AI275175, AI890907, AA857847, |
| | | | | | AI307494, AW022494, AW269097, AW265004, AI499890, AL040243, AW268072, |
| | | | | | AW268261, AI345608, AI636372, AI620284, AA575874, AI567582, AW020288, |
| | | | | | AI879064, AI309443, AL038564, AI565172, AL039783, AW083804, AI345471, |
| | | | | | AW022299, AL042628, AI561170, AW191003, AI702527, AW020425, AL079799, |
| | | | | | N27632, AI336585, AW020710, AI921057, AI623941, AI309401, AL120254, |
| | | | | | AI923046, AL048375, F36003, AL042627, AI866510, AI557238, AI446373, |
| | | | | | AL039390, AL042365, AL038605, AW238730, AI866461, AF081195, AL117440, |
| | | | | | Z99297, AL122049, AF081197, AC004805, AP000030, E06743, AL137665, E01314, |
| | | | | | AL137574, AL117457, AF141289, AL117435, S68736, I48978, AF113019, S63521, |
| | | | | | S77771, AF111851, A03736, M92439, AC006203, AL133072, I89947, AC004213, |
| | | | | | AR038854, AF162270, Y10080, I46765, Z49258, U77594, A08913, AI8777, Z72491, |
| | | | | | AL122106, AC005874, AF134471, A08912, A08910, A08909, I89931, L30117, |
| | | | | | AL034376, AF026124, AF036268, AF158248, I49625, AL122110, AF113690, |
| | | | | | A08908, AL133080, AL133081, S76508, AL133077, AL133049, AR011880, |
| | | | | | AF110520, AF067728, AF058921, AL137558, I89934, I00734, Y10655, D83989, |
| | | | | | AR020905, AF100931, L19437, AL137478, AL137271, AF153205, AF094480, |
| | | | | | AL117649, A91160, E00617, E00717, E00778, AL050092, AL137548, X96540, |
| | | | | | X72889, AF113013, A08916, A65340, AL049314, AF125948, AF022813, |
| | | | | | AR053103, AL031732, AC004544, AF113689, Y10823, S36676, AL080110, |
| | | | | | AF111849, AF090886, AL122121, AC004686, AL033521, AF078844, Z13966, |
| | | | | | AF114818, AC008067, AL110221, M27260, AC005048, AJ010277, AL133568, |
| | | | | | U80742, I03321, AC004383, E07361, D55641, Y11587, AL050277, E02349, Y14314, |
| | | | | | A08907, X67813, U42766, AF061943, AL031274, Z82206, AC004594, AB007812, |
| | | | | | AF061795, AF151685, E06788, E06790, E06789, AJ012755, AL050310, AF169154, |
| | | | | | AF002985, Z98036, AC004989, S75997, AF003737, I89944, A07588, A65341, |
| | | | | | U67958, AL049382, AL133640, AL050172, Z82022, AF183393, AL137554, |
| | | | | | AF106697, J05032, AF113676, X06146, AF151109, AL137488, X93495, AL133565, |
| | | | | | AF061573, AL049452, AL110280, A58524, AL133665, A58523, AF095901, S78214, |
| | | | | | AC005488, AF113691, AL049347, AF026816, X63410, AJ001838, AL133067, |
| | | | | | E03348, AF090934, AF017437, AF113677, A86558, A08911, AF215669, E02253, |
| | | | | | E03349, AF118090, AL080154, U53505, AF079763, AF120268, AR059958, E15324, |
| | | | | | AL117460, AL050108, AF039138, AF039137, and S79832. |
| HANGC84 | 21 | 715991 | 1-440 | 15-454 | |
| HANGF36 | 22 | 952583 | 1-263 | 15-277 | |
| HANGF49 | 23 | 722635 | 1-112 | 15-126 | AC007320. |
| HANGG22 | 24 | 848727 | 1-347 | 15-361 | |
| HANGH48 | 25 | 718759 | 1-410 | 15-424 | |
| HANGH53 | 26 | 727914 | 1-460 | 15-474 | |
| HANGH58 | 27 | 811987 | 1-393 | 15-407 | |
| HANGH66 | 28 | 661513 | 1-442 | 15-456 | |
| HANKD09 | 29 | 625167 | 1-334 | 15-348 | |
| HANKD47 | 30 | 719963 | 1-425 | 15-439 | |
| HANKD83 | 31 | 963964 | 1-300 | 15-314 | |
| HANKG78 | 32 | 710760 | 1-180 | 15-194 | |
| HANKG90 | 33 | 746282 | 1-410 | 15-424 | |
| HANKH48 | 34 | 721340 | 1-343 | 15-357 | |
| HANKH56 | 35 | 733063 | 1-360 | 15-374 | |
| HAOAA57 | 36 | 955693 | 1-228 | 15-242 | AW138563, W39428, AA441848, AI928563, AW138262, AI825038, AA985573, |
| | | | | | AW162121, AA063432, AA583586, AW341116, AA372242, N26196, H50245, |
| | | | | | AI565281, AA861973, AA338299, T85197, C00398, AI810565, and AF187318. |
| HAOAA78 | 37 | 756979 | 1-544 | 15-558 | |
| HAOAA90 | 38 | 919249 | 1-321 | 15-335 | |
| HAOAC05 | 39 | 932017 | 1-502 | 15-516 | |
| HAOAD47 | 40 | 864899 | 1-473 | 15-487 | AC005495. |
| HAOAE53 | 41 | 964029 | 1-368 | 15-382 | |
| HAOAE56 | 42 | 767915 | 1-323 | 15-337 | AI927761, AW378374, AI932972, AI690765, T58205, AF098066, and Z84488. |
| HAOAE60 | 43 | 657909 | 1-226 | 15-240 | AA348977. |
| HAOAF68 | 44 | 752788 | 1-951 | 15-965 | AA031836, AA031837, AA909082, and AL134312. |
| HAOAH38 | 45 | 705946 | 1-325 | 15-339 | AC005036. |
| HAOMA13 | 46 | 915881 | 1-414 | 15-428 | |
| HAOMB64 | 47 | 960293 | 1-599 | 15-613 | |
| HAOMC21 | 48 | 670518 | 1-542 | 15-556 | |
| HAOMD90 | 49 | 788658 | 1-395 | 15-409 | AL050343. |
| HAOME45 | 50 | 705947 | 1-506 | 15-520 | |
| HBCGA72 | 51 | 756953 | 1-137 | 15-151 | AI126076, AI539265, AI458605, AW379387, and AW368357. |
| HBCKB24 | 52 | 676825 | 1-482 | 15-496 | |
| HBCKB82 | 53 | 779562 | 1-522 | 15-536 | AA961486. |
| HBCKE22 | 54 | 674041 | 1-147 | 15-161 | AI954693, AI656728, AI281560, and AA491824. |
| HBCKE78 | 55 | 746109 | 1-647 | 15-661 | AA204666, AA171635, AA632321, AA814237, AA631958, AW389228, AI167680, |
| | | | | | AI274831, AW023312, AA860756, AA631959, AW450236, T49450, AI168544, |
| | | | | | AI332870, AB014543, AC004494, and AC004224. |
| HBFMC73 | 56 | 764150 | 1-385 | 15-399 | AL135357, AW196064, AI002744, AA536040, AA515905, AA502860, AA493708, |
| | | | | | AI524360, AI252274, AI591375, AW274349, AA527602, AI053911, AI872020, |
| | | | | | AA658362, AA595499, AW020992, AA580808, AA630672, F17555, AA847499, |
| | | | | | AW237875, AI249880, AL046409, AA531079, AW302711, AA715814, AW270784, |
| | | | | | AI267269, AA613232, AI791913, AA527727, AI674873, AI792133, AI053560, |
| | | | | | AI821714, AI564185, AA574442, AI476049, AA664909, AA493845, AI687343, |
| | | | | | AA642060, AA297666, AA521323, AW339622, AW303196, AI144081, AA362698, |
| | | | | | AL037771, AA521399, AA621381, AA679532, AA749235, AI499938, AA652677, |
| | | | | | AA806796, AI744306, AI682665, AI821785, AW378968, AC007540, AP000495, |
| | | | | | AC004686, AC006151, AC005324, AC002352, AC005183, AC005859, AC004150, |
| | | | | | AL031311, AL117693, AF129756, AC004815, AC003982, AF196779, AC004019, |
| | | | | | Z97053, AC004383, AC004895, AL109829, AC005736, AL096867, AC006130, |
| | | | | | AC004144, AP000696, AL132796, AP000504, AC002115, AL021940, AC004263, |
| | | | | | Z68321, AC007617, AC004912, AC002395, D83989, AC007919, AC003006, |
| | | | | | U85195, AL021397, AC005799, AC002091, AE000658, AP000356, AC005327, |
| | | | | | AC005911, AC000052, AC007073, AL031597, Z93241, AL021155, AL022302, |
| | | | | | AC005863, AL031255, AC003109, AC004253, AP000044, AP000112, AC005668, |
| | | | | | AC002563, AC003689, AP000088, AP000365, AL110502, AC007649, AL080285, |
| | | | | | AL023575, AC004167, X75335, AL080114, Z99756, AC006985, AC006449, |
| | | | | | AC004821, AP000548, AC007114, AC004008, AL109628, AP000359, AC000353, |
| | | | | | AL008730, AL031003, AC006511, AC005822, AL030997, AP000117, AL034451, |
| | | | | | U89337, AC001231, AL035072, AC006251, AC002350, Z82976, AL035405, |
| | | | | | AC004655, AP000354, AL009177, AP000143, AC007371, AC006057, AC005261, |
| | | | | | AF111169, AC006539, AC005081, AF227510, U07563, AC005533, AL049636, |
| | | | | | AF006501, AC005058, AL034554, AC005209, AC006211, AC011311, AC007285, |
| | | | | | AL009179, AL022165, AC006241, AC006035, Z83844, AL020995, AL078583, |
| | | | | | AC007917, AL109847, AC008498, AL049775, AC007160, AL021391, AC006487, |
| | | | | | AC005901, AC006037, AC007656, D88268, AB023051, AL121603, AC005399, |
| | | | | | AC005409, AC004890, AP000959, AL133355, AC005377, AC005484, AL022323, |
| | | | | | AC005730, AL034395, AL031767, AC007435, AL021154, AC008040, AC007384, |
| | | | | | U66061, AL024509, AC004472, AC004885, AC006953, AL121658, AC003101, |
| | | | | | AC010205, AL096701, L29074, AC004913, AF130343, AC005019, AC005184, |
| | | | | | AL031276, AL022476, AC002316, AL050341, AC007676, AC007126, Z93930, |
| | | | | | AC005530, AC003664, AL022163, AC004531, AL109798, Z99716, AC006044, |
| | | | | | AL135744, AC004033, AL031668, AL031591, AC006076, AC009516, AB023048, |
| | | | | | AC005255, AL049760, AC006578, M26434, AC005412, AC009028, Z85987, |
| | | | | | AC000114, AC008115, AL049872, AC005015, AC010206, AC005520, AC005695, |
| | | | | | AC007686, AL021878, AP000512, AC004099, AL034420, and AP000501. |
| HBSAK76 | 57 | 506666 | 1-265 | 15-279 | |
| HBSAL69 | 58 | 573004 | 1-419 | 15-433 | |
| HBSAL80 | 59 | 506580 | 1-366 | 15-380 | |
| HBSAM46 | 60 | 526732 | 1-331 | 15-345 | |
| HBSAM48 | 61 | 727635 | 1-393 | 15-407 | |
| HBSAP02 | 62 | 920648 | 1-325 | 15-339 | |
| HBSAP73 | 63 | 764589 | 1-454 | 15-468 | |
| HBSAQ64 | 64 | 530344 | 1-296 | 15-310 | |
| HBSDB50 | 65 | 571365 | 1-353 | 15-367 | |
| HBSDB63 | 66 | 745211 | 1-331 | 15-345 | AP000689, AC006344, and AL096701. |
| HBSDD91 | 67 | 775313 | 1-136 | 15-150 | AA069743, and AA069767. |
| HCDAA94 | 68 | 661278 | 1-265 | 15-279 | AL020995. |
| HCDAB17 | 69 | 530726 | 1-327 | 15-341 | AA679229. |
| HCDAE77 | 70 | 533925 | 1-344 | 15-358 | AI908895, and AB027251. |
| HCDAF27 | 71 | 592244 | 1-488 | 15-502 | |
| HCDAF29 | 72 | 533812 | 1-265 | 15-279 | |
| HCDAF54 | 73 | 530529 | 1-421 | 15-435 | |
| HCDAG92 | 74 | 724693 | 1-363 | 15-377 | |
| HCDAG95 | 75 | 533871 | 1-412 | 15-426 | |
| HCDAH34 | 76 | 533870 | 1-390 | 15-404 | |
| HCDAJ67 | 77 | 925362 | 1-305 | 15-319 | AL049875. |
| HCDAK93 | 78 | 523648 | 1-186 | 15-200 | T05398, and AC003029. |
| HCDAK96 | 79 | 960047 | 1-360 | 15-374 | |
| HCDAM34 | 80 | 523607 | 1-265 | 15-279 | AC005969. |
| HCDAO32 | 81 | 530006 | 1-316 | 15-330 | |
| HGDAT56 | 82 | 533881 | 1-651 | 15-665 | AA252681, N51549, AI026801, AI202595, AI000893, AW450220, W44769, |
| | | | | | AA923523, AI346827, AW090676, AI640582, AI659843, F22685, AI092608, |
| | | | | | AW102828, AA075433, AI350733, AA789132, N32022, N98535, N69933, and |
| | | | | | AL109657. |
| HCDBO13 | 83 | 709590 | 1-242 | 15-256 | |
| HCDBR37 | 84 | 968501 | 1-329 | 15-343 | AB011101, and AF106069. |
| HCDBR39 | 85 | 921893 | 1-347 | 15-361 | |
| HCDBU77 | 86 | 661272 | 1-185 | 15-199 | |
| HCDBW51 | 87 | 556469 | 1-281 | 15-295 | |
| HCDBW61 | 88 | 960044 | 1-203 | 15-217 | N51115. |
| HCDBX78 | 89 | 847580 | 1-243 | 15-257 | Y18642. |
| HCDCB84 | 90 | 670159 | 1-248 | 15-262 | AI244405, AW072090, AA565081, AI253256, H64704, AW026742, AA243715, |
| | | | | | AW025779, AA455006, AA455005, AW117348, AI767598, AI206307, N46194, |
| | | | | | AA644147, AI420462, AL035634, AF076957, AF121859, and AF131214. |
| HCDCE48 | 91 | 529893 | 1-334 | 15-348 | |
| HCDCE62 | 92 | 523582 | 1-226 | 15-240 | AL031177. |
| HCDCF11 | 93 | 967768 | 1-243 | 15-257 | AA844561, AA975423, AW173039, AI400317, AA937116, AI863192, AC006942, |
| | | | | | AC005758, and AL022170. |
| HGDCKO7 | 94 | 865908 | 1-149 | 15-163 | H89524. |
| HCDCK91 | 95 | 592465 | 1-255 | 15-269 | AI268324. |
| HCDCR26 | 96 | 960048 | 1-307 | 15-321 | AP000087, and AP000226. |
| HCDCX68 | 97 | 529778 | 1-103 | 15-117 | AC003692. |
| HCDCY13 | 98 | 921702 | 1-60 | 15-74 | |
| HCDDB52 | 99 | 847581 | 1-332 | 15-346 | AA535216, AA586656, AA565319, AI251584, AI431434, AW192065, AA654781, |
| | | | | | AI537458, AI537538, AA303040, F13749, AI884383, F23258, AI355986, R33941, |
| | | | | | AI682665, AA484208, AI708005, AA603530, AA338289, AA639946, AA608751, |
| | | | | | AI280771, AW079664, AA487690, AA659608, AW068316, AI814739, AI475954, |
| | | | | | AW162288, AA845209, AC005015, AC006487, AC002126, AC005071, AC005048, |
| | | | | | AL121653, AP000350, AL034351, AL049780, AC002470, AL049539, AF135025, |
| | | | | | AC008273, AC005740, AC007114, AC004967, AC007051, AC006120, AC004814, |
| | | | | | AC004216, AC006530, AL035683, AC005682, AC008498, AI003147, AL022316, |
| | | | | | AL031659, AC002511, AC006597, AC005231, AL035684, AC003684, AC002375, |
| | | | | | AC006211, U95742, AC007308, Z83822, AC005324, AF111167, AL096701, |
| | | | | | AC005011, Z97630, AC005229, AC005952, AC004815, AC002310, AP000088, |
| | | | | | AL133245, AL034420, AL080317, AC002544, AC005399, Z84466, AC003682, |
| | | | | | AL050341, AL109627, AC006064, AL021368, U89335, AC004125, AC005264, |
| | | | | | AF195658, AC004685, AC004492, AF001549, Z83846, AC005214, AC005081, |
| | | | | | AC005007, AC005261, Z98051, AC005940, AC007676, AC005880, AL049692, |
| | | | | | Z82206, AC007055, AC004796, AF064861, AL021937, AL049794, AC002991, |
| | | | | | AF196972, AL035405, AC004966, AC005378, AC004894, AL109952, Z98200, |
| | | | | | AC007227, AL109865, AC002394, AL133246, U78027, AL049832, AC007151, |
| | | | | | AC002996, AC002112, AC005746, AC005387, AL049591, AC005527, AL034548, |
| | | | | | U85195, AL121769, AC004832, AC006001, AP000692, U47924, AF053356, |
| | | | | | AC007371, AP000354, AL031281, AC007421, AC002483, AL034451, AL078581, |
| | | | | | AC005919, AC002477, AC006071, AC007263, AC004552, AF001552, AC004890, |
| | | | | | AB023049, AL024498, AL109847, AC007283, Z81364, AL035422, AC002350, |
| | | | | | AE000658, AC004897, AC004999, AC004025, AC005839, AC005535, AC005089, |
| | | | | | AC004491, AC006312, AL049829, AC006441, AP000462, AF038458, AC005179, |
| | | | | | AC002045, AC006011, AC005215, AL034379, AB026898, AL031427, AC006277, |
| | | | | | AC009396, AC007981, AC005562, AC005234, AC000025, AC007129, AL008718, |
| | | | | | AC007637, AL132712, AC003962, AC005529, AP000512, AC002546, AP000300, |
| | | | | | AC004382, AL080243, AP000031, Z84480, Z83840, AC016025, AC004934, |
| | | | | | AC006014, AB017654, AC002456, AL049833, AF024533, AC004837, AL110502, |
| | | | | | AC005821, Z82176, AC005067, AB023048, AC005730, AL035400, AJ246003, |
| | | | | | AL031984, AF165926, AC009516, AL035587, AF196969, AC005722, U91323, |
| | | | | | AC007225, Z99716, AC006544, AL031286, AC008372, and U80017. |
| HCDDB62 | 100 | 529890 | 1-240 | 15-254 | |
| HCDDI61 | 101 | 529937 | 1-103 | 15-117 | AI248455, and AC005876. |
| HCDDU07 | 102 | 954177 | 1-200 | 15-214 | AC005498. |
| HCDDV90 | 103 | 847575 | 1-241 | 15-255 | |
| HCDDY57 | 104 | 556465 | 1-349 | 15-363 | |
| HCDDZ09 | 105 | 523605 | 1-396 | 15-410 | Z83820, AL022574, AP000261, AP000035, AP000100, and Z69722. |
| HCDDZ44 | 106 | 863388 | 1-484 | 15-498 | |
| HCDEB49 | 107 | 847572 | 1-238 | 15-252 | |
| HCDEB78 | 108 | 921710 | 1-125 | 15-139 | |
| HCDEG67 | 109 | 531239 | 1-454 | 15-468 | |
| HCDEG95 | 110 | 533879 | 1-467 | 15-481 | |
| HCDER16 | 111 | 667338 | 1-310 | 15-324 | AC008064. |
| HCDER29 | 112 | 523506 | 1-198 | 15-212 | |
| HCDET89 | 113 | 524045 | 1-341 | 15-355 | |
| HFIAB89 | 114 | 848927 | 1-57 | 15-71 | |
| HFIAB93 | 115 | 713799 | 1-592 | 15-606 | AW299250, AW438583, AI261419, AI271941, AA688176, W19548, AI867634, |
| | | | | | N62642, AI718356, T59367, and AC005179. |
| HFIAE82 | 116 | 779898 | 1-437 | 15-451 | |
| HFIAH10 | 117 | 964652 | 1-222 | 15-236 | |
| HFIAI07 | 118 | 952884 | 1-528 | 15-542 | H75698, and AC005722. |
| HFIAP31 | 119 | 697775 | 1-340 | 15-354 | AI394725, T49120, AC004916, AP001052, and AP001051. |
| HFIAP89 | 120 | 587844 | 1-335 | 15-349 | |
| HFIAP91 | 121 | 925831 | 1-603 | 15-617 | AI754091, AI991838, AW005052, AW054864, AA603953, AA604330, AI147846, |
| | | | | | AI570396, AI497756, AI421847, AA877182, AI494281, N35004, AA775287, |
| | | | | | W46449, AA581458, AI086636, AI148897, AI278835, AA057575, AW168484, |
| | | | | | AW272886, R61553, AW196844, AI888235, AI679184, AW192289, H99897, |
| | | | | | W52277, AI356673, AA428604, AA969120, AI086886, AW167037, W47555, |
| | | | | | N69430, AA972050, AA579776, N93836, AI744805, W88660, F30196, H67841, |
| | | | | | AA703585, R54415, H80849, AA496690, AA777896, AA234453, AA035655, |
| | | | | | AA350919, F37094, AA234061, AA284876, T93624, AI474971, AA886060, F31971, |
| | | | | | AA150893, AA300810, AA376247, AW014654, AA977993, AA496609, H67163, |
| | | | | | AI310732, AI755278, AA430492, AA993506, AA558203, F31374, AA430533, |
| | | | | | AA477605, AA436330, AA410238, AI086193, H54089, AA682577, AI342640, |
| | | | | | AI161001, AI089475, AA290638, AA502644, AA402631, AW151250, AL045805, |
| | | | | | AA676716, U46298, AA724973, F36499, W52276, AA329392, W88866, T74861, |
| | | | | | AI659749, AA432307, W47495, W40292, AA419293, H38512, AA057574, |
| | | | | | AA203205, AL110156, AC002094, AF077203, and AC002324. |
| HFIAV83 | 122 | 780358 | 1-190 | 15-204 | |
| HFIAZ63 | 123 | 966761 | 1-543 | 15-557 | AI676091, and AC012039. |
| HFIBI48 | 124 | 587871 | 1-414 | 15-428 | |
| HFICA06 | 125 | 934675 | 1-430 | 15-444 | AA452688, H91923, R18017, R69518, R74244, C04901, W73580, AA315530, |
| | | | | | R83609, AA159260, W84825, H84664, N53738. H28250, R49760, T64564, |
| | | | | | AA486811, H24652, AA93 1976, T79349, C05147, H92397, R62673, H25249, and |
| | | | | | AA010050. |
| HFICE40 | 126 | 587918 | 1-441 | 15-455 | |
| HFICF01 | 127 | 916103 | 1-199 | 15-213 | |
| HFICI52 | 128 | 522239 | 1-635 | 15-649 | AW303375, AW173315, AA417652, AI751258, AA364833, C05155, AA600736, |
| | | | | | AI090486, AA258414, AA625303, C04206, AA455496, AI768270, AA599207, |
| | | | | | AA446297, C03119, AA421744, AI828437, AI862133, AA834031, AA024968, |
| | | | | | AA446024, AA419609, AA419525, AI272646, AI148235, AA634323, AI092202, |
| | | | | | AA455497, AI191710, AA593295, AI218226, AA319726, AI754332, AI039656, |
| | | | | | AA774270, AA336003, AA384793, AI350380, AA978105, AI084698, AA912802, |
| | | | | | N64555, AI751035, AI673545, N67061, AI432010, AI754989, AA971661, D31528, |
| | | | | | AI609700, AA478719, AI221431, AI075349, AA456579, AW338252, AA375571, |
| | | | | | AA936765, AA610296, AA258397, T59227, AI564218, D31541, T59268, I76208, |
| | | | | | and AR020615. |
| HFICM95 | 129 | 587875 | 1-431 | 15-445 | |
| HFICZ77 | 130 | 934192 | 1-323 | 15-337 | AI803895, AI391495, AA974333, AA480293, AI418615, AW303930, AA976516, |
| | | | | | AI376344, AA027959, AI188582, AA772607, AA150835, N49399, W43008, |
| | | | | | AI073381, AI679130, AI679704, AA558944, AA748509, AA854570, AI084408, |
| | | | | | AA863284, AI094952, AI351871, AI271532, AA994580, AI370805, AI401404, |
| | | | | | AW044595, AI214656, R33818, AA772710, W95681, AA993489, AI023527, |
| | | | | | AA025063, AA456325, AI563920, AI887313, AA976183, W07752, AA683499, |
| | | | | | AA873879, AA894918, AA737975, AI432209, N80691, AI299818, AA991522, |
| | | | | | AA975924, AA047682, AA906771, AA665526, AI151172, AI379259, R33819, |
| | | | | | AI707592, AA984396, AA047733, AA025062, W45208, AI095417, AA662634, |
| | | | | | AI147183, C02347, F34897, AA972351, AI041404, AW024289, AA683598, |
| | | | | | AW027714, AW366247, AL119399, AW008226, AI277938, AI261589, AI499570, |
| | | | | | AW079334, AA910330, AI638644, AW166412, AI561177, AI884318, AI364167, |
| | | | | | AL042544, AI266652, AI419826, AW192461, AI275609, AW081383, AW087934, |
| | | | | | AI630947, AL037602, AI538564, AL037582, AI445829, AI934011, AI963763, |
| | | | | | AI679771, N29277, AI744268, AI370623, AA806720, AI421149, AI473536, |
| | | | | | AI633125, AI568293, AI916419, AW152182, AI345415, AA580663, AW129264, |
| | | | | | AI620864, AI522052, AI698391, AW148882, AI538850, AI648509, AI363741, |
| | | | | | AI860348, AL042382, AW089844, AI539690, AI701097, AW190194, AI524626, |
| | | | | | AA019328, AI374987, AI352514, AI679891, AW198090, AI371243, AI125015, |
| | | | | | AA923096, AI370322, AI440444, AW080157, AW151714, AI440239, AI473799, |
| | | | | | AI249962, AI524179, AI500113, AI635016, AI929108, AI624693, AW161098, |
| | | | | | AI689096, AI915291, AI580027, N21402, AI473434, AI887772, AI224027, |
| | | | | | AI745684, AI866040, AA788861, AI587606, AI866419, AI598017, AI871727, |
| | | | | | AL043073, AI869765, AI719817, AI678773, AL134830, AI270706, AI249877, |
| | | | | | AL041573, AI932739, AI802542, AI635851, AI590043, AI696583, AI611743, |
| | | | | | AL043355, AI571439, AW075382, AI702073, AI151136, AI610115, AW149937, |
| | | | | | AI640370, AI801766, AI433157, AI572676, AI421662, AI678446, AW128834, |
| | | | | | AA594927, AI634345, AI270039, AI240978, AI689470, AW168822, AI628331, |
| | | | | | AI863002, AI342023, AW191844, N68309, AW169383, AW152195, AW078712, |
| | | | | | AW149311, AI537024, AI287252, AI589428, AW167895, AI651840, AI973288, |
| | | | | | AI670009, AI579901, R40363, AI567846, AW130088, AI610318, Z97053, |
| | | | | | AL137533, AL050366, AF061981, AL117587, E05822, AL133084, I80062, Y16645, |
| | | | | | U80919, Z82022, A77033, A77035, A21103, AF060866, AL080154, U77594, |
| | | | | | AL133075, AF126372, S61953, AL122050, AL137271, AF030513, Z30970, |
| | | | | | AR038854, AB026995, A65340, AL080159, Y11587, AL137488, AB007812, |
| | | | | | AL137268, I48978, AF167995, AF090934, AL080146, AL049382, U72621, |
| | | | | | AL133049, AL080139, AL080148, AF215669, X99971, AC002464, AR050959, |
| | | | | | A18788, AF085355, U70981, E03671, U83980, AL137284, X78627, AL137555, |
| | | | | | D44497, AF084644, AF084645, A65341, X83544, AF007142, AF150103, X66366, |
| | | | | | A41575, AR066485, AL137574, AL122100, AJ005870, AL050149, AL096744, |
| | | | | | AL133010, L04859, S77771, AF058798, AF118070, A18777, A31001, AF047716, |
| | | | | | A58545, AF118558, AF124728, U73682, X93328, AF139986, AL050138, |
| | | | | | AR034821, AC002467, AL133067, S36676, M77345, AL133062, AF201468, |
| | | | | | A52184, X93495, AC002287, S78214, AL133559, AL133558, A41579, AI3028451, |
| | | | | | AC006288, L04849, X60769, X82434, L04852, X84990, X69026, A32826, A30330, |
| | | | | | A32827, A30331, AF036941, AC005091, AL035407, AC002564, U89906, |
| | | | | | AF113699, AL137560, AF106697, AL117440, U49908, AF115410, AF113019, |
| | | | | | AL133088, Y14314, AC004213, AC002471, AC005374, A08910, AF067790, |
| | | | | | AB031064, A08907, A08909, AL133112, I48979, AF126488, A21625, AF000145, |
| | | | | | AL137550, AL031732, A15345, X97332, AL049938, X80340, AF115392, |
| | | | | | AL110296, AL137529, A08908, AL117435, A03736, AF040723, AF162270, |
| | | | | | AF102578, AF032666, AF098162, X53587, E12580, and AF145233. |
| HFIDB12 | 131 | 968922 | 1-616 | 15-630 | |
| HFIDL94 | 132 | 964316 | 1-390 | 15-404 | |
| HFIDM69 | 133 | 926894 | 1-473 | 15-487 | R31339, and AA251156. |
| HFIDN81 | 134 | 959050 | 1-441 | 15-455 | |
| HFIEC13 | 135 | 883185 | 1-511 | 15-525 | Z59127. |
| HFIEF04 | 136 | 926824 | 1-98 | 15-112 | Z99396, AL036418, AL038837, AL037051, AL036725, AA631969, AW392670, |
| | | | | | AL039074, AW372827, AL038509, AL036924, U46341, AL036858, AW384394, |
| | | | | | AL039564, AL119497, AL039085, AW363220, AL039156, AL039108, AL039109, |
| | | | | | AL039128, AL119341, AL037639, AL119443, AL037094, AL039659, AL119457, |
| | | | | | AL134524, AL119319, AL119355, AL036196, AL036190, AL119324, AL119496, |
| | | | | | AL119483, AL119484, AL119363, AL119391, AL042965, AL038531, AL119335, |
| | | | | | U46350, AL037526, AL036767, AL119522, AL037082, AL119396, U46351, |
| | | | | | U46349, AL039625, AL039648, AL045337, AL119418, AL036238, AL038447, |
| | | | | | U46346, AL042978, AL042909, AL119444, AL042433, AL039678, AL039629, |
| | | | | | AL134902, U46347, AL037085, AL039386, AL036268, AL038520, AL134528, |
| | | | | | AL134920, AL039423, AL042551, AL037615, AL039150, AL037077, AL037205, |
| | | | | | AL042614, AL040992, AL119439, AL042984, AL042975, U46345, AL119399, |
| | | | | | AL119401, AL134536, AL036998, AL036733, AI142132, AL134531, AL119464, |
| | | | | | AL042450, AL134525, AL134538, AL042544, AI142131, AL043019, AL042970, |
| | | | | | AL119488, AL037027, AL037178, AL043029, AL039410, AL042973, AL036679, |
| | | | | | AL036719, AL043003, AL042542, AL042850, AI142134, AL036191, AL036765, |
| | | | | | AL037021, AL036774, AL036886, AL036158, AL036999, AL036836, AR066494, |
| | | | | | AR060234, AR069079, A81671, AR023813, AR064707, AR054110, and AB026436. |
| HFIEH79 | 137 | 855196 | 1-628 | 15-642 | Z99396, AL038837, AL037051, AL036725, AL039074, AA631969, AL039085, |
| | | | | | AL039564, AL039156, AL039108, AL039109, AL039128, AL039659, AL038531, |
| | | | | | AL039625, AL039648, AL045337, AL037526, AL039678, AL039629, AL039150, |
| | | | | | AL039423, AL036924, AL040992, AL042909, AL037639, AL037094, AL037726, |
| | | | | | AL038447, AL039410, AL036858, AL036238, AL036190, AL036196, AL119483, |
| | | | | | AL036767, AL045353, AL037615, AL036973, AL038851, AL037082, AL119484, |
| | | | | | AL039440, AL044407, AL036418, AL038509, AL036268, AL036117, AL037077, |
| | | | | | AL039386, AL134524, AL036733, AL036998, AL039924, AL037027, AL036679, |
| | | | | | AL119418, AW392670, AL036191, AL037178, AL036719, AL037085, AL037021, |
| | | | | | AL037054, AL039538, AW384394, AL119341, AL038520, AL036765, AL119497, |
| | | | | | AL044530, AL036999, AW372827, AW363220, AL119363, U46350, AL119319, |
| | | | | | AL119457, AL036158, AL119443, AL037016, AL119324, AL119444, AL119335, |
| | | | | | AL119391, AL119355, AL119522, U46349, U46341, AL038821, U46351, |
| | | | | | AL119496, AL119396, AL036836, U46347, AL036964, AL119439, AL037205, |
| | | | | | U46346, AL042614, AL134531, AL134528, U46345, AL042984, AL042965, |
| | | | | | AL042975, AL119399, AL134518, AL134538, AL042551, AL042544, AL043019, |
| | | | | | AL043029, AL134542, AL042450, AL042542, AL119304, AL043003, AL036886, |
| | | | | | AL119464, AL036774, AR060234, AR066494, AR023813, AR064706, AR064707, |
| | | | | | A81671, Y11449, Y11447, AR069079, AB026436, and AR054110. |
| HFIHB16 | 138 | 661971 | 1-458 | 15-472 | |
| HFIHD91 | 139 | 702324 | 1-721 | 15-735 | N31707. |
| HFIHE47 | 140 | 857988 | 1-1959 | 15-1973 | AA534198, AI978627, AW166513, AI459812, AW166498, AI819341, AW195142, |
| | | | | | AI139595, AA209319, AI365580, AI620649, AI022352, AA583627, AW005402, |
| | | | | | AA583619, AI475193, AW166054, AI569467, AI540081, AI191668, AA331346, |
| | | | | | AI272323, R51977, AA508608, AA678590, AA524450, AW451651, AI090886, |
| | | | | | AW082159, F09189, R51978, AA378790, AI382250, AI378098, AI917676, |
| | | | | | AI868588, T46979, AI355097, AI635445, AW131365, F11527, AI291485, N64277, |
| | | | | | and T46978. |
| HFIHF63 | 141 | 944246 | 1-750 | 15-764 | AW182823, AI378016, AI669104, AI420515, AA010826, W95509, AW297177, |
| | | | | | W95412, AA011202, AA782437, AI869000, AI702739, AA450119, AA889785, |
| | | | | | AA255554, and AI291551. |
| HFIHJ60 | 142 | 740280 | 1-456 | 15-470 | |
| HFIHJ85 | 143 | 707899 | 1-548 | 15-562 | |
| HFIHL29 | 144 | 690546 | 1-367 | 15-381 | |
| HFIHS76 | 145 | 769952 | 1-390 | 15-404 | |
| HFIHZ33 | 146 | 588058 | 1-496 | 15-510 | AA054673, H89424, AA180830, and AF025422. |
| HFIHZ51 | 147 | 725587 | 1-370 | 15-384 | |
| HFIIB73 | 148 | 669594 | 1-438 | 15-452 | AL031296. |
| HFIIS21 | 149 | 670765 | 1-529 | 15-543 | AI570906, AL118651, AL118594, AA644545, AL050343, AL133445, AL096791, |
| | | | | | Z93023, AC004020, AC004851, AC007450, AC000353, AL132712, AP000704, |
| | | | | | AC002400, AC004491, U91323, AL021579, AL022334, AL020997, AC005899, |
| | | | | | AL034417, AC002565, AL009181, AC004106, AC007298, AL139054, AC006449, |
| | | | | | AC002425, AC002544, AL109865, AL022313, AJ246003, AC007227, AC005071, |
| | | | | | AC006014, AC006285, AC005529, AC005488, AF2055 88, Z95 152, AP000689, |
| | | | | | AL034419, U73640, AC004966, AC004477, AL035450, AL031577, AL133448, |
| | | | | | AC008372, AC003036, AC004685, AL009183, AC006013, AC005326, AC005225, |
| | | | | | AL117352, AP000240, AL049829, AC007773, AC004526, AP000047, Z85986, |
| | | | | | AC008115, AC005520, AC016025, AL121658, AC004638, AD000092, AL049795, |
| | | | | | AC004448, AC005015, Z98304, AC007050, AC003029, AC003101, AC007226, |
| | | | | | AC006965, and AC012384. |
| HFIJF34 | 150 | 703972 | 1-448 | 15-462 | |
| HFITX48 | 151 | 934328 | 1-453 | 15-467 | AJ011930,AJ011931, and AP000219. |
| HFITZ24 | 152 | 677144 | 1-412 | 15-426 | |
| HFIUE17 | 153 | 855119 | 1-452 | 15-466 | AW295133. |
| HFIUH54 | 154 | 929787 | 1-429 | 15-443 | AC004774. |
| HFIUI66 | 155 | 746397 | 1-304 | 15-318 | |
| HFIUJ95 | 156 | 735969 | 1-425 | 15-439 | AC009044. |
| HFIUM59 | 157 | 724249 | 1-308 | 15-322 | |
| HFIUO63 | 158 | 691921 | 1-476 | 15-490 | R64316. |
| HFIUP04 | 159 | 582296 | 1-158 | 15-172 | R64259, AA344341, AI080039, AL046624, AA629791, AI368952, AW168763, |
| | | | | | AI952419, N26238, AA834946, AI524512, AI264761, AA393317, AI092959, |
| | | | | | N34467, AI167603, AI817019, AI186197, AW024266, AA220934, AI686547, |
| | | | | | AA079792, AI423180, AW294323, AI022487, AA298287, AI125828, AA977969, |
| | | | | | AI041033, AW167771, AI982550, AA577038, AW129990, AI219200, AI745726, |
| | | | | | AI872119, AA568591, AI074179, N23849, AI076303, AI126251, AI873831, H89854, |
| | | | | | AW410097, N73002, AA034187, AI077832, AI144021, AA961792, AA431977, |
| | | | | | AI818881, AI620483, AI827251, AA738013, AW450235, AI277544, AI049595, |
| | | | | | AA738259, AI263352, AI193279, R85594, AW351844, N52553, T57796, AI000731, |
| | | | | | AW177690, AI018741, AI125766, AA744959, AI351749, AI753417, AI865588, |
| | | | | | N76513, H71780, F25828, AI971511, AW389860, AA805498, AI699779, |
| | | | | | AW054724, AA417958, AI754465, AI189605, AA846282, H71692, N58371, |
| | | | | | AW028940, AI168778, AA033792, R85377, AL134572, AA702274, AA001869, |
| | | | | | AA371623, AI270649, AA704581, AA342144, T79160, AA151314, F00140, T99810, |
| | | | | | H90753, H42220, AA903483, AA700585, AA932956, AI557195, AI143854, |
| | | | | | AA682817, T95829, AL110192, AL050150, AF077054, AB020692, AL096773, |
| | | | | | X60127, and X52311. |
| HFIVB03 | 160 | 924021 | 1-324 | 15-338 | |
| HFIVB25 | 161 | 678022 | 1-269 | 15-283 | AA004777, T66806, AA033897, R75757, and AB014550. |
| HFIVB62 | 162 | 741665 | 1-241 | 15-255 | AC004002. |
| HFIVQ02 | 163 | 919802 | 1-441 | 15-455 | |
| HFIXA30 | 164 | 692637 | 1-313 | 15-327 | AI038502, AA993051, AI926924, AA836474, and AW269412. |
| HFIXC30 | 165 | 692635 | 1-345 | 15-359 | |
| HFIXC44 | 166 | 839536 | 1-541 | 15-555 | R52856, R16202, H09464, R16204, D53134, Z42545, T66661, and T66663. |
| HFIXC49 | 167 | 722886 | 1-369 | 15-383 | |
| HFIXK83 | 168 | 767156 | 1-351 | 15-365 | |
| HFIXK94 | 169 | 943717 | 1-412 | 15-426 | AF045448, and AF064860. |
| HFIXM11 | 170 | 966714 | 1-218 | 15-232 | |
| HFIXO03 | 171 | 923735 | 1-361 | 15-375 | AA824654, AA810370, AA644538, AA824655, AA521376, AA649705, AA834755, |
| | | | | | C14793, H02877, AA483223, AA574110, AA704643, AA678436, AA640034, |
| | | | | | AA568778, AA858197, AA503473, AA973803, AA515909, AA719080, AA446657, |
| | | | | | AA906889, AA679009, AA577906, AA602528, AA605032, AA582911, AA804379, |
| | | | | | AA601355, T49241, AA721981, AA235466, AA668578, AA348504, AA533036, |
| | | | | | AA483731, T53128, AA910125, AA425922, AA573020, AA522942, AA533725, |
| | | | | | AA490183, AA304977, AA341336, AA527958, AA143490, AA838096, AA525249, |
| | | | | | AA668902, AA558616, AA191198, AA156538, AA578017, AA663486, AA434388, |
| | | | | | AA670468, AA525876, AA601499, AA846929, AA102006, AA053551, AA633094, |
| | | | | | AA403110, T16056, W16581, AA600222, AA623002, AA861959, AA280632, |
| | | | | | AA437161, AA831904, AA845843, AA127636, AA825357, AA873560, AA665021, |
| | | | | | AA630925, W05364, AA682912, AA521355, AA678453, AA564859, AA487225, |
| | | | | | AA401022, AA461206, AA599920, AA708311, AA649722, AA127517, AA524838, |
| | | | | | AA210852, AA847984, AA972238, AA654761, AA487858, AA644207, AA970213, |
| | | | | | T10560, R32415, AA169756, AI191227, AA634145, AA635442, AA524809, |
| | | | | | AA551201, AA325699, AA714595, AA595825, F32800, AA486885, AA808941, |
| | | | | | N46153, AA357307, AA059472, AA523815, AA664015, F09736, N69316, |
| | | | | | AA167643, AA134347, AA780515, AA569743, AA650271, AA715355, AA720691, |
| | | | | | H48636, AA678772, AA515435, AA629827, AA987619, AA729740, AA309196, |
| | | | | | T94075, AA768905, F23250, AA480790, AA767376, M85966, AA828042, |
| | | | | | AA728889, AA346575, AA604497, AA633266, AA095511, AA630606, AW088058, |
| | | | | | M77899, AA492140, AI002834, AA778110, AA613851, R95704, AA631799, |
| | | | | | T15897, AA081909, AA825455, T24049, AA405453, H02135, AA326589, |
| | | | | | AA434484, H11124, AA744338, AA834756, AA632755, AA774184, AA113376, |
| | | | | | AA486414, AL046457, AA788726, X62695, AP000302, AP000114, AP000046, |
| | | | | | Z83313, Z68192, AP000431, L43392, AF029750, AB012251, Z92844, AC004047, |
| | | | | | AC004216, AL031012, U07000, AC005755, S61977, AC006515, U67274, U20770, |
| | | | | | Y12508, M87919, AC004837, AL109798, AP000548, AL022325, AL031588, |
| | | | | | AC006466, AF193806, AC003681, U02044, U55180, A26236, L04965, AP000501, |
| | | | | | AL132712, L44140, AC007878, U14694, U13056, D49685, AL096765, AF112866, |
| | | | | | AC000047, S70689, AC002482, AL021878, M87918, U02058, U02063, Z82900, |
| | | | | | AC005280, AL117258, AC012627, AP000011, AL023578, U91326, AP000473, |
| | | | | | AC002544, AC006546, AP000098, AC005245, Z48051, AC006162, Z73420, |
| | | | | | AF003530, AL021392, X88791, M74900, AL031542, AC006322, Z97206, I51997, |
| | | | | | U02048, S70697, S70692, AD000092, M94631, AC005778, AL035209, AL008726, |
| | | | | | AF003528, AL031428, AC007899, AC003954, AF139813, AC009044, AC004745, |
| | | | | | AC005907, X54178, X54181, D83253, X54175, AP000097, AC005610, AL022160, |
| | | | | | AL121754, Z15025, AC004820, U02532, AP0001S1, Z99495, AC002430, |
| | | | | | AC005923, AC006978, AC007314, Z94721, AP000567, AF060568, AC002431, |
| | | | | | AC005060, AC003003, AL122126, U91322, AP000OO9, AC007384, X58156, |
| | | | | | AL109807, AL031256, AC005384, AC005785, AL117355, AC003088, AL021406, |
| | | | | | AP000966, AF015148, Z49816, AC005071, AC008101, AC004940, AC009069, |
| | | | | | X77859, U18400, AC004825, AC005808, AB019005, L07900, AC005822, |
| | | | | | AC005775, AL121652, AC006055, AL049845, AC007237, AL031848, AL049795, |
| | | | | | AP000152, X55932, U18390, AL109653, U14702, AC000025, AL049757, |
| | | | | | AF027390, Z81311, U11309, AC007386, AC005527, U63721, AC002553, X55928, |
| | | | | | AL096734, X54179, AC005940, AC008115, AC000097, Z99289, AC007254, |
| | | | | | Z72521, AC006022, AC002110, AC002105, AC006049, AC000075, Z97184, |
| | | | | | AC004191, AC004802, AC003030, AP000220, AC010186, Z81364, AC004854, |
| | | | | | AP000513, AP000142, AP000084, AL133289, AC006486, U85196, AL031589, |
| | | | | | AP000090, AC005016, AB023049, AL031295, AC004947, AC007243, AC007114, |
| | | | | | AC005664, AC002402, U85198, AL132641, AC004691, AL035671, AL022310, |
| | | | | | Z98946, AP000470, AC005799, AC002289, U96629, AC005900, AC005324, |
| | | | | | AC007537, AC007392, AC008372, U57005, AC007450, U18393, X55925, U18394, |
| | | | | | AC006547, Z83846, U57006, U18392, AL080250, U18391, X54180, S41998, |
| | | | | | U57007, AC016026, AC003119, Z86090, AL033525, AL031447, AL080248, |
| | | | | | U57009, AL031680, AL096770, AL133399, AL022302, AC005912, and AC004470. |
| HFIXV93 | 172 | 597031 | 1-361 | 15-375 | AL080075. |
| HFIXY13 | 173 | 656812 | 1-347 | 15-361 | R54797. |
| HFIXY57 | 174 | 734580 | 1-352 | 15-366 | |
| HFIXY80 | 175 | 965077 | 1-395 | 15-409 | AA833709, AI342422, AI207067, AW303434, AW005730, and AW002395. |
| HFIYA86 | 176 | 757155 | 1-343 | 15-357 | AF015720, AF015722, and AJ229041. |
| HFIYB24 | 177 | 952847 | 1-291 | 15-305 | AL022724. |
| HFIYB40 | 178 | 964251 | 1-428 | 15-442 | |
| HFIYK01 | 179 | 916125 | 1-154 | 15-168 | W22304, and AC007510. |
| HFIYL01 | 180 | 919416 | 1-418 | 15-432 | R69518, AA452688, AA315530, R74244, H91923, C04901, AA159260, R18017, |
| | | | | | W73580, H28250, W84825, R49760, R83609, AA486811, N53738, H84664, |
| | | | | | T64564, T79349, H24652, AA931976, C05147, H92397, R62673, and H25249. |
| HFIYO14 | 181 | 657598 | 1-281 | 15-295 | AA927326. |
| HFIYP02 | 182 | 919501 | 1-363 | 15-377 | |
| HFIYV01 | 183 | 916064 | 1-413 | 15-427 | AI799462. |
| HFIYV03 | 184 | 923755 | 1-389 | 15-403 | Z97206, and AL034375. |
| HFIYV59 | 185 | 861487 | 1-317 | 15-331 | AA502207, AW188742, AA668896, AI355246, AL037771, AA975997, AA668915, |
| | | | | | AW023111, F35684, R64617, AA535736, AA536040, AI653999, AI791131, |
| | | | | | AA494174, AI791130, AA857518, AL119563, T05118, AA487209, AA364860, |
| | | | | | AA906536, F34170, AA084609, H47295, AL040009, AI446336, AI434513, |
| | | | | | AA676971, AA578690, AA581525, AA486565, AA309341, T71936, AI189682, |
| | | | | | AA483606, AA225273, AA737235, AA846923, AA991914, AA485328, AA630535, |
| | | | | | R89560, AA904211, AA689351, H07953, AL041375, AA630122, AI206841, |
| | | | | | AA983673, AA502532, AI866911, AA312303, AA654801, AW316777, AW020736, |
| | | | | | AA709362, N24909, AW192402, N55296, AL031730, AF205588, AC007637, |
| | | | | | AL031005, AC004477, AL109963, AC004000, AC004491, AL021937, AC004841, |
| | | | | | AC005740, AL049758, AL049636, AL117337, AC005670, U91326, AC005899, |
| | | | | | AL096791, AC007227, U96629, AL139054, AC004859, Z98946, AC002070, |
| | | | | | U91323, AC005696, AC005412, AF047825, U73024, Z95331, U80017, AC002301, |
| | | | | | AL031666, AC005317, AC002425, AP000689, AC005911, AC005089, AC005971, |
| | | | | | AC003098, AL022163, U78027, AC004525, AC005225, AC004921, AC008044, |
| | | | | | AC004922, AF001552, Z84480, AL135744, AC002094, AC004967, AF111168, |
| | | | | | AC003962, AJ246003, AC006512, AC005480, AL136295, AL035422, AL049843, |
| | | | | | AC005839, AL096701, AC006211, AC005183, AC005316, L78810, AL035249, |
| | | | | | AP000344, AP000555, AC005914, AC007376, AC005332, AC005523, AL021578, |
| | | | | | AC002477, AC004912, AC007546, AC005988, AL035587, AL049539, AC005704, |
| | | | | | AL078581, AL035417, AB003151, AC006101, U07561, AC005730, AP000557, |
| | | | | | Z84487, AL109758, AC008372, AL008726, AC004876, AC004134, AC005722, |
| | | | | | AC007686, AC002126, Z98750, AJ010770, AC005531, AC006441, AC004985, |
| | | | | | AC004895, AC004263, AC004383, AL031295, AL121658, AC005632, AC006120, |
| | | | | | AC008040, AC005043, AL109984, AC002430, Z99716, AC004966, AL035090, |
| | | | | | AF196779, AC005921, AL080243, AP000208, AC006505, AF117829, Z84466, |
| | | | | | AC006011, AI3023051, AL049757, AC005261, AL009181, AC005562, AL035086, |
| | | | | | AL132777, AC002133, AL022318, AC007193, AP000066, AC005902, AC007384, |
| | | | | | AC004929, U85195, AL022336, AL050318, AC005224, AC004584, AC005375, |
| | | | | | AC005520, AC003041, AF053356, AP000115, AL049569, AL031432, AC006305, |
| | | | | | AC005088, U95739, Z68870, AC006480, AC009405, AL049856, AL049759, |
| | | | | | AC005484, AC002544, AC002059, AC005701, AC003689, AC006251, AC004854, |
| | | | | | AC009363, AC006210, Z93023, AC008989, AC004953, M17262, AP000512, |
| | | | | | AL109952, AC006511, AP000099, AC005049, AC005233, AC005529, AE000658, |
| | | | | | AC004517, AC012384, AC004991, AC006077, AC005377, Z92844, AC008115, |
| | | | | | AP001052, AC007551, AL031577, AC002476, AL023553, AL121653, AL049712, |
| | | | | | AL035659, AL049872, AC007057, AF030453, AC005071, AC002997, AC007263, |
| | | | | | AL022313, AC006255, AP000511, AF067844, AL050321, AL132712, AC005231, |
| | | | | | AL031680, U52112, AC004815, Z85986, AC005057, AC005409, AF064861, |
| | | | | | AC004526, AL031311, AL022311, AL109628, AC002369, AL031670, AC004167, |
| | | | | | AC006121, AC002300, AC005697, AC004125, AC007421, AL049780, AC002316, |
| | | | | | AC009516, AC005666, AB000882, Z75887, U62293, AL049631, AC001226, |
| | | | | | AL022320, and AP000036. |
| HFIYW08 | 186 | 958978 | 1-472 | 15-486 | |
| HFIYZ13 | 187 | 656795 | 1-364 | 15-378 | |
| HFIZF95 | 188 | 795734 | 1-351 | 15-365 | AI470647, and R26573. |
| HFIZG93 | 189 | 928170 | 1-537 | 15-551 | AW070612. |
| HFIZH29 | 190 | 953895 | 1-390 | 15-404 | |
| HFIZM92 | 191 | 791267 | 1-559 | 15-573 | H13123, R82393, AI634609, AI925440, AI333038, AW195580, AA504939, |
| | | | | | AB014580, and AL049844. |
| HFOXA79 | 192 | 774901 | 1-238 | 15-252 | AC004150. |
| HFOXB85 | 193 | 752957 | 1-362 | 15-376 | AL133500. |
| HFOXC25 | 194 | 677995 | 1-335 | 15-349 | AC012039. |
| HFOXC35 | 195 | 638311 | 1-560 | 15-574 | AI284640, AA847499, AI499588, AI754336, AI802835, AA601876, AL138396, |
| | | | | | F12561, AA728812, AI862939, AA847952, AA368059, AA358515, AA765736, |
| | | | | | AA514854, AI002510, F25733, AI537077, AA126450, AA508359, AI282511, |
| | | | | | AA620467, F08248, AW327868, AA935988, AL121235, C06339, N35602, |
| | | | | | AW028392, AA045017, AI338350, AA629992, AI079389, AA780784, AA724333, |
| | | | | | AA169263, AI093030, AI933534, AA493708, AA659360, AI536900, AA579075, |
| | | | | | AA719292, AL045808, AL046156, AI358812, AA347027, AA847515, AI312309, |
| | | | | | H71429, AA683258, AA491862, AA491831, AI564185, AW168618, AI921061, |
| | | | | | AA491650, AW075948, AL042853, AI290405, AW023149, AA368943, AI061143, |
| | | | | | AI076766, AA071393, AA679936, AA634196, AI610435, AI866964, AA351056, |
| | | | | | AI683446, AL134972, U95743, AC002477, AF117829, AF064858, AC002369, |
| | | | | | AC002368, AC008080, AC007298, Z97054, Z94056, AC003957, AF003626, |
| | | | | | AC007546, AC005823, AL034420, AP000113, AP000045, D84394, AC006443, |
| | | | | | Z82203, AF111168, Z86090, Y10196, AC007878, AC004024, AC005049, U80017, |
| | | | | | AC005031, AC005355, Z99916, AC006578, AC008013, AF207550, AC002385, |
| | | | | | AC007221, AC005484, AJ229043, Z83840, AC005915, AC007450, AL034400, |
| | | | | | AL035450, AP000347, AP000351, AF015262, AL049538, AC006137, AC006040, |
| | | | | | AC004032, Z98941, AC004382, AC005004, AC000113, AC005154, AC006536, |
| | | | | | AL023805, AC007065, AP000014, AL031684, AC005736, AC004112, AL022238, |
| | | | | | AL022477, AC004887, AC007225, AC003071, AC004585, AC003029, AC004019, |
| | | | | | AP000104, AL050318, AF149773, AC002350, U91322, AC007245, I391321, |
| | | | | | Z95400, AC006111, AC002091, AL031591, AC004617, AC002089, Z98036, |
| | | | | | AL049874, AC005342, AL022316, AL117354, AP000350, AC004816, AC002364, |
| | | | | | AL035555, AL078624, AC002416, Z97181, AP000355, AL117355, AP000156, |
| | | | | | X96421, AL049835, AL050343, AP000115, AC004496, AC006012, AC004813, |
| | | | | | AC005740, AC004796, AC005284, AC004664, AC005383, AL022323, AL049766, |
| | | | | | AP000048, AC005330, AC004924, AC006530, AL121820, AL035088, AC004386, |
| | | | | | AL009181, AL049780, AC002366, AL049837, AC015853, AC005863, AC003099, |
| | | | | | AC000052, L78833, AL035411, AC004491, AC004841, AC005919, AC016831, |
| | | | | | AC004253, AC004966, AC002994, AC000353, AL049557, AC004144, AL121653, |
| | | | | | AL049829, AL023653, AL050321, AL049869, AC007567, AC006316, AC004531, |
| | | | | | AC005036, AL031230, AC006450, AC005826, AC002316, AC009510, AC007314, |
| | | | | | U95090, AJ251973, AC004849, Z95114, AC005911, AL121652, Z93930, AC002418, |
| | | | | | AC006376, AL035563, AL022318, AC006205, AC002992, AC007684, AC005971, |
| | | | | | AF064862, AC000105, AC009514, U52111, AC006116, AL022723, AF107885, |
| | | | | | AF045555, AP000330, Z98884, AC007685, Z95113, AF001550, AL117667, |
| | | | | | AC002563, AL121578, AL136504, AC005013, AC002420, Z82190, AP000272, and |
| | | | | | AC005244. |
| HFOXE83 | 196 | 587955 | 1-271 | 15-285 | AA928539, AI590043, AI863382, AI345415, AA830709, AI690813, AI679388, |
| | | | | | AA641818, AI612913, AI819545, AI491842, AW162194, AI954200, AW169291, |
| | | | | | AL047100, AI345612, AI452560, AI479292, AI345416, AI613038, AW198090, |
| | | | | | AI571439, AI702063, AA937566, AI859991, AI370623, AI635851, AI554402, |
| | | | | | AI376425, AW129722, AI885664, AL048538, AW084896, AI538850, AI540831, |
| | | | | | AI698391, R40363, AA804541, AI635216, AL120706, AL043166, AI863002, |
| | | | | | AI633125, AW130362, AI696714, AI909697, AI539800, AI927233, AI539260, |
| | | | | | AI270183, AI619820, AW194014, AW022754, AI950865, AA743430, AW149937, |
| | | | | | AI889189, AI818562, AL042745, AL042744, AI580027, AA814517, AL037602, |
| | | | | | AI766348, AL043293, AW090550, AW152182, AI824688, AL037582, AI696583, |
| | | | | | AI830016, AI688854, AI538564, AI701097, AI872423, AI870192, AI440260, |
| | | | | | AL080045, AI635016, AI690784, AW058202, AI804515, AI699175, AI915291, |
| | | | | | AI678496, AW151974, AW105431, AI583032, AI473536, AI860027, AW022957, |
| | | | | | AL079799, AI884318, AI918677, AW151893, AI494198, AI890907, AW196720, |
| | | | | | N66892, AI868740, AW188525, AI654286, AI470717, AI499570, AI434229, |
| | | | | | AI434969, AI583065, AI653402, AW022636, AA575922, AI827212, AL046200, |
| | | | | | AL040366, AI684244, AI500061, AW148363, AW103628, AI921633, AI547265, |
| | | | | | AI309769, AI147877, AI446511, AW148544, AW151132, AI445025, AI095003, |
| | | | | | AI469784, AL042944, AI609375, AI798359, AI434731, AI440238, AI560569, |
| | | | | | T69241, AI453767, AW022856, AA128660, AI950729, AI358271, AI624543, |
| | | | | | AL046466, AI912356, AI624938, AI637584, AA715307, AI524654, AA809974, |
| | | | | | AW103878, AI419826, AI889191, AW019985, AW128971, AI275956, AI475331, |
| | | | | | AI670895, AI798456, AL043152, AI677796, AI687362, AA748353, AI699823, |
| | | | | | AI973152, AI540354, AI571442, AI161279, AI061405, AI866469, AW131165, |
| | | | | | AA814343, AI673278, AI887163, AI620643, AW090736, T49776, AW148536, |
| | | | | | AW194509, AI801515, AI343325, AI635287, AI469532, AI250282, F34309, |
| | | | | | AI364167, AL045453, AI683606, AI610690, AW089726, AI620056, AC004383, |
| | | | | | AL133029, AL117587, D44497, A17115, A18079, A86558, AF141289, AJ003198, |
| | | | | | AF090900, AL031732, AF013249, AR022283, A93914, AL133623, AL137488, |
| | | | | | AC006203, I33391, AL137459, AF124728, S65585, L04849, L04852, AF080068, |
| | | | | | AL022147, AL137657, AL133637, AF126372, AL137539, X97332, A41579, |
| | | | | | A27171, Z97214, AL136884, I34395, I18358, AF124435, AL133084, I28326, |
| | | | | | AL080146, AL117416, AF126247, AR066485, M85165, A15345, AR038854, |
| | | | | | A12558, AF100931, Y16645, AL133053, I89947, A26498, U38419, AL137530, |
| | | | | | Y13350, AF222801, AF111849, AL080140, AL080148, AL133049, AF102578, |
| | | | | | A60092, A60094, AF031572, A12522, AR050959, AR068753, AR012379, |
| | | | | | AC005291, AL080139, AF004162, A21625, AJ012755, S36676, X63162, X59812, |
| | | | | | AL110158, AL049466, AF002672, U49908, AI238093, X15132, AF013214, |
| | | | | | AF200464, AJ005690, AL035407, A21103, AL049283, AF054988, AF111851, |
| | | | | | U58996, U75304, X78627, AL133015, AR066486, Y17327, AL122049, AB031064, |
| | | | | | AL050172, AL137254, AL137548, AL050322, AC018767, AF026124, AF061795, |
| | | | | | AF151685, U37359, AL137533, X68560, I03321, AL117575, AL080118, AF076464, |
| | | | | | AL122104, Z93784, E12580, E12888, A20553, AF131773, I33392, A08907, |
| | | | | | AF153205, E03168, AL137529, AL050149, AF060555, AF106657, AC002471, |
| | | | | | AC005374, AF169154, AR013797, X60769, AF145233, E03671, AL049423, |
| | | | | | AL122100, AF058921, U51123, I09499, AF061981, AL133608, AF112208, |
| | | | | | AF116573, X06146, X61049, A23327, AL137478, A76337, I18355, U4392, |
| | | | | | AB020777, X69026, and X99971. |
| HFOXL03 | 197 | 923772 | 1-309 | 15-323 | AI394067, and AI056068. |
| HFOXM54 | 198 | 587974 | 1-346 | 15-360 | |
| HFOXN89 | 199 | 587984 | 1-97 | 15-111 | |
| HFOXO24 | 200 | 733377 | 1-517 | 15-531 | AI026814. |
| HFOXR28 | 201 | 587994 | 1-310 | 15-324 | |
| HFOXR67 | 202 | 806488 | 1-447 | 15-461 | D56451, AI797289, AW008969, AI394269, AI541453, D56220, Z36872, H17761, |
| | | | | | AW009897, AA248589, AI278793, H59335, C04806, R01796, AW062936, N30347, |
| | | | | | H93411, AW263105, R62171, AW178925, AA613553, AI148761, AA960959, |
| | | | | | R52799, AA996071, AW363731, AI026967, AW069303, AA148228, AW247577, |
| | | | | | H41429, N91665, AA837473, AW247732, R86909, T34155, C05230, AA316485, |
| | | | | | N94214, AI751446, AI750270, AI276480, AA865609, T36130, R81681, N93270, |
| | | | | | AI383153, AF153605, and AF151861. |
| HFOXS81 | 203 | 588052 | 1-502 | 15-516 | AC009509. |
| HFOXU83 | 204 | 887781 | 1-334 | 15-348 | |
| HFOXU92 | 205 | 588057 | 1-64 | 15-78 | AA225747. |
| HFOXV15 | 206 | 964296 | 1-451 | 15-465 | AR038762. |
| HFOXV80 | 207 | 771290 | 1-442 | 15-456 | AA308546, AW157090, AI937913, AW156893, AW162217, AW157724, |
| | | | | | AW161439, AI879643, AW156973, AI879261, AW163058, AI929716, AW087100, |
| | | | | | AA305024, AW157680, AW068829, AI929159, AW160392, AI928949, AI929458, |
| | | | | | AI879102, AI815607, AW163676, AI816107, AI929203, AA533150, AA603376, |
| | | | | | AA315102, AA557858, AI042255, AA316902, AA305999, AI929416, AA467847, |
| | | | | | F20887, AI148106, AA635409, AI080578, C16701, AI735002, AI703215, AI218297, |
| | | | | | AA578143, AA306384, C15041, AI004923, F34246, AI813679, AW161950, |
| | | | | | AI741580, AA558231, F27426, AA315107, AA316386, F28430, AA747217, F19264, |
| | | | | | AA582173, AW162077, AI880659, AI284407, AA969828, AA316519, AI797882, |
| | | | | | AA182966, AA312837, AA593697, AA429825, AA314832, AA534268, AW051532, |
| | | | | | AA551986, AA514368, AI283754, AA314733, AA857416, AA504055, AA099703, |
| | | | | | AA703668, AA813296, AA305425, AA627106, AA658158, AA102518, AA912491, |
| | | | | | W70100, AA806144, F21803, AA729466, AW188624, AA362481, AA578344, |
| | | | | | T58704, AA552195, AA570027, C14962, F27125, AI547077, F24635, AA146770, |
| | | | | | AA569705, F22538, AI051783, AA582239, AA954461, AA523344, F25970, |
| | | | | | AI818276, AA628531, F28354, AI541451, AI286214, AI302226, AI749166, |
| | | | | | AA595326, AA923442, AA970629, AA836780, AA382399, AA358548, AI589583, |
| | | | | | AA553775, AA302481, AA302037, AI015174, AA309890, AA639958, AA994774, |
| | | | | | AI928906, AA868034, F35973, AA366144, AA541672, AW162742, AA385897, |
| | | | | | AA305293, AA358129, AI383381, F19236, F27230, AA372465, AA532593, F35969, |
| | | | | | AA659394, R50158, AI815885, AI816148, AA353710, AA082359, AA320396, |
| | | | | | AA345921, N85393, AA506932, W44688, AA146771, AA894893, AA363398, |
| | | | | | AI347797, C15196, AA084010, H25768, AA352140, AA143324, F27370, |
| | | | | | AA535125, AA482870, AA126459, AA070860, AA112167, AA320816, AA559162, |
| | | | | | AA375521, AA186947, AA741424, AI476367, AA533959, AA302382, AI339429, |
| | | | | | F16378, AA304454, W44689, AI749986, AA303205, AA876719, H67183, |
| | | | | | AA355917, AA371889, AA303560, AA121010, T68786, AA190982, AI609251, |
| | | | | | AA187063, T61564, T47265, AA484195, AA669582, AA746899, AA375705, |
| | | | | | AA318361, AA373707, AI991245, F16990, AA721793, Z22017, AA633759, |
| | | | | | AA480788, AA099379, AI688209, AA181199, F17072, AA627728, AA358130, |
| | | | | | F21668, AA327089, H25809, F22482, AA514522, AA328203, AA608523, |
| | | | | | AA143373, AA531014, AI581577, AA318610, AA301081, Z20171, AA181098, |
| | | | | | T25773, AI906511, F29640, AA344773, AA559980, R29520, T58654, AI828156, |
| | | | | | AA662018, AI612840, T50358, AA126533, F29292, AA191447, AI459942, |
| | | | | | AI818088, AA662715, AA372830, AI420455, AL050273, AF077043, AC004884, |
| | | | | | AC007160, AC003071, and A74819. |
| HFOYI36 | 208 | 935532 | 1-412 | 15-426 | |
| HFOYL77 | 209 | 494844 | 1-303 | 15-317 | |
| HMUBM26 | 210 | 908912 | 1-551 | 15-565 | |
| HMUBX25 | 211 | 678004 | 1-248 | 15-262 | |
| HMUBY88 | 212 | 740311 | 1-360 | 15-374 | D31124. |
| HOAAB15 | 213 | 575254 | 1-283 | 15-297 | |
| HOAAB42 | 214 | 530605 | 1-246 | 15-260 | AL047846, AC008013, AC009533, and AR050956. |
| HOAAB56 | 215 | 507839 | 1-361 | 15-375 | |
| HOAAC31 | 216 | 693597 | 1-368 | 15-382 | AA648984, AA866183, and AA236595. |
| HOAAD05 | 217 | 932756 | 1-546 | 15-560 | AL045968, AL046394, AW449989, AI351357, AA757688, AI937374, AI129540, |
| | | | | | AI952327, W28986, AI362659, AA704558, AA973323, AP000219, and AJ239328. |
| HOAAD52 | 218 | 859628 | 1-317 | 15-331 | |
| HOAAE10 | 219 | 968532 | 1-325 | 15-339 | AC005164. |
| HOAAE45 | 220 | 530602 | 1-316 | 15-330 | |
| HOAAE49 | 221 | 859630 | 1-290 | 15-304 | AI696455, AA631512, AA280198, AA063419, AA730609, AA063493, N53783, |
| | | | | | AJ230815, AA094679, AI919048, T03774, AI547110, AA676462, AA484321, |
| | | | | | T94858, AI800189, AI683125, N64807, N63562, AI832554, AA338436, AA325104, |
| | | | | | AA485778, AW169324, H63173, AA229489, AA297208, AW085626, AA284638, |
| | | | | | AA720594, AA640104, C15279, AW192471, AI754926, T58562, AA594164, |
| | | | | | AA524804, AA524604, AA115769, AA302962, AI267285, AA362670, AA228268, |
| | | | | | R43468, AW086015, AA730325, AI523991, AW085751, H65404, AI708663, |
| | | | | | AA452912, AA516061, AA910236, AI299889, AA494145, AW169183, AA632355, |
| | | | | | AA507657, AI818921, AL079682, AL041740, AA358330, AA174108, AW089646, |
| | | | | | AA300221, H60396, AA082007, AI242994, AI207692, W02485, W45215, |
| | | | | | AL109984, AL035423, AC005763, AC006343, AC007225, AC006930, AC005231, |
| | | | | | AL020995, AB001523, AL021393, AC011594, AC005179, Z69364, AL034379, |
| | | | | | AC002316, AL135745, AC005775, AC001231, AC005082, AC007066, AC004106, |
| | | | | | AC019014, AC005694, AC003969, X64467, AB026906, AC005593, AC006205, |
| | | | | | AC004844, AC007238, AD000092, Y18000, AC005225, AC007686, AC005971, |
| | | | | | AC005527, AC003658, AC005695, AC004525, AC002463, AC006064, AC005277, |
| | | | | | Z93241, AL133243, AC005529, AC004033, AC007298, AC004686, AC005215, |
| | | | | | AL021391, AP000228, AC005412, AL031844, AC002070, AF169035, AP000140, |
| | | | | | AL022316, AF135028, Z85988, AC004447, AC004650, AL035420, AC004022, |
| | | | | | AL034417, AC008044, Z82188, AL031432, AL078474, AF064861, AC002504, |
| | | | | | AC004843, AL096678, AC006011, AC004765, AC010722, AC003013, AL117340, |
| | | | | | AL109628, AC004388, AF036121, AF196972, Z68756, AC005738, AC006120, |
| | | | | | AC003685, AC005516, AP000310, AL096703, AL035249, AP000116, AP000152, |
| | | | | | AP000010, Z97632, AC008085, AP000088, AC003041, AL080276, AC002350, |
| | | | | | AC005369, AL049709, AL022311, AC007050, AF184614, AC005331, AC005102, |
| | | | | | AC005410, AC005832, AC007240, AC006148, AC004816, AC007546, AC002076, |
| | | | | | AC006441, AC005937, AC004073, AB023048, AC005962, Z83844, AF069491, |
| | | | | | L78833, AC007971, Z83843, Z98946, AL033392, AL078581, AF196969, AL049631, |
| | | | | | U85195, AC000134, AP000335, AC004019, AL021453, AC002351, AL035658, |
| | | | | | AC007868, AL031680, AL022165, AC005768, AC006130, AL080242, AF081795, |
| | | | | | AE000658, AL024498, AL021808, U80459, AC003004, AB022785, AC005933, |
| | | | | | U73648, AL031721, AC005785, Z94161, AC006273, AL121934, AC002037, |
| | | | | | AL022237, AP000251, AL031255, AF023268, AL096757, AL031118, AL035398, |
| | | | | | AL049743, AL109963, AC004897, AC004771, AC006071, Z93930, AC005773, |
| | | | | | AP000065, AP000030, AC004079, AC004920, AC004703, AL049757, AL078476, |
| | | | | | AL035400, AC005033, and AL049745. |
| HOAAE73 | 222 | 960631 | 1-303 | 15-317 | |
| HOAAF18 | 223 | 530600 | 1-343 | 15-357 | |
| HOAAH10 | 224 | 968368 | 1-608 | 15-622 | AI038589, H38572, AA604708, and H59854. |
| HOAAI05 | 225 | 932537 | 1-296 | 15-310 | |
| HOAAJ23 | 226 | 531389 | 1-257 | 15-271 | |
| HOAAK90 | 227 | 527490 | 1-280 | 15-294 | |
| HOAAM08 | 228 | 960060 | 1-189 | 15-203 | |
| HOAAR14 | 229 | 526530 | 1-230 | 15-244 | H60486, H60440, AW151194, AW378516, AW378511, AC005696, AL031230, |
| | | | | | AC004771, AC006011, AL049872, AL096701, AC005034, AC003103, AC004983, |
| | | | | | AC004000, AP000696, AL109952, AL110122, Z99716, AC005031, AC005839, |
| | | | | | AF196970, AL023575, AL035458, AC004999, L78833, AC006441, AC004859, |
| | | | | | AL034548, AL023553, AC007390, U80017, AC005399, AC008372, M17262, |
| | | | | | AL035398, Z85986, AP000512, AL031680, AC004832, AC004797, and AC007182. |
| HOAAV23 | 230 | 527489 | 1-294 | 15-308 | |
| HOAAW21 | 231 | 527487 | 1-296 | 15-310 | |
| HOAAZ61 | 232 | 531065 | 1-320 | 15-334 | |
| HOABA20 | 233 | 932539 | 1-104 | 15-118 | |
| HOABA93 | 234 | 792929 | 1-198 | 15-212 | |
| HOABD58 | 235 | 738359 | 1-96 | 15-110 | |
| HOABP66 | 236 | 507175 | 1-277 | 15-291 | |
| HOABP69 | 237 | 531049 | 1-98 | 15-112 | |
| HOABR40 | 238 | 531051 | 1-344 | 15-358 | |
| HOEAK21 | 239 | 954961 | 1-326 | 15-340 | |
| HOEAY14 | 240 | 659258 | 1-336 | 15-350 | AA010406, and AA513951. |
| HOEBL44 | 241 | 715851 | 1-288 | 15-302 | |
| HOEBO31 | 242 | 693689 | 1-335 | 15-349 | |
| HOEBP01 | 243 | 916957 | 1-565 | 15-579 | R51124, R50890, H09201, F08412, H10008, R23547, and AC007688. |
| HOECN79 | 244 | 723113 | 1-223 | 15-237 | |
| HOECY54 | 245 | 506692 | 1-532 | 15-546 | |
| HOEDD40 | 246 | 572900 | 1-332 | 15-346 | |
| HOEDD83 | 247 | 578934 | 1-311 | 15-325 | |
| HOEDK10 | 248 | 915054 | 1-314 | 15-328 | |
| HOEDT31 | 249 | 826009 | 1-461 | 15-475 | N40134, AA459424, H23811, AA477809, AW361971, R22603, R80171, AA255699, |
| | | | | | AW388174, R07949, H43071, AA019983, AA491397, AA853328, AW167516, |
| | | | | | AA325547, AA156738, AW388175, N42726, AA333808, AA953943, AA299231, |
| | | | | | N41696, AA715394, T73669, AW083486, T63684, AA838699, AI890778, |
| | | | | | AA046378, AW008861, AW162991, AW300924, AI205997, H38711, AI125503, |
| | | | | | AW166548, AA911687, AA504780, AA434314, AI567841, R78822, and R67144. |
| HOEDU54 | 250 | 506576 | 1-501 | 15-515 | AI954403. |
| HOEDU68 | 251 | 713695 | 1-156 | 15-170 | |
| HOEEB63 | 252 | 745039 | 1-299 | 15-313 | R47912. |
| HOEEC02 | 253 | 919822 | 1-226 | 15-240 | |
| HOEEQ45 | 254 | 717754 | 1-336 | 15-350 | Z64883. |
| HOEEQ17 | 255 | 663719 | 1-357 | 15-371 | |
| HOEFG22 | 256 | 744340 | 1-272 | 15-286 | |
| HOEFL91 | 257 | 790134 | 1-346 | 15-360 | AI042148, T72500, D45636, and AL049830. |
| HOEFN92 | 258 | 698444 | 1-312 | 15-326 | R45895, AA585325, T18597, R28965, R29218, R28892, D54897, D60765, D60844, |
| | | | | | AA170832, AA585098, R28735, R29445, R29657, R28967, Z32887, D57491, |
| | | | | | D59751, AA585101, Z32822, AA585439, AA283326, C15406, D53161, AI547250, |
| | | | | | D61185, C15069, Z33559, AI546831, AA585476, D61254, AI525316, AI557262, |
| | | | | | C16294, C16315, D55233, AI557864, R28895, Z28355, D59458, AI541356, |
| | | | | | AI525306, AI546875, AI557734, AI525500, D59436, AI546999, AI546921, D54850, |
| | | | | | AI526078, AI526016, AA585155, AI526140, AI541365, AI557740, C16296, C16292, |
| | | | | | D53447, AI546971, C15120, C15762, AI557763, D52835, C16305, C16293, |
| | | | | | AI547122, AI557799, AI541383, D53472, AI546901, AI526194, AI526184, |
| | | | | | AI526109, AI535639, AI557718, AI541517, AI547039, C15737, R29179, AI541374, |
| | | | | | C16300, AI525339, AI557731, AI526112, AI541205, AI526117, AI526191, |
| | | | | | AI525556, D57186, AI557787, AI535660, AI546945, AI557727, AI547202, |
| | | | | | AI541535, AI525431, AI557808, AA585430, AI557809, AI557852, AI547006, |
| | | | | | D60730, AI541346, AI541013, AA585356, AI540903, AI541307, AI557084, |
| | | | | | AI540967, AI541034, AI557264, AI557758, AI557807, AI525320, Z30131, |
| | | | | | AI557408, AI546996, AI557533, AI526024, AI546891, R29262, R29172, AI557602, |
| | | | | | AI557317, AI536138, AI526158, AI541527, C16290, AI526195, AI525114, |
| | | | | | AI557155, R29177, AI547196, C14208, AI525168, AA585453, D61060, AI557279, |
| | | | | | T19407, AI540974, AI547189, AI546954, AI525856, C14210, AI526113, AI526073, |
| | | | | | AI541422, AI524904, AI541515, AI557810, AI557796, T41289, AA585434, |
| | | | | | AA585117, AA514191, AI541321, AI541492, AI541345, AI540944, AI546829, |
| | | | | | AI556967, AI557041, AI557786, AI525076, AI524890, AI046024, T41329, |
| | | | | | AI525656, AI557785, AI547137, AI526169, AI525286, AI541506, AI557039, |
| | | | | | AI541415, AI546841, AC005913, AR038762, AR038855, AR062871, A25909, |
| | | | | | Y09813, X76012, X82786, AJ243486, AR003381, AJ244006, AJ244005, Y16359, |
| | | | | | AF082186, AR031358, X81969, AR031365, D50010, D13509, AI244004, A20702, |
| | | | | | AR062872, AR062873, A20700, D78345, A43189, A43188, Z32836, AR054723, and |
| | | | | | X55486. |
| HOEFS83 | 259 | 615154 | 1-240 | 15-254 | AL133353. |
| HOEJE18 | 260 | 666349 | 1-300 | 15-314 | |
| HOEJG04 | 261 | 859251 | 1-470 | 15-484 | AA1997. |
| HOEJW84 | 262 | 859225 | 1-511 | 15-525 | R06873, and T84693. |
| HOEKH88 | 263 | 924112 | 1-692 | 15-706 | AI694533. |
| HOEKP01 | 264 | 918873 | 1-436 | 15-450 | AA043660, AA336439, D79158, T32005, Z24843, and AA482531. |
| HOEKP79 | 265 | 963337 | 1-455 | 15-469 | AA506744, AA564925, AW080772, AA972523, W24312, N69686, AA501450, |
| | | | | | AA831345, AA515733, AW029515, AI264579, AI446127, F25580, AA524846, |
| | | | | | AI300054, W61253, R51582, AI421723, T64444, AL119156, AL119182, AL133353, |
| | | | | | AC006480, AC006160, AF011889, AC010206, AC008928, AL133163, AC004849, |
| | | | | | AC004596, AL121653, AL118510, AC008119, AL024498, AL133500, AL109753, |
| | | | | | AL096701, Z84488, AC004605, AC007684, AB020867, AL021940, AL031295, |
| | | | | | AL031602, AC003037, AL021368, AC007221, AL031659, Z98048, AL021877, |
| | | | | | AC005393, U50871, U96409, AF111168, Z95152, and AC003689. |
| HOEME76 | 266 | 974069 | 1-530 | 15-544 | AA280295, H19334, AI371007, AA127347, N24841, F09340, AA635400, N52087, |
| | | | | | and U60062, |
| HOEMK02 | 267 | 918364 | 1-94 | 15-108 | |
| HOEMQ65 | 268 | 922789 | 1-309 | 15-323 | |
| HOEOE25 | 269 | 907806 | 1-611 | 15-625 | AW182459, AI376825, AI654638, AA866171, AA984176, AA806823, AA743557, |
| | | | | | AW340266, AA470942, AA470974, AI868578, AA743581, and AA761032. |
| HOHAA14 | 270 | 468867 | 1-371 | 15-385 | |
| HOHAB04 | 271 | 665381 | 1-271 | 15-285 | AA465435. |
| HOHAB21 | 272 | 670814 | 1-229 | 15-243 | |
| HOHAE68 | 273 | 781448 | 1-321 | 15-335 | AI751085, AA033678, D30912, and W55850. |
| HOHAM36 | 274 | 782043 | 1-539 | 15-553 | AA059163, AA864897, H99945, and N64132. |
| HOHBE48 | 275 | 588317 | 1-386 | 15-400 | |
| HOHBF30 | 276 | 859046 | 1-504 | 15-518 | Z84484, and AC006571. |
| HOHBL11 | 277 | 966720 | 1-464 | 15-478 | |
| HOHBL32 | 278 | 588329 | 1-538 | 15-552 | |
| HOHBO79 | 279 | 588271 | 1-428 | 15-442 | AI638299, AA918485, and AF077660. |
| HOHBW86 | 280 | 784723 | 1-264 | 15-278 | AC009247. |
| HOHBX75 | 281 | 669536 | 1-493 | 15-507 | AI735183. |
| HOHBY75 | 282 | 840109 | 1-413 | 15-427 | AI215403, AW297341, Z21179, and AL137348. |
| HOHCH04 | 283 | 859047 | 1-621 | 15-635 | |
| HOHCI05 | 284 | 935123 | 1-380 | 15-394 | |
| HOHCM38 | 285 | 709295 | 1-416 | 15-430 | AA058800, AI268296, N47161, AA303034, and H45390. |
| HOHCM90 | 286 | 703734 | 1-140 | 15-154 | |
| HOHCO85 | 287 | 751299 | 1-565 | 15-579 | Z21583, and AL09677l. |
| HOHCP35 | 288 | 656516 | 1-281 | 15-295 | |
| HOHCQ76 | 289 | 825236 | 1-549 | 15-563 | |
| HOHCQ77 | 290 | 661480 | 1-103 | 15-117 | AP000274, and AP000104. |
| HOHCV83 | 291 | 735685 | 1-289 | 15-303 | AI636734, T60940, H01852, AI078143, AI683019, AA854460, R35259, AA541794, |
| | | | | | N74027, AW167909, AI439676, W63553, AI472070, AI538106, AI332676, |
| | | | | | AI446259, W67486, AW245354, AA856817, AW152661, AI459617, AA845825, |
| | | | | | W67485, T49133, AI961232, AL041342, AI149238, AA807579, AA362037, |
| | | | | | AA565232, AA502813, AI434365, M78026, AA988600, A1127133, AA502498, |
| | | | | | T07225, H79586, AA471086, R83068, AA559205, AI223968, N68851, R48980, |
| | | | | | AI679496, N92064, AA702717, AW439625, AI962973, AW439820, N34258, |
| | | | | | AI859849, AI762302, AA636102, AA551548, N22153, AA572982, AW073498, |
| | | | | | AI929410, AI753672, AI750950, AC007371, AF165138, Z94277, AC004084, |
| | | | | | AC004838, AC005520, AC004985, AL008735, AC005751, AC005971, AF029062, |
| | | | | | AB000876, AC004181, AP000506, AL022313, AB000882, AC004655, AL031178, |
| | | | | | AC005377, AL022345, AL031584, AF227509, AF108083, AC005660, AC004941, |
| | | | | | AL035415, AC005486, Z98304, AC000049, AL096774, AC004079, AL033504, |
| | | | | | AC004020, AC007156, AC008372, AF008915, AC004750, AC005568, AC003959, |
| | | | | | AL050350, AL035410, AC005913, AC004805, AC005412, AC004854, AC002407, |
| | | | | | AL050318, AL096716, AC007686, AL022311, AL035587, AL096791, AC006368, |
| | | | | | AL109865, AC003664, AC008040, AF132033, U73630, Z81314, AC006347, |
| | | | | | AC006130, AL049748, AL096861, AL022400, AC003973, AC005081, AC005837, |
| | | | | | AC003991, Z72006, AC004797, AL021707, AP000045, AP000113, AL035417, |
| | | | | | AL079342, AC005043, AC008115, AC004953, AL022302, AL035249, AC005186, |
| | | | | | AL133163, AC004531, AL109628, AC005262, AC004771, AL021920, AC004967, |
| | | | | | AC011604, Z99716, AL049779, AC005005, AF043251, Z49236, AC004235, |
| | | | | | AC004034, AC002450, AF050154, AC005789, AC005233, AC004131, AC004913, |
| | | | | | AC004070, Z95116, AL049631, AL096712, AL031657, AC007114, AL031281, |
| | | | | | AF121782, AL022336, AC009275, AC007011, AC004098, Z98949, AC005058, |
| | | | | | AC006040, AF064857, L47234, AF179633, AL035683, AC012099, AF003529, |
| | | | | | AC009263, AC004893, AC002544, AP000555, AC004585, AL133245, Z97053, |
| | | | | | AC002302, AC005274, Z82173, AC005265, AB015355, AL031602, AL049540, |
| | | | | | AC005067, AC005255, Z98048, AP000502, AL117354, AL008583, AC005754, |
| | | | | | AL031280, U82671, AC005914, AF047825, AC005534, and AL031053. |
| HOHCW02 | 292 | 919142 | 1-290 | 15-304 | |
| HOHDB11 | 293 | 966413 | 1-650 | 15-664 | N29990, N36333, AI085776, H25536, H26237, H81879, H96029, N26443, N31186, |
| | | | | | W03046, W44451, AA037341, AA079718, AA203198, AA424475, AA745282, |
| | | | | | D82780, C00261, AA249588, and T48492. |
| HOHDB32 | 294 | 698781 | 1-303 | 15-317 | |
| HOHDD23 | 295 | 675616 | 1-400 | 15-414 | |
| HOHDF40 | 296 | 710748 | 1-357 | 15-371 | AA640725, AI333044, AL042761, and AB011158. |
| HOHDF53 | 297 | 727620 | 1-410 | 15-424 | |
| HOHDI48 | 298 | 966379 | 1-241 | 15-255 | |
| HOHDY85 | 299 | 764155 | 1-407 | 15-421 | |
| HOHDZ61 | 300 | 741382 | 1-272 | 15-286 | |
| HOHEA19 | 301 | 668208 | 1-385 | 15-399 | |
| HOHEC41 | 302 | 712037 | 1-523 | 15-537 | AI971892, AI683311, AB033063, and AR065869. |
| HOHEN50 | 303 | 662365 | 1-150 | 15-164 | |
| HOSAB04 | 304 | 531565 | 1-310 | 15-324 | W61042, AA304276, AA099793, AW369803, AA451642, AI908298, AW369815, |
| | | | | | AW369818, AA451620, AW369839, AA192643, AW151982, AI982623, AI857726, |
| | | | | | AW369763, AI204558, AA320140, W27176, AA319885, AW023791, W27949, |
| | | | | | AI670119, AI554355, AW051557, AI804785, AW236073, AI799768, AA192644, |
| | | | | | AA908706, AA888425, AA876810, AA167392, AA577519, AA876691, AA525477, |
| | | | | | AA879274, AI345444, C17613, AI075107, A1114490, F34539, AI492852, |
| | | | | | AA593784, AA738303, F37334, AA566072, N86742, AA886806, AA503355, |
| | | | | | AA523167, AA541429, AA876872, AI933389, AA877045, AI352526, AW050724, |
| | | | | | AI536939, AA886558, AA469371, AI694189, AA937272, AI420436, AA542813, |
| | | | | | W21397, AI418514, AA166702, AA102263, AA522721, AA166638, AA526669, |
| | | | | | AW273151, AW327392, AA999779, F17050, AI042584, AA136123, AA747343, |
| | | | | | AF117616, AL031003, L39354, L39338, L39332, U95676, U95677, U95681, |
| | | | | | L39330, L39334, U95680, U95688, AJ230596, AJ230597, AJ230599, AJ230603, |
| | | | | | AJ230605, AI230609, AJ230595, AJ230602, AJ230607, AJ230610, AJ230611, |
| | | | | | AJ230613, AI230600, M76331, M76289, M76288, M76293, M76360, M76286, |
| | | | | | M76297, M76320, M76329, M76314, M76363, M76367, M76364, M76366, M76287, |
| | | | | | M76307, M76342, M76368, M76302, M76339, M76306, U25391, U25395, U25359, |
| | | | | | U25363, U25371, M76315, M76290, M76323, U25357, U25368, U25400, M76316, |
| | | | | | U25379, M76341, M76340, U25409, M76301, M76337, M76356, U25358, U25373, |
| | | | | | U25396, U25407, AF176190, M76296, M76304, M76347, M76348, U25372, |
| | | | | | U25412, AF176182, M76361, U25390, AF176138, AF176179, AF176180, M76335, |
| | | | | | M76351, M76354, U25397, M76362, U25369, AF176174, M76305, AF176202, |
| | | | | | M76328, M76350, U25403, U25408, AF176183, AF176205, M76352, U25364, |
| | | | | | U25366, AF176161, M76330, U25410, AF176171, AF176172, AF176200, |
| | | | | | AF176201, M76333, U25388, U25399, U25405, U25406, AF176166, M76292, |
| | | | | | M76295, M76326, M76359, U25356, U25361, U25384, U25402, U25365, U25370, |
| | | | | | U25374, U25413, AF176132, AF176181, AF176194, AF176203, M76353, U25362, |
| | | | | | U25367, U25392, U25393, U25394, U25401, AF176125, AF176140, AF176141, |
| | | | | | AF176164, AF176178, AF176189, AF176199, U25377, U25378, U25398, AF176130, |
| | | | | | AF176137, AF176142, AF176158, U25404, AF176139, AF176162, AF176167, |
| | | | | | AF176175, AF176204, U25354, U25355, AF176131, AF176134, AF176144, |
| | | | | | AF176159, AF176187, M76309, U25383, AF176126, AF176128, AF176160, |
| | | | | | AF176163, AF176170, AF176185, AF176198, M76319, AF176129, AF176186, |
| | | | | | AF176193, M76324, U25381, U25382, AF176143, AF176173, AF176184, |
| | | | | | AF176133, M76355, M76346, M76299, M76291, M76294, M76312, M76283, |
| | | | | | X93341, M76325, M76334, V00661, M76303, U25411, AF176156, U25360, |
| | | | | | AF176195, X93334, U25375, U25376, L39322, L39320, L39352, L39350, L39326, |
| | | | | | L39328, L39348, U95685, L39344, U95684, AJ230601, AJ230606, M76327, U95687, |
| | | | | | AJ230614, K02485, M12531, AR058756, M76268, M76258, M76313, M76317, |
| | | | | | M76310, M76358, M76298, M76345, M76275, M76336, M76260, M76265, M76266, |
| | | | | | M76344, M76300, U25387, U25389, M76264, M76343, M76349, M76357, U25386, |
| | | | | | AF176169, U25385, M76276, AF176127, AF176168, AF176157, and AF176192. |
| HOSAR25 | 305 | 509226 | 1-319 | 15-333 | |
| HOSBR08 | 306 | 925430 | 1-94 | 15-108 | |
| HOSBU17 | 307 | 667195 | 1-569 | 15-583 | AA181322. |
| HOSBU81 | 308 | 508735 | 1-156 | 15-170 | |
| HOSBV22 | 309 | 780092 | 1-252 | 15-266 | AI368409, AI767148, AI347671, AI400068, AA954702, AI583977, AA009615, |
| | | | | | AI418746, and AI457713. |
| HOSBW16 | 310 | 933016 | 1-238 | 15-252 | AA421843. |
| HOSCG51 | 311 | 967584 | 1-421 | 15-435 | AA381761. |
| HOSCM15 | 312 | 921336 | 1-384 | 15-398 | AC005661. |
| HOSCZ35 | 313 | 707379 | 1-356 | 15-370 | AA330344, and AI005821. |
| HOSDE63 | 314 | 580959 | 1-188 | 15-202 | H15344, AI752743, R23438, AA401585, AW339993, Z44943, H06750, H50269, and |
| | | | | | H40825. |
| HOSDG51 | 315 | 523872 | 1-359 | 15-373 | |
| HOSDN27 | 316 | 530459 | 1-256 | 15-270 | |
| HOSEB61 | 317 | 741812 | 1-883 | 15-897 | N98675, and AL049781. |
| HOSEM84 | 318 | 831049 | 1-354 | 15-368 | AI073997, H87655, AA326173, AA157664, W45610, AA182685, AA352875, |
| | | | | | AA358040, and AA320365. |
| HOSFO57 | 319 | 736034 | 1-309 | 15-323 | AW363743. |
| HOSFV63 | 320 | 873010 | 1-159 | 15-173 | R32290, H56316, H56315, AI701812, AI818182, H02802, AW189354, AA179098, |
| | | | | | AI149010, AA903771, AA846152, AW236253, AI688210, AA219082, AI188637, |
| | | | | | AI457307, AW148946, AI912534, AW008419, AW149032, W56627, AA470757, |
| | | | | | AA464507, AI888588, AI056698, AW168755, AI924212, AA522891, AW089716, |
| | | | | | AW193562, AA987677, AA343171, AA769724, F35157, and AA361146. |
| HOSFY79 | 321 | 774052 | 1-417 | 15-431 | |
| HOSFZ39 | 322 | 705351 | 1-355 | 15-369 | |
| HOSGH28 | 323 | 686649 | 1-395 | 15-409 | AA364637, AA149539, AA405966, AA828153, AI032490, AA320105, AA237098, |
| | | | | | AA662590, H85808, R64617, R70883, AA838091, AA714999, AI434513, N63149, |
| | | | | | AA632765, C14480, AI471467, AW007424, AA468196, AA558404, N95156, |
| | | | | | AA729512, AA551268, AA603400, AA838161, AL041375, T05118, AA526107, |
| | | | | | AA553579, R81911, AA528566, AA728861, AW117860, AA715955, AI049630, |
| | | | | | AA548968, AI671077, AI452836, AA532732, AL118925, AI302156, AL045476, |
| | | | | | AW440451, N28624, AA612578, AA302978, F16848, N54538, AI870453, |
| | | | | | AA601237, AI249365, AA708132, AA586433, AI912401, AC005520, AC005736, |
| | | | | | AC007371, AC003973, AC007066, AL022165, AC003684, AF109907, AL008582, |
| | | | | | AC005233, AC004859, AF064861, AC005837, AC003108, AP000692, AL034379, |
| | | | | | AC008009, AL096704, Z83826, AC005839, AL022158, AL080243, U91326, |
| | | | | | AL049538, AF111168, AF051976, AC005531, AC007684, AC002558, AC008085, |
| | | | | | AC006023, AC005971, AC003669, L78810, L78760, U51561, U50871, AC003098, |
| | | | | | AC004991, AC004900, AC007845, AL035088, AL033381, AL133353, AC007637, |
| | | | | | AC016026, AL049780, AC007055, AC005486, AC005519, AC002550, AC007666, |
| | | | | | U91318, AC000052, AC004019, AC006211, AC004821, AC003951, AL021155, |
| | | | | | AB033026, AC005058, AC004782, AC006449, AC006947, AC002314, AC005015, |
| | | | | | AL049843, AP000133, AP000211, AL049735, AC005696, AC004000, AB022430, |
| | | | | | Z77852, U53583, AC005214, U89335, AL049653, AC004834, AL096757, |
| | | | | | AC004254, AB020877, AF155238, AC007129, AP000512, AC005164, AC005664, |
| | | | | | AC000025, AC005527, AC006547, AL021938, AC002044, AC005529, AL135744, |
| | | | | | AC005031, AC004712, AL133245, AL024498, AC007676, AP000358, Z93783, |
| | | | | | AL035587, AC002996, Z99716, Z93241, U80017, AL034429, AC004707, AP000353, |
| | | | | | AP000354, AL022330, AL022238, AC006487, AC005722, AC005730, AC005921, |
| | | | | | AL035405, AC002369, AC005412, AP000359, Y14768, AC004638, AC000081, |
| | | | | | AP000043, AP000111, AC005598, AC009247, AL031431, AP000212, AP000134, |
| | | | | | AP000030, AL022313, AC004909,AL049650, AC008122, AC005102, AC000159, |
| | | | | | AP000300, U43572, M84472, AP000299, AC000075, AC000084, AF039907, |
| | | | | | AC002491, AC005786, U34879, Z83847, AC004131, U82668, AF003626, |
| | | | | | AL035408, AC004897, AC005255, AC004913, AC005057, AP000504, AP000113, |
| | | | | | AP000045, AC005231, AC005004, AL031622, AL049748, Z83823, AC004259, |
| | | | | | AC006251, AL031735, AC004600, AC003043, Z84469, AC006996, AL023803, |
| | | | | | AC004534, AC005666, AC009542, AL133241, AP001053, AC009721, U91323, |
| | | | | | AC005695, AC010170, AC009330, AC005920, AL022069, AC005939, AC004216, |
| | | | | | AC007738, AFT29756, AL079305, AC010582, AL132985, AL049569, AC005332, |
| | | | | | AC004615, AC005618, AC005663, AL035079, AC006505, AC007206, AP000251, |
| | | | | | AL035249, AL031291, AL035460, Z83844, AL133448, AC000353, AC005399, |
| | | | | | U95742, AL035685, AC005115, AC006441, AC005669, AL080317, AC007450, |
| | | | | | AC006125, AC005288, AF196969, AL023584, AL078638, Z98946, AC007057, |
| | | | | | AC007216, Z82194, Z81365, U91321, and U47924. |
| HOSGJ17 | 324 | 508870 | 1-319 | 15-333 | AA430297, AI633618, andAW293ll7. |
| HOSMD84 | 325 | 959483 | 1-1036 | 15-1050 | N75110, and H71506. |
| HOSNO86 | 326 | 858938 | 1-464 | 15-478 | W19582. |
| HOSOE05 | 327 | 930946 | 1-494 | 15-508 | AW341882, AW089950, AW392414, AA768179, AI223968, AA573000, AA429481, |
| | | | | | AI142551, AA135761, AA515172, AA568127, H86579, AW236277, AI185394, |
| | | | | | AI471455, AA626840, AA666295, AW151247, AA527109, AI687343, AA368155, |
| | | | | | AI370470, AA720582, AA507526, AA662629, AA664248, F23327, AA657910, |
| | | | | | AA225100, H01852, AA702717, AA706495, R34070, AI857366, AA480486, |
| | | | | | AA469230, AA338266, AA550959, AA829565, AI521042, AI701250, AA502110, |
| | | | | | AI709174, F23338, AA503142, AA250955, AI358501, AI590404, AI624379, |
| | | | | | T48723, AI521393, C75533, AA655037, AA469441, AW083934, AI523205, T94072, |
| | | | | | AI281943, AA484892, AL048825, AA716460, AI355103, AI431513, AI635440, |
| | | | | | AW080724, AA456937, AA377318, AA773881, AW409763, AA224525, |
| | | | | | AW404666, F34506, AI923331, AA187760, AA736447, AA714110, F27015, |
| | | | | | H85059, AI123488, AI762302, AA643434, AI114657, AA362349, AW068580, |
| | | | | | AA946848, AI821382, AI678812, AA535494, AW272389, AA548710, AI668605, |
| | | | | | AI499954, Al820534, F00688, AA610374, AI679394, AI925423, AA643424, |
| | | | | | AI369076, Al679902, AA228442, AI288033, R80563, AA483483, AA856817, |
| | | | | | W28961, T53133, AA741301, AA808725, AW150167, AA559241, T70539, |
| | | | | | AA678622, AW368401, AA601212, T07903, AA298365, AA487829, AA654464, |
| | | | | | T92803, AW162555, AI811647, AA368012, AI250019, AA598740, AW019964, |
| | | | | | AA709110, AI144055, H81700, AA481779, AI733856, T59930, AI366981, |
| | | | | | AA714073, AA074351, AA572921, AA810158, AA657835, AA468923, AA206163, |
| | | | | | T03928, AA715876, F32248, F35946, H77505, AL048060, AA664169, AA581525, |
| | | | | | R87135, AA373861, AA630845, AA487209, AA992126, AA578973, F26953, |
| | | | | | AA374525, AA568856, AI289505, AI359200, T03576, AF150410, AW157005, |
| | | | | | AI356440, AA507343, AW404647, AA458573, A1114680, AL021578, AC004673, |
| | | | | | AL034421, AC011456, U96629, AC018633, AP000503, AF134726, AL034345, |
| | | | | | AL033521, AC006101, AC002994, AL049869, AL022398, AC003966, AL109952, |
| | | | | | AC004623, AL031431, AC002400, AC004773, AF196779, AL050341, AC007068, |
| | | | | | AC002404, Z83847, AL009183, Z97876, AC005102, AL109827, AP000504, |
| | | | | | AC004849, AL080243, Z94801, AC019014, AF129756, AC004901, AC005189, |
| | | | | | AC006111, AC004895, AC004999, AC006511, Z68323, AF061032, AF003626, |
| | | | | | AL117328, AC000003, AF015164, AL022147, AC004587, AC004741, X64467, |
| | | | | | AF002993, AC004531, AL133245, AP000690, AL109963, AP000689, AC004448, |
| | | | | | AP001053, AC006057, AC005562, Z83846, AL078593, AC007276, AC004645, |
| | | | | | AC005484, U91318, AC005348, U80017, AL021707, AP000355, U73479, U89337, |
| | | | | | AL049570, AL034561, AC022517, AL022345, AC004882, AL049569, AL109628, |
| | | | | | AC004084, AC006344, AC005088, AC004782, AC004209, Z99291, AP000096, |
| | | | | | AL121603, AC004020, AP000240, AP000249, AC005785, AC007312, AC006600, |
| | | | | | AC005386, AC005531, AC005516, AP000555, AC009516, AC007308, AC005257, |
| | | | | | AP001068, AC002563, AP001067, AL031121, AJ011930, U52111, AC007671, |
| | | | | | AC005971, L77035, AC004125, AC006011, AC005031, AC004041, AL008710, |
| | | | | | AC006597, AL031275, AC004796, AC006160, AC006312, AF029308, AF053356, |
| | | | | | AL079305, AC006359, AP000514, AL035682, AC004893, AC004955, AL031283, |
| | | | | | AC006552, AF077186, AB014077, AF187320, AP000347, AL121757, AC005696, |
| | | | | | AC005726, AL008635, AC007228, AC009464, AL122020, AL031230, AC005225, |
| | | | | | AC005399, AL022476, AC000159, AC005944, AP000093, Z98051, AC005207, |
| | | | | | AC004584, L78833, AC002040, U95742, AC004984, AC007381, AC004112, |
| | | | | | AL022238, AC005690, AP000468, AC005907, AJ011932, M26434, AL023578, |
| | | | | | AF030453, AC003663, AP000556, AP000557, AC004383, AF111169, AJ246003, |
| | | | | | AL020997, AP000113, AP000045, AF190465, AL049745, AC006427, AL031657, |
| | | | | | AC008372, AC004706, Z95152, AC009731, AP000237, Z83845, AF107258, |
| | | | | | AC000075, AF051976, AP000210, AP000132, AP000558, AP000553, AL049636, |
| | | | | | Z97056, AL117436, AL031668, AL121658, AP000115, AC006962, AC004506, |
| | | | | | AL024474, AC005477, AC004590, Z77249, AL035089, AL049776, AL035681, |
| | | | | | AL022240, AP001054, Z69720, AC004539, AP000510, AC006449, AC005037, |
| | | | | | AC004883, AC005305, X65032, AC003086, AP000226, AF196969, AL109758, |
| | | | | | AL022332, AC005921, AC007537, AL022163, AC003109, AP000087, AC005378, |
| | | | | | AL020995, AL022311, AC005666, AB000462, Z68279, AC006540, AC005670, |
| | | | | | AP000348, AL049590, AC005619, Z73967, AC005800, AC007279, AC008273, |
| | | | | | AC002312, AC007207, AC006251, AL021808, AC005829, AF008915, AP000312, |
| | | | | | Z74617, and U73644. |
| HRDAB18 | 328 | 509019 | 1-263 | 15-277 | AA372168. |
| HRDAB60 | 329 | 509428 | 1-323 | 15-337 | AA372225, AA514809, AA501943, and AC008082. |
| HRDAF07 | 330 | 954331 | 1-317 | 15-331 | |
| HRDAF69 | 331 | 956269 | 1-212 | 15-226 | AL022320. |
| HRDAF90 | 332 | 531026 | 1-311 | 15-325 | AB020878. |
| HRDAH91 | 333 | 525525 | 1-305 | 15-319 | |
| HRDBA76 | 334 | 534304 | 1-337 | 15-351 | Z98304. |
| HRDBC02 | 335 | 921144 | 1-599 | 15-613 | AA372229. |
| HRDBC30 | 336 | 530858 | 1-235 | 15-249 | |
| HRDBC52 | 337 | 867169 | 1-299 | 15-313 | |
| HRDBD35 | 338 | 525526 | 1-367 | 15-381 | |
| HRDBE07 | 339 | 954289 | 1-356 | 15-370 | |
| HRDBE18 | 340 | 956267 | 1-466 | 15-480 | AA253263, AA973971, and T88817. |
| HRDBE19 | 341 | 534495 | 1-381 | 15-395 | |
| HRDBE41 | 342 | 530856 | 1-370 | 15-384 | AB023049, AC006138, and AP000513. |
| HRDBG59 | 343 | 507381 | 1-300 | 15-314 | |
| HRDBI81 | 344 | 932761 | 1-303 | 15-317 | |
| HRDBJ28 | 345 | 925457 | 1-336 | 15-350 | |
| HRDBK03 | 346 | 925460 | 1-356 | 15-370 | AI694154, N58235, T40838, T40853, AA485402, AI521019, AI761393, AW068580, |
| | | | | | AI620266, C15362, AI018726, AA584493, AA324088, AA326330, T47138, |
| | | | | | AA487415, AI872229, AA614647, AA487296, AA584183, AA487209, AA558404, |
| | | | | | AI955360, R94909, R84335, H94979, AA626840, AA514450, AI243793, AI538491, |
| | | | | | AI270647, AI744933, R76565, AL039761, AA167179, AL034417, AB017602, |
| | | | | | AC005697, Z93023, AL121694, AC005874, AF134471, AC007151, AC004750, |
| | | | | | AC005568, AL034555, AP000144, AC004983, AL031668, Z30952, U07561, |
| | | | | | AC004798, Z82214, AC004988, AC005206, AC008015, AL031662, AC005667, |
| | | | | | AC005288, AC005803, AC004067, AF112441, U63721, U52112, AL109628, |
| | | | | | AC001531, AC007566, AL008718, AP000555, Z98052, AL121603, AL109967, |
| | | | | | U70984, AL109623, AC003051, AC008273, AL031053, Y11493, AC007225, |
| | | | | | AC006277, AL031388, AP000689, AL033521, AC006120, X15943, AC005514, |
| | | | | | Z97876, AF141309, Z83840, AC005231, AL022330, AC007227, AC005600, |
| | | | | | AL031667, AC004478, AC005822, AC005768, AC003690, AC005316, AC005343, |
| | | | | | AL049697, AC005317, AC005406, AC005940, AC007993, AF031076, AC005775, |
| | | | | | U89337, AF031078, AF030876, AC002477, AC003665, U52111, AL096791, |
| | | | | | AC005736, AL021394, AC004149, AC005480, AF196970, AL133448, AL022401, |
| | | | | | AC004477, AC005755, AL050348, AL021578, AC005799, Z83844, AC002991, |
| | | | | | Z97635, AC004973, AL009051, AF196972, L78810, AC005146, AC005036, Z97054, |
| | | | | | AC005529, AL034420, AC002091, AL031597, AC006388, AC004953, AL031432, |
| | | | | | AC006948, AC006449, AJ003147, AC005412, AP000493, AC003036, Z93016, |
| | | | | | AC003002, AC005694, AL021707, AC007541, Z68192, AL022311, AC006130, |
| | | | | | AF015416, AC003661, AC005193, AC005184, AC007738, AC005919, AL080243, |
| | | | | | AC002364, AC006132, AC004414, AC004167, AF107885, AP000277, AC004034, |
| | | | | | AC004651, AC006293, AF184110, and AC004922. |
| HRDBL61 | 347 | 575229 | 1-336 | 15-350 | AW139046. |
| HRDBL75 | 348 | 524423 | 1-254 | 15-268 | |
| HRDBM42 | 349 | 530849 | 1-361 | 15-375 | |
| HRDBQ18 | 350 | 954274 | 1-380 | 15-394 | U53331. |
| HRDBQ38 | 351 | 533939 | 1-310 | 15-324 | AA513046. |
| HRDBQ64 | 352 | 879705 | 1-478 | 15-492 | AL079303, AL133355, M15366, U91323, AL049569, AF217403, AF165124, |
| | | | | | AC006111, Z84488, and AC006241. |
| HRDBQ82 | 353 | 533947 | 1-401 | 15-415 | |
| HRDBR04 | 354 | 927900 | 1-340 | 15-354 | |
| HRDBR35 | 355 | 867167 | 1-303 | 15-317 | |
| HRDBT72 | 356 | 507847 | 1-340 | 15-354 | |
| HRDBU70 | 357 | 971700 | 1-75 | 15-89 | AL049745. |
| HRDCA61 | 358 | 921128 | 1-442 | 15-456 | |
| HRDCB18 | 359 | 968554 | 1-336 | 15-350 | |
| HRDCD12 | 360 | 921796 | 1-419 | 15-433 | |
| HRDDF49 | 361 | 867159 | 1-121 | 15-135 | |
| HRDDF95 | 362 | 967837 | 1-434 | 15-448 | |
| HRDDH84 | 363 | 867156 | 1-470 | 15-484 | AA287503. |
| HRDDN54 | 364 | 932764 | 1-301 | 15-315 | AC004853. |
| HRDDN90 | 365 | 531117 | 1-310 | 15-324 | AF015262, and AI229043. |
| HRDDY26 | 366 | 526783 | 1-153 | 15-167 | |
| HRDDY73 | 367 | 574336 | 1-439 | 15-453 | |
| HRDDZ76 | 368 | 574324 | 1-113 | 15-127 | AC002210, and AC004227. |
| HRDEB78 | 369 | 526861 | 1-284 | 15-298 | |
| HRDEC91 | 370 | 747169 | 1-627 | 15-641 | |
| HRDED92 | 371 | 936045 | 1-296 | 15-310 | AL139054. |
| HRDEG76 | 372 | 574326 | 1-310 | 15-324 | |
| HRDEJ76 | 373 | 574335 | 1-152 | 15-166 | |
| HRDEK44 | 374 | 574380 | 1-210 | 15-224 | |
| HRDEL91 | 375 | 790374 | 1-204 | 15-218 | T84539, AI858864, AL034553, Z85986, AC005288, L78833, AL049576, AL021707, |
| | | | | | AC007919, AL133163, AP000694, AL109799, AC005049, Y10196, AC003007, |
| | | | | | AL049839, AC005057, Z81308, AL023553, AL122020, AL049757, AC005632, |
| | | | | | U62293, AL031281, AL022163, AP000509, AC006530, AC006468, AC005253, |
| | | | | | AC006449, AL035088, AP000692, AC003663, AC004126, AC004526, AP000044, |
| | | | | | AP000112, AC005581, AP000023, AJ246003, AC005231, AC002301, AC006112, |
| | | | | | Z82178, AL031681, AC005746, AC005722, AC002431, AL121603, AC012627, |
| | | | | | AC006285, AC003101, AC007052, and AC005081. |
| HRDEO12 | 376 | 867140 | 1-279 | 15-293 | AA745407, T52786, AA757869, AA320095, AA779599, AA508103, AA302763, |
| | | | | | F07564, AA745388, AW440424, AA366676, AI002863, AA424249, AA112791, |
| | | | | | AA084148, AA713720, AA083850, AA993165, AA339592, AA351808, AA362440, |
| | | | | | AA508882, AA496309, AA856815, AA230075, AA347203, AA496941, AA336058, |
| | | | | | AA744063, M86139, AI940546, AA015948, AI929418, AI929460, AA454504, |
| | | | | | H27788, AA748840, AI032411, AA768079, AI701898, AA010265, AA372231, |
| | | | | | AW028376, AI345256, T31290, AI571094, AA629939, X84712, AA372389, |
| | | | | | AA383937, AA297496, AA085372, AI337065, AA349923, AA736488, AA368329, |
| | | | | | AI445338, AW407007, AA744018, AA579044, AA557727, AA364006, AW377912, |
| | | | | | AA084950, AA338216, AW157128, AA812542, H87818, AL109801, AL133243, |
| | | | | | Z98036, AC007283, AL031767, AC004895, AL035658, AL034429, AF001548, |
| | | | | | AL132777, AC004893, AC004491, AL031283, AC006509, AC007688, AL021546, |
| | | | | | AF047825, AC007157, AL035454, AC005670, AC006088, AL049830, AC002425, |
| | | | | | U07561, AC005971, M63796, AC003043, AL049538, Z83844, AC012085, |
| | | | | | AC006312, AP000501, AC004158, AC004019, AC005330, AC004985, AL022336, |
| | | | | | AC007240, AC009247, AC004967, AL021453, Z82176, AL135960, AJ131016, |
| | | | | | AC007052, AP000349, AB008681, AC006946, AC004000, AC006148, AP000032, |
| | | | | | AC006101, AC005231, AC006006, AC004223, AL022316, U62293, Z82206, |
| | | | | | AL031295, AL031589, AC008928, AF064857, AF165926, AL117258, AC005057, |
| | | | | | AF134726, AL023775, Z82244, AL035455, AC006130, AL121934, AL117391, |
| | | | | | Z84480, AL034582, AC005516, AC009501, AC002126, AC005740, AL031657, |
| | | | | | AC005015, L05367, AD001527, AC005500, AC004815, AC005081, AC000159, |
| | | | | | AL031650, AC005940, Z95152, AC007367, AL049539, AF207550, AC004520, |
| | | | | | Z95889, AC007541, AC005786, AP000047, AL109628, U02057, AC007686, |
| | | | | | AL049764, AC003690, AL022721, AC004098, AC005871, AL049760, AC006084, |
| | | | | | AC005482, AC005581, AF001549, AC006441, AL031121, AF111168, Z70281, |
| | | | | | AC005599, AP000133, AP000211, AC006141, AL021808, AP000117, AC002350, |
| | | | | | AC004820, AL121658, Z99128, AC005778, AC004526, AP000500, AC004253, |
| | | | | | AC005060, AF111170, AB020868, AC004132, AC006511, AC006965, AL133448, |
| | | | | | AC003086, AL021394, AL031311, AC002369, AC004650, AL031291, U63721, |
| | | | | | AC004922, AL049569, AL031775, AC005565, AC011594, AP000050, AL049843, |
| | | | | | AL020997, AF042089, AL050348, AC004883, AL021392, AL008719, AL035696, |
| | | | | | AL024507, AL023880, AC006071, AP000269, AC006013, AL109952, AL031005, |
| | | | | | AC007243, AL033397, AP000555, AC005512, AC004914, AP000115, AC000070, |
| | | | | | AC004707, U89336, AC002395, AL121754, AL109963, AJ011930, AL035588, |
| | | | | | AC006162, AL117329, AC006063, U47924, AB014087, AC007917, AC008101, |
| | | | | | AC004084, AL008631, AF222684, Z97630, AL035249, AL080243, U81031, |
| | | | | | AC000028, Z93244, AP000116, AF129756, AL031433, AC005049, AC006505, |
| | | | | | AL049776, AC002314, AJ246003, AL080250, AC004856, AC002094, AC008009, |
| | | | | | AL096701, AL035457, AC016027, AP000103, AL096712, AL117330, AC005793, |
| | | | | | AC004188, AC006930, AL022163, AC016830, AC005484, AC004190, AC005531, |
| | | | | | AL022398, AC005914, AC007327, AF195658, AC004832, AL050341, AL035659, |
| | | | | | AL109956, AL031577, AC002470, AF124730, AC006360, AC005695, AL135744, |
| | | | | | and AC005235. |
| HRDEO76 | 377 | 952894 | 1-606 | 15-620 | |
| HRDEP31 | 378 | 766222 | 1-205 | 15-219 | |
| HRDEP75 | 379 | 574431 | 1-366 | 15-380 | |
| HRDEQ30 | 380 | 506774 | 1-314 | 15-328 | AI051942. |
| HRDEQ96 | 381 | 507543 | 1-446 | 15-460 | AA634654. |
| HRDES52 | 382 | 867115 | 1-340 | 15-354 | |
| HRDES65 | 383 | 526823 | 1-395 | 15-409 | |
| HRDET67 | 384 | 825182 | 1-333 | 15-347 | |
| HRDET91 | 385 | 827084 | 1-426 | 15-440 | |
| HRDEU33 | 386 | 572905 | 1-306 | 15-320 | |
| HRDEU42 | 387 | 881296 | 1-323 | 15-337 | |
| HRDEU43 | 388 | 765813 | 1-146 | 15-160 | N95696, AA683130, N95587, N95562, and AL021368. |
| HRDEU61 | 389 | 575566 | 1-405 | 15-419 | |
| HRDEU78 | 390 | 573031 | 1-321 | 15-335 | AC004031. |
| HRDEU93 | 391 | 844316 | 1-449 | 15-463 | R97129, and Z92544. |
| HRDEV13 | 392 | 574442 | 1-107 | 15-121 | |
| HRDEW02 | 393 | 848793 | 1-319 | 15-333 | R69655, AA504728, AW197426, AW239197, R61016, L44427, H09430, N98902, |
| | | | | | Z42694, AA432395, and AA337216. |
| HRDEW30 | 394 | 526812 | 1-482 | 15-496 | Z68226. |
| HRDEW90 | 395 | 574288 | 1-415 | 15-429 | AC003077. |
| HRDEY14 | 396 | 574438 | 1-485 | 15-499 | AC009263. |
| HRDEZ06 | 397 | 936072 | 1-402 | 15-416 | |
| HRDEZ54 | 398 | 867127 | 1-461 | 15-475 | |
| HRDEZ60 | 399 | 919386 | 1-208 | 15-222 | AI949774, AA493365, AI039944, AI332543, AW082899, AW157648, AA300420, |
| | | | | | AA706469, R88367, AI969957, and AI167160. |
| HRDEZ64 | 400 | 536668 | 1-66 | 15-80 | |
| HRDEZ84 | 401 | 575553 | 1-474 | 15-488 | |
| HRDFB47 | 402 | 508001 | 1-316 | 15-330 | AI932599, AA486559, AW002350, AA719531, AI345418, Z18873, AI144101, |
| | | | | | AC005332, AC007546, AC004686, AL096791, AC007773, AC005736, AL022165, |
| | | | | | U50871, AL121655, AC002350, Z69838, AC002492, AC006064, AC004526, |
| | | | | | AL049759, AC005488, AL049636, AC005531, AC006449, AC008372, AC002992, |
| | | | | | AL031680, AC007308, AC005207, AC004033, AC003689, AC004797, AC005225, |
| | | | | | AC005081, AL035420, Z98743, AL020993, AC009247, AL049569, AC006285, |
| | | | | | AP000510, AL133246, AC002400, AL031291, AL109758, AC005412, AC004382, |
| | | | | | AC005829, AL022476, AJ229042, AC005632, AC006006, AC005703, AC016027, |
| | | | | | AC006581, AC016830, AL035413, AF129756, U91323, AC005324, AC005071, |
| | | | | | AC002395, AC004832, AL022326, AL049776, AC005015, D84394, AC004477, |
| | | | | | U80017, AP000086, AC002565, AL034548, AF015723, AL096701, AL049709, |
| | | | | | AC004821, AC004983, AC005037, AC005667, AP000117, AC009509, AL035683, |
| | | | | | AC007182, AC000353, U95742, AL049694, AL009183, AC007686, Z98884, |
| | | | | | Z84484, AC007216, U95090, AL049869, AC008018, AC005206, AC005104, |
| | | | | | Z97196, AL050307, AL133448, AC006121, AC006538, AC006160, AC005520, |
| | | | | | AC005924, AC004887, AC004087, AC008045, AC008119, AC004638, AC007435, |
| | | | | | AC002404, AL049539, AL133163, Z83822, AC000003, AL035086, AL117258, |
| | | | | | U07000, U93237, and AC002091. |
| HRDFB78 | 403 | 589478 | 1-402 | 15-416 | Z78337, AW375353, U55777, T60176, AA364491, AI140371, AW393482, |
| | | | | | AW387144, AW402704, AA338532, and T30802. |
| HRDFC68 | 404 | 574205 | 1-384 | 15-398 | Z94044. |
| HRDFE73 | 405 | 574142 | 1-322 | 15-336 | |
| HRDFE74 | 406 | 765750 | 1-301 | 15-315 | AI452477, AA526633, AC006211, AL031276, AC004893, AL096712, AC000025, |
| | | | | | AC003687, AL109760, and AC003101. |
| HRDFF42 | 407 | 953913 | 1-78 | 15-92 | |
| HRDFF62 | 408 | 574436 | 1-508 | 15-522 | T77462. |
| HRDFG25 | 409 | 574433 | 1-332 | 15-346 | |
| HRDFG37 | 410 | 792517 | 1-280 | 15-294 | |
| HRDFG46 | 411 | 574439 | 1-365 | 15-379 | |
| HRDFH14 | 412 | 575578 | 1-149 | 15-163 | |
| HRDFH24 | 413 | 575245 | 1-423 | 15-437 | AI284640, W00807, AI291124, R97934, AI471481, AI282832, AA862173, |
| | | | | | AI245679, AA947811, AA362349, AA507547, AW265009, AI801600, AI889781, |
| | | | | | AI357551, AA515224, AI439210, AA806796, AA828704, AA810370, AA348929, |
| | | | | | AA775940, AW339568, F34498, AA557686, M86143, T07451, T05101, AA654771, |
| | | | | | AI457397, AA593247, AI866908, AA584201, AA513293, AI358571, AI291268, |
| | | | | | AI281697, AA678436, AA578861, AA213741, AA493708, AI298710, AA661948, |
| | | | | | H86305, AA669840, AW089322, AA513141, AI049634, AA831375, AI564185, |
| | | | | | AA554319, AI364809, AA525824, AI500454, H51714, AA259245, AA713891, |
| | | | | | AA491284, AI561255, AL046409, AA610611, AW327868, AW338086, AA603156, |
| | | | | | AW103758, AI358343, AI499938, AA579075, AA348017, AA649722, AA346458, |
| | | | | | AA492166, AA847985, AA908468, N25296, AL042853, T41242, AI904894, |
| | | | | | AW265385, AA244357, AA502103, AA649542, AA649484, AA503283, AW168342, |
| | | | | | AW193609, AI859251, F33121, AI888008, AA665330, AA426277, AW265699, |
| | | | | | AI358501, AA630925, F04987, AA503284, AA225246, AI475569, AA916371, |
| | | | | | D83989, M87919, X75335, S70707, U67827, U67829, M37547, AF077058, M37551, |
| | | | | | X55923, AB023052, AC006203, AP000513, M87925, U14706, AC002536, Z94721, |
| | | | | | AC002301, U73024, AC004821, AL031736, AF015151, AC006138, AL031685, |
| | | | | | Y10196, AC005324, U14716, AF015156, U14713, AL133245, AL022238, |
| | | | | | AL096707, AC005622, AC006292, AL035681, AC016830, AF018071, D87675, |
| | | | | | D13624, AC007731, AL109984, AL078613, M19045, J03801, E01888, E02193, |
| | | | | | AL022727, AC006449, AC006004, AL122003, AC002380, AP000141, AC004388, |
| | | | | | AC007546, AB020863, S43650, AC007050, AC004263, AC005261, U07562, |
| | | | | | AL132987, AC006274, AL021368, AC010175, L49046, Z68223, AR047856, |
| | | | | | AC004687, AP001172, AF042090, AC004076, AC007064, AC007363, AF129756, |
| | | | | | AC005900, AC005280, AC006057, AC008039, AC005682, AC008124, AP000326, |
| | | | | | AP000353, AL021937, AC004853, AC002059, AL121934, AL022067, AC004151, |
| | | | | | AP000054, AP000169, AP000359, AC000067, AC005940, Z68192, AL021154, |
| | | | | | AC002480, Z69917, AL110172, AC002073, AL031729, AL022237, S75337, U14695, |
| | | | | | AC006959, AC004858, AC000120, U14710, AL023656, AL117352, AC004408, |
| | | | | | AL031281, AC005771, AC003688, AC002070, AL133371, AC006352, AL008709, |
| | | | | | AL035587, U91326, AL109612, AC006123, AL117258, AC005484, AL008629, |
| | | | | | AC005158, AC006079, AL035695, AL031123, AL080276, AC007450, AF109907, |
| | | | | | AP000122, AC007043, AC005563, X14008, AC004209, AC006001, AC010077, |
| | | | | | AC005703, AC004030, AC004901, AC004895, AC006998, D25272, U69569, |
| | | | | | AC006960, AL031224, AL117354, AP000517, Z92540, AL035496, AC005837, |
| | | | | | AC006285, AL049643, AC007536, AC009516, AC008115, AC007262, U14712, |
| | | | | | AC004638, AF132033, U95740, AC000086, AC006064, AP000349, AC004653, and |
| | | | | | AL035249. |
| HRDFH25 | 414 | 953882 | 1-370 | 15-384 | |
| HRDFH39 | 415 | 574558 | 1-364 | 15-378 | |
| HRDFH77 | 416 | 953673 | 1-422 | 15-436 | |
| HRDFI13 | 417 | 574561 | 1-363 | 15-377 | |
| HRDFJ71 | 418 | 574553 | 1-406 | 15-420 | |
| HRDFK03 | 419 | 924925 | 1-464 | 15-478 | AW410890, AL079806, and AB007931. |
| HRDFK41 | 420 | 867106 | 1-315 | 15-329 | AI002928, AA804808, N55076, AA018258, AA804694, AC004983, AC004775, |
| | | | | | AC005225, AC005519, AL096791, AL031680, AC005291, AL022311, AC003072, |
| | | | | | AC004383, Z98949, AC006285, AL031602, AL021579, AL031985, AC005399, |
| | | | | | AP000113, AP000045, AL109623, Z84469, AC005755, AC007421, AC002395, |
| | | | | | AL022316, AP000555, AC002477, AF045555, Z94801, U66532, Z97056, AC007021, |
| | | | | | AL096701, AC005914, U95741, AL022238, AL049759, AC005696, AC005666, |
| | | | | | AC007225, AC004884, AF109907, AC016025, Y11107, AL008710, M26434, |
| | | | | | U47924, AC006388, Y14768, AP001054, AC005081, AF064861, AC005218, |
| | | | | | AF001548, AC009225, AC005730, AC006367, AC006101, AC005940, AC009509, |
| | | | | | AC005632, AL008718, AC004975, AC007283, and AC006362. |
| HRDFM18 | 421 | 574435 | 1-108 | 15-122 | |
| HRDFN95 | 422 | 574565 | 1-116 | 15-130 | |
| HRDFQ64 | 423 | 733847 | 1-256 | 15-270 | AA832055, AA077542, AA770651, AC004987, and AL133216. |
| HRDFQ75 | 424 | 525524 | 1-240 | 15-254 | AL132987. |
| HRDFT06 | 425 | 867109 | 1-389 | 15-403 | |
| HRDFT15 | 426 | 574549 | 1-415 | 15-429 | |
| HRDFT45 | 427 | 506584 | 1-530 | 15-544 | AC004142. |
| HRDFT84 | 428 | 584823 | 1-445 | 15-459 | AA309894, A8009022, AB012143, AB012142, AF025654, AF034568, AF025653, |
| | | | | | AB009023, and AB009024. |
| HRDFU48 | 429 | 573030 | 1-301 | 15-315 | |
| HSHAX53 | 430 | 518795 | 1-302 | 15-316 | |
| HSHBV66 | 431 | 523348 | 1-323 | 15-337 | |
| HSHBV67 | 432 | 529483 | 1-308 | 15-322 | AC007536, and Z97832. |
| HSHCF34 | 433 | 529313 | 1-214 | 15-228 | AL035415. |
| HSKCS36 | 434 | 529163 | 1-233 | 15-247 | |
| HSKCT33 | 435 | 866514 | 1-297 | 15-311 | |
| HSKDA70 | 436 | 757183 | 1-599 | 15-613 | W49690, AA284238, W49689, AI950805, AI085909, AI457351, AI866940, |
| | | | | | AW013806, AI246901, AW051765, AI739482, AA394133, AI380566, AI921768, |
| | | | | | AI827273, AI860590, AW009629, AI768051, AI392972, W45591, W45590, |
| | | | | | AI022944, and AB017614. |
| HSKDJ16 | 437 | 661928 | 1-330 | 15-344 | AL049464. |
| HSKEF43 | 438 | 866410 | 1-301 | 15-315 | |
| HSKEK63 | 439 | 744336 | 1-376 | 15-390 | AA372904, C16438, AW380254, AW168420, AA534258, AI674174, AA372949, |
| | | | | | T39494, AC005331, AC006013, AL022311, AC004827, Z99570, AL020997, |
| | | | | | AJ010770, Z93023, AC005746, AP000505, AC006007, AC007546, Z75741, |
| | | | | | AC002563, AL024498, AL021546, AC007845, AC002398, Z94722, AC004815, |
| | | | | | AC004703, AL133404, AC004526, Y14768, AC005482, AC005200, AC005039, |
| | | | | | AC002319, AL021451, AC004099, AC004884, AC008119, AC005324, Z95152, |
| | | | | | M29929, AC007877, AC006112, AF129756, AC003101, AF107885, AL031320, |
| | | | | | U82828, AF007136, AC004976, Z69666, AL031668, AC004953, AC006965, |
| | | | | | AF196779, AF064751, AC005355, AC004702, Z81314, AC002541, Z69388, U91318, |
| | | | | | L47234, AC008273, AP000690, AC004152, AF002997, AL031117, AC009784, |
| | | | | | AF111169, AC004106, AL109628, AC004148, AC004253, U07562, and AP000318. |
| HSKEM02 | 440 | 969071 | 1-426 | 15-440 | AA143157, AA063324, N57369, W81341, and AL133355. |
| HSKET11 | 441 | 967000 | 1-414 | 15-428 | |
| HSKHJ11 | 442 | 965002 | 1-433 | 15-447 | Z98046. |
| HSKHS71 | 443 | 911592 | 1-367 | 15-381 | |
| HSKIT38 | 444 | 855173 | 1-369 | 15-383 | |
| HSKJS05 | 445 | 930979 | 1-64 | 15-78 | AA731590. |
| HSKKD70 | 446 | 916984 | 1-563 | 15-577 | |
| HSKKL06 | 447 | 934040 | 1-646 | 15-660 | |
| HSKNO53 | 448 | 728210 | 1-521 | 15-535 | AW275953. |
| HSKWA56 | 449 | 916496 | 1-423 | 15-437 | |
| HSKWA78 | 450 | 731756 | 1-516 | 15-530 | |
| HSKWA79 | 451 | 733394 | 1-488 | 15-502 | W90331, AA398850, and AA435854. |
| HSKXG06 | 452 | 935455 | 1-312 | 15-326 | |
| HSKXJ15 | 453 | 866373 | 1-437 | 15-451 | AL117340. |
| HSKXN20 | 454 | 668928 | 1-290 | 15-304 | AI610572, AA494027, AW089962, AW020620, AW021195, AP000703, Y10196, |
| | | | | | AC004079, AL080243, AP000702, AC005067, AC005874, AF134471, AC006453, |
| | | | | | AL031255, AL031733, AL049767, AC007450, AC005089, Z83836, U95090, |
| | | | | | AP000347, AC005803, AP000352, AC002381, Z98048, AL033397, AC005777, |
| | | | | | AC005265, AC005696, Z98200, AL024507, and AC002117. |
| HSKXP58 | 455 | 955073 | 1-352 | 15-366 | AA372956, AL031737, AP000553, AC004491, Z83826, AL050318, L78810, |
| | | | | | AC005484, AC007685, AL078602, AC005667, AC007298, AF049895, AC004699, |
| | | | | | and AC005206. |
| HSKXQ58 | 456 | 736045 | 1-376 | 15-390 | AI810143, AI799021, AI347650, AW020141, AA143516, AA551503, H56729, |
| | | | | | N29948, N54304, AA601919, AA079101, AW089810, H79394, AW402170, |
| | | | | | AI580898, AL031257, AL022719, AL021808, AC008123, AC003007, AC005632, |
| | | | | | D86864, AC005776, AC005539, AC005262, AL022315, AP000126, AP000204, |
| | | | | | AC005252, AP000556, AP000244, AP000557, AC007050, AC007308, X89398, |
| | | | | | AL031280, AC007637, AF087913, AC005251, AP000150, AP000009, AC006016, |
| | | | | | D28877, AC005071, AC004019, AC006137, AL031386, and AC003684. |
| HSKYG66 | 457 | 698007 | 1-333 | 15-347 | AI209100. |
| HSKYH52 | 458 | 466574 | 1-419 | 15-433 | |
| HSKYJ96 | 459 | 921032 | 1-346 | 15-360 | |
| HSKZE12 | 460 | 970639 | 1-104 | 15-118 | |
| HSKZE32 | 461 | 959400 | 1-273 | 15-287 | AA464651, H60107, AA419210, R11432, AW151815, and AC006254. |
| HSLAB77 | 462 | 772652 | 1-301 | 15-315 | AC007392. |
| HSLBO30 | 463 | 574086 | 1-198 | 15-212 | |
| HSLBW19 | 464 | 671738 | 1-212 | 15-226 | |
| HSLBX08 | 465 | 959911 | 1-257 | 15-271 | Z95152. |
| HSLBX20 | 466 | 574004 | 1-422 | 15-436 | AC005922. |
| HSLBZ91 | 467 | 573987 | 1-281 | 15-295 | |
| HSLCB15 | 468 | 693455 | 1-619 | 15-633 | H24866, AA031368, W47079, W46779, H84840, N30984, W32033, AA018530, |
| | | | | | H26464,N40269, AA459816, AA296636, AI751106, W19406, R24391, R21973, |
| | | | | | AA370945, AW366386, AA374691, N40640, H39859, AA296525, AA446165, |
| | | | | | AW377667, AA322178, AI366199, N28622, AW367978, AA382270, T85743, |
| | | | | | AA337106, AI684270, AW367975, R57416, Z92846, and AF125535. |
| HSLCJ46 | 469 | 529622 | 1-265 | 15-279 | AL096677. |
| HSLCJ47 | 470 | 908627 | 1-352 | 15-366 | |
| HSLCL38 | 471 | 951028 | 1-232 | 15-246 | |
| HSLCP75 | 472 | 529631 | 1-340 | 15-354 | E08867. |
| HSLCV95 | 473 | 793080 | 1-315 | 15-329 | |
| HSLDA25 | 474 | 679301 | 1-370 | 15-384 | |
| HSLDB29 | 475 | 866340 | 1-424 | 15-438 | |
| HSLDC06 | 476 | 936010 | 1-259 | 15-273 | AI672480. |
| HSLDG13 | 477 | 913664 | 1-325 | 15-339 | |
| HSLDI16 | 478 | 574014 | 1-202 | 15-216 | |
| HSLDJ24 | 479 | 574050 | 1-349 | 15-363 | I09483, I09484, and I09485. |
| HSLDJ94 | 480 | 753657 | 1-447 | 15-461 | |
| HSLDK43 | 481 | 675440 | 1-521 | 15-535 | |
| HSLDM32 | 482 | 699486 | 1-299 | 15-313 | |
| HSLDM79 | 483 | 526740 | 1-335 | 15-349 | |
| HSLDP16 | 484 | 573210 | 1-433 | 15-447 | |
| HSLDW65 | 485 | 689722 | 1-416 | 15-430 | |
| HSLEB25 | 486 | 669654 | 1-389 | 15-403 | |
| HSLEC25 | 487 | 572859 | 1-400 | 15-414 | |
| HSLEC36 | 488 | 936003 | 1-365 | 15-379 | |
| HSLED38 | 489 | 709381 | 1-506 | 15-520 | |
| HSLED42 | 490 | 572860 | 1-375 | 15-389 | |
| HSLEE46 | 491 | 572878 | 1-322 | 15-336 | |
| HSLEF89 | 492 | 572883 | 1-346 | 15-360 | |
| HSLEG74 | 493 | 825500 | 1-385 | 15-399 | AI526055. |
| HSLEH57 | 494 | 584090 | 1-130 | 15-144 | F07221, AA307815, N99978, AI660617, AI906507, AW166174, W30916, |
| | | | | | AA877685, AI692837, and AA434201. |
| HSLEJ22 | 495 | 572863 | 1-304 | 15-318 | |
| HSLEL46 | 496 | 573212 | 1-275 | 15-289 | |
| HSLEO70 | 497 | 841952 | 1-354 | 15-368 | AL048938, AW385766, AA417805, AA134623, AW239566, AA075905, AA167826, |
| | | | | | AA134649, AA375645, AW005427, and AI424382. |
| HSLFE34 | 498 | 706986 | 1-396 | 15-410 | |
| HSLFF91 | 499 | 572885 | 1-413 | 15-427 | AI095822, AI827514, AA909148, AI635994, AI339613, AI242071, and AI343397. |
| HSLFM86 | 500 | 785489 | 1-427 | 15-441 | |
| HSLFS42 | 501 | 948740 | 1-287 | 15-301 | |
| HSLFS45 | 502 | 717782 | 1-360 | 15-374 | |
| HSLFT76 | 503 | 725788 | 1-382 | 15-396 | |
| HSLFT89 | 504 | 786061 | 1-378 | 15-392 | |
| HSLFU01 | 505 | 916448 | 1-404 | 15-418 | |
| HSLGD23 | 506 | 675872 | 1-436 | 15-450 | |
| HSLGH26 | 507 | 681705 | 1-426 | 15-440 | |
| HSLGK79 | 508 | 774049 | 1-377 | 15-391 | |
| HSLGV91 | 509 | 780005 | 1-428 | 15-442 | |
| HSLGX20 | 510 | 669648 | 1-424 | 15-438 | |
| HSLHA55 | 511 | 866273 | 1-392 | 15-406 | AI699746, AI869424, AA484365, AA015948, AA788575, AI003051, AA598608, |
| | | | | | AA814719, AA463832, AA243128, AI798714, AA015753, AW148821, AI002786, |
| | | | | | AI383589, W21030, AA665411, AI000381, AI445699, AA846014, AA493245, |
| | | | | | AI791664, AA455804, AI702049, AL138262, AW192930, AI734158, AA455202, |
| | | | | | AL121039, AI734193, AW410844, AI064968, AA653228, D25266, AL038971, |
| | | | | | AA584738, AI167784, AA226133, AI800445, AA300049, AI016729, AW265468, |
| | | | | | AW085626, Z97206, AL022147, Z97181, AC007842, Z84480, AF053356, |
| | | | | | AF006501, AL031622, Z97056, AL031587, AL031117, AC007371, AL109628, |
| | | | | | AL024507, AC005399, AC005409, U82672, AC005565, AC007151, AC007676, |
| | | | | | AC004914, Z86090, X69907, D87008, AC000040, AI250235, AC004663, D88268, |
| | | | | | AL096757, Z83851, AC005914, AC007690, AC007541, AL117329, AC005375, |
| | | | | | AC004067, AC005531, AC006198, AC005772, AC008040, AF053139, M94634, |
| | | | | | AC005368, AF111169, AC005345, AC000387, AC006006, L47222, AC006261, |
| | | | | | AC005808, AL035079, AC004020, AC002456, AL121595, AC005391, AC005379, |
| | | | | | AL035400, AL021937, AC004785, AJ010598, AC006285, AC009336, AL050333, |
| | | | | | AC004815, AF064865, AC004832, AC005060, D83402, Z69650, AP000227, |
| | | | | | AC002120, Z49918, Z68277, AC005256, AC006138, Z15025, AC002106, |
| | | | | | AC007565, AC005214, AC007536, AL022144, AF038458, AF190465, AP000087, |
| | | | | | AP000513, AL008731, AL020993, AC005033, AC007899, AC005277, AF064866, |
| | | | | | AB023049, Z98950, AC006509, AP000689, AC005844, AL021578, AL031311, and |
| | | | | | AL079342. |
| HSLHC22 | 512 | 673918 | 1-440 | 15-454 | R64409. |
| HSLHP20 | 513 | 669210 | 1-418 | 15-432 | |
| HSLIA21 | 514 | 668116 | 1-388 | 15-402 | |
| HSLIG54 | 515 | 713982 | 1-382 | 15-396 | |
| HSLII61 | 516 | 918071 | 1-458 | 15-472 | W19840, R50853, AA482385, T72743, H21057, T72748, R10320, and W01711. |
| HSLIJ57 | 517 | 659533 | 1-377 | 15-391 | |
| HSLJB11 | 518 | 966227 | 1-131 | 15-145 | Z83844. |
| HSLJJ21 | 519 | 670330 | 1-329 | 15-343 | A40155, and A40156. |
| HSLJJ83 | 520 | 727874 | 1-295 | 15-309 | AC007193. |
| HSLJK88 | 521 | 923108 | 1-203 | 15-217 | AI914865, AW377768, AA767396, AA975495, AA972715, AI991550, AL132776, |
| | | | | | and AB018319. |
| HSLJN31 | 522 | 750394 | 1-337 | 15-351 | |
| HSLJN49 | 523 | 920062 | 1-448 | 15-462 | |
| HSLJN61 | 524 | 966267 | 1-485 | 15-499 | AI014258, and D89677. |
| HSLJN71 | 525 | 759941 | 1-335 | 15-349 | |
| HSLJQ31 | 526 | 961447 | 1-427 | 15-441 | H02450, R32623, AA349144, R11455, R27382, AA599094, N31153, N25174, |
| | | | | | N35733, H12488, AA082514, W60949, R06834, N26982, H04870, AW361043, and |
| | | | | | AB020685. |
| HSLJW53 | 527 | 866261 | 1-240 | 15-254 | AA872180, AW304637, AI927741, R14941, T80162, AA702988, AA226346, |
| | | | | | AA134007, AI216978, AI358513, AA634227, AI151261, AI826253, AA662431, |
| | | | | | AA766883, AW028950, AA838162, AA297145, AA706845, T87973, AC006211, |
| | | | | | AL078639, AP001137, AP000325, AP000168, AP000054, AP000122, AC006344, |
| | | | | | AF196969, AL080239, AP110527, L78833, AC004876, AD000092, AL117330, |
| | | | | | AC004859, AL022476, AC004833, AC005476, Z83840, AC006441, AC006581, |
| | | | | | Z58851, AC005233, AC004057, AL035398, AC002365, AC003046, AC007371, |
| | | | | | AC007537, AL049776, AL022318, AC007868, AC005089, AC002400, AC007551, |
| | | | | | AC002470, AC007308, AF141325, AL121593, AC007377, M55523, AC004522, |
| | | | | | AC004817, AC007263, AC008498, AC005914, AL034420, AC004858, AC002476, |
| | | | | | AF109907, and D87675. |
| HSLKC70 | 528 | 866256 | 1-410 | 15-424 | |
| HSRAX95 | 529 | 747078 | 1-311 | 15-325 | Z68164. |
| HSRBE02 | 530 | 921205 | 1-341 | 15-355 | W79904, R73478, H42289, and AL137459. |
| HSRDE58 | 531 | 519542 | 1-208 | 15-222 | AC000378. |
| HSRDI39 | 532 | 921749 | 1-381 | 15-395 | AL117454. |
| HSRDJ68 | 533 | 530333 | 1-244 | 15-258 | AL080190. |
| HSRDK92 | 534 | 838033 | 1-209 | 15-223 | AF095719. |
| HSRDL32 | 535 | 530294 | 1-261 | 15-275 | AL045354. |
| HSRDM42 | 536 | 523843 | 1-136 | 15-150 | |
| HSRDN23 | 537 | 530334 | 1-200 | 15-214 | AC005703. |
| HSRDQ89 | 538 | 780221 | 1-178 | 15-192 | |
| HSRDS77 | 539 | 530289 | 1-230 | 15-244 | AC000026, and AC002059. |
| HSREB43 | 540 | 524678 | 1-272 | 15-286 | |
| HSREC27 | 541 | 753810 | 1-296 | 15-310 | |
| HSRED45 | 542 | 530233 | 1-327 | 15-341 | |
| HSREG25 | 543 | 523815 | 1-347 | 15-361 | |
| HSREG40 | 544 | 712779 | 1-534 | 15-548 | AI032560, AI040579, AI040370, AA702902, and AI685149. |
| HSREG49 | 545 | 723267 | 1-206 | 15-220 | |
| HSRFC96 | 546 | 558385 | 1-279 | 15-293 | AL109852, Z93403, AL035468, Z95124, AC008041, AL035552, AL135783, |
| | | | | | AC007736, and AL008709. |
| HSRFD34 | 547 | 575288 | 1-139 | 15-153 | AA088873, AI079088, AI160732, AI381253, AW162324, AI992192, AI358948, |
| | | | | | AI933299, Z92910, AR036572, U91328, AC005393, AL035462, AC004890, |
| | | | | | AC005366, AC002509, AC007227, and AC010200. |
| HSRFD47 | 548 | 973782 | 1-428 | 15-442 | AC004386, AC002418, and Z83843. |
| HSRFE58 | 549 | 556519 | 1-334 | 15-348 | AC007198, and AC005280. |
| HSRFF03 | 550 | 925369 | 1-130 | 15-144 | |
| HSRFG30 | 551 | 920265 | 1-286 | 15-300 | |
| HSRFR21 | 552 | 529767 | 1-229 | 15-243 | |
| HSRFZ71 | 553 | 557976 | 1-304 | 15-318 | |
| HSRGA32 | 554 | 529726 | 1-306 | 15-320 | AW192199, AL133312, AC005683, and AF172277. |
| HSRGB23 | 555 | 974538 | 1-413 | 15-427 | AI207415. |
| HSRGE47 | 556 | 974539 | 1-327 | 15-341 | |
| HSRGG66 | 557 | 556518 | 1-169 | 15-183 | AC007198, and AC005280. |
| HSRGK48 | 558 | 535012 | 1-110 | 15-124 | AA373481, and AL134562. |
| HSRGQ30 | 559 | 534479 | 1-407 | 15-421 | AI493261. |
| HSRGS08 | 560 | 960211 | 1-299 | 15-313 | |
| HSRGV79 | 561 | 921005 | 1-356 | 15-370 | |
| HSRGW30 | 562 | 529624 | 1-296 | 15-310 | |
| HSRGZ32 | 563 | 699561 | 1-348 | 15-362 | AI963683, and AI742748. |
| HSRHA45 | 564 | 974551 | 1-391 | 15-405 | AL049871. |
| HSSAE47 | 565 | 720685 | 1-337 | 15-351 | AA377682. |
| HSSAF46 | 566 | 508117 | 1-341 | 15-355 | |
| HSSAN96 | 567 | 936108 | 1-239 | 15-253 | |
| HSSAP44 | 568 | 508831 | 1-374 | 15-388 | AA378117, AL048143, and AA378114. |
| HSSAVI8 | 569 | 508832 | 1-186 | 15-200 | AA378135, and AA378220. |
| HSSAV88 | 570 | 508829 | 1-375 | 15-389 | AA378151. |
| HSSBO48 | 571 | 871217 | 1-357 | 15-371 | |
| HSSBO59 | 572 | 707683 | 1-396 | 15-410 | AA632960, H82330, R13151, AA528455, AL045709, AA657416, AA658320, |
| | | | | | AI150670, AA721615, AA077776, AI564508, AA652057, AA640979, F17700, |
| | | | | | AW407919, AA437402, AA487542, AA302732, AA516207, D58782, AA298387, |
| | | | | | AA125788, AA482896, F37052, AA775049, AA581914, AI446474, AI284595, |
| | | | | | AI014378, AI888405, T47460, AA362395, AA298386, AA743137, AA491484, |
| | | | | | AA809189, AI862716, AA483655, AW271904, AI679713, AA878140, AA569187, |
| | | | | | AI292236, AA663306, AW265654, AA720732, AA642053, N69462, AA165462, |
| | | | | | AL119025, AA448838, AI628224, AI493264, N45421, H55894, AA572960, H65439, |
| | | | | | AA371409, T48872, AA365744, AI524540, AW075979, AW103383, AA599495, |
| | | | | | AI473701, AI279759, AI471572, AA425922, AI627581, AA558344, AW440633, |
| | | | | | AI540107, AI803827, T03203, AA443426, AI609223, AA577732, AI460390, |
| | | | | | AW339622, AI754291, H65440, AW268277, AA493885, F26719, AI251111, |
| | | | | | AI184226, AW407340, AI114752, N38789, AA747472, AA848143, AL120976, |
| | | | | | AW117976, AA100884, AA654627, AA704643, AL037910, AW021917, AA127916, |
| | | | | | AW189353, AA507991, AI597832, AA283083, AI634323, H94289, AL041083, |
| | | | | | F33511, AI863399, AA167741, AA468051, AA228283, AA745560, AI832000, |
| | | | | | AI689019, F37223, AA632845, AA501418, AW192330, AI978792, R23352, |
| | | | | | AA831388, AA968509, AA192695, AI623563, AI270476, AI872503, AA311071, |
| | | | | | AW167154, AI253797, T94094, AW079809, AI859834, AA516225, R26134, |
| | | | | | AA515937, D56402, AW419081, AI473684, AA655005, AI754037, A1114477, |
| | | | | | AA569202, AA626829, AA467988, AI366982, AA558003, R32200, AI042342, |
| | | | | | H53562, AA579278, C06137, AI859280, AI889921, Z96050, AC004201, AC009510, |
| | | | | | Z82176, U97046, Z96568, AL109798, AL020990, Z95331, AC004902, AL033527, |
| | | | | | AC003991, AC006239, AC003042, AL023806, AC006450, AC006363, AC002065, |
| | | | | | AL121603, AL008710, AL079339, AL035454, AC005378, AL080286, AC005180, |
| | | | | | AC006372, AC005037, AF043105, AL022397, AC006006, AC005546, AC007358, |
| | | | | | AC002381, AC004643, AL024509, Z98743, M63543, M63544, AC006578, |
| | | | | | AC003098, AC006251, AC000083, U89337, AF059675, AP000500, U73167, |
| | | | | | U90094, Z73420, AL009031, Z84484, AC002326, AL009029, AC005011, AJ003147, |
| | | | | | AL031003, Z84469, AC005562, AF020503, M87918, AL021397, AC003101, |
| | | | | | AP000518, M87914, Z70289, AL110114, AL078639, U62317, AC002996, |
| | | | | | AC004531, AR036572, Z99572, AF019413, AL049766, AL117344, AC004816, |
| | | | | | AP000306, AB023054, Z69648, AC002550, AC004972, U63313, AC005095, |
| | | | | | AC003954, AF039401, AC002316, AC004703, AL023574, U95742, AC007216, |
| | | | | | AF001549, AL008725, AC005954, AC003051, AC008163, AC005701, D32202, |
| | | | | | AL035685, Z68224, Z82172, AL121915, AP000289, Z85994, AP000042, AP000110, |
| | | | | | AL031005, AL031447, AC009069, AC005618, AC005823, AC009498, AC005859, |
| | | | | | AF097026, AL096678, AC005664, Z69647, AC004851, AC005755, AL020993, |
| | | | | | AF196969, AC005914, U95740, U91326, AC007385, AC002504, AC004231, |
| | | | | | AC002365, AL049759, AC004024, AC002045, AC002039, AL022394, AL049553, |
| | | | | | AC005881, AC006443, AC009330, AC004762, AL096803, Z83838, AL109654, |
| | | | | | AC008498, Z92546, AC004887, AC005578, AF053356, AP000122, AF016052, |
| | | | | | Z69652, AL033543, AL035400, AL031055, AC002347, AL020997, AC005081, |
| | | | | | AL049761, AF067574, D87005, D88269, AL121587, AL049697, AL031655, |
| | | | | | AC005874, AF134471, AC000097, AC005372, AC004859, AC006547, AP000353, |
| | | | | | Y11312, L29766, AF190631, Z82097, AC004776, AL008635, AL022160, AC005921, |
| | | | | | AC005740, AC004253, AC007263, AC004834, AC004448, AC008124, AC005261, |
| | | | | | AC007327, AP000047, AC004051, AF039954, AB018249, AC005354, AC005339, |
| | | | | | AC004140, AP000093, AC004996, AL031775, AC004675, AL022576, AF047825, |
| | | | | | AP000237, AF107258, AP000473, AL133448, AL022328, AF088219, AC008125, |
| | | | | | AL133445, AC005291, AF052684, AC005971, AC006953, AC004409, AP000251, |
| | | | | | AC006985, AC004656, Z99755, AP000134, AP000212, AP000030, AB020871, |
| | | | | | AL033524, Z99128, AL050307, AC007628, AB020868, AC005411, AC006960, |
| | | | | | AC006111, AC008040, AL049776, AC004596, AL022400, Z93020, AC004152, |
| | | | | | AC004186, U07562, AC004694, AC007382, and AP000207. |
| HSSCC04 | 573 | 928001 | 1-119 | 15-133 | |
| HSSDJ02 | 574 | 871226 | 1-348 | 15-362 | AL035681, Z93241, AL049839, Z82189, and AP000553. |
| HSSDL20 | 575 | 667599 | 1-159 | 15-173 | AF084557, AC003025, AF139813, and AC004228. |
| HSSDL94 | 576 | 526758 | 1-285 | 15-299 | D80188, AI525912, AA514184, and AR008278. |
| HSSDR63 | 577 | 537329 | 1-213 | 15-227 | AC006071. |
| HSSDX20 | 578 | 783128 | 1-113 | 15-127 | |
| HSSED56 | 579 | 625572 | 1-358 | 15-372 | AA346009. |
| HSSEF29 | 580 | 689837 | 1-389 | 15-403 | |
| HSSEK75 | 581 | 766507 | 1-166 | 15-180 | |
| HSSEU91 | 582 | 766573 | 1-163 | 15-177 | |
| HSSEU93 | 583 | 911261 | 1-358 | 15-372 | |
| HSSEV89 | 584 | 572851 | 1-296 | 15-310 | AI961823, AW166279, Y17108, and Z92544. |
| HSSFF80 | 585 | 753589 | 1-285 | 15-299 | |
| HSSFQ43 | 586 | 715318 | 1-405 | 15-419 | AC007367. |
| HSSFR41 | 587 | 707006 | 1-346 | 15-360 | |
| HSSFX54 | 588 | 708845 | 1-429 | 15-443 | T71424, R18371, and Z43782. |
| HSSGC65 | 589 | 955064 | 1-391 | 15-405 | AI982519, AL042376, AL042377, AI361890, AI200168, AI656939, AC000385, |
| | | | | | AF061779, AC004923, and U73627. |
| HSSGC66 | 590 | 319740 | 1-231 | 15-245 | |
| HSSGC72 | 591 | 760648 | 1-141 | 15-155 | |
| HSSGD37 | 592 | 739505 | 1-308 | 15-322 | AL049569. |
| HSSGH47 | 593 | 720367 | 1-355 | 15-369 | |
| HSSGI20 | 594 | 668919 | 1-328 | 15-342 | Z81364. |
| HSSGI75 | 595 | 767325 | 1-333 | 15-347 | |
| HSSGI91 | 596 | 789411 | 1-338 | 15-352 | AP000348, and AP000347. |
| HSSGK96 | 597 | 960636 | 1-378 | 15-392 | AA378503. |
| HSSGL55 | 598 | 766115 | 1-599 | 15-613 | W74502, AA602391, AI420864, AW249723, AW166500, AA076659, AA947286, |
| | | | | | AW148931, AA523509, N59225, C14268, AI367349, AI421445, AI936982, |
| | | | | | AI769470, AI368200, AI419527, N98776, AI684498, AI572122, AW206959, |
| | | | | | AI634762, W49625, N34422, AI217398, W31030, AA725340, AI081813, |
| | | | | | AW373882, AI672387, AA641497, AI337000, AA478173, AI766926, AI365401, |
| | | | | | AI813446, AI608807, AI382536, AI950175, AI382559, AA827390, AW183593, |
| | | | | | AI420810, AA309806, AI565511, AI362447, AA478017, AA773507, T11147, |
| | | | | | C14269, AI738446, AI800023, AI242987, AA639592, AI399691, AA659150, |
| | | | | | AA371822, AI243140, AA631086, AI659508, AI927588, AI651868, AI699620, |
| | | | | | AA335673, AI805041, AA336127, W48799, AA335414, N76692, AI916893, |
| | | | | | AI468167, AA335239, AW206563, AI873196, AW137813, AW451053, AW137008, |
| | | | | | AI823968, H16597, AW006577, AW006554, N71461, AI401174, W79098, D19946, |
| | | | | | and AI541353. |
| HSSGL78 | 599 | 788924 | 1-376 | 15-390 | R83708, AA515728, D44639, AL041894, AL038842, AA515138, AI762528, |
| | | | | | AA158759, AA452887, AI421257, AA581247, AA516320, AI792529, AA502991, |
| | | | | | AA630535, C14858, AI801701, H70108, AA182731, AI054193, AA773098, |
| | | | | | AC005841, AC005071, AF001550, AC007536, AL133448, AC007041, AL020997, |
| | | | | | U95739, AL034429, AL096701, AC005005, AC006597, AC002126, AL008635, |
| | | | | | AL109628, AC006121, AC004953, AC002301, AP000208, AP000130, AP000247, |
| | | | | | AC005324, AC005874, AF134471, AC004797, AC002404, AC007225, AF001549, |
| | | | | | AC005921, AC005919, Z85987, AC005261, AL049776, AC005740, AC007637, |
| | | | | | AC007298, AC003692, AC006130, AP000557, AF111167, AL133246, AC005102, |
| | | | | | AC004659, AC004882, AL109801, AC007537, AC005527, AC007114, AC004975, |
| | | | | | AC005529, AL049795, AF111163, AL096712, AC006312, AC006449, AL031680, |
| | | | | | AC002314, AC006942, AC000353, AC007664, AC005231, AL034420, AC002302, |
| | | | | | AL031295, AC005899, AL035209, AC000025, AC005488, Z95331, AC002472, |
| | | | | | AC002477, AP000704, AC006285, AC005351, AC002350, AC005828, AC008018, |
| | | | | | AF001548, AL096761, AL109623, L44140, AC005520, AC005920, AC002470, |
| | | | | | AF017104, AC005821, AC016025, AC007283, AC016831, AJ003147, Z98200, |
| | | | | | AC005086, AC004386, AC005220, AL022327, AL109984, AC006530, AC007546, |
| | | | | | AC004477, AC006511, AC004000, AL121754, AC004985, AC007040, AL035587, |
| | | | | | AC004534, AC007263, AL049843, AD000671, Z83844, AL117329, AC004019, |
| | | | | | Z95114, AF196779, AF134726, AC003043, Z93023, AC002288, AL021578, |
| | | | | | AC000134, AL132712, AC004999, AP000211, AP000133, AC005881, AL033521, |
| | | | | | AC005049, AL109758, AC005722, AC010209, AC005632, AC005531, AP000193, |
| | | | | | AF104455, AC004259, AL031228, AC004032, AP000050, AC005695, AL035422, |
| | | | | | AC005726, AC004600, AP000555, AP000117, D87675, AC004813, AL031737, |
| | | | | | AC007050, AC004851, AC005082, Z99943, AL024498, AC005332, AL049759, |
| | | | | | U29953, U96629, AL031577, AC009516, AL034548, AL021707, AL023284, |
| | | | | | AL023575, AC003037, AL022302, AC005697, Z99716, AC002425, AL050321, |
| | | | | | AL118497, AL133353, AF196970, AP000346, AC005300, Z95113, AL031005, |
| | | | | | Z83840, AC005624, AC004791, AC004149, AC006487, Z98044, AC006050, |
| | | | | | AL122021, AP001052, AC002310, AC002390, AL031681, AC004990, AC005088, |
| | | | | | AC006455, AC005081, AL022326, AC006203, AC002045, AL034351, AC005338, |
| | | | | | Z81314, 784469, AP000248, AL021391, U91323, AL034553, AC002544, AL050312, |
| | | | | | AP000212, AP000134, AL031282, AC008015, AC004020, AL049569, AC007421, |
| | | | | | AL122126, AC007388, AC006080, Z93930, AC005067, AC007226, AC004099, |
| | | | | | AL139054, and AC005179. |
| HSSGM62 | 600 | 707685 | 1-397 | 15-411 | |
| HSSGN47 | 601 | 707003 | 1-324 | 15-338 | AI076644, AI951987, AA969026, AD000671, AF186605, and AJ007041. |
| HSSHA92 | 602 | 792714 | 1-396 | 15-410 | |
| HSSJN44 | 603 | 716573 | 1-428 | 15-442 | AL139054. |
| HSSJN49 | 604 | 708841 | 1-331 | 15-345 | |
| HSSJU66 | 605 | 653212 | 1-248 | 15-262 | AW241370. |
| HSSJV60 | 606 | 970749 | 1-417 | 15-431 | AA972086, and AW241953. |
| HSSKB40 | 607 | 711130 | 1-558 | 15-572 | R78078, AI672012, AI291253, AW438453, Z83844, AL139054, AL008715, Z85996, |
| | | | | | AL035072, AL035695, AF218772, AC006056, AC006508, AF037046, AF146793, |
| | | | | | AF034692, AL118503, U31796, AF019657, AC006584, AF092084, and U31316. |
| HSSMT78 | 608 | 712468 | 1-481 | 15-495 | AA378685, AA378686, AP001101, and AC004837. |
| HYBAE74 | 609 | 925074 | 1-314 | 15-328 | AC006121. |
| HYBAG11 | 610 | 967880 | 1-194 | 15-208 | |
| HYBAU83 | 611 | 732419 | 1-226 | 15-240 | AA371642, AA345063, N87410, AI886060, AI886365, AA528441, AA652329, |
| | | | | | AI743721, AA987962, AA364488, AI954525, F13749, AA626829, AL135643, |
| | | | | | AW075915, AI982634, AI751162, AW162288, AI696793, N54179, AI610603, |
| | | | | | AA360260, AA258848, AI240339, F32893, AW341903, AI216998, AI370270, |
| | | | | | AI348302, AI024782, AW402145, AW157005, AI028510, AA968509, AI270524, |
| | | | | | AW157492, AI797901, AI653905, AI634691, AI797892, AA372881, AI678785, |
| | | | | | AI471418, AI345657, AI349966, AI879394, AI796594, AI345717, AA772016, |
| | | | | | AA507837, AL039187, AI467877, AA992126, AW088843, AA215335, AI332666, |
| | | | | | AI799303, AL038909, AA364315, H78031, AA367555, AI753365, AA617954, |
| | | | | | AW300776, AA843450, AA226584, AA319813, AI244758, AA657835, AA318652, |
| | | | | | N54764, AA192330, AA206807, AA364330, AI053981, AI051037, H79308, F33121, |
| | | | | | AW271904, AA347040, AI240891, AI719644, AI921541, AA984191, AI079423, |
| | | | | | AI144094, U73167, U90094, Z84469, AL034420, AL031296, AL050307, AC007688, |
| | | | | | Z82097, AC006211, AC004263, AC006441, AC004660, AC004921, AC006241, |
| | | | | | AC005971, AL008635, U80017, AL035089, AC007199, AP000697, AC009501, |
| | | | | | U78027, AC005209, AC007055, AC000353, AP000503, AL035422, AB008681, |
| | | | | | AC006084, AC007486, AC003684, AF134726, U80459, AC004235, AC004382, |
| | | | | | AL022336, U62293, AC005664, AC0005071, AC005214, AL117694, AL121655, |
| | | | | | U85195, AC005529, AC000097, AC005856, Z86090, AP000500, AC003101, |
| | | | | | AC002470, AC006547, AC005940, AC006480, AE000658, AC005772, AC005057, |
| | | | | | AL022163, AC007283, AL121769, L78833, AC007842, AC006509, AL021808, |
| | | | | | AP000248, AC004678, AC005988, AL031774, X74984, AC005922, Z98744, |
| | | | | | AL079333, AF129756, AC007038, AC006449, AL022328, AC005086, AF045555, |
| | | | | | AL049795, AL117258, AL008582, AL031447, AL022578, AL078477, Z85986, |
| | | | | | AC008040, AC005844, AC006387, AC004236, AC004129, Z94057, AP000505, |
| | | | | | Z94056, AP000556, AP000557, AC004685, AC001231, AC007041, AC005696, |
| | | | | | AC005913, Z97056, Z93241, AC000070, Z83822, AC002073, AL133245, |
| | | | | | AC006155, AJ006996, AC005527, Y18000, AC005730, AC002350, AL035658, |
| | | | | | AL133448, AP000509, AJ003147, AC004477, AL109628, AP000552, AP000959, |
| | | | | | AC006213, AP000692, AC007276, AC009516, AC005180, Z82244, AJ239027, |
| | | | | | AL136504, AC006530, Z98036, AC004013, Z84474, AC006001, AC004668, |
| | | | | | AC002991, AC002040, AC006277, AC007387, AC006116, AL031053, AC003046, |
| | | | | | AC002310, AC005067, AL049779, D84149, AL049832, AL049540, AC004913, |
| | | | | | AL049834, AC007263, AC005755, AC005808, AF172277, AL024509, Z85996, |
| | | | | | AP000354, AL031675, AL009183, AL031662, AL139054, AC006020, Z84487, |
| | | | | | AC005041, AC007537, AC007073, AL021546, AP000010, AP000152, AC002385, |
| | | | | | AL035659, AC004814, AC002349, AC004882, AC007687, Z84480, AJ010770, |
| | | | | | AC006064, AC000085, AC005089, AL096791, AL049543, AL023804, AC004975, |
| | | | | | AC000134, Z93023, AP000477, Z94160, AL022397, AC005694, AL049761, |
| | | | | | AL034349, AC002425, AD000092, AL049539, AL031680, AP000553, AF222686, |
| | | | | | AC005996, AC005839, AC006013, and AC003688. |
| HYBAX25 | 612 | 456251 | 1-341 | 15-355 | T55280, Y17457, AL031133, AC005089, AC005412, AC005886, AC004472, and |
| | | | | | AC006509. |
| HYBAY40 | 613 | 531202 | 1-284 | 15-298 | |
| HYBBB24 | 614 | 584989 | 1-307 | 15-321 | AA806538, AI005244, and AA535437. |
| HYBBI18 | 615 | 584991 | 1-340 | 15-354 | Z98880. |
| HYBBJ30 | 616 | 693345 | 1-228 | 15-242 | AB032972. |
| HYBBL17 | 617 | 691328 | 1-232 | 15-246 | AA046858, AI078144, AA022643, AI809791, N57180, AW170191, AA328923, |
| | | | | | AA401814, H27580, AI869993, AA249586, AA576955, and W67605. |
| HYBBK83 | 618 | 505138 | 1-595 | 15-609 | AI923052, AW265688, AI862716, AA557911, AI358712, AI932871, AI380617, |
| | | | | | AW408767, AA533054, AA488687, AL039187, R92658, AW085758, AA528516, |
| | | | | | T05118, AI246796, AW268329, AI696955, AA599080, AA828834, AW023975, |
| | | | | | AA604751, AI357823, AI689198, AI821382, AA115865, AA469327, AL049576, |
| | | | | | AC002477, AC006157, AC007283, AC005089, Z98044, AL133448, AF064861, |
| | | | | | AC006071, Z82244, AC006511, AC004913, L44140, AL031589, AB003151, |
| | | | | | AC005399, Z93241, AC007707, AC007227, AC012627, AC005696, AC004254, |
| | | | | | AF134726, AC006312, U95740, Z98752, AC004967, AC004673, AC005409, |
| | | | | | AL030996, V00596, Z98200, AL049709, AC005028, AC002470, AC006057, |
| | | | | | AP000295, AC002352, AC005972, M17262, AC005288, AC005821, AC004878, |
| | | | | | AP000689, AC005519, AF111167, AC004990, AC006241, AC004242, AC002288, |
| | | | | | AC005907, AC004975, AC004933, AC005902, AC002558, AC005488, Z98036, |
| | | | | | AC005274, AC005067, AC004477, AC005379, AC007993, AC002997, AC007226, |
| | | | | | AC007421, AL022320, AL096701, AC003982, AP000270, AL049776, AC005829, |
| | | | | | AC004882, Z93242, AC005726, AC008115, AP000512, AC004752, AC004129, |
| | | | | | AC003108, AC006026, AC007225, AC005871, AC006530, AP000502, X55448, |
| | | | | | AC006050, AC005071, AL050318, AC003109, AL136295, AL008583, AF023268, |
| | | | | | AC005320, AC002492, AC006166, AC002126, AB023051, Z93020, Z99943, |
| | | | | | AL031584, AP000032, AP000553, D84394, AL035420, AC002984, AC000085, |
| | | | | | AL049829, AC004228, AC007040, AL049780, AC006013, AF165142, AL020995, |
| | | | | | AF196969, AC005180, AL031587, AC006080, AL021939, AF196779, AL034549, |
| | | | | | AL034429, AC004185, AC002563, AL035422, AC004985, Z98304, AL031281, |
| | | | | | AC007151, AC002301, AL023553, AC005755, Z94160, AP000346, AC010582, |
| | | | | | AF029308, AC003104, AL133399, AL031667, AP000557, AC009516, U78027, |
| | | | | | AC006064, AC000159, Z85987, AC007686, AL008719, AL109628, AC005520, |
| | | | | | AP000466, AC007276, AC006237, AC005784, AL121748, AC005837, AL096774, |
| | | | | | AC004851, AC004491, AC002040, Z83844, AL031681, AC005670, AF045555, |
| | | | | | AL133244, AC006011, AL109657, AC005736, AF111163, AC007540, AP000704, |
| | | | | | AL034379, AC004007, X96421, AC003093, AC004139, AL021878, AC003983, |
| | | | | | AP001052, AP000248, AC008040, AL031311, AC006040, AC006120, AL133485, |
| | | | | | AF051976, AP000356, AL022323, AC006121, AC004663, AL022316, AL121756, |
| | | | | | AC004020, AL121655, AC004686, AF165926, AC002395, AF207550, AC002314, |
| | | | | | AC005529, AC005527, AL022312, AL021977, U95742, AC004656, AL122020, |
| | | | | | AC004492, AC006285, AP000558, AC006277, Z97181, AC006571, AF139813, |
| | | | | | AC016025, AP000509, AC002038, AC004148, Z98257, AC005037, AP000065, |
| | | | | | AC004019, AL022302, AC000134, AL031432, AC005066, AL080243, AC006132, |
| | | | | | AC005952, Z97196, AC005663, AL021707, AC005697, AC011456, AC016027, |
| | | | | | AC004832, AL121658, AC005081, and AC005786. |
| HYBBG93 | 619 | 531201 | 1-60 | 15-74 | AF024533, and AC005088. |
| HYBAY92 | 620 | 792923 | 1-426 | 15-440 | W01795, and N99837. |
| HYBAW03 | 621 | 925068 | 1-323 | 15-337 | AA435790. |
| HYBAH65 | 622 | 518736 | 1-592 | 15-606 | H48087, T70307, W72466, H80227, H81398, T78885, AA704555, H73669, T78410, |
| | | | | | and AW236543. |
| HYBAG53 | 623 | 669602 | 1-463 | 15-477 | H71386, AW408254, H81132, H44291, N21071, AI801120, N36421, AW341639, |
| | | | | | AA878376, C02991, AI758487, and AA280550. |
| HYBAF63 | 624 | 745585 | 1-649 | 15-663 | N48536. |
| HSSMZ93 | 625 | 530752 | 1-346 | 15-360 | AA378965, AA378966, and AL035696. |
| HSSMZ01 | 626 | 921800 | 1-401 | 15-415 | AA378938, H90844, T57767, AA824453, AA492105, AI752358, AA458452, |
| | | | | | AI783911, AA723299, AA812684, AA728973, N67313, AA167489, AA483771, |
| | | | | | AA664604, AI241831, U63721, AC005071, AL049692, AC006312, AC004878, |
| | | | | | AC005229, AC002996, AC005520, AC002544, AL031670, AC005874, AF134471, |
| | | | | | AC004099, AL109984, Z95115, AF134726, AC004263, AC004983, AC004686, |
| | | | | | AF111167, AF095703, AP000692, U80017, U91326, AC007686, AL135783, |
| | | | | | AL031666, AC004475, AC005207, AC004217, AC004996, AC007563, AC006441, |
| | | | | | AL096791, AL022322, AL021154, AL035414, AC005821, AC006026, AC006960, |
| | | | | | U62293, Z83844, AC007450, AL024498, AC004520, AC004659, AL080243, |
| | | | | | AC006512, AP000356, AL049552, AP000505, AC006211, Z98051, AC004019, |
| | | | | | AC000003, AC006101, AL049745, Y14768, AC004132, AC016027, AC005031, |
| | | | | | AC004814, AC002045, AF129756, AC004938, AC005740, AC006111, AL033521, |
| | | | | | AL009181, AL008726, AC006237, AP000280, AC006450, AC005971, AC007344, |
| | | | | | AC007227, AC000025, Z83826, AC004491, AP000248, AC004883, AC002316, |
| | | | | | AC008064, AL035422, AP000503, AF109907, AP000107, AC005972, AC000026, |
| | | | | | AL049636, AC006487, AL109798, AL022316, AC005829, AC004386, AC005668, |
| | | | | | AC007376, AL049869, Z68756, AC005696, AP000552, AC016830, AC005057, |
| | | | | | AL023553, AL023913, AF190465, AP001054, AP000030, AP000133, AP000211, |
| | | | | | AF200465, AC005922, AC008498, AL031311, AL133243, AL117355, AC005369, |
| | | | | | AL022336, AC006511, AC002400, AC005914, AC008372, AF003626, Z95114, |
| | | | | | AL031390, AF196779, AL079304, AC004383, AL021579, AC007308, AC005702, |
| | | | | | AC009891, AP000228, AL133246, AC004125, AC004966, AC003110, AC002565, |
| | | | | | U78027, AC004453, AC006057, AL022323, AL021939, AP000035, AP000104, |
| | | | | | AC002472, AC007277, AL023653, AC003664, AC006040, AF111168, AC007546, |
| | | | | | AL132987, AP000557, AL020989, AL049776, Z93930, AP000497, AP000140, |
| | | | | | AC003667, AC006530, AL049653, AC007073, Z99716, AC005803, AC004032, |
| | | | | | AC004458, AP000696, AC008018, AF152364, AL133163, AC008062, AC005837, |
| | | | | | AC002288, AC007151, AC006254, AC006362, AC004967, Z93241, AC006480, |
| | | | | | AC004815, AC005412, AC005011, Z93017, AL023807, AL109628, AF024533, |
| | | | | | AL021393, AC004808, AC004583, AC007226, AC007540, AC005538, AC004655, |
| | | | | | AC000393, AL049569, AC005553, AC004663, AL049712, AL031729, and |
| | | | | | AL031005. |
| HSSMW90 | 627 | 975081 | 1-306 | 15-320 | AA378852, AI149537, AW130188, AW173759, AA715418, AI280504, AW149288, |
| | | | | | AA489978, AL035413, AL050332, AB014078, AP000514, Z98749, AC006139, |
| | | | | | AC002468, AC008064, AC005589, Z80901, AL109753, AP000215, AP000128, |
| | | | | | AP000206, AP000245, AP001056, and AC008163. |
| HSSMT76 | 628 | 928421 | 1-299 | 15-313 | AA378683, N72524, AA378682, N57752, N53565, AA831903, AI017251, |
| | | | | | AW103030, N91572, AI689198, AA655005, AA716348, AI580898, AA077667, |
| | | | | | AW341903, AI336480, AA340747, AW002831, AA347114, C05986, AI457397, |
| | | | | | AA533033, AI866908, AI027056, N75391, AA071334, AW151247, AA599352, |
| | | | | | AI244356, AA086318, AA657416, AA664604, W47183, AI753365, AI824541, |
| | | | | | AI499376, AI500552, AA630535, AA347034, W79504, AI471481, AI537955, |
| | | | | | AA773463, T57267, AA603911, N32878, AI291268, AA086344, AA167659, |
| | | | | | AA644551, AI291124, AI745325, AA488620, AA300391, AA303054, AA613138, |
| | | | | | AA491814, R64617, AA832145, AI801563, AA665021, AA284184, AW277174, |
| | | | | | AI291037, AA568778, AA828637, AI267269, AW270768, AI446205, AA502991, |
| | | | | | AW157005, AA573213, AW438616, AI080618, AW276827, AW193432, AI339845, |
| | | | | | AA916600, AA483771, AI270476, AA362349, AA551503, AA577906, AA446616, |
| | | | | | AA350859, AI688846, AA599920, AA553363, H90844, AA579184, N25296, |
| | | | | | AI687206, AA381138, C15092, AA367986, AA437161, AL041706, AA579736, |
| | | | | | N22797, F01666, AI350211, AA992126, AI580652, AI344844, AI061334, AI679294, |
| | | | | | Z82205, AL049829, AC005666, Z93017, Z83840, AF111168, AC005696, AC006511, |
| | | | | | AC005971, AL049636, AC005488, AL031055, AL022721, AL035413, AC007774, |
| | | | | | AC005924, AC004797, AC005839, AL109628, AC002470, AL133246, AC005726, |
| | | | | | AC005841, AC007136, AP000354, AL109758, AP001053, AF064860, AL008635, |
| | | | | | AL035420, AC005037, AC005619, U80017, AL133448, AC004253, Z84487, |
| | | | | | AC005015, AL024509, AL096791, AC007878, AC004882, AL049832, Z83822, |
| | | | | | AP000555, Z97054, AC002094, AC002302, AL049766, Z82206, AC004862, |
| | | | | | AC002426, AL139054, AF207550, AL121769, Z85987, AC003982, AL079340, |
| | | | | | AC004678, AC005529, AC005829, Z93244, AP000116, AC004686, AL008725, |
| | | | | | AC003041, AC002476, L44140, AC005158, AL008718, AC006372, AL080243, |
| | | | | | Z84480, AC004590, AF134726, AC006285, AC002301, AC004019, AL078581, |
| | | | | | U47924, AR036572, U91328, AC004854, AC016025, AP000692, AC007388, |
| | | | | | AL049557, AC004878, AC002347, AC008372, AC004876, AC006327, AC005578, |
| | | | | | AP000501, AL033527, AC002073, AC006006, AP000547, AC000353, AC005089, |
| | | | | | AC006441, AC004765, AC004242, AC004150, AC005786, Z98884, AL121603, |
| | | | | | AC004983, AL024507, U85195, Z98950, AC002543, AF111167, AC005484, |
| | | | | | AC006274, AC007199, AL049872, AC004601, AC007688, AC003006, AC005070, |
| | | | | | AC002039, AF107885, AC004815, AL132987, AE000658, AB023049, AC003029, |
| | | | | | AL023804, AL022476, AC006088, AC005520, AC002115, Z83826, AL109801, |
| | | | | | AC006312, AC002544, AL133163, AL022237, AF045555, AC010205, AC005914, |
| | | | | | AC004895, U95742, AC005856, AC004477, AL049776, AC007263, AC005874, |
| | | | | | AF134471, AC005399, AC005799, AC005317, AC009509, AL031432, AC005207, |
| | | | | | AC004526, AC007376, AL031311, AC007687, Z97876, AC005899, AC007421, |
| | | | | | AL109952, AL049569, AL035400, AC007938, M63480, AC005086, AC004967, |
| | | | | | U95743, U78027, AF196972, AF196779, AC004448, AC003046, AC007666, |
| | | | | | AL031589, AJ011930, AC006273, AC005694, AC007386, AC005206, AC006241, |
| | | | | | AL049869, AC007308, AC007052, AL031427, AC000026, AC007371, AL049646, |
| | | | | | AC004531, AL049761, AC009516, AC000003, AC005972, AL021391, M63544, |
| | | | | | AC005722, AC005682, AC006480, AL031005, AC004099, AP000131, AP000209, |
| | | | | | AP000065, AC005667, AC002997, AC002119, AC005551, AP000505, AC002044, |
| | | | | | AC005684, AC006120, AL031685, AL008730, AF190465, Z83846, AC002059, |
| | | | | | AC006023, AP000248, AC006039, AC007216, AC005837, AF117829, AC005291, |
| | | | | | AC005527, AL031447, Z98946, U91326, Z85986, Z95115, AC003670, AC005756, |
| | | | | | AJ003147, AL035681, AC010206, AL021877, AL078638, AC005736, AC007363, |
| | | | | | AL135744, AL021397, AC004752, AF011889, AL031588, AF118808, AC010200, |
| | | | | | AC005844, AC005796, and AC005939. |
| HSSMT70 | 629 | 530758 | 1-284 | 15-298 | AA378674, and AA378675. |
| HSSMP20 | 630 | 854092 | 1-360 | 15-374 | R70723, and AA378431. |
| HSSKD17 | 631 | 726525 | 1-552 | 15-566 | W68188, AW248260, AW379441, H14177, R51748, N45444, AA009502, |
| | | | | | AA121499, AI750975, AA521345, AW204392, and AC005306. |
| HSSJQ60 | 632 | 975185 | 1-192 | 15-206 | |
| HSSJP81 | 633 | 911334 | 1-541 | 15-555 | Z43294, AA252498, AW371259, R07447, AA403066, F07754, and AL133017. |
| HSSJL22 | 634 | 871170 | 1-1260 | 15-1274 | D31661, L41939, AF025304, L25890, L36643, and D37827. |
| HSSJK65 | 635 | 747891 | 1-742 | 15-756 | AA010525, R94490, N59062, AI032097, R94491, and AI241480. |
| HSSJH78 | 636 | 773558 | 1-371 | 15-385 | W58293, H17374, and AC004552. |
| HSSJA08 | 637 | 959336 | 1-559 | 15-573 | AA516469, AI796388, and AA579963. |
| HSSGK12 | 638 | 970714 | 1-407 | 15-421 | Z73988, and AL050347. |
| HSSGJ84 | 639 | 781975 | 1-492 | 15-506 | H53756. |
| HSSGD96 | 640 | 796410 | 1-98 | 15-112 | |
| HSSGD82 | 641 | 779899 | 1-558 | 15-572 | R87893, and AL110228. |
| HSSGD56 | 642 | 608144 | 1-501 | 15-515 | AA502843, AA470969, AI345157, AW150524, AL022323, AC002381, AL035555, |
| | | | | | AC005071, AL049776, AL022302, U91321, Z95152, AF165926, AC003029, |
| | | | | | AC006571, AC005154, AC005871, AC002402, AL096701, AC005899, U91323, |
| | | | | | AC005696, AC005089, AC005280, AC006581, Z86090, Z99716, AC007546, |
| | | | | | AP000553, Z83845, Z95116, AC006160, AC002425, Z84480, AP000346, AC007406, |
| | | | | | AC005412, AL121603, AC006441, AC007685, AC005081, AL133353, AC008101, |
| | | | | | AC002990, AF038458, AC002996, AC004859, AC004662, AP000023, AC005520, |
| | | | | | AP000210, AP000132, AL132712, AC007637, U80017, AL031662, AC000066, |
| | | | | | AC007537, Z93783, AC016830, AL021707, AC008045, AC005288, AC005841, |
| | | | | | AL033547, and AC005225. |
| HSSFW84 | 643 | 781973 | 1-623 | 15-637 | H13333, Z46049, and AC004590. |
| HSSFU84 | 644 | 888462 | 1-388 | 15-402 | Z82214. |
| HSSFN08 | 645 | 959735 | 1-529 | 15-543 | AA584893, M62144, AJ132917, AF158180, AF031075, AF031078, and AF030876. |
| HSSFK90 | 646 | 788687 | 1-534 | 15-548 | AI633959. |
| HSSFB73 | 647 | 955200 | 1-322 | 15-336 | R16937, and AC007537. |
| HSSEU40 | 648 | 891055 | 1-352 | 15-366 | AA004732, and R45758. |
| HSSEP69 | 649 | 871211 | 1-356 | 15-370 | AC005484. |
| HSSEI90 | 650 | 789157 | 1-373 | 15-387 | H91190, AI903727, AW367564, AW376992, AW367618, AW367543, AW367594, |
| | | | | | and AL080172. |
| HSSEG25 | 651 | 679351 | 1-490 | 15-504 | AA481165, AA034225, AW131736, AW137070, AA063633, AA844084, AA482038, |
| | | | | | and Z83845. |
| HSSEF33 | 652 | 702701 | 1-530 | 15-544 | H67629. |
| HSSEC79 | 653 | 775312 | 1-254 | 15-268 | AA984057, AA084951, AB023138, M96377, and M96376. |
| HSSDQ07 | 654 | 880720 | 1-492 | 15-506 | AI967980, AL035703, and U72207. |
| HSSDI03 | 655 | 924975 | 1-389 | 15-403 | AA808840, W74796, W74722, AA723330, and AP000501. |
| HSSDH37 | 656 | 575460 | 1-256 | 15-270 | AI869797, AA326034, AI689198, F01222, AA526683, AA032001, T30864, |
| | | | | | AA378474, AI590906, AA565319, AA856815, AA513851, AA364137, H93152, |
| | | | | | AA372106, N70449, AA343810, AI193417, AA225486, AA745302, AA714524, |
| | | | | | AA297698, AA384200, AA555232, AA086257, AI354333, AA831408, AA551067, |
| | | | | | AA745351, W44359, AI114557, R52008, AC005899, AC003029, AC007993, |
| | | | | | AC003025, AC004084, AF139813, AC000025, AC005527, AC006511, Z98750, |
| | | | | | AL035681, AC005529, Z94802, AC005399, AL135744, AL049776, AC007193, |
| | | | | | AC006277, AB001523, AC006388, AC000353, AL035659, AC006001, Z98946, |
| | | | | | AP000359, AC002351, AC004651, AL034417, AL109628, AL034420, AC002310, |
| | | | | | AC006023, AL035400, AC007731, AF038458, AC005365, AL049780, AC004491, |
| | | | | | AC005632, AC004973, AC005015, AL031056, AC005102, Z82206, AL133245, |
| | | | | | AC005841, AC005932, AP000689, AL121653, AP000279, AL031662, AC004019, |
| | | | | | AL121603, AL031602, AF031078, AC005081, AI251973, AC005500, AC006449, |
| | | | | | AP000115, AL008730, AL024498, AL049636, AC004820, AF030876, AL080317, |
| | | | | | AP000305, AB003151, AL133163, AC002126, Z82203, Z99716, AC006121, |
| | | | | | AC004030, AC004967, U62293, AP000106, AP000038, AC005914, AL049694, |
| | | | | | AC002120, AC007226, AL022311, AC004821, AF088219, AC004596, Z85996, |
| | | | | | AL031588, AC005332, AP000045, AP000113, AL050348, AB023049, AC005484, |
| | | | | | AC002470, AP000355, AC002395, AP000209, AL109984, AC000026, AL033392, |
| | | | | | AL139054, AC008372, AC006257, AJ246003, Z93017, AL121658, AC004106, |
| | | | | | AC003982, AC004963, AL022326, AC005288, AP000692, AL049834, AP000116, |
| | | | | | AC006084, AC003041, AL022476, AL022721, AL031666, AC007773, AC002350, |
| | | | | | AP000694, AL049874, AF039906, AC005086, AL031848, AP000047, AL022238, |
| | | | | | AC002059, AL133246, AC004851, L48038, AP000248, AL008582, AC005696, |
| | | | | | AF134726, AC005067, AF196969, AL031427, AC004125, Z98051, AL034421, |
| | | | | | AC002369, AC005839, AL035455, AP000212, AP000134, U91318, AC007934, |
| | | | | | AC005940, Z93241, AL022336, AC004675, AC004655, AC007308, Z83846, |
| | | | | | AL109801, AJ003147, AC003109, AC004890, AC007227, AC002400, AC005378, |
| | | | | | AC002544, AC004975, AC005695, AL079342, U52112, AL117694, U63721, |
| | | | | | AC005972, AP000555, AP000504, AC005089, AC003010, AC004685, AP000553, |
| | | | | | AC005880, AC007066, AP000308, AC004033, Z93020, AL049869, AC005730, |
| | | | | | AC004000, AC007546, AL031295, AC004883, AL117344, AP000514, AL035413, |
| | | | | | and AC002306. |
| HSSDC50 | 657 | 724696 | 1-244 | 15-258 | H16286, and R53150. |
| HSSCC14 | 658 | 600216 | 1-898 | 15-912 | AI284640, AI281881, AI679782, AW276827, AA680243, AI334443, C75026, |
| | | | | | AI801591, AA720702, AA491814, AI368745, AW419262, AW162049, AI929531, |
| | | | | | AI683577, AI610159, AI732120, AI005388, AI471534, AW406447, AW088058, |
| | | | | | AW243960, AI469624, AI053672, AI471481, AA503015, AI962050, AI076616, |
| | | | | | AW303196, AW104748, AA649642, F36273, AA581903, AI339850, AW274349, |
| | | | | | AW022379, AW148792, AW166815, AW301350, AI358343, AI298710, AI434706, |
| | | | | | AL037683, AI567674, AL039958, AL048925, AI206785, AL138455, AI143242, |
| | | | | | AI564185, AI286356, AI625244, AL044858, AL119691, AI379719, AA613345, |
| | | | | | AA488746, AI355224, AI446638, AA394271, AA713815, AI927741, AI640702, |
| | | | | | AA178953, AA192740, AL042420, AW021583, AI246409, AW072587, AI133164, |
| | | | | | H71429, AI732186, AI696955, AI192631, AI355206, AI697208, AL044940, |
| | | | | | AW272758, AA521323, AL046898, AI674873, AW270270, AI110770, AI246796, |
| | | | | | AI376100, AI251002, AA665021, AI921649, AA620525, AW302013, AW270716, |
| | | | | | AI890923, W79504, AA521399, AI061227, AI367975, AI364020, AA598586, |
| | | | | | AA493708, AI049722, AI471543, AA587256, AA074130, AI471487, AA758934, |
| | | | | | AI133636, N27584, AW089322, AI434311, AA084070, AI148277, M77974, |
| | | | | | AI859251, AW073470, AW089789, AL134972, AI251436, AI568678, AW162489, |
| | | | | | AA302963, AW406162, AI921188, AW440836, AC004743, AL031005, AP001172, |
| | | | | | AC005037, AC006449, AC005324, AC004862, AC006241, AL031729, Z97053, |
| | | | | | U62293, AC007450, AF042090, AB023052, AC005785, AL117352, AC004263, |
| | | | | | AC005234, AC006468, AC002044, AC006115, AC006044, AP000513, AP000557, |
| | | | | | AC003026, AL022322, AB023049, AC010206, U63721, AP000020, AP001054, |
| | | | | | U91321, AC009516, AC005051, AC002542, AC005755, AC006487, AC009223, |
| | | | | | AC005280, AP000553, AC005261, AL050341, AL078477, AC007676, Z83846, |
| | | | | | AF134726, AD000684, AL031276, AL031965, AL021391, AC005218, AL096701, |
| | | | | | AF088219, AC005520, Z99758, AP000556, AC006079, AP000302, AC008039, |
| | | | | | AC005358, AC005341, AP000115, AC005412, AL096774, AL117258, AL034371, |
| | | | | | AC002429, U78027, AF015147, AL031123, U67221, AC005011, Z86061, |
| | | | | | AC006430, AL121603, AC004067, U07000, AC007308, AL031286, AP000503, |
| | | | | | AL096768, AC006985, AC007263, U07562, AL035659, AC005844, AF077058, |
| | | | | | AP000114, AP000046, AL035422, AC008079, AL008735, AC006213, Z94056, |
| | | | | | AP000359, AC000026, AP000304, U66059, AP000047, Z98200, AL022476, |
| | | | | | AC007842, AC005488, AC005288, AP000558, AL132987, AF123462, AC005778, |
| | | | | | AF109907, AC002525, AC004491, Z99129, AL035420, AC005004, AP000351, |
| | | | | | AL021707, Z98257, AC004492, AC005837, AL008629, AC002059, AL034561, |
| | | | | | AL021368, AC004531, AL022311, AL049569, AC002365, AC005747, AC005231, |
| | | | | | AL023575, AC006277, AL035417, AC007687, AL049759, AC004913, AL021393, |
| | | | | | AC005900, AL031651, AC002452, AC004158, AL078472, U95743, X75335, |
| | | | | | AC002549, AC005104, AL109753, AC004941, L48038, AC007731, AC004605, |
| | | | | | AC006071, AC004675, AC005500, AP000555, AC006459, AL139054, U62317, |
| | | | | | AC005043, AL035587, AC002460, AC003101, AC005664, AC002985, AP000348, |
| | | | | | AL021940, AC007043, AF015167, AP000356, AC005971, AC005257, AC005531, |
| | | | | | AC005175, AC004152, AP000950, AL109852, AC003074, AL031295, AP000689, |
| | | | | | AC005699, AC005682, AF045555, AL035683, AL031848, U47924, AL049562, |
| | | | | | AL021808, U80017, AC006211, AC004028, AC004253, Z95124, AC004987, |
| | | | | | AP001053, AL021977, AC000075, AL049835, AC012599, Z82244, AL096791, |
| | | | | | AC005072, AC022517, Z82210, AC004773, AF017104, AC007565, U18399, |
| | | | | | AF037338, AL022147, AC006998, AC003041, AC005057, AC007151, AL031542, |
| | | | | | and AF001550. |
| HSSAZ04 | 659 | 933015 | 1-447 | 15-461 | AW104609, AA731470, AA378296, AA093496, AA648807, and AC005768. |
| HSSAY34 | 660 | 703345 | 1-399 | 15-413 | R35953, AA378260, AL137558, and AB033041. |
| HSSAP68 | 661 | 564334 | 1-1137 | ‘15-1151 | AL041924, AA569648, AA595661, AW020150, AI801505, AA974503, AA577706, |
| | | | | | AI521525, AI310670, AL041375, AI479148, AI282253, AW162314, AL036896, |
| | | | | | AA669238, AW151541, AI251034, AA526542, AA287363, AI890297, AW338376, |
| | | | | | AA171400, AI250552, AA218684, AA515728, AA533025, N68677, AW302048, |
| | | | | | AL079734, AW020094, AW069227, AI224583, AW408413, AW021399, |
| | | | | | AW275432, AI251284, AI754653, AI926102, AA313025, AA084320, AI284543, |
| | | | | | AI537020, AI809776, AA583245, N26159, AA719564, AW410844, AI355246, |
| | | | | | AI879968, AW086291, AW162332, AA180056, AI625604, AA610826, AA218851, |
| | | | | | AA935827, AI904840, H77492, AI732151, AI223626, AA197089, AI049845, |
| | | | | | AA829036, AI791659, AA601674, AI345394, AI095197, AI003626, AI049643, |
| | | | | | AW439224, AA584765, AW419389, N95424, AI753131, AI310787, AI719298, |
| | | | | | AI254770, AI733523, AA659324, AA225406, AW274182, AL121039, AI349130, |
| | | | | | AI702049, AI453155, AA598443, AW022796, AI570236, AI915081, AI697235, |
| | | | | | AI654738, AI570067, AI216990, AC006312, AC007151, AC002477, AC005696, |
| | | | | | AF001549, AP000046, AP000114, AC006064, AL024498, AC005480, AC004263, |
| | | | | | AL022323, AC005911, AC005207, AL008718, AL020997, AC002425, AL031602, |
| | | | | | AL031053, AL136295, AL031311, AC006480, AL049869, AC006071, AC007057, |
| | | | | | AL049570, AC004526, AC007055, AF196779, AL031680, AC004659, AF001548, |
| | | | | | AC003101, AF207550, AC005231, AC002312, AC005736, AC006121, AL021918, |
| | | | | | AL034451, AC005049, AF109907, AL034379, AL021393, AL049780, AL050312, |
| | | | | | AC002310, AC005531, AC004000, AL133353, AL022336, AC005913, AC007688, |
| | | | | | AC003982, AL031229, AC002316, AL049694, AC005102, AL049757, AC005486, |
| | | | | | AC003043, AC003665, AC006487, AC005914, AL031685, AC016831, AL031662, |
| | | | | | AP000692, AC005702, AF053356, AC007371, Z94056, AC016025, AL133245, |
| | | | | | U95742, AP000359, AC002044, AL031295, AC007021, AC002400, AC007207, |
| | | | | | AC005081, AL080243, AC005015, AC008040, AC007376, AL078463, AC004671, |
| | | | | | AC005324, Z93023, AL022327, AC007685, AC005288, AC002369, AC007395, |
| | | | | | AL023803, AC006115, AC002470, AB023049, AP000503, AC010205, AL049759, |
| | | | | | AC004382, AC006449, AC005527, AL022476, AC005088, AC007637, Z86090, |
| | | | | | AL022396, AC007227, AL034420, AL035072, AL122021, AC004131, AC007686, |
| | | | | | AL031291, AL031284, L44140, AC006088, AC000025, U85195, AC006581, |
| | | | | | AC002375, AP000555, AC005755, AC004796, AC005225, AP000065, AL139054, |
| | | | | | AC007308, AP000556, AL050341, AL109952, AL035587, AC007687, AE000658, |
| | | | | | AC006046, AL021155, AC004812, AC004890, Z95115, AL008583, AF111169, |
| | | | | | AC005821, AL109758, AC002303, AC004185, AC004699, AC005921, AP000688, |
| | | | | | AC004797, AL049793, AL021546, D87675, AC006023, AL049776, AC004491, |
| | | | | | AC004752, AP000501, AL022316, AC006965, AC002314, AJ003147, AP000514, |
| | | | | | AC005086, Z95113, AC006252, AL109627, AB000565, AC007225, AC004223, |
| | | | | | AC007845, AL034417, Z94801, AL034429, AL096791, AC004686, AC003109, |
| | | | | | AC004905, AC007664, AC005412, AC002544, AL022238, AC006077, AC009516, |
| | | | | | AC007011, AL021707, AC006241, AL023575, AL022313, AC005670, AC005619, |
| | | | | | Z93241, AF024533, AC005255, AL049569, AL035249, AC004814, AC009509, |
| | | | | | AC005529, AP000142, AP000509, AC004816, D84394, AC004253, AC004099, |
| | | | | | AC005726, AC009247, AC004876, AF134726, U62293, AC007193, AC004832, |
| | | | | | AC007684, AC005484, AC003108, AC007216, AC004112, AC005972, U91321, |
| | | | | | AF111168, AL117258, Z94161, AC005280, AL031123, AL121603, AC003663, |
| | | | | | AC005901, AC005971, AL022326, AC004552, AL133216, U91323, Z97056, |
| | | | | | U82828, AC003042, AL031282, AC002565, AL049539, AC005291, U89335, |
| | | | | | AC005800, AC005399, AL035681, Z84466, AC004765, AL031846, AC004963, and |
| | | | | | AL035443. |
| HSSAJ89 | 662 | 875882 | 1-302 | 15-316 | W92215, AA377828, AI740584, N76763, T84274, R82785, T78575, R17095, |
| | | | | | T87269, R11236, and T79354. |
| HSSAE52 | 663 | 871244 | 1-167 | 15-181 | AI472653, and AA377685. |
| HSSAA15 | 664 | 965347 | 1-796 | 15-810 | AI110596, AA278446, R76143, AA312497, AA284193, AA355145, AA490794, |
| | | | | | AA377558, N79277, AA464226, AA363394, R24680, AA490748, AI902621, |
| | | | | | H56984, AA340607, R69950, AI830706, N78524, AW364076, H13787, AA366038, |
| | | | | | N80360, AA442589, AA046344, AA813247, AA215532, H45795, AW250076, |
| | | | | | AA147663, AI393282, AA282719, AI089657, AW043798, AI652874, AA557376, |
| | | | | | AW167542, AI982882, AA490235, AI143182, AI439663, AI017552, T89683, |
| | | | | | AW408401, AW402303, AA534702, AA284082, N51261, AI357897, AI089649, |
| | | | | | C14798, D60855, AA490509, AA864859, AA262577, AA812466, and AL133009. |
| HSRAY10 | 665 | 961237 | 1-731 | 15-745 | AI565051. |
| HSRAS82 | 666 | 780222 | 1-259 | 15-273 | AW385413, N78312, and U73168 |
| HSRAF70 | 667 | 524680 | 1-393 | 15-407 | AB011100. |
| HSRAF11 | 668 | 967886 | 1-296 | 15-310 | AC002133, and AC004587. |
| HSRAD72 | 669 | 539530 | 1-434 | 15-448 | R06151, AA385070, AA398993, AA491011, H28273, R00914, H69631, H87597, |
| | | | | | R17024, AW362296, AA064980, AI065074, H28240, AA043619 AA032023, |
| | | | | | AA069630, W81414, N76651, AA037103, H61103, AA243289, R02831, H28759, |
| | | | | | AL120864, T70140, AI735280, AA337374, AF191339, and AB019409. |
| HSRAD65 | 670 | 871268 | 1-239 | 15-253 | AL119835, AW163089, AW162617, AI928782, and AW162588. |
| HSRAD53 | 671 | 525490 | 1-321 | 15-335 | |
| HSRAD49 | 672 | 722134 | 1-377 | 15-391 | AI394551, AA812658, and AA776285. |
| HSRAD31 | 673 | 524845 | 1-235 | 15-249 | |
| HSRAD10 | 674 | 968614 | 1-464 | 15-478 | AA312660, and AI474863. |
| HSRAD03 | 675 | 925505 | 1-303 | 15-317 | AC002536. |
| HSRAB87 | 676 | 823174 | 1-325 | 15-339 | AA661583, AI536625, AA078084, AI803827, AI472453, AI932902, T60674, |
| | | | | | AA377621, AA302970, AA372389, F23307, AA496309, AA346485, AW192199, |
| | | | | | AA366936, AA459962, AA371410, AW194802, AC005944, AP000553, AC005895, |
| | | | | | AF165926, Z84718, AC005277, AC005358, AC005971, AL136295, AC005619, |
| | | | | | AP000351, AC005696, Z97054, AC004019, AC002470, AC005225, AC005280, |
| | | | | | AC006515, AC006511, AC007421, AC005940, U78027, AF129756, AC007731, |
| | | | | | AL049653, AL031255, AL035422, AP000505, AL133353, AC005071, AP000512, |
| | | | | | AP000114, AP000046, AC007546, AC020663, AC006946, AL133448, AL031280, |
| | | | | | AL049694, AP000555, AC005746, AC005821, AC005231, AC005500, AC005067, |
| | | | | | AL031722, AC006538, AC005911, AL022331, AL021154, AB023051, AC006509, |
| | | | | | AL035458, AL121934, AP000300, AP000045, AP001056, AL035405, U63721, |
| | | | | | AP000302, Z97056, AL049829, Z86090, AL121653, AF207550, AC004859, |
| | | | | | AL031733, AL008719, AC004814, AC002996, AL049757, AF029308, Z99716, |
| | | | | | AC005041, L78833, Z69917, AL080243, Z85986, AP000113, AL022324, AF196779, |
| | | | | | AC004841, AC007319, AC000025, AL008582, AC006057, AL031311, AC004983, |
| | | | | | AP000557, U91326, AL049872, AL132987, AC006449, AC004963, AC004883, |
| | | | | | AC005288, AC007066, AC005664, AL034548, AC002072, AL050318, AC005529, |
| | | | | | AC002504, AP000031, Z98946, AC003041, AP000345, AC004552, AC007298, |
| | | | | | AL031291, AL049759, AC005694, AL109627, Z92540, AC009516, U52112, |
| | | | | | AC004386, AC005095, AC006479, AC004448, AC005082, Z81369, AC005599, |
| | | | | | AC006992, AF205588, AC000041, AP000563, AC005755, AC005412, AC006539, |
| | | | | | AC006077, AL121603, AL049636, AL031432, AC003030, AC004134, AC004771, |
| | | | | | AL033527, AC002073, AL121915, AL139054, AC002401, AC007283, AC011311, |
| | | | | | AJ003147, AL132712, AL049539, AL133243, AL021977, AC007277, AC004099, |
| | | | | | AC002369, AC005519, AC000353, AC005606, AC003051, AL132992, AC005355, |
| | | | | | AC005695, AL035089, AL079295, U85195, AC005773, AC007308, AC004884, |
| | | | | | AC008041, AC002492, AC005527, AC008115, AC004217, AC007216, AC000379, |
| | | | | | AC002301, Y14768, AL034429, AL008718, AL049795, AC004643, |
| | | | | | Z98051, AC005924, AL024498, AP000133, Z83843, AF109907, |
| | | | | | AF064861, AC008055, AC004655, AC006125, U62292, L44140, AL096701, |
| | | | | | AC002316, AC004821, Z83846, AC016026, AC002120, AR060470, AC016830, |
| | | | | | AC004559, AC005261, Z93017, AND AC004216. |
| HSRAB82 | 677 | 522945 | 1-388 | 15-402 | AL031733. |
| HSRAB76 | 678 | 508105 | 1-393 | 15-407 | AW003750, and AA608656. |
| HSRAB36 | 679 | 522946 | 1-376 | 15-390 | AC005352. |
| HSRAB34 | 680 | 706996 | 1-399 | 15-413 | L14561. |
| HSRAB08 | 681 | 960411 | 1-134 | 15-148 | |
| HSRAA86 | 682 | 527194 | 1-415 | 15-429 | Z66025. |
| HSRAA80 | 683 | 937640 | 1-446 | 15-460 | AC006504, AC007788, AL020995, AL031393, and AC006118. |
| HSRAA64 | 684 | 955314 | 1-315 | 15-329 | AC005924. |
| HSRAA51 | 685 | 522834 | 1-314 | 15-328 | AA287418. |
| HSRAA39 | 686 | 719712 | 1-406 | 15-420 | W57866, AA405363, AW068952, AI347952, AW338731, AW262930, AI650770, |
| | | | | | AI827045, AA406218, AI224572, AI983500, AI659859, AW139817, AI367100, |
| | | | | | AW029065, AA860374, N29563, AI683067, AI148585, AI963162, AA457121, |
| | | | | | AI830485, AW129125, AI983651, AI800368, AA115644, AI817037, H26177, |
| | | | | | AI590898, AI811420, AI963645, AA857298, H99276, AW088836, AI421113, |
| | | | | | H22014, AI753020, Z40200, F04312, AI751902, AA131162, AI698346, AI955784, |
| | | | | | AI290179, R22616, AI955793, AA834648, AA826157, AW057686, R62159, T33749, |
| | | | | | AW392341, H26176, AW274070, AI750657, R22615, AL096713, AB033033, |
| | | | | | AF182317, and AF182316. |
| HSRAA37 | 687 | 522837 | 1-444 | 15-458 | AC007684. |
| HSRAA24 | 688 | 795855 | 1-465 | 15-479 | T80334. |
| HSRAA23 | 689 | 524795 | 1-406 | 15-420 | AI783911, AA502532, AA552724, AA481887, AA376358, AA604147, AA452887, |
| | | | | | F30310, H90878, R95840, AA584756, AA613754, N72170, AA559241, AL048275, |
| | | | | | AA192252, AA975894, AA181363, AI879951, AW265688, AI620585, AA194285, |
| | | | | | AI742168, AI358776, AA564925, AA936718, H62343, AA581247, AA339923, |
| | | | | | AA021429, AA018588, AA021428, AA722336, F00564, R73744, AI431513, |
| | | | | | AA019872, AA470567, AA708753, H78898, AA862253, AA747757, AA078830, |
| | | | | | AA605243, AI302156, AA481970, Z83844, AC006271, AC007226, AC006538, |
| | | | | | AC004841, AC005620, AC005531, AP000030, AC004131, AF196969, AC005696, |
| | | | | | AC006581, Z93930, AC005274, AL080243, U91323, AC000026, AP000694, |
| | | | | | AC006011, AC005011, AC005800, Z98051, AC002059, U91326, AC004815, |
| | | | | | AC005480, AC005736, AL021579, AC006071, AC004887, AC008044, AC005527, |
| | | | | | AL034379, AC005225, AC004526, AL117337, AC005399, Z93023, AC005844, |
| | | | | | Z95116, AC004033, AL050332, AL049766, AC005876, AC007546, AC020663, |
| | | | | | AC006312, AC006966, AC007686, AP000553, AL121658, AC005516, AL133353, |
| | | | | | AC004491, AC004477, AC004929, AC002312, AL008710, AC005193, AC004019, |
| | | | | | AC007688, AC004996, AC003108, AC005667, AL096701, AF196970, AL022320, |
| | | | | | AC005015, Z98946, AL133448, AL008582, AC006468, AC002316, AC004263, |
| | | | | | Z97054, AC008072, AF111168, AC006515, AC002072, AC004551, AC005874, |
| | | | | | AF134471, AC002492, AC012627, AL035587, AL035088, AC005081, AC005358, |
| | | | | | AF053356, Z93017, AL022318, AC004914, U80017, AL050318, AC006449, |
| | | | | | AC006441, AL022323, AC004531, Z84466, AC005046, AC006064, AC004921, |
| | | | | | AL022238, AC000353, AL024506, AL035461, AL034549, AC005529, AL117258, |
| | | | | | AF205588, AL021707, AC005200, AC005839, AL109984, AC004659, AF111169, |
| | | | | | AC009516, AL022336, AP000501, AF109907, AL135744, AF111167, AC004832, |
| | | | | | AC006948, AL034420, AC016027, Z95114, Z98200, AC007308, Z81365, |
| | | | | | AC006111, AC003665, AC005730, U95090, AC000052, U91318, AC016830, |
| | | | | | AC002302, AL023807, D87675, AC006511, AF001549, AL031685, AL031680, |
| | | | | | AC005971, AP000704, AC004858, U07563, AC004087, Z95115, AC004408, |
| | | | | | AC007285, AC005914, AC007225, AC002369, AL034553, AC002476, AC005585, |
| | | | | | AC005088, AJ246003, AL049576, Z83826, AL139054, AC003684, AL035455, |
| | | | | | AL031597, AC002314, Z82203, L78833, AC004622, AC002094, AC006120, I34294, |
| | | | | | AL079342, AC005697, AC005086, AL031432, AL009172, AC005694, AC005231, |
| | | | | | AC002563, AC004812, AP000131, AP000209, AL031587, AL031283, AC004967, |
| | | | | | AC004851, AC005913, AC005067, AL049694, AC005755, AC004134, AL031657, |
| | | | | | AL031846, AC006509, AC004638, AF165926, AC007151, AL031848, AP000251, |
| | | | | | Z98884, AC006130, AL078638, AC005488, AP000355, AC003101, AC005037, |
| | | | | | AC004801, AC004859, AL035462, AP000090, AC005049, AJ251973, AL049631, |
| | | | | | AC007298, AC006088, AC006480, AC010205, AL049569, AL033527, AL034418, |
| | | | | | AC003661, AC005411, AC002425, AL050341, AC004821, AL096791, and U47924. |
| HSLKB62 | 690 | 905738 | 1-1727 | 15-1741 | |
| HSLKB37 | 691 | 929743 | 1-687 | 15-701 | N68327, AW139202, AI350326, AI279786, AW339260, AA513265, H66480, |
| | | | | | H38171, AI187961, and H69151. |
| HSLKA06 | 692 | 934638 | 1-838 | 15-852 | AI623826, AI202494, and AL137429. |
| HSLJJ62 | 693 | 742895 | 1-423 | 15-437 | R10605, T97572, and R91642. |
| HSLJF33 | 694 | 938811 | 1-542 | 15-556 | T12297, and T12296. |
| HSLJD02 | 695 | 965826 | 1-942 | 15-956 | AW360811, AW366296, AW375405, AW177440, AI905856, AW178893, |
| | | | | | AW377671, T03269, AW177501, AW177511, AW360844, AW360817, AW352117, |
| | | | | | C14389, AW179328, AW375406, AW378534, AW179332, D58283, AW377672, |
| | | | | | AW179023, AW178905, D59859, AW352170, D80022, C14331, D80166, D80195, |
| | | | | | D80193, D59927, D59467, D51423, D59619, D80210, D51799, D80391, D80164, |
| | | | | | D59275, D80240, D80253, D80043, D59787, D80227, D59502, AW378532, |
| | | | | | AW367967, D81030, D81026, AW178980, C14014, D80212, D80196, D80188, |
| | | | | | D80219, AW178775, AA305578, D80038, C15076, D80269, D59610, AW377676, |
| | | | | | AA305409, AW352171, D57483, C14429, D51022, D50979, D50995, AW177731, |
| | | | | | D80366, D59889, AW178907, AW178906, AW178762, D80248, D80045, D80132, |
| | | | | | AW179019, AW179024, D80522, D80024, D80134, AA514186, AA514188, D80378, |
| | | | | | D51060, D80133, D51097, AW177505, AW179020, AW178909, AW177456, |
| | | | | | D80251, AW179329, AW177733, AW378528, AW178908, AW178754, AW179018, |
| | | | | | AW352158, D58253, AW352174, D80268, AW179004, D80302, AW178914, |
| | | | | | AI535850, C75259, D80439, D80247, AW178774, T48593, D51103, D88547, |
| | | | | | X82626, A84916, A67220, D89785, A62300, A62298, Y17188, AB028859, A78862, |
| | | | | | D34614, D26022, AI132110, AR018138, AR008278, X67155, Y12724, AF058696, |
| | | | | | A25909, A94995, AB012117, AR025207, I18367, AR008443, I19525, AR066490, |
| | | | | | A85396, D88507, AR066482, A44171, A85477, A86792, AR066488, X93549, |
| | | | | | A82595, AR016514, D50010, D13509, AR060138, A45456, A26615, AR052274, |
| | | | | | Y09669, AR060385, AB002449, AR066487, A43192, A43190, AR038669, |
| | | | | | AR008408, and AR060133. |
| HSLIJ48 | 696 | 721248 | 1-916 | 15-930 | AL119990, AA524531, AI459232, AW295852, AW274849, AI990971, AI086621, |
| | | | | | AI703399, AI582316, AI887899, AW444954, AI198620, AI201159, AA769116, |
| | | | | | AA908833, AI769819, AI761662, AI678189, AI638810, AW001104, AW339272, |
| | | | | | AI025272, AW151222, AW015232, N30310, AI797112, AA781447, AW083242, |
| | | | | | AA291544, AW003604, AA831760, AI027612, AI624665, AW276610, AW168171, |
| | | | | | AW170708, T62956, AA442455, AI807572, AW080508, AI052790, AW378235, |
| | | | | | AA827853, AA737447, AI969056, AA465529, H03505, R78862, AW205495, |
| | | | | | AA515398, T88738, AI972735, AA436647, AA805386, H03615, N56642, AI825714, |
| | | | | | AA293351, AW292091, AI473377, AA404571, AI349471, T63206, R79349, |
| | | | | | AA399447, Z38283, AI582475, AA252529, AA252574, AA708728, AI670981, |
| | | | | | AA429843, C06324, AA748807, AI650622, AW392315, and D20600. |
| HSLIG07 | 697 | 952493 | 1-766 | 15-780 | N31935, AI433732, N20982, AA736780, AA721230, AA460997, and AA018340. |
| HSLIE03 | 698 | 923393 | 1-636 | 15-650 | AA164206, and Z98049. |
| HSLIC21 | 699 | 670359 | 1-499 | 15-513 | H22544, AI204929, and H46842. |
| HSLHZ82 | 700 | 779067 | 1-512 | 15-526 | H72516. |
| HSLHZ10 | 701 | 963808 | 1-294 | 15-308 | T57527. |
| HSLHV27 | 702 | 964075 | 1-999 | 15-1013 | T03269, D80212, D58283, D80166, D80195, D80193, D59927, D51423, D59619, |
| | | | | | D80210, D51799, D80391, D80240, D80253, D80043, D80227, D59859, D80196, |
| | | | | | D80188, D80219, D80269, D80038, C14429, D59889, D81030, D80366, D59502, |
| | | | | | D57483, D80022, D59275, D80045, D59610, D80024, AW178893, D80378, D50979, |
| | | | | | D50995, AW177440, C14389, AW179328, D59787, D80241, C14014, C75259, |
| | | | | | D80164, D51060, AI905856, C14331, D80134, D59467, AW378532, C15076, |
| | | | | | D51097, AW178775, AW177501, AW177511, AA305409, AW352158, D81026, |
| | | | | | AA285331, F13647, AW178762, AW352117, D80949, D80168, AW360811, |
| | | | | | AW176467, D51022, D58253, D80522, AW377671, AW377672, AA305578, |
| | | | | | AW375405, AW360834, AW360844, AW366296, AW360817, AW179023, |
| | | | | | AW375406, AW178905, AW378534, D80248, AW179332, AW352172, AW177731, |
| | | | | | D59695, D80251, AW352171, AW377676, AW179019, AW352170, AW179024, |
| | | | | | AA514188, AW178907, AW179220, AW177733, AW177505, AW179020, |
| | | | | | AW178909, AW177456, AW378528, AW179018, D80268, AW179329, AW178908, |
| | | | | | AW178754, AA514186, D80133, AW178906, AW178980, AW367967, AW179004, |
| | | | | | AW178911, AW178914, C05695, AW352174, AW178774, D80132, D80302, |
| | | | | | AW178983, T48593, D80439, D80247, AW177723, AW378533, D80157, D51103, |
| | | | | | AW367950, AA033512, AW178986, D45260, C06015, AI535850, C14975, |
| | | | | | AW378542, D80314, C03092, AW360855, AI525923, AI525913, AI525917, |
| | | | | | AA514184, AI535959, A84916, A67220, D89785, A62300, A62298, A78862, |
| | | | | | AJ132110, X67155, A25909, Y17188, D26022, D34614, AR025207, D88547, |
| | | | | | X82626, AR018138, A8012117, Y12724, A85396, AR066482, X68127, A44171, |
| | | | | | AF058696, A85477, I19525, A86792, AR008278, X93549, AB028859, U87250, |
| | | | | | A94995, AF135125, AR008443, I50126, I50132, I50128, I50133, AR016514, |
| | | | | | A82595, AR066488, AR060138, A45456, A26615, AR052274, D88507, AR064240, |
| | | | | | A43192, A43190, AR038669, A30438, D50010, Y09669, AR060385, I18367, |
| | | | | | AR066490, AB002449, AR066487, AR008408, AB033111, Y17187, A63261, |
| | | | | | D13509, AR060133, AR062872, A70867, U87247, A64136, A68321, Z32749, |
| | | | | | AR016691, AR016690, U46128, U79457, AF123263, I14842, X93535, and |
| | | | | | AR008382. |
| HSLHG49 | 703 | 722570 | 1-455 | 15-469 | T76925, and F13028. |
| HSLHC40 | 704 | 710681 | 1-386 | 15-400 | H87626, and H87632. |
| HSLGY08 | 705 | 959371 | 1-459 | 15-473 | H52847, and U73638. |
| HSLGQ48 | 706 | 720956 | 1-450 | 15-464 | R14758. |
| HSLGP07 | 707 | 953305 | 1-430 | 15-444 | H52460. |
| HSLGO19 | 708 | 668634 | 1-530 | 15-544 | T69707, AI364440 N48142, and AI193460. |
| HSLGN78 | 709 | 773565 | 1-345 | 15-359 | AA648821, AI937873, AW241962, AA085600, AA743475, and AA618255. |
| HSLGN52 | 710 | 466026 | 1-268 | 15-282 | N44280, and AF030339. |
| HSLGK46 | 711 | 719031 | 1-479 | 15-493 | AI929533, AA143673, AF160973, AB032994, AL136549, and AF162472. |
| HSLGK26 | 712 | 929286 | 1-594 | 15-608 | R02405, AI902990, AL049742, and AB033071. |
| HSLGK23 | 713 | 675266 | 1-447 | 15-461 | AA761431, W23694, and W35274. |
| HSLGJ37 | 714 | 708824 | 1-438 | 15-452 | R14817. |
| HSLGI76 | 715 | 770035 | 1-643 | 15-657 | W03269. |
| HSLGI67 | 716 | 465989 | 1-681 | 15-695 | R15431, R43754, R41977, AI684818, AW263190, R20728, and AA764976. |
| HSLGH70 | 717 | 871888 | 1-613 | 15-627 | AA020737, AL120362, T04912, AI207884, and AL120567. |
| HSLGG86 | 718 | 784703 | 1-573 | 15-587 | R13205, F06363, Z42917, Z42916, and AC005550. |
| HSLGG79 | 719 | 775146 | 1-469 | 15-483 | N49335, N32155, AI378923, AA825350, AI168537, T75454, AA553340, and |
| | | | | | AC003086. |
| HSLGA79 | 720 | 774051 | 1-487 | 15-501 | T89229. |
| HSLGA45 | 721 | 717776 | 1-198 | 15-212 | AA456710. |
| HSLGA24 | 722 | 955333 | 1-793 | 15-807 | |
| HSLFU18 | 723 | 666405 | 1-975 | 15-989 | AI948585, AI091275, AI768335, AA002188, AA054389, AI422809, AA625455, |
| | | | | | AA152352, AA504767, AI091665, AI274082, AI151107, AI356672, AI276227, |
| | | | | | AW363928, AW293599, AI379300, AA028994, T06356, AI401834, D25946, |
| | | | | | Z41039, AA152353, H09081, AI695174, AL118909, AA429474, AI079113, and |
| | | | | | AC008154. |
| HSLET29 | 724 | 680451 | 1-448 | 15-462 | |
| HSLFN96 | 725 | 796375 | 1-267 | 15-281 | |
| HSLFI01 | 726 | 876881 | 1-458 | 15-472 | R74609, AW080754, AL049611, and D31762. |
| HSLED70 | 727 | 757319 | 1-501 | 15-515 | AA463820, AW177073, AA235749, and AI940206. |
| HSLEB84 | 728 | 783130 | 1-422 | 15-436 | H02965. |
| HSLDW24 | 729 | 779689 | 1-442 | 15-456 | AW237453, N56967, N47347, AA436760, R96401, H73070, and AC005082. |
| HSLDT25 | 730 | 949079 | 1-1531 | 15-1545 | |
| HSLDR18 | 731 | 578926 | 1-371 | 15-385 | |
| HSLDR05 | 732 | 932128 | 1-220 | 15-234 | |
| HSLDP66 | 733 | 866331 | 1-389 | 15-403 | AW151855, AC006597, AC004796, AC005844, AC005740, AC007563, AL049780, |
| | | | | | AC005015, AC006530, Z99716, AP000350, AC002365, AC004408, AC005747, |
| | | | | | AC004552, AC005663, AC007057, Z83820, AC005670, AC005242, AC009501, |
| | | | | | AL034343, and AC004125. |
| HSLDO01 | 734 | 916969 | 1-303 | 15-317 | |
| HSLDM82 | 735 | 780055 | 1-533 | 15-547 | T53015, T53016, and U88969. |
| HSLDF25 | 736 | 430328 | 1-541 | 15-555 | |
| HSLCY75 | 737 | 766533 | 1-536 | 15-550 | W88780, and AC000078. |
| HSLCX61 | 738 | 742031 | 1-538 | 15-552 | H19015, R24546, and AC007676. |
| HSLCF96 | 739 | 637670 | 1-1575 | 15-1589 | |
| HSLBW39 | 740 | 705630 | 1-419 | 15-433 | AA190333, and AB029001. |
| HSKZE91 | 741 | 790166 | 1-531 | 15-545 | AI904945,T48340, AI921328, AI147425, AW264955, AL079935, AF111163, |
| | | | | | AC004765, AL109827, AP000503, AF134726, AJ003147, AP000201, AF124731, |
| | | | | | AP000097, AL031295, AC000105, AC002565, AC006367, and AC004032. |
| HSKYG48 | 742 | 721631 | 1-294 | 15-308 | AI204981, W23546, AA862243, AA579469, AA749235, AA572960, AA780929, |
| | | | | | AA808263, AA814778, AI446474, AA508873, AA857381, AL043289, H10143, |
| | | | | | AW022317, H29019, AW082744, AA634786, AA655005, T92957, AA577748, |
| | | | | | AW068394, AA384039, AI870204, AI623899, AA122028, AL120708, AA502175, |
| | | | | | AA426277, AL120897, AI216054, F17700, AI916335, F23327, AI754064, AI446464, |
| | | | | | AA558298, AI355119, AI908093, H45320, AA467988, AA492313, H10859, |
| | | | | | AA364814, AL133353, AL031289, AC007298, AC009479, Z98755, AC004815, |
| | | | | | AC005046, AP000348, AC008249, AL133244, AL133163, AL024498, AC008044, |
| | | | | | AL035455, U91323, AC002347, AC006965, Z97053, AL022318, AC005520, |
| | | | | | AC002477, AL031431, Z95889, AC007564, AC005089, AP000552, AF109907, |
| | | | | | AC002395, U95742, AC003029, AL035685, AL020993, AC005696, AB023049, |
| | | | | | AC005856, AC005837, AL031432, AF117829, AL109984, AC005071, AL117352, |
| | | | | | AL096864, U95740, AC004972, AC004675, AC009510, AC007536, AC005664, |
| | | | | | AL031012, AL050318, Z84466, AL050307, Z98051, AF190465, AL022312, |
| | | | | | AP000355, AC005632, AC005781, AC004149, AL132712, AF088219, Z85986, |
| | | | | | AF207550, AC000085, AC007216, AC005339, AP000117, AC005358, AL121653, |
| | | | | | AC007664, AC005291, AL035072, AC005412, AL021917, AC005776, AC000003, |
| | | | | | AC006450, AL031433, AF152365, AL031447, AF196969, AC004150, AC004797, |
| | | | | | AC002301, AL049694, AC005228, AC012384, AC006547, AC003071, AL031257, |
| | | | | | AP000553, AL049836, AC009516, Z98949, AC005057, AC003102, AC006285, |
| | | | | | AL031848, AC005907, AC004024, AC005538, AP000512, AC003992, AC010382, |
| | | | | | AC002524, AC006449, L78810, AC004765, AC005663, AC005747, AC005919, |
| | | | | | AF108083, Z82188, AL121603, AL031577, Z98752, AC007050, AC007283, |
| | | | | | AC007690, AF053356, AC005399, AC006257, AC002350, AC005500, AC002432, |
| | | | | | AF196779, AC008056, AL031685, AC003111, AL132777, AL023553, AC000075, |
| | | | | | AL008635, AL049776, AC006597, K00059, AL133448, AF196972, AL021453, |
| | | | | | AL096773, AC004883, AC004167, U47924, AL136295, AF129756, AC007376, |
| | | | | | AC004584, AC000084, AC005899, AC006211, AC007731, AC008018, AC006162, |
| | | | | | AC006271, AL033504, AC002351, AL080243, AL035587, AP000514, AC006077, |
| | | | | | AL022721, AC007136, AP000556, AL034402, AC002310, AC004814, AC005702, |
| | | | | | AL049797, AC004226, AL049869, AC007878, AC007191, AC004859, AC005839, |
| | | | | | AL022238, AL008726, AC006512, AC005037, AC006539, AC005790, U85195, |
| | | | | | AL133245, Z82190, Z83846, AC005189, AC004617, AL033521, AC005069, |
| | | | | | AL109985, Z84480, AC004477, AL031296, AC006120, AC004967, AP000313, |
| | | | | | AC005768, AC005988, AP000194, AL049757, AC004016, AC006530, AE000658, |
| | | | | | AC002980, AC005043, AC005701, AC004491, AC004000, Z99716, AL109627, |
| | | | | | AF001549, AP000050, AC005484, AC004983, U91629, AC005914, AC005070, |
| | | | | | AC006071, AC006365, Z85987, AC004810, Z84469, AL022163, AP000472, |
| | | | | | AC005971, AL031276, AC006130, AL121694, AL031277, AC008372, AC007917, |
| | | | | | U91326, AC004526, AC005932, AL031846, AL035089, AC006121, AP001054, and |
| | | | | | AC004849. |
| HSKXA69 | 743 | 754258 | 1-470 | 15-484 | T71620, AA534420, AA831032, AA594106, AI263883, AI761286, AA983957, |
| | | | | | AI001173, T92198, AW004790, and T89254. |
| HSKKE11 | 744 | 965857 | 1-231 | 15-245 | W16981, AF195534, and AF005355. |
| HSKJR15 | 745 | 866396 | 1-394 | 15-408 | AI287342, N49215, and AB020629. |
| HSKJG88 | 746 | 866402 | 1-543 | 15-557 | AI420428. |
| HSKII90 | 747 | 788894 | 1-628 | 15-642 | AA216387, AA228676, T63548, and T63473. |
| HSKHZ47 | 748 | 720286 | 1-623 | 15-637 | AA001179, AA001429, AA018483, AL119995, and AC007228. |
| HSKHT93 | 749 | 957866 | 1-437 | 15-451 | AA252410, AA095264, AA310368, AA282860, R88254, AA131559, AA043465, |
| | | | | | AA319576, AA315504, AF091871, and AF117815. |
| HSKHP10 | 750 | 964568 | 1-316 | 15-330 | AI810136, AA974689, AA889167, and AL137442. |
| HSKGS69 | 751 | 755046 | 1-321 | 15-335 | AI094227, R02713, T86217, W92159, W86709, AA885954, and W86575. |
| HSKEH21 | 752 | 941976 | 1-952 | 15-966 | AI675047, and U59429. |
| HSKDC06 | 753 | 935452 | 1-318 | 15-332 | R82607, R64237, and T92293. |
| HSKCR54 | 754 | 922730 | 1-743 | 15-757 | AA203533, AW129778, W67725, AI760143, AI760154, AI076011, AI141700, |
| | | | | | AW291405, AW084971, AI249711, AI860954, T56255, AA521444, AA933784, |
| | | | | | AI357440, AI126235, AW024151, AW054658, AI073421, AI332800, AI088159, |
| | | | | | AA740986, AI436661, AA636135, AA780513, AA844488, W68184, AI359009, |
| | | | | | AA505079, AA863180, AA011196, AA878994, AI360359, AA435579, N92742, |
| | | | | | AA083868, AI151305, AA098801, AA312160, AI291546, AI370946, AA074916, |
| | | | | | AI298772, AI219280, AI498113, AW451298, AI095138, AA011293, AA947145, |
| | | | | | AA948297, AI962142, AA563646, AA010799, N30192, AA398878, AI076091, |
| | | | | | AA307568, AA316691, AA039627, AA843701, AI266592, F16320, R56976, |
| | | | | | AI918303, AA928915, N40842, AA706164, N57341, AA074919, R76961, |
| | | | | | AA721373, AA098800, AW451443, N29414, AI475037, AA872862, AA083975, |
| | | | | | AA320742, AA010857, AI265777, and T56399. |
| HSKCD43 | 755 | 714389 | 1-492 | 15-506 | AA424097, AA452654, R02449, AF033120, AF033121, and AF033122. |
| HSKBW86 | 756 | 785783 | 1-351 | 15-365 | |
| HSKBW62 | 757 | 521937 | 1-316 | 15-330 | AA653323, AA598964, AA653202, AI732164, AI821721, AA745570, AA610482, |
| | | | | | AA569206, AA364953, AI624800, AI092525, AA564510, N25034, AC004253, |
| | | | | | Z83843, AC004386, Z95125, AL137312, AC005899, AL049709, AC007690, |
| | | | | | AC005746, AC003102, AC005616, AL133353, AC002456, AP000507, AL021154, |
| | | | | | Z97206, AC004699, AC004905, AC005844, AC004970, AC002326, AC004887, |
| | | | | | AC003047, AC005031, AC004999, U80017, S83170, AL031662, AC007314, |
| | | | | | AL035420, AL034561, AL135744, AC005011, AL022165, AL035090, AC006312, |
| | | | | | AB000880, AC006441, AC005903, AL031905, AL079342, AL139054, AC007151, |
| | | | | | AL078581, AC004491, AC004601, AL035587, AL050348, AL080243, AC005684, |
| | | | | | AC004832, AC004851, AC004938, AC009516, AC005200, AC006111, AC002978, |
| | | | | | AC002123, AC007425, AL078460, U82828, AC018633, AC004217, AC002465, |
| | | | | | AC002300, X76498, Z97055, AC007999, AC002302, AL035691, AL031003, |
| | | | | | AC007207, AB001523, AC002418, AC003010, AC008372, AL035361, AF111169, |
| | | | | | AC005553, and AL021578. |
| HSKBW21 | 758 | 671383 | 1-128 | 15-142 | AI218427. |
| HSKBV67 | 759 | 561585 | 1-245 | 15-259 | |
| HSKAE10 | 760 | 968508 | 1-680 | 15-694 | AI478821, AI034114, AW057617, and AI034113. |
| HSKAC29 | 761 | 535402 | 1-362 | 15-376 | AA381761. |
| HSJCA03 | 762 | 925252 | 1-450 | 15-464 | AA813174. |
| HSJAY64 | 763 | 866540 | 1-301 | 15-315 | T59788, and T59655. |
| HSJAB49 | 764 | 723261 | 1-325 | 15-339 | H60179. |
| HSHCL04 | 765 | 840406 | 1-1575 | 15-1589 | AI282710, AA469327, AW272815, AC007637, AL021154, AC007055, AL049780, |
| | | | | | AC007216, AL109827, AL035072, AC002369, AL096791, AL021453, AC002425, |
| | | | | | AP000501, AF196779, Z82206, AL031311, AC005837, AC006241, AC005409, |
| | | | | | L44140, AC004531, Z84469, AL133448, AC005520, AL022316, AP000689, |
| | | | | | AC005740, Z98941, AC005562, AC005914, AC004686, AC007263, AC004905, |
| | | | | | U91318, AC011311, AC005736, AC004525, AL110502, AC004217, AC004895, |
| | | | | | AC005899, AC005288, AC007298, AC005553, AL121658, AC005920, Z99716, |
| | | | | | AF109907, AC006064, AC005972, AL031447, AC005696, Z98742, AL133485, |
| | | | | | AC007225, AC004782, AC002492, AC004125, AL035420, AL022329, AC004985, |
| | | | | | AL008582, AC005280, AC004841, AC005911, AC018633, AC006006, AP000046, |
| | | | | | AP000140, and AL022320. |
| HSHCK86 | 766 | 785392 | 1-564 | 15-578 | |
| HSHCJ63 | 767 | 468536 | 1-489 | 15-503 | |
| HSHBU07 | 768 | 866636 | 1-443 | 15-457 | |
| HSHAH05 | 769 | 932689 | 1-379 | 15-393 | H02663. |
| HSCAF60 | 770 | 537444 | 1-372 | 15-386 | AI684502, and AL080250. |
| HRDFU03 | 771 | 924698 | 1-352 | 15-366 | R07659. |
| HRDFH46 | 772 | 590391 | 1-523 | 15-537 | AA102589, AA804174, and AA026519. |
| HRDFG13 | 773 | 925350 | 1-237 | 15-251 | AA443411, Z99716, and AI236681. |
| HRDFF47 | 774 | 740594 | 1-101 | 15-115 | H81628, N66263, and AL049835. |
| HRDFD56 | 775 | 733556 | 1-447 | 15-461 | AW051571, AA662497, AI022097, AA779814, AA649495, AA621426, D62952, |
| | | | | | AA621628, AI470588, D79237, N50823, R51630, AA019034, R42166, and |
| | | | | | AA887956. |
| HRDFA03 | 776 | 867122 | 1-974 | 15-988 | AI054414, AI608771, AI204309, AL037632, AA290878, AI791227, AA577824, |
| | | | | | AA714224, AI871954, AA547979, AI445582, AW405593, AA287259, AL048969, |
| | | | | | AI133516, AA206629, AI922805, AA601425, AI907046, AA838140, AW238345, |
| | | | | | US1704, AI061646, AL042310, AA443390, AA708108, AA429020, AI581006, |
| | | | | | AI281401, AI925321, AA737309, AW247819, AA829044, AA311156, AA524604, |
| | | | | | W96277, AA610433, AL135377, N49425, AA595093, AI110760, AA581471, |
| | | | | | AI679782, AA603315, AL079869, AA224525, AL138265, AA209415, AI354847, |
| | | | | | AI889426, AA287618, AA429197, AI745133, AC004797, AC005015, AP000134, |
| | | | | | AP000212, AL031281, AC009516, AC006211, U95742, AC007227, AC006285, |
| | | | | | AF047825, AP000692, AP000030, AL049569, AF109907, AC004019, AL049776, |
| | | | | | AL024507 AC007193, AL022238, Y10196, AC007216, AC007637, AC005519, |
| | | | | | AP000558, AC006312, AC004659, AC002477, AL022320, AP000152, AC005696, |
| | | | | | AC005529, AC006480, AC004832, AL049636, AL049869, AC004865, AC007011, |
| | | | | | AC000025, AC005527, AC004217, AC006449, U85195, AL008716, AC009247, |
| | | | | | AL034420, AL021707, AC007546, AC005480, AC005037, AC006064, Z97630, |
| | | | | | AL034423, AC003043, AC002288, AL031311, AB023049, AC007688, AF207550, |
| | | | | | AE000658, AC004685, AL022476, AC016025, AL031284, AC006530, AC002316, |
| | | | | | AL035422, AL078581, AC007014, AC005785, AC005280, AC000353, U96629, |
| | | | | | U95740, AC004876, D88270, AL022316, AC002350, AC007308, U80017, |
| | | | | | AF045555, AL031848, Z98044, AC007684, AL133448, AC002314, AC002039, |
| | | | | | AC005081, AL096701, Z99716, AC002565, D86992, AC004253, AC005412, |
| | | | | | AC007387, AC004815, AC003108, AC005231, Z95152, AF031078, AC005736, |
| | | | | | Z85996, AC005488, AC005180, Z83844, Z93241, AC002310, AC004858, |
| | | | | | AC004675, AP000501, AL031447, AF030876, AL023807, AC005207, AC004686, |
| | | | | | AC000035, AL049780, AC002126, AC003101, Z95114, AC004878, AL049709, |
| | | | | | AC010205, AL049759, AP000553, AC005295, AC000134, AL049766, AC005274, |
| | | | | | AC002470, AC005821, AL031659, AC005071, AC004000, AL035086, AL035405, |
| | | | | | Z97054, AL049643, AP000113, AC004812, AP001052, AL022328, AC006571, |
| | | | | | AF001549, AL121652, Z98742, AP000689, AL021546, AL020997, AC004967, |
| | | | | | AC006966, Z98036, AC006441, AL049757, AL021154, AC005082, AC005920, |
| | | | | | AC005088, AC003695, AF038458, AF088219, Z68870, AC006130, AC006115, |
| | | | | | AC007919, AC006487, AC002303, AC005859, AC004765, AP000502, AL121825, |
| | | | | | AC004383, AL022237, AL096791, AC007934, AP000045, AL031680, AC005666, |
| | | | | | AC005225, U95743, AP000552, Z82190, AC005839, AL031597, AL022326, |
| | | | | | AC004883, AC005793, AC005921, AC005089, AC005031, AC002352, Z93930, |
| | | | | | AC005516, AC004851, AF129756, AC012384, AC007664, AC005520, AL050321, |
| | | | | | AC007225, AC007371, AL109798, AC007066, AC003690, AC005632, ALI21655, |
| | | | | | AC004882, AL050348, Y14768, AC005914, AC005972, AC007358, AL050341, |
| | | | | | AL050318, AC004477, AC004491, AC002425, AC005971, AL009181, AL109827, |
| | | | | | AC007192, AF001548, AC004638, Z93023, AC005324, AP000505, AL080242, |
| | | | | | AL133243, AC005544, AC007676, AC006120, AC004933, AF111168, AL079342, |
| | | | | | U82828, AC002472, AC005387, Z83822, U91321, AL022165, AC002558, |
| | | | | | AL050332, AP000688, L78810, AC002544, AC005011, AL049872, AC005041, |
| | | | | | AJ003147, and AC005399. |
| HRDEZ73 | 777 | 774414 | 1-371 | 15-385 | H26725, H22204, R48422, H40444, AW299397, AI125783, AI003778, AA470331, |
| | | | | | AA470347, AA468450 AA468277, AA468204, and AI924555. |
| HRDEX24 | 778 | 867123 | 1-750 | 15-764 | AI347412, AA098880, AA099225, AI473261, AI308141, and AI468639. |
| HRDER90 | 779 | 789140 | 1-414 | 15-428 | AA084891, H82037, T85036, R94550, and R01653. |
| HRDER35 | 780 | 707569 | 1-447 | 15-461 | W02017, AB011399, AL049698, and AB016897. |
| HRDEP20 | 781 | 690456 | 1-878 | 15-892 | N41324, AA196645, W80987, N56686, AA317626, H71355, AA305440, AA150080, |
| | | | | | AI885648, W92648, AA070703, AA824341, AW410573, AW157530, AL040266, |
| | | | | | AA045127, AA043642, AA368590, AA325559, AA587915, AW250790, AA778651, |
| | | | | | AA317723, AW410572, AI139138, AW007464, AI819989, AW188549, AI951992, |
| | | | | | AI951978, AA036715, AI677931, H92998, AI364379, AI758826, AA303613, |
| | | | | | AA749431, AW162769, AA584288, AI376410, AI373112, AA383234, AA977318, |
| | | | | | AI187131, AI768324, AI076148, AI934676, AA150015, AA057355, W70033, |
| | | | | | AA682387, AA196549, AI000432, AI040155, AA513466, AA946608, AI038499, |
| | | | | | AI279549, AA778720, AI887548, R60037, N86794, W94564, AA487107, AI758476, |
| | | | | | AW273537, AI077415, AA836837, AW103741, AI199096, AI439996, AI278114, |
| | | | | | AI038357, H94227, AA186980, AI253749, AI700221, AW004637, AA045098, |
| | | | | | AI200368, and T35014. |
| HRDEK53 | 782 | 867137 | 1-275 | 15-289 | AA703174, AC005585, and AC004832. |
| HRDEJ33 | 783 | 487523 | 1-110 | 15-124 | AL034344. |
| HRDDX67 | 784 | 460145 | 1-438 | 15-452 | AC007541. |
| HRDDX01 | 785 | 921501 | 1-376 | 15-390 | AI871189, AA512915, AI636339 and AI017463. |
| HRDDU41 | 786 | 712572 | 1-297 | 15-311 | AI280574, AA329535, AI559583, AW089016, AI983047, AA743968, AI453160, |
| | | | | | AI554725, AI564294, AI436330, AA715891, AA657910, AA613775, AA837715, |
| | | | | | AA287502, AA632765, AI471467, AA573693, AA326904, AI306717, AA643451, |
| | | | | | AA636102, AJ628859, AI049701, AA577824, AI762528, AI253376, AW007424, |
| | | | | | AA809153, AA017240, D51809, F00688, AA552989, AW073498, AI929410, |
| | | | | | AI753672, AI049512, AI925978, AI750950, AL043212, AA993165, AI280535, |
| | | | | | AA857812, AA233951, AI590598, AA598734, AA099840, AL041019, AW265279, |
| | | | | | AW084100, AI244356, AW188791, AA608520, AA704393, AL041018, AI569363, |
| | | | | | AI002762, N22153, AI524471, AA558404, AA643441, M86139, AI417586, |
| | | | | | AI225179, AL138199, AI564301, T74524, F31654, AA679353, T40629, AA846923, |
| | | | | | AA084506, AI609972, AA302978, AI255004, AI049630, AI255015, AI569546, |
| | | | | | T74259, H74326, T92803, H38769, AI537800, AW263867, AA223910, AA230146, |
| | | | | | T90477, AL120543, AI061313, AW084173, AC004605, AC007283, AP000501, |
| | | | | | AL031659, AC005227, AC005180, AC006515, AP000365, AL049779, AC010206, |
| | | | | | AF003626, AC004707, Z95152, AC007193, AC004662, AL035555, AL031275, |
| | | | | | AL031407, AC004694, AJ003081, U80017, AC004531, Z99943, AL022238, |
| | | | | | AC004955, AC006101, AC002375, AC004019, AL024498, AL031283, Z97876, |
| | | | | | AC008124, AC008119, AL034420, AC007376, AC003101, AF111168, AC008040, |
| | | | | | AC005317, AC004744, AC007050, AL022476, AC005562, AL021578, AC006208, |
| | | | | | AC007386, AC005529, AP000550, AL022324, AC007773, AC008018, Z97353, |
| | | | | | AC004242, AL023575, AC006449, AF064860, AC000025, AC004099, AC006011, |
| | | | | | AL031985, AC005527, AL133238, Z83847, AC004031, AC008009, AC003029, |
| | | | | | AL109963, AC005988, AC004738, AL109839, AC007057, AC002551, AL049758, |
| | | | | | AC005747, AL035682, AL031289, AC003964, AC008039, AL022336, AC004895, |
| | | | | | AP000692, AC016027, AC002312, Z98941, AC007630, Z75887, Z97054, AC007207, |
| | | | | | AL035462, AC004653, AC016830, Z85986, Z93016, AC005884, AB020864, |
| | | | | | AC002563, AC002470, AL049712, AC007938, AL023803, AL031295, AC006511, |
| | | | | | AL049694, AC005071, AL031228, AC005041, AC019014, AC005899, AC005300, |
| | | | | | AC004928, AC005288, AC000353, AF165138, AC004638, AL122020, AL133500, |
| | | | | | AC002395, AL035086, AP000088, AC005089, AL031729, AC006946, AC006254, |
| | | | | | Z73417, AF011889, AC004383, AL049757, AC005074, AF165926, AP000117, |
| | | | | | AL049691, AL021394, Z93023, AC005316, Z95118, AC006160, AL031277, |
| | | | | | AF038458, AB000882, AC005207, AC007240, AF196971, AC004859, AL117694, |
| | | | | | Y11107, AC005231, Z86090, AC005666, AC005280, AC005004, AL034423, |
| | | | | | AC002072, AC007421, AC004150, AC005632, AP000011, Z84480, AC004131, |
| | | | | | AP000032, AL022316, AC007363, Z93096, AC005971, AC012384, AL022165, |
| | | | | | AL049643, AC004088, K03021, AL050307, AL022313, AC002496, AC007664, |
| | | | | | AL031428, AC008115, L48038, AC007011, AC005102, X54150, AC007868, |
| | | | | | AC005412, AC002057, AC004552, AF047825, AF091544, AC005215, Z83840, |
| | | | | | Z93020, AP000313, AF207550, AP001053, AP000194, AL021546, AC005844, |
| | | | | | AL121923, AL031055, AL049642, AF152364, AC006312, AC006581, AC004491, |
| | | | | | AC004222, AC004033, AP000050, AC004381, Z93244, AC005399, AC005393, |
| | | | | | AC004985, U95740, AC006050, AC004921, AC007372, AC004967, AP000270, |
| | | | | | AC009721, AL096816, AC004782, AC005921, AC005837, AP000547, AL121825, |
| | | | | | and AL031735. |
| HRDDR39 | 787 | 867151 | 1-210 | 15-224 | AA422067, AI822098, AI341461, and AI338541. |
| HRDDQ55 | 788 | 490884 | 1-598 | 15-612 | AW410844, AW148821, AL121039, AI702049, AI890283, AW265468, AW162314, |
| | | | | | AA640305, AI567676, AA765899, AA507623, AW162332, AI064968, AI884404, |
| | | | | | AW275432, AI174703, AA601336, AW021674, AA280886, AA515727, AW151541, |
| | | | | | AI252005, AI254463, AW439224, AA831426, AA728954, AA313025, AI570067, |
| | | | | | AI250333, AI538404, AA524604, AW192930, AI090377, AA935827, AA558488, |
| | | | | | AL138262, AW328185, AI445699, AA568303, AW238137, AA804177, AI819419, |
| | | | | | AI791659, AI609992, AA551062, AA101744, AI174827, AI039257, AI572680, |
| | | | | | AA496369, AA593168, AW338633, M77964, AI754653, AW057760, AI890857, |
| | | | | | AW020612, H86399, AI857834, AW239465, AW152451, AI890297, AW338376, |
| | | | | | AA171400, AI560241, AI798521, AA218684, AI921744, AA568433, AI281622, |
| | | | | | AI224583, AA661583, AA493245, AA584360, AI500645, R23873, AA568311, |
| | | | | | H05066, AI754421, AI815770, AL044966, AA676592, AI683079, AI926728, |
| | | | | | AC007934, Z85986, AC004150, AC006359, AL122023, AC005900, AL121655, |
| | | | | | AC005696, AC006057, Z98200, AL121595, AD000092, AC005089, AL031311, |
| | | | | | AL021808, AP000556, AC007637, AF109907, Z73979, AL049869, Z83840, Z84474, |
| | | | | | AL031983, AL132712, AL080317, AC002404, AF196779, AP000555, AC004491, |
| | | | | | AC005409, AL031281, AP000280, AL031289, AJ011930, AL121653, AP000107, |
| | | | | | AC016025, AC004796, AC016026, AC004814, AC004099, AC008044, AF129756, |
| | | | | | AC007240, Z98749, AC004000, AC005618, AC002347, U80017, AC007845, |
| | | | | | AC006487, AC005899, AC005175, AC008009, AC005839, Z98044, AC005822, |
| | | | | | AC007055, AC002565, AC005971, AJ003147, AC004891, AL022323, AC004584, |
| | | | | | AC005488, AL024474, AC007565, AP001068, AP000250, AC005500, AL022318, |
| | | | | | AC002310, AL035089, AC010205, AL049694, AP000211, AP000133, AL049538, |
| | | | | | Z92542, AL096712, AC005071, AL080243, AC004019, AP000030, AP000512, |
| | | | | | AC006013, AC005924, AL031670, AF196971, AC005755, AP000691, AC004263, |
| | | | | | AC005519, AC005295, AL133163, AL096791, AL022165, AL020993, AC007227, |
| | | | | | AC005037, AC005666, AP000692, AC008125, AD000864, AB033024, AP000553, |
| | | | | | AC005726, AC004066, AF118808, AC005399, AL049839, AC005730, AC004084, |
| | | | | | AC006121, AP000309, AC004799, AL132992, AC002996, AL049646, AF111168, |
| | | | | | AL022336, AC006050, AF088219, AP000275, AL031257, AC007510, AL109628, |
| | | | | | AC002126, AC005291, AC005280, AP000037, AP000105, AC002036, AC004895, |
| | | | | | AC005003, AL031680, AL024498, AL050308, AC002477, AL034420, AC007688, |
| | | | | | AC005251, AC004685, AP000116, AP000326, AF165926, AL031587, AL022240, |
| | | | | | AC005031, AC000075, AC005722, Z98950, AC006454, AF002993, AC004673, |
| | | | | | AP000054, AP000169, AC006547, AC004821, AC003109, AC004890, AC004913, |
| | | | | | AL031255, AF191071, AC008115, AC002492, AL022326, AC007687, AP000048, |
| | | | | | AC004097, AC005412, Z98048, AC007536, AC005253, AL023879, AL049653, |
| | | | | | AL033539, Z98742, AL049776, AC005921, AL109952, AL035460, AF038458, |
| | | | | | AC004999, AC005881, AL049709, AL021154, AC005261, Z15025, AL078593, |
| | | | | | AP000248, AC005808, AC004593, AL022313, AL022315, AC005531, AL035450, |
| | | | | | AC004907, AC007298, AP000505, AC004033, AC006241, AC002306, AC005701, |
| | | | | | AC009178, U91326, AL049636, AC008134, AC005216, AC003982, AL035086, |
| | | | | | AC005365, AC005844, AC005535, AC004476, AF205588, AC005763, AL020997, |
| | | | | | AC008372, AC003043, AC007676, AC005244, AC005281, AP000036, AL021579, |
| | | | | | AC006160, AC005102, AC004771, AL022320, AL031427, AC006530, U52112, |
| | | | | | AP000039, Z97183, AC006978, AL121825, AL008582, AL050307, AL109753, |
| | | | | | AL034343, AC006369, AC002544, AC005664, AB023051, AF134726, and |
| | | | | | AC006277. |
| HRDCD44 | 789 | 715769 | 1-558 | 15-572 | W03563. |
| HRDBH52 | 790 | 728715 | 1-559 | 15-573 | W69216, R85388, AA677237, and AW295702. |
| HRDAB42 | 791 | 800333 | 1-415 | 15-429 | AA372217, and N74721. |
| HOSOW01 | 792 | 914804 | 1-472 | 15-486 | R12246, T97409, H20317, F10552, AA642698, AA463715, T03808, AA135561, |
| | | | | | AI912860, T16035, H17063, AL109623, AC010206, AC004787, AL031186, and |
| | | | | | AC007358. |
| HOSNO25 | 793 | 974291 | 1-601 | 15-615 | AC005243. |
| HOSMP95 | 794 | 948496 | 1-591 | 15-605 | R09369, N78208, N59653, AW295483, T85232, R09252, T89192, AI638845, |
| | | | | | AI824892, AF161355, AC004500, and AF197927. |
| HOSGN29 | 795 | 830653 | 1-420 | 15-434 | AA463363, AA490561, AA452944, T66840, AI907242, AA774254, AA972623, |
| | | | | | AA459531, AA355833, N77376, Z20330, AA088535, AI561196, H90342, |
| | | | | | AA610050, AA883211, H90382, and AF155107. |
| HOSFV77 | 796 | 856933 | 1-645 | 15-659 | AI302244, AI376858, AA744868, AI655166, AA206365, AI016092, AW117621, |
| | | | | | AL135188, AI473834, AA442880, AI218992, AW440891, AI619652, AI218976, |
| | | | | | N58875, AA005386, AA515059, R83118, T66299, R37419, AA227169, R66694, |
| | | | | | N54853, R67572, AW168764, AI862971, R83130, AA782861, R27978, T95799, |
| | | | | | AA731049, Z38308, AA813893, AA256649, R28234, R66224, and AL035411. |
| HOSFU59 | 797 | 739262 | 1-424 | 15-438 | AA026237. |
| HOSFL57 | 798 | 734709 | 1-351 | 15-365 | R21661. |
| HOSFL07 | 799 | 953183 | 1-677 | 15-691 | H80558, AA011699, AA249550, N50173, AA720594, AA812006, N53417, |
| | | | | | AI985322, and AB032996. |
| HOSFK40 | 800 | 711140 | 1-566 | 15-580 | AA056618, AW015136, AI640750, AI814601, AI215460, AI478294, and T98138. |
| HOSFI46 | 801 | 719021 | 1-297 | 15-311 | N55220, AA488250, W92994, AA897297, D81949, AP000495, and AC002076. |
| HOSFC66 | 802 | 750560 | 1-671 | 15-685 | W52745, AI3023145, and AB028449. |
| HOSFB04 | 803 | 615200 | 1-412 | 15-426 | R15372, H16359, and R19326. |
| HOSDR12 | 804 | 971169 | 1-447 | 15-461 | Z99943, AC004000, L78810, AL117352, AC006387, AF155238, AP000556, |
| | | | | | AP000557, AC003006, AL031685, AL049759, AC004590, AC007371, AC004069, |
| | | | | | and AR038753. |
| HOSDQ78 | 805 | 858983 | 1-488 | 15-502 | AC006474. |
| HOSDP27 | 806 | 682113 | 1-500 | 15-514 | N26610. |
| HOSDG79 | 807 | 781787 | 1-913 | 15-927 | W95020, R91323, H70373, and AI655142. |
| HOSDA04 | 808 | 951842 | 1-525 | 15-539 | AA846729, AI028108, AA846827, AI609525, AA724378, AA843409, AW195335, |
| | | | | | AI949374, AI129292, AA706724, AI806599, AA700507, AI031774, AI478383, |
| | | | | | AW003724, AA056023, AA029907, AI206246, AW197629, AI082553, AI026964, |
| | | | | | AI023934, AI026963, AW235807, AI079146, AI056148, AA424153, AA854249, |
| | | | | | AA843263, AI022608, AA479110, AI802270, N90579, AA846140, AI168397, |
| | | | | | AI031992, W39235, AA846163, AI022871, AI335584, N52355, AA723602, N35347, |
| | | | | | W04599, W15275, AI026070, AA044387, AA452000, AA772698, AA724104, |
| | | | | | W45008, N52362, N94993, AI478133, R54828, AA772128, W32433, AA479261, |
| | | | | | AA411010, D79933, D79420, AI382712, AA056071, C00297, N75133, D62903, and |
| | | | | | AL110152. |
| HOSCV06 | 809 | 960555 | 1-346 | 15-360 | AI610013, AI090186, AW173233, AI127920, AA058965, AA099683, AW082370, |
| | | | | | AA146976, AI873263, T94367, AA099684, AA136188, AA137215, AA279168, and |
| | | | | | AL133104. |
| HOSCT25 | 810 | 783692 | 1-449 | 15-463 | T83223, AI074110, W47135, N27470, W24127, AA284235, Z19637, AA936569, |
| | | | | | and A74325. |
| HOSCP67 | 811 | 753874 | 1-505 | 15-519 | AA181657, and AA190577. |
| HOSCO73 | 812 | 764756 | 1-305 | 15-319 | T90400, and AC008063. |
| HOSBY89 | 813 | 787182 | 1-429 | 15-443 | W03298, AW453073, R91771, AA248939, and AA281702. |
| H0SBX46 | 814 | 719414 | 1-352 | 15-366 | AI435472, N52787, N48806, AL049781, AB002309, and U17195. |
| HOSBX34 | 815 | 706769 | 1-533 | 15-547 | H10526, R20107, F05110, and AC008009. |
| HOSBR53 | 816 | 728525 | 1-613 | 15-627 | H29345. |
| HOSBO34 | 817 | 706770 | 1-474 | 15-488 | AA167280, AI269650, and AW404853. |
| H0SBM55 | 818 | 732550 | 1-528 | 15-542 | N70015, N70098, W00901, R17917, W00930, R18009, AB014087, AC004188, and |
| | | | | | AP000516. |
| HOSAY52 | 819 | 728759 | 1-352 | 15-366 | AA249054, AL118892, N45598, AA628647, AI016287, N57609, AL049781, |
| | | | | | AB002309, and U17195. |
| HOSAX03 | 820 | 960942 | 1-931 | 15-945 | AA400703, AI684638, AW070184, AI090864, AW183803, AA400657, and |
| | | | | | AW293645. |
| HOSAL10 | 821 | 968710 | 1-299 | 15-313 | AA075375. |
| HOSAI41 | 822 | 712708 | 1-1063 | 15-1077 | AA203712, AI807483, AA203713, AI088364, AI131250, AA489726, AA489625, |
| | | | | | AA004409, AA705699, AA723797, AW293365, H95647, T98715, H82415, and |
| | | | | | AI022074. |
| HOSAH30 | 823 | 693406 | 1-479 | 15-493 | H19428. |
| HOSAF19 | 824 | 672078 | 1-516 | 15-530 | AA147082, and AA312956. |
| HOHEN28 | 825 | 686034 | 1-444 | 15-458 | N33237, AI631133, AI917082, AI657012, AI624839, AA902453, AI655635, |
| | | | | | AI273682, AA729233, H27969, AA761232, N21684, AA417084, T06849, |
| | | | | | AW004990, AI280456, AI865276, AI638369, and D31765. |
| HOHEG71 | 826 | 760051 | 1-529 | 15-543 | AA233884, and AA232830. |
| HOHDF94 | 827 | 793970 | 1-702 | 15-716 | AA081832, and AB018257. |
| HOHCV57 | 828 | 734413 | 1-488 | 15-502 | N76235, AB007936, and AL109755. |
| HOHCL29 | 829 | 634778 | 1-381 | 15-395 | AI525843, AI541231, AI541114, AI541109, AI547179, H41687, AA984744, |
| | | | | | AI547043, AL044967, AI547164, AA094680, AA525444, AW014590, H18262, |
| | | | | | H50911, H45071, H41335, H42388, F33456, AI979115, AI547122, AA484568, |
| | | | | | AA285311, AA090063, AI498779, AA096319, AA426205, M27358, K01364, |
| | | | | | X00686, X56974, X82564, M10098, K03432, U13369, X03205, AF000381, K01593, |
| | | | | | M29839, X01117, V01270, M11188, X06778, J01876, X00640, X59733, X59734, |
| | | | | | K01373, X04025, AF115860, M97576, J00999, X02995, AJ279506, M91183, |
| | | | | | M15821, L11288, M91181, AJ270030, X98837, AB029314, X98838, X98841, |
| | | | | | X98839, X98843, X98842, X98846, M91180, X98840, X98844, M91182, AF169014, |
| | | | | | AB016657, X98836, AF030250, M97575, M97573, M59398, U76257, U11437, |
| | | | | | M59400, M91179, Z61867, M59402, M59401, AF021880, M59384, M59387, |
| | | | | | M59392, M59390, M59383, M59403, M59393, M59397, X98845, M36006, M59389, |
| | | | | | M59385, AB016658, M59386, M16759, S60585, AB016659, M59395, M59391, |
| | | | | | D38360, D38357, D38341, D38358, D38354, D38363, D38362, M59396, M59388, |
| | | | | | D38359, M59399, and M59394. |
| HOHCH52 | 830 | 588375 | 1-555 | 15-569 | R63803. |
| HOHCG79 | 831 | 859029 | 1-453 | 15-467 | AI025117. |
| HOHCD58 | 832 | 973105 | 1-442 | 15-456 | |
| HOHBZ27 | 833 | 588364 | 1-453 | 15-467 | T26461, R12434, and AI909064. |
| HOHBY26 | 834 | 588358 | 1-464 | 15-478 | AA190664. |
| HOHBV67 | 835 | 718562 | 1-527 | 15-541 | AA464946, AA045533, AA058869, Z43315, F07427, R34556, D20922, and R17869. |
| HOHBS10 | 836 | 964324 | 1-396 | 15-410 | AW072006, AA992322, AW183466, AI590479, AI610065, AA524829, H53828, |
| | | | | | AA828610, AA476397, AA572713, AA431949, AW440299, R49657, AI436608, |
| | | | | | AI114557, AA480574, AA847702, AA482953, Z84469, AC005899, AC005822, |
| | | | | | AC006079, AC005125, Z93016, AC002544, AC004408, AC005411, AJ011930, |
| | | | | | AC005996, AC007773, Z98257, AC002553, AC006211, AL035086, AC006088, |
| | | | | | AC005332, AC004263, AC009225, AC004841, D87675, AL133243, AC004884, |
| | | | | | AC004460, AC020663, K03176, K03178, Z99716, AP000961, AC005747, |
| | | | | | AC006080, AC004659, AC006978, Z84480, AC002316, U96629, AC006959, |
| | | | | | AC005186, AC006318, AC007050, AF165176, AL022326, Z68164, AF008191, |
| | | | | | AF017104, AC004230, AJ003147, AC002091, AC011504, and AL022329. |
| HOHBP36 | 837 | 708158 | 1-468 | 15-482 | N53160, H56717, N58596, H56640, W27084, AA516214, F19606, AA515728, |
| | | | | | AA558487, AA278482, AI823533, AI823535, AW057873, AW151288, AI356264, |
| | | | | | Z54073, AF001548, AF205588, AC004263, AC004982, AC006948, AC005081, |
| | | | | | AC005476, AC002390, AL049843, AL009181, Z82215, AC007312, AL049757, |
| | | | | | AF129756, AC003010, AC009225, AC006312, AP000555, AC004601, AL021878, |
| | | | | | AC005684, AL035411, Z98949, Z93020, AL049709, AF134726, AC004985, Z84476, |
| | | | | | AC003101, AC004820, AL109627, Z85987, Z93241, AC009405, AL049613, |
| | | | | | AC005036, AL109753, AP000091, Z95115, AF196779, and AL008721. |
| HOHBN56 | 838 | 859041 | 1-897 | 15-911 | AA489227, AA490533, AA504306, and AA490534. |
| HOHBL35 | 839 | 973238 | 1-462 | 15-476 | |
| HOHBI84 | 840 | 782908 | 1-363 | 15-377 | H46912, AA287471, AA399188, AW007707, AL036600, AA025639, and |
| | | | | | AA405089. |
| HOHBB90 | 841 | 588308 | 1-448 | 15-462 | R76965, AI077565, AA452929, AI393755, and AL035455. |
| HOHAV60 | 842 | 489007 | 1-827 | 15-841 | N20939, AI337242, H68935, AI224489, F27732, F37358, and AC007279. |
| HOHAT59 | 843 | 867949 | 1-454 | 15-468 | AI124699. |
| HOHAT11 | 844 | 966727 | 1-622 | 15-636 | U83208. |
| HOHAQ65 | 845 | 859057 | 1-501 | 15-515 | R06584, R06638, AA086435, AW408596, AA111870, C14480, AA279649, |
| | | | | | AI680547, AA608570, AL135363, AA595661, AA158018, AA554257, AA205436, |
| | | | | | AW162227, AA470512, AA599423, AA315361, AA722336, AW082098, AA470559, |
| | | | | | AA569053, H64278, F33037, AA348399, AI298079, AA378489, AI271762, R81167, |
| | | | | | R89129, AW069537, AI440037, AA368659, AC005042, AC005207, AC002425, |
| | | | | | Y08864, AC005S31, Z49236, AP000099, AC005598, AL109865, S42653, AC007182, |
| | | | | | AL034420, AC007637, AL022720, AP000036, AC007738, AP000553, AC004820, |
| | | | | | AC004531, AC008273, AF069074, U91326, U68041, AC003684, AL049712, |
| | | | | | AL021453, AC007563, AC005746, AC008015, AL031228, Z49862, AL031681, |
| | | | | | AF181897, Y10196, AC007050, AL023494, AL031311, AL049776, AC004900, |
| | | | | | AL031291, AC002492, AL096791, AP000133, AP000211, AC006211, AC002477, |
| | | | | | L78833, AL022329, AF030453, AC007011, AC003108, AC002094, AC002301, |
| | | | | | AL034429, AL035422, AL049636, AC005082, AC005324, AF099810, AC005412, |
| | | | | | AL121578, AB026898, AF001550, AC002132, AC004472, AC002996, AL049538, |
| | | | | | AC004223, AL035413, AL033521, AC005180, AL121658, AL050318, AP000354, |
| | | | | | AC006312, AP000086, AC005484, AL080243, AL132712, AC004526, AL049569, |
| | | | | | Z49235, AL021155, AP000I17, AC002456, X84664, AF196779, AC002375, |
| | | | | | AL096818, AC003966, AC005305, AP000349, AL021546, AC004927, AC005911, |
| | | | | | AC005102, Z93023, AL034423, AC006062, AP000353, AC005048, AC004655, |
| | | | | | AC002347, AC002563, AC006011, AC005486, AC004551, AC003685, AP000555, |
| | | | | | AP000689, AC004750, AC006023, AC004890, AC002429, U95740, AC006057, |
| | | | | | AC004883, AP000047, AC002385, AC005300, AC007388, AC003109, AL035071, |
| | | | | | AC006377, AC008372, AP000049, AC004893, AC006017, AC009516, AL096815, |
| | | | | | AC006538, AP000497, AP000311, Z98036, AL022316, AC010206, AC006071, |
| | | | | | AL030996, AP000223, AC005399, AC004787, AF109907, AC006328, AC004805, |
| | | | | | AC006430, AL096712, AC004881, AF053356, U95742, AL031666, AC005821, |
| | | | | | AC005736, AC007250, AC009399, AF172277, AC005220, AC005914, and U91323. |
| HOHAM66 | 846 | 859058 | 1-545 | 15-559 | H02088, R30796, AI904000, and AW175694. |
| HOHAII1 | 847 | 947140 | 1-4073 | 15-4087 | AA424371, AA417690, N72255, AA417582, W02998, AI378916, AA424511, and |
| | | | | | AF086109. |
| HOHAE76 | 848 | 494001 | 1-453 | 15-467 | T59559, and T59513. |
| HOEOA28 | 849 | 859156 | 1-786 | 15-800 | AI276895, AW026397, AA053296, AA054752, AA789119, AI745474, AA744964, |
| | | | | | AW087227, AW379213, and AC002519. |
| HOENH06 | 850 | 934095 | 1-844 | 15-858 | AW007160, AA393649, AI022457, AI139147, AW386744, R40518, H14594, |
| | | | | | Z40081, F01575, R48161, F10287, N93352, AA468505, AA614254, AA228368, |
| | | | | | AA468371, AA230025, AA467760, AA224889, AA228269, AA298789, AA838161, |
| | | | | | AA599710, T47138, AI355385, AA381754, AI418967, AA224815, AI270370, |
| | | | | | AA197218, H63066, AW057873, AA259267, AA558404, AA130647, F00533, |
| | | | | | AI192440, AA836552, AA302971, T49633, AI290405, AA668915, N63149, |
| | | | | | AA668896, AL050306, AC003030, AC006965, AC004491, Z85986, AC007283, |
| | | | | | AL096703, AC004765, AL078581, AL050318, AC005280, AL022311, AC002477, |
| | | | | | AL109628, Z84480, U91318, AC007055, AC004815, AC002472, AC006124, |
| | | | | | AC006071, AC005829, AC005682, AC006079, AC002997, AC004216, AC005932, |
| | | | | | AC007546, AC007664, AC007536, U63721, Z73963, AF047825, AF196969, |
| | | | | | AC005764, AC007566, AC004560, AC005632, AC004222, AC004638, AP000696, |
| | | | | | AL049780, AL049538, AC007226, AC002369, AL032821, AP000112, AP000044, |
| | | | | | AL050348, AL049569, AP000695, AC006006, AC006449, AC006208, AL035398, |
| | | | | | AL035405, AC007917, AL022324, AC006255, AP000501, AC004590, AP000245, |
| | | | | | AP000497, U89337, AC007052, AC005225, AC000052, AC004019, AL035410, |
| | | | | | Z99716, AC004030, AC007541, AC000353, AP000557, AL035422, Z68226, L44140, |
| | | | | | AC005952, AC007066, U82668, AC005899, AL035587, AC005324, AC007537, |
| | | | | | AC005015, U91326, AC007371, AC004655, AC002310, AC003983, AL020997, |
| | | | | | AL035659, AC006480, AC005081, Z93023, AC005529, AC005182, AC006277, |
| | | | | | AL049869, AC006211, AC005291, AP000512, AC007860, Z97054, AL049694, |
| | | | | | AP000115, AB023050, AP000034, AC016025, AC004477, U96629, AC005102, |
| | | | | | AL031577, AL034429, AC004129, AL034548, AP000502, AC005881, AC005231, |
| | | | | | AC012331, Z98745, AC005387, Z98946, AL021878, AC005338, AL022320, |
| | | | | | AL049830, U78027, AC006344, AL035086, AB026898, AC006285, AC005519, |
| | | | | | AL031282, AC005369, Z99128, AC003041, AC005071, AC003010, U95740, |
| | | | | | AC002425, AC006115, AC002303, AC003982, AL022163, U91319, AL008582, |
| | | | | | AB003151, AC005678, AC005058, U82828, AC007216, M13792, AL049576, |
| | | | | | AB022785, AC005694, AC007687, AL022326, AL033397, AC004217, AL031680, |
| | | | | | AP000244, AC006530, AL008719, AF001550, AP000065, Z93017, AL133245, |
| | | | | | U91321, AC005183, AL035555, AC003029, AL031985, AL035249, AP000326, |
| | | | | | AC004686, AC002544, AP000212, AC007738, AC002107, AC005209, AC004526, |
| | | | | | AP000122, AP000054, AP000169, AL049776, AL031311, AC006450, AC005365, |
| | | | | | AC005014, AC005488, and AC004024. |
| HOELI08 | 851 | 958181 | 1-669 | 15-683 | AI862922, AI983798, AI817696, AA465702, AI768039, AI831870, and AA459562. |
| HOEEX37 | 852 | 708728 | 1-703 | 15-717 | H44964, AI570044, AI078541, AI570062, AA733022, H45674, AI084055, W94003, |
| | | | | | N28018, and AC007285. |
| HOEEU57 | 853 | 932562 | 1-818 | 15-832 | AW387014, AI831578, AW387023, AW386986, AA862453, AI276148, AI923983, |
| | | | | | AI925229, AI344497, AI299183, AI343937, AI086925, AW374923, R21305, |
| | | | | | R18269, AA333257, AI991662, AI093616, W02289, R87814, H08423, AA528079, |
| | | | | | Z45607, AA455633, W49743, R58057, AI124525, AA767913, Z42086, and R56671. |
| HOEER75 | 854 | 767265 | 1-800 | 15-814 | AI989799, AW299570, AI978646, AI638110, AW290948, N67990, AI962847, |
| | | | | | AW167412, AA706538, N80412, AA961236, AI557808, AI525653, AI557238, |
| | | | | | AI525669, AI541321, AI541048, AI557258, AI557602, AI541205, AI541353, |
| | | | | | AI557809, AI535813, AI546829, AI557222, AI535994, AI557543, AI525840, |
| | | | | | AI541346, AI525656, and AL133617. |
| HOECJ59 | 855 | 739426 | 1-640 | 15-654 | AI016603, AA884245, AI806142, AI199574, W07522, AI492605, AI767868, |
| | | | | | AW014287, AI143416, AA126482, AW072550, AI377899, AW002034, AI223352, |
| | | | | | AW418843, AI033261, AI018587, AI760070, AA908231, N80857, AI660406, |
| | | | | | AW449281, AI479045, AW303620, AW184004, AW195771, AA250993, AI332874, |
| | | | | | AC003959, and AF086145. |
| HOECF70 | 856 | 573426 | 1-193 | 15-207 | AA602457. |
| HOEBT89 | 857 | 921065 | 1-352 | 15-366 | R66475, AI692694, AI677948, N32840, AI187227, T19392, AI499800, H51056, |
| | | | | | AA169602, AI208443, AW134907, R67315, and AI209123. |
| HOACG06 | 858 | 954572 | 1-485 | 15-499 | AW152166, AA011199, H18839, AI718722, and AA010802. |
| HOABY40 | 859 | 711510 | 1-540 | 15-554 | N62212. |
| HOABX26 | 860 | 753954 | 1-562 | 15-576 | AA065209, AA077377, T32948, AI571240, T08560, R90825, AI033147, AI277382, |
| | | | | | AI453118, R88021, AA663789, H14060, R87895, AA077707, and AC005071. |
| HOABX21 | 861 | 531390 | 1-75 | 15-89 | |
| HOADW12 | 862 | 968797 | 1-387 | 15-401 | AI075814. |
| HOABG91 | 863 | 811156 | 1-221 | 15-235 | AB011540, and AB011533. |
| HOABF65 | 864 | 888203 | 1-284 | 15-298 | |
| HOABD07 | 865 | 954060 | 1-358 | 15-372 | AI269153. |
| HOABA95 | 866 | 796063 | 1-405 | 15-419 | R31045. |
| HOAAX37 | 867 | 708718 | 1-330 | 15-344 | T97580, and AF143887. |
| HOAAW11 | 868 | 967660 | 1-489 | 15-503 | AA525910, and AC004049. |
| HOAAW02 | 869 | 920869 | 1-393 | 15-407 | AA284348. |
| HOAAV77 | 870 | 772512 | 1-398 | 15-412 | H84034, and N44965. |
| HOAAO86 | 871 | 859626 | 1-431 | 15-445 | AA662926, AW204080, AA700032, AA514295, N52358, AA621278, AI126468, |
| | | | | | AA653154, AI986182, AI174766, AA933084, AA829039, AA547947, AL135357, |
| | | | | | T52475, AW303008, AA601356, AA565484, AI366993, AI002744, AA630672, |
| | | | | | AI635819, AA570230, AI630176, AL042756, AW068596, AI920802, N41888, |
| | | | | | F08230, AW263724, AA507612, AI611960, H93097, T90263, AW002350, |
| | | | | | AI583255, AI890324, H73230, AA629872, AI628929, AA443390, AC005914, |
| | | | | | AC002301, AC002395, AC005488, AL109865, AC004801, AC007051, AL034420, |
| | | | | | AL031846, AC002554, AC007298, AC006057, AC007201, AC008055, AC005668, |
| | | | | | AL035089, AC005043, AL049569, AC009247, AC004491, AL133246, AL022319, |
| | | | | | AL009181, AC004216, AF205588, AC003104, AC005482, AP000694, AC007225, |
| | | | | | AL023284, U91323, AC005280, ALO31905, AC004859, AC007919, AC005839, |
| | | | | | AC005678, AC004821, AC006313, AC005632, AC000353, AL080243, AC002303, |
| | | | | | AC006211, AF111169, AC002449, AC005225, AC005261, AL049869, AC005694, |
| | | | | | AF181897, AC004659, AC007242, AC005046, AL035685, AC007510, AC005484, |
| | | | | | AL049764, AL139054, U91326, AC006039, AC006026, AL035448, AC006040, |
| | | | | | AF107885, AL121653, AC005874, AF134471, AC007666, AJ246003, AC007358, |
| | | | | | AC004685, Z86061, AC002365, AC004525, AL021707, AC004913, AP000088, |
| | | | | | AC004813, AC007204, AC004955, AL033397, AC006088, AC006312, AL020993, |
| | | | | | AC004887, AC005829, AC007676, AC007559, Z84487, AC006538, AC005378, |
| | | | | | AL133243, AC005015, AP000134, AP000212, AL121658, AC004814, AC005531, |
| | | | | | AC002115, AC005332, AC003962, U91321, AL031055, AL031985, AL096701, |
| | | | | | AC004851, AF196779, AC007546, Z97054, AC006064, AC004953, AL133448, |
| | | | | | AC006501, AC003957, AC020663, AC006115, AP000031, AC004797, AL035361, |
| | | | | | AL008718, AC004595, AL078477, Z98946, AP000152, AC004638, AL035405, |
| | | | | | AC006013, AC004968, AL031255, Z85986, AC005102, AC005152, AC000052, |
| | | | | | AC005386, AL008629, AL023807, AP001052, AC004019, AC010206, AP000039, |
| | | | | | AP000280, AC007011, AL080241, AC005081, Z99916, AC007845, D87675, |
| | | | | | Z85987, AC005088, AC005988, AC002091, Z97055, AC005291, AC005529, |
| | | | | | AC002544, AL031279, AC006480, AL021391, AL021154, U95742, AC004070, |
| | | | | | AF130343, AC007055, AP000107, AC002563, AC006277, AC007245, AL022574, |
| | | | | | AL133355, Z97987, AC009223, AL022238, AC004655, U89337, AL117351, |
| | | | | | AC005690, AL109798, AC006120, AC022517, AC002994, AP000348, AC005740, |
| | | | | | AL135745, AC007216, AL133396, AL031311, AC006449, AL049843, AC006042, |
| | | | | | AL136295, AC004230, Y14768, AC004383, AC007688, AC016025, AL031295, |
| | | | | | AC005913, AL096791, AP000555, AC004967, AC007690, AC016831, AC005701, |
| | | | | | AL096775, AC007057, AC000025, AC004773, Y10196, AC006946, AL031668, |
| | | | | | AL023553, AC006001, AC004593, AC005399, AC005777, AC006285, AC003029, |
| | | | | | AC007684, AC007227, AL117344, AC003688, AC005585, AC018633, AL049766, |
| | | | | | AC005250, AC007193, and AC005175. |
| HOAAM67 | 872 | 751947 | 1-292 | 15-306 | H50680, and AA779243. |
| HOAAK71 | 873 | 761445 | 1-407 | 15-421 | T95206, Z83821, AL020991, and AF068624. |
| HOAAK11 | 874 | 859624 | 1-430 | 15-444 | |
| HOAAI58 | 875 | 859643 | 1-679 | 15-693 | AW303494, AI039909, AA448710, D31172, D31271, AW195840, D31138, D31112, |
| | | | | | AA133322, H89975, and AB032978. |
| HOAAH77 | 876 | 772514 | 1-458 | 15-472 | W72892, AA909448, W76097, AA999702, AI051236, and AI419691. |
| HOAAH41 | 877 | 712601 | 1-468 | 15-482 | H71845, AA703576, and AA203612. |
| HMUBZ11 | 878 | 966856 | 1-497 | 15-511 | D31554, and H69385. |
| HMUBY48 | 879 | 721586 | 1-141 | 15-155 | AI250353, AL037582, AL037602, AA782332, AI125109, AI039104, AW263805, |
| | | | | | AI475339, AA830709, AI590043, AI370623, AI500061, AL046466, AI569440, |
| | | | | | AI648699, AI613038, AI612913, AW103928, AI698391, AI887163, AI610714, |
| | | | | | AI299903, AI581088, AW130362, AI537187, AI345010, AW118448, AW166870, |
| | | | | | AW022000, AI636588, AW411225, AW128834, AA720924, AI241741, AI580027, |
| | | | | | AI802542, AI332957, AI524654, AA831128, AI950887, AI912434, AI678681, |
| | | | | | AW050850, AA102339, AA748729, AW073858, AW167926, AI963846, AI758445, |
| | | | | | AW022856, AI184903, AI950892, AI245008, T49776, AI499057, AI923989, |
| | | | | | AI469262, AA824435, AI832038, AI635851, AI538867, AA130341, AI359744, |
| | | | | | AI653829, AI537273, N25033, AW129456, AW103628, AL041587, AI540831, |
| | | | | | AI818562, AI270183, AI697045, AL040161, AI141400, AW027898, AI581362, |
| | | | | | AI612747, AI798456, AI288285, AI282669, AI472650, AI141406, AI828239, |
| | | | | | AW167083, AI638644, AW262552, AI521594, AI554402, AW263709, AL045610, |
| | | | | | AW020425, AI283385, AL119399, AI635016, AI419826, AI638798, AI434109, |
| | | | | | AL046944, AW087199, AI699823, AI473536, N66391, AI682968, AL042193, |
| | | | | | AA814343, AI586931, AI934011, AI250282, AI925164, AW081902, AI241923, |
| | | | | | AI401697, AI590755, AI567513, AI863002, H89138, AW020358, AI884318, |
| | | | | | AI919500, AW188525, F37323, AL040844, AI457589, AI498582, AI634223, |
| | | | | | AW020381, AI452560, AA665612, AW051088, AI956080, AI963191, AI445620, |
| | | | | | AI869765, AW129659, AW169626, AW162194, AI364167, AI623835, AI619820, |
| | | | | | AA872047, AI434731, AI583578, AI421252, AW055252, AI567769, AA761557, |
| | | | | | AI828676, AI446511, AA555145, AW264009, AI075885, AI889189, AI538885, |
| | | | | | AA128641, AA810677, AI114703, AA641577, AI824576, AI688854, AA641818, |
| | | | | | AI633125, AL0800I1, AI889916, AI784214, AI538564, AI251221, AI915291, |
| | | | | | AW152182, AI819545, AW270013, AI683606, AW104141, AI828806, AA744531, |
| | | | | | AI886355, AI648494, AI701097, AI225000, AI687568, AI282688, AW059818, |
| | | | | | AI499570, AI630932, AI491842, AI627339, AI610446, AI909641, AI624279, |
| | | | | | AI475815, AI445611, AI673363, AW087538, AI818980, AI582529, AI249389, |
| | | | | | AW079075, AI690813, AI962900, AI697359, AI927233, AI539690, AW190297, |
| | | | | | T69241, AI621341, AI147877, AI254731, AW087217, AI580436, AI138221, |
| | | | | | AL134840, AI888480, AA552445, AI696714, AI824746, AI739583, AW131024, |
| | | | | | AW080140 AW129106, AI866090, AI371872, AI345415, AI435253, AI499890 |
| | | | | | AI440284, AI374987, AI608882, AI635634, AI522256, AI093315, AI049733, |
| | | | | | AW080746, AI473652, AI874261, AW089233, AI633434, AW117675. AL117587, |
| | | | | | AC004594, AL110218, A03736, AL136884, A86558, AF102578, I89947, AF076633, |
| | | | | | AL133665, S36676, I09499, AL137550, U00686, AF040751, AL137554, AF008439, |
| | | | | | Z97214, AL035458, I48978, X99971, AL133608, Z94277, Z93784, AF026816, |
| | | | | | AF013214, AP000130, AP000208, AF185614, AF124728, AL137284, AP000247, |
| | | | | | AL133062, AL133619, U83980, AF150103, AF161418, X66871, S59519, AC005091, |
| | | | | | AJ010277, AL049426, AL137292, X96540, AL137529, AF090900, AL133560, |
| | | | | | AR050959, AF100931, AF061795, AF151685, AF044323, AJ005690, AL137479, |
| | | | | | AL110280, AL133637, AF111851, AF106697, U37359, AC006288, A26498, |
| | | | | | AR013797, X82434, AL080146, X61399, AF069506, AF047716, U72621, X66366, |
| | | | | | J05277, AL137270, E12747, X97332, X66862, I80062, AL133088, E07108, |
| | | | | | AL137533, AR034821, A60092, A60094, AF031572, AR038854, AR022283, |
| | | | | | AL137657, AL049324, AL137711, AC009233, AL022147, AL050393, U02475, |
| | | | | | AL049423, AF007142, AF200464, I17544, AL122100, U62807, AF004162, U78525, |
| | | | | | AF106657, U42766, AL137521, AC006112, Y16645, AL137298, AF184965, |
| | | | | | AL133565, AF116573, AF061573, A08912, U4395, I18358, AP000458, A08911, |
| | | | | | I48979, M19658, AB016226, X79812, A77033, A77035, I33392, AL133640, Z72491, |
| | | | | | U53505, AL110228, A08913, AL080118, X61970, AL049447, X98066, AF067790, |
| | | | | | L19437, A65341, Z13966, M85164, AL122098, S76508, S83440, S68736, AL137476, |
| | | | | | AL137254, AL122104, AL117416, AF079763, AF126488, X69026, A21625, I32738, |
| | | | | | U35846, AC009501, AL133558, AF106827, U49434, AF061981, AF019298, |
| | | | | | AJ012755, U75604, AC018767, Z98036, A92311, AF082526, AL035587, AL137557, |
| | | | | | S77771, AB031064, AF090886, A08910, Y09972, U62966, U80742, AL117394, |
| | | | | | AL133113, A12297, AL080129, AL137548, AF032666, AF055917, M80340, |
| | | | | | U49908, A08907, AC004200, AF130342, A08909, A70386, AF215669, AL080159, |
| | | | | | X83544, AL110296, AF031147, AF111849, AL137658, AF002672, AL050092, |
| | | | | | AL133049, X72889, AC004383, A08908, X06146, AC010202, E12579, E12580, and |
| | | | | | AL133084. |
| HMUBY20 | 880 | 669581 | 1-425 | 15-439 | |
| HMUBV40 | 881 | 837969 | 1-420 | 15-434 | |
| HMUBR94 | 882 | 793261 | 1-438 | 15-452 | AL135377, AA828637, AA084766, AI446336, AA773463, AA984114, AL036037, |
| | | | | | R20544, AC000025, AC005527, AC005529, AC007227, AL035086, AL035400, |
| | | | | | AC004859, AC002347, AL008719, AC004531, AL078581, AC006312, AC002563, |
| | | | | | AC000353, AC004953, AC006111, AP000512, Z95115, AL024498, AC005821, |
| | | | | | AL023575, AL022238, AC004821, AC006011, AJ246003, AL049589, AC006261, |
| | | | | | AC004644, AC003030, AC006430, AC005520, AC004858, AL109802, AP001054, |
| | | | | | AL033527, Z98200, AC005102, AL109758, AL034420, AL020997, AC002375, |
| | | | | | AC007191, U47924, AC016027, AC005089, Z93930, Z98742, AC003007, |
| | | | | | AC006050, AF196779, AC004815, AC006509, AL049830, AC016830, AL133246, |
| | | | | | AC005209, AC002287, AC006480, AC006117, AC005837, AF129756, AL022316, |
| | | | | | AL049869, AL049776, AL035587, AC007052, AC007773, Z83840, AC002119, |
| | | | | | AP000113, AP000045, AL022322, AC007842, AC004491, AC004983, Z84466, |
| | | | | | AL024508, AL009181, AL031295, AC004967, Z84480, AC006014, AC005180, |
| | | | | | AC007298, AC006004, AC005632, AC004996, AL049697, AL049713, and |
| | | | | | AC005881. |
| HMUBR78 | 883 | 955060 | 1-526 | 15-540 | AA019047, AI343422, and Z92845. |
| HMUBQ01 | 884 | 918052 | 1-377 | 15-391 | |
| HMUBP74 | 885 | 765502 | 1-539 | 15-553 | A1432103, N66775, AA555232, AA410788, AA491361, AA228778, AI798449, |
| | | | | | AA084504, W45274, AI753904, AA324059, AA326603, T93109, AF196779, |
| | | | | | Z93017, AP000350, Z95116, AF196972, AC004832, AL023575, AL049776, |
| | | | | | AF024533, AL031311, AL139054, AC003043, AC005089, AC005015, AC005399, |
| | | | | | AC003029, AL121603, AL034417, AC007934, AC005971, AC005736, AL132777, |
| | | | | | AF111167, AC007308, AC006057, AP000008, AC000134, AC000052, AL109801, |
| | | | | | AC002316, AC000159, Z85986, AC007227, AC005088, AC005722, AC004019, |
| | | | | | AC004890, AC002369, AC008394, AP000704, AC007151, AL049780, U91321, |
| | | | | | AC005696, AC006064, Z93930, Z82180, Z85987, AC007666, AC006285, |
| | | | | | AC007878, AP000512, U85195, AC006205, AC003010, AE000658, AC005193, |
| | | | | | AL031295, AC008072, AC004967, AL022316, AC004030, AF196969, AC006088, |
| | | | | | AC003684, AC007055, AL031848, Z95331, AC004999, AC006011, AC007051, |
| | | | | | AC004821, AL035079, and AC005086. |
| HMUBP38 | 886 | 716800 | 1-274 | 15-288 | D62503, W31481, W31478, AI031797, AW194041, AW050479, AA737576, |
| | | | | | AA693819, AA825328, AA860686, AA843163, AA782544, AI026970, AA450017, |
| | | | | | AA772466, AW152339, AI263677, AI804555, AA347503, AI824356, AI191171, |
| | | | | | AA993329, AI470261, AI886205, AA632359, AA863458, AI289935, AW132079, |
| | | | | | AI678407, AI800349, AI623948, AA450366, AA044819, AW188740, AA878533, |
| | | | | | AI364418, AI874104, AI933937, AA358323, AW131974, AA894788, AW103212, |
| | | | | | N76132, AA897025, AI915173, AI933628, AI913873, AA860713, N30064, |
| | | | | | AI579994, AI299561, AA025007, AA781624, R36254, AA934658, AW088795, |
| | | | | | AW080423, T97261, AI690491, AA614454, AI095864, AW024736, AI016555, |
| | | | | | AI569566, AI298435, R92692, AI266450, AI689224, AI015682, AI889552, |
| | | | | | AW014696, AW189459, AA005320, AI424177, AI041476, AI801066, AW168035, |
| | | | | | W32273, AW152395, AI276661, AI028138, AA954648, AW166786, AA099737, |
| | | | | | AI344521, AI874055, AW193867, AI355584, AI734946, AA860530, AI874021, |
| | | | | | N70641, AI185811, N30060, R00232, AI138761, AI276660, AI362305, AI332470, |
| | | | | | AA024894, N22767, AW139075, AW129011, T57193, N30057, N91781, N71091, |
| | | | | | AI092410, AI288216, AI244973, T57088, AW139081, AI160023, AA490670, |
| | | | | | AI560718, AI887980, AW080420, AW419084, AI126270, AI859726, AI457657, |
| | | | | | AI274779, AI962882, AI564514, AI589042, AI689396, AA993572, N94949, |
| | | | | | AI979109, AA411838, AA602523, AA827550, AW150847, AA772171, AA917826, |
| | | | | | AI859443, AI524525, AW169111, W72460, AA056733, AI126748, AA133968, |
| | | | | | N90530, AI475928, AI344395, R82315, AW303738, AA983225, AA628813, |
| | | | | | AI564394, H13839, AA771989, AI951442, AA024806, AW021070, H22324, |
| | | | | | AI680522, R34368, AA418061, AW129473, AW151046, T48350, AA846743, |
| | | | | | N71006, AA001714, AA027095, T65946, AI921252, AI933525, AI691098, |
| | | | | | AI364257, AA011167, AI357333, T85101, AA772584, AW194109, AW022540, |
| | | | | | AW090282, and AI318244. |
| HMUBN15 | 887 | 659543 | 1-452 | 15-466 | AA772883. |
| HMUBN05 | 888 | 932057 | 1-455 | 15-469 | AF090896. |
| HMUBM89 | 889 | 786082 | 1-444 | 15-458 | AW302705, AW302659, AI792521, AI792499, AL079734, AI801141, AA468505, |
| | | | | | AI635440, AL042667, AL042670, T74524, AW192179, AI962030, AL135357, |
| | | | | | AI053793, AI267269, AI267356, AA603567, AI049709, AA601336, AI267450, |
| | | | | | AI053688, AA772906, H07953, H82636, AA809546, T41134, AA669238, |
| | | | | | AA491767, AI733856, AW023111, AI016560, AA659832, AI982884, AI923050, |
| | | | | | H38769, AI590442, AI754291, Z98044, Z97630, Z84469, AC004764, AL049776, |
| | | | | | AL035422, AC002470, AC004813, AC009247, AL139054, AC007308, AP000694, |
| | | | | | AL079304, AF129756, AC005218, AC005874, AF134471, AL133245, AC004382, |
| | | | | | AL031228, Y10196, AC006511, AF196779, AL049872, AB004907, Z82176, |
| | | | | | AC008055, AF053356, AC006530, Z86090, AC005081, AL121655, AC002425, |
| | | | | | AC003962, AC004655, AC005776, AC006509, AP000354, AC005678, U61375, |
| | | | | | AC006130, AC005520, U07562, AC006050, AP000501, AL031311, U85195, |
| | | | | | AL023803, AF165926, U91323, AL049697, AE000658, AL009181, AC005323, |
| | | | | | AC009516, Z98745, AC005071, AC010200, AC002310, AL096761, AF039907, |
| | | | | | AL135959, AL031276, AL133485, AL021707, AL109798, AC004887, AC007227, |
| | | | | | AC005015, AL133244, AC006312, AC005924, AC005180, AC006544, AF031078, |
| | | | | | AC002430, AL022320, AL050306, AF030876, AC002432, AL109758, AC005701, |
| | | | | | AL132987, AJ003147, AC007384, AC002351, AP000128, AP000206, AP000150, |
| | | | | | AC005531, AL031575, AC000134, AL050332, AL034553, AC003983, AC007688, |
| | | | | | AC004765, AL049538, AC004985, L48038, AC007030, AL021808, AC005913, |
| | | | | | U78027, AC007686, AC007738, AP000009, AC005412, AL021978, AC004967, |
| | | | | | AL049692, AC007899, AL035071, AC006474, AC005829, AL008718, AC004150, |
| | | | | | AP000245, Z84466, AC002350, AC005821, D87675, AL031589, AC002395, |
| | | | | | AC005600, AL022316, AL035089, AC005781, AL020997, AC006071, AC007676, |
| | | | | | AC005803, AC004526, AC002455, AC004638, AC002352, AC005233, AC004895, |
| | | | | | AL022326, AC004231, AP000094, AL136295, AC005914, AF111168, AL031595, |
| | | | | | AC004552, AL049834, AL049653, AL031729, U80017, AL021579, AF123462, |
| | | | | | AC005037, Z83840, AC005632, AL080317, AC003101, AC004386, AC004000, |
| | | | | | AP000555, AC005730, AL050321, AL121825, AC006023, AC003108, AC006441, |
| | | | | | AL020995, AL008715, Z85987, AC007216, AC005625, D49558, AL035455, |
| | | | | | AC004694, AC007536, AC004131, AC007041, AC006450, Z83838, AC000026, |
| | | | | | AC004671, AC006057, AC006581, AC003687, AC016025, AF024534, AC005899, |
| | | | | | AC004945, AC003112, AL008630, AC004999, AC005500, AC004520, AF045555, |
| | | | | | AC006160, AB023050, AC004099, AC004659, AC004855, AC005138, AP000143, |
| | | | | | AC005837, AC007225, AC005004, AL022336, Z98949, AC006313, AL078462, |
| | | | | | AC000159, AL021939, AL022322, AC006241, AL080243, L47234, AC004922, |
| | | | | | AC005288, AP000090, AC004492, AC002059, AC006120, AL121754, AL031650, |
| | | | | | AC005994, AL133371, AL021940, AC004884, AC005846, AC005084, AC002476, |
| | | | | | Z98048, L78810, AC006449, AC003036, AC005684, AC001228, and U47924. |
| HMUBM85 | 890 | 784295 | 1-492 | 15-506 | AW162314, AW021674, AW265468,N95424, AW438757, AW162332, AI431442, |
| | | | | | AI755227, AW410844, AW022796, AW327673, AI609992, AI475297, AA112864, |
| | | | | | AW148821, AL039471, N99245, AW403177, AA568311, AI114494, AA568303, |
| | | | | | AA631915, AI797998, AA659923, AA618531, AI065031, AA554289, AI076729, |
| | | | | | AW157128, AW410561, AA507623, AI270280, H96966, AA280886, AI038029, |
| | | | | | AI144125, AA064983, AA557945, AI567676, AW162762, N72509, AI538404, |
| | | | | | AA669238, AA568433, AI609107, AI419390, AJ568260, AL044701, AI421783, |
| | | | | | AA847341, AA550837, AW020682, AW277240, AA182577, AW409621, AI819419, |
| | | | | | AA640305, AI064968, AA074086, AW301712, AW272513, AI859368, AI828721, |
| | | | | | AA489390, AI224583, AA657392, AI572680, AW246579, AL121039, AW439224, |
| | | | | | AI702049, AW273201, AW273146, AA101265, AI813920, R99253, AI061313, |
| | | | | | AI613459, AI281622, AA658890, AL079734, AA225754, AA632355, AI745666, |
| | | | | | AI862213, N58334, AI744963, AW238699, AW069769, AA225392, AW274180, |
| | | | | | AA935827, AA535558, AA533660, AA158023, AI027602, AI590404, AA829693, |
| | | | | | AA569220, T03928, AI049845, AI569401, AI185856, AI307563, AI174703, |
| | | | | | AI573009, AI300356, AA157876, AL044966, AW239465, AA772818, AA593168, |
| | | | | | AI275631, AA610644, AI884404, AI703335, AI423034, AI419419, AL120616, |
| | | | | | AI049999, AI608751, AA525156, AW008217, AI251024, AA572982, AI283329, |
| | | | | | AI708175, D88268, AF205588, AC005921, AL135744, AL121658, AC007066, |
| | | | | | D87008, Z99943, AC005519, Z86061, AC005057, AL049833, AC005839, |
| | | | | | AL117337, AC007371, AL109809, AL096701, Z84466, AC005913, U62293, |
| | | | | | AP000152, AC007216, Z93023, D87012, Z83844, AL031311, Z97053, AC005081, |
| | | | | | AL050321, AC007934, AC004913, Z84480, AC002350, AP000011, AC003688, |
| | | | | | AC007151, AP000211, AP000133, AC007308, AL034429, AL109623, AC007546, |
| | | | | | AE000659, AL008582, AL022238, AC004231, U91326, AC007676, AF109907, |
| | | | | | Z84469, AC005288, AL022162, AP000703, AE000661, AL035422, U85195, |
| | | | | | AB023050, AF196779, AE000658, AC005084, AC005696, AC007052, AC005920, |
| | | | | | AL022165, Z98946, AC005500, AC004673, AC007298, U89335, AC002115, |
| | | | | | AC004383, AC004841, AL049843, AL049759, AF124731, AC005969, AF118808, |
| | | | | | AC002563, AC005291, AL031733, AL080243, Z84487, AC007899, AC000025, |
| | | | | | AP000044, AP000112, AC005529, AC004890, AL133163, AC005527, Z93241, |
| | | | | | AJ006345, AL132777, AC007686, AC005484, AC002055, AC007240, U95742, |
| | | | | | AC016026, AC003110, AC002369, AL133245, AC004967, AL031985, AF047825, |
| | | | | | AC007845, AC007055, AL049830, AL133312, AC003051, AC007637, AC004929, |
| | | | | | AC004645, AL049872, AC006449, AC003043, AC015853, AC004106, Z98200, |
| | | | | | AC006121, AC002544, AL118497, AC008134, AC006004, AC005594, AL022315, |
| | | | | | Z98742, AC000111, AC005011, AL078621, Z82190, AC002425, AL139054, |
| | | | | | AF023268, AF134726, AC006441, AC009501, AL031589, AL049569, AF207550, |
| | | | | | AL031670, AL035398, AC005261, AC009247, AC004797, AC005808, AF055066, |
| | | | | | AC006317, AL022333, AC005488, AC006166, AC006006, AC005102, AP000555, |
| | | | | | AC012627, AL109963, AL020997, AC005822, AC007666, AC008928, AC004139, |
| | | | | | ALI21652, U78027, AC004974, AC004765, AC004686, AC005666, AC005736, |
| | | | | | AC004820, AC004491, AL109758, AF124523, Z84474, Z97056, AC005778, |
| | | | | | AC005277, AC000003, AC004506, AC002470, AP001052, AC005399, AC004019, |
| | | | | | AC006600, AL078639, AC003982, AF001550, AC005971, AC006111, AC007226, |
| | | | | | AL078584, U85199, AL049576, AL034561, AC006211, AC006511, AC004668, |
| | | | | | AC002133, Z84476, AC005914, AL023803, AC016025, AP000511, AC004887, |
| | | | | | AL031282, AL049697, AC004966, AC005516, AC008072, AC005730, AC001226, |
| | | | | | AL031055, AC005911, AC004531, AC006101, AC006026, AP000556, D84394, |
| | | | | | AL031281, Z99570, AL023876, AC005899, Z98950, AC003695, AC005037, |
| | | | | | AL034421, AC004870, AL121754, AP000065, AC006509, AL021940, AL096791, |
| | | | | | AC005632, AC005537, AC007376, AC002301, AC004859, AL034451, Z93017, |
| | | | | | AP001053, AL080317, AC002553, AC005274, M63796, AL049539, AC000353, |
| | | | | | AP000344, and AC004659, |
| HMUBM23 | 891 | 675296 | 1-361 | 15-375 | R51236, R45099, Z40109, and AF107403. |
| HMUBM21 | 892 | 861218 | 1-513 | 15-527 | |
| HMUBM01 | 893 | 916291 | 1-541 | 15-555 | AF039239, AA156352, AI928298, and AC004596. |
| HMUBL79 | 894 | 774904 | 1-279 | 15-293 | |
| HMUBL25 | 895 | 678011 | 1-735 | 15-749 | T83448, and AC004051. |
| HMUBI26 | 896 | 424764 | 1-534 | 15-548 | R11938, and R17505. |
| HMUBH84 | 897 | 782971 | 1-467 | 15-481 | AI300542, W91888, N63093, AL117338, AL049569, AL031687, AL035209, |
| | | | | | AP000697, AC004099, AL035415, AL008718, AC005089, and AC002563. |
| HMUBC76 | 898 | 769968 | 1-466 | 15-480 | H53236. |
| HMUBA75 | 899 | 767192 | 1-363 | 15-377 | AC007250. |
| HMUBA61 | 900 | 741710 | 1-429 | 15-443 | AP000365, and AP000547. |
| HMUAT71 | 901 | 772958 | 1-350 | 15-364 | AA160854, R71813, R71760, R48639, N42220, AW247533, R50575, AW170393, |
| | | | | | AA083908, AA313213, AA455790, AI372424, AI700503, H30234, AI807620, |
| | | | | | AI149104, R85186, H74174, AA371702, H67210, R90881, AI148673, R70330, |
| | | | | | AA380748, W86716, AI421626, R80075, R35880, H30476, W31820, AA099322, |
| | | | | | AI014871, AA323925, H04088, AI951537, AI498026, AW027328, R70448, |
| | | | | | AC006165, A8023051, AP000512, AF085357, AF089750, AF145044, U90435, |
| | | | | | U60976, and U60977. |
| HMUAE85 | 902 | 783543 | 1-313 | 15-327 | AA027138, AI752271, AI880296, AI752272, and D80011. |
| HFOZC29 | 903 | 923288 | 1-555 | 15-569 | AI095431, AI571923, AW261883, AI200605, AA482065, AI200699, AI017296, |
| | | | | | AI923202, AW015684, AA767648, AA883935, AA677666, AI573221, AI033576, |
| | | | | | AI126442, AI369853, AI249160, AI142443, AW264134, AA806683, AI092218, |
| | | | | | AA858007, W94283, AI339695, AI262289, AI076383, AI311852, AI910100, |
| | | | | | H46722, W85678, W74408, AA631052, AA918365, AI301845, AA604026, W72883, |
| | | | | | H47019, AA635622, AA045304, AA746223, AW408264, AI038223, AA482654, |
| | | | | | AA137252, AI985703, AW023603, T32125, W07308, AI658934, T30570, |
| | | | | | AA502009, Z25192, H46795, AA326741, H46480, AA658982, H81844, AA736875, |
| | | | | | AI678243, AW401539, AW352130, AA481943, AA359248, AI832746, AI383918, |
| | | | | | H97071, AI784354, AA344343, AA137251, AW339756, AW188941, D56149, |
| | | | | | N57967, AI382332, N48245, H61635, AA086068, AA603737, AI362081, AA434581, |
| | | | | | AA490441, AI828818, AI220855, AA295325, AI814087, AA830821, AI925463, |
| | | | | | AL039086, AL119791, AW079159, AW074993, AW072484, AI349614, AI349937, |
| | | | | | AI349256, AI312152, AI783504, AW075084, AI872910, AI312399, AI334884, |
| | | | | | AI307543, AI345251, AW071412, AI307708, AI312325, AI340659, AW071377, |
| | | | | | AI340644, AI867042, AI334930, AI309443, AI632997, AI307520, AI874166, |
| | | | | | AI499986, AI340664, AI310592, AW193236, AI345739, AI312143, AI349637, |
| | | | | | AI310927, AI307578, AI349955, AW075093, AI312357, AW268072, AI801325, |
| | | | | | AI923989, AL036631, AL040241, AI919345, AW243886, AW071395, AI830029, |
| | | | | | AI273142, AI636719, AW029271, AW089689, AW268964, AW302965, AI349269, |
| | | | | | N71180, AA572758, AI312432, AI811785, AI440263, AI312237, AW196141 |
| | | | | | AI886415, AW071380, AI358701, AL048656, AI343112, AW301300, AI349598, |
| | | | | | AW075207, AI343037, AW269097, N75771, AI345735, AL079963, AI310925, |
| | | | | | AI635067, AW162189, AI863411, AL047422, AL036265, AI307210, AI345224, |
| | | | | | AI625595, AI345156, AI307569, AI311159, AI313320, AI336495, AI336654, |
| | | | | | AW148320, AI313352, AI311892, AI307736, AI345562, AI284517, AI345026, |
| | | | | | AI307454, AI349266, AI334452, AI349787, AI434741, AI345817, AI344808, |
| | | | | | AI312146, AI538342, AI312339, AI309431, AI345674, AI345258, AI344260, |
| | | | | | AI866573, AI312168, AI348879, AW071276, AI344779, AI344785, AI311604, |
| | | | | | AL119863, AI824576, AW168121, AI310945, AL036664, AI312988, AW059828, |
| | | | | | AW151136, AI475377, AI312428, AI696819, AL037454, AI345111, AI863321, |
| | | | | | AW072588, AW160916, AL110306, AI689420, AL045500, AI912866, AI929108, |
| | | | | | AI683684, AI174394, AI349645, AI431408, AW089572, AI345370, AI471361, |
| | | | | | AI282355, AL036274, AI352326, AI284509, AI358455, AI287704, AI345347, |
| | | | | | AW161579, AI538829, H89138, AI432040, AWI6I156, AL036396, AI620284, |
| | | | | | AL038605, AL036403, AF161529, AF151878, X75935, AR037370, I89947, A08916, |
| | | | | | A08913, AL050108, A08912, AF097996, I48978, A08910, A08909, U00763, |
| | | | | | AL133104, AL049300, I89931, AL110218, I49625, U80742, A07647, AL050393, |
| | | | | | Y10655, E03348, AL122121, I96214, AR034830, AL049283, AL122050, AF106827, |
| | | | | | A93350, AL133077, AF113013, AR038854, A08908, AF054599, U67958, A18777, |
| | | | | | AR059958, AL050149, A65341, AL049430, AF113699, AL049452, E02349, E07108, |
| | | | | | AL117457, AF113676, AF177401, AL110225, AL117394, AJ012755, AL049314, |
| | | | | | AF090903, AL133606, AL133067, AF111849, AF113691, X65873, AL133560, |
| | | | | | AF113694, AL122049, AF113677, Y16645, AL137557, AF067728, AL133080, |
| | | | | | AL080159, I48979, AL137648, AF183393, AL117585, AL133075, AL133016, |
| | | | | | AL050146, AL122093, U91329, AB019565, AL049466, AL050024, AL110196, |
| | | | | | AL080127, AF090896, AL133072, AF079765, A03736, AL110280, AF119337, |
| | | | | | AF113019, I26207, AL049382, Y11254, AL137560, X70685, AL133081, AJ242859, |
| | | | | | AL137550, AL117460, AL133113, AL137521, AF061573, AF057300, AF057299, |
| | | | | | AL122123, X72889, AL080060, AR020905, AF113690, X82434, AF090934, |
| | | | | | A77033, A77035, AF087943, AL137271, U58996, AL117583, Z82022, AL137459, |
| | | | | | AF079763, AF153205, AL137538, AF090900, Y09972, AF158248, AL133568, |
| | | | | | AF185576, AF146568, AF090901, AL050092, AL133565, AL137479, AL050277, |
| | | | | | AF113689, AF118094, I09360, AJ000937, M30514, A90832, AL133098, X92070, |
| | | | | | AF125948, S78214, U42766, X98834, AL080124, AL049464, AL122110, AF091084, |
| | | | | | AL137283, I89934, AR038969, AL049938, Y11587, I03321, AL133640, AL049465, |
| | | | | | AF125949, X93495, X63574, AF106862, AF104032, AR011880, AF111112, |
| | | | | | AF003737, AF118064, AL137478, U68233, I92592, AF000301, AL110221, |
| | | | | | AL096744, AF039138, AF039137, A12297, E02221, X96540, I00734, U72620, |
| | | | | | AF026816, A58524, A58523, AF078844, AF126247, AF090943, AL133558, I33392, |
| | | | | | AF051325, L31396, E00617, E00717, E00778, U68387, E15569, AL137488, L31397, |
| | | | | | AF100931, E02253, AF118070, X62580, AL137523, AF118090, I42402, AL050116, |
| | | | | | AF026124, Z37987, Y10080, AF106657, AL117435, U35846, AJ006417, AL137463, |
| | | | | | A93016, AR013797, I89944, X84990, AL133557, Y07905, AL050138, X83508, |
| | | | | | AF061943, AL137556, AF162270, AL133093, AF111851, AL110197, AL122098, |
| | | | | | AF017152, E08631, S68736, AL080137, AL137527, AL137292, I41145, AL080074, |
| | | | | | AF017437, Z72491, AJ238278, AL080158, AL137529, AL133014, AL137476, |
| | | | | | AC004883, E04233, AR000496, AF132676, U39656, AF061836, AL050172, |
| | | | | | U35146, and X52128. |
| HFOZA47 | 904 | 909372 | 1-303 | 15-317 | T99977, AA386007, AW419200, AI301419, T99978, AA813111, and AL133243. |
| HFOYW76 | 905 | 769894 | 1-387 | 15-401 | Z43100, R23391, R18897, and AA775801. |
| HFOYV08 | 906 | 959038 | 1-503 | 15-517 | AI885037, AW005574, AI127653, AI471784, AW002166, AI652199, AA775784, |
| | | | | | AA398384, AA525786, C21259, and Z98048. |
| HFOYS58 | 907 | 735816 | 1-267 | 15-281 | AA464919, AI360067, and AI563967. |
| HFOYN65 | 908 | 747740 | 1-403 | 15-417 | R42824, AI418414, AI094617, AI159874, AA614150, AI420613, AI082558, |
| | | | | | AI478270, AA928271, AA477739, H29542, AW297075, F35711, AW292053, |
| | | | | | Z39149, AW362068, F25020, and AI597841. |
| HFOYN01 | 909 | 854780 | 1-446 | 15-460 | AA188606, and AL109710. |
| HFOYM48 | 910 | 721455 | 1-461 | 15-475 | N69806, AI692502, AI077479, AA8I1249, N69787, and AC000076. |
| HFOYL33 | 911 | 702209 | 1-593 | 15-607 | W03664, and AW070784. |
| HFOYK21 | 912 | 670653 | 1-852 | 15-866 | AA428559, AA429496, and AA909127. |
| HFOYK02 | 913 | 919458 | 1-475 | 15-489 | W38502, and W21229. |
| HFOYJ30 | 914 | 932485 | 1-669 | 15-683 | W67514, AI655409, AW051595, AI799668, AI400464, AA563735, AI183528, |
| | | | | | AI354914, AA652158, AI337235, AA652105, AA961057, AA772564, AI093875, |
| | | | | | AA889803, AA442063, AI652462, H17951, AA442166, W68127, H12516, |
| | | | | | AI365333, N95071, AA861656, AA939316, R71444, AA917342, AA487907, |
| | | | | | R81789, D62541, R71096, AI355106, F13621, AI277031, Z38139, AA773369, |
| | | | | | AI419837, H12464, C18326, AA767156, and AF116827. |
| HFOYH01 | 915 | 916055 | 1-555 | 15-569 | AI733400, AI392911, AA669057, AI522044, AW293639, AI261721, AI791812, |
| | | | | | AI792235, AA948371, R82728, and AI017805. |
| HFOYG88 | 916 | 494875 | 1-794 | 15-808 | W81024, AA040397, AI806528, AI626098, AI474320, W81060, AW181963, and |
| | | | | | N92485. |
| HFOYG86 | 917 | 949496 | 1-549 | 15-563 | AI089319, AA495807, AA122079, AI682875, and AA626188. |
| HFOYC08 | 918 | 958975 | 1-627 | 15-641 | AI939308, AI089885, AI674951, and AW452881. |
| HFOYA17 | 919 | 662642 | 1-334 | 15-348 | H85252, and Z59473. |
| HFOXW67 | 920 | 494854 | 1-497 | 15-511 | R59304, Z41276, and F01353. |
| HFOXV94 | 921 | 794175 | 1-494 | 15-508 | AA224103, and AC005328. |
| HFOXT74 | 922 | 875383 | 1-522 | 15-536 | AA203672, AA521316, AW025339, AI971502, AA833669, N71094, AA832189, and |
| | | | | | AC003029. |
| HFOXT35 | 923 | 707088 | 1-506 | 15-520 | |
| HFOXS42 | 924 | 713514 | 1-462 | 15-476 | |
| HFOXO57 | 925 | 928171 | 1-493 | 15-507 | N62077, AW408398, R14585, W44378, R52298, H29068, AA258983, R14764, |
| | | | | | R60391, and AL022165. |
| HFOXO33 | 926 | 702212 | 1-555 | 15-569 | R00471, F22586, AI473631, AA773289, AI758435, AI471914, F34093, AA397821, |
| | | | | | H48670, AA251356, AA298788, F27108, AI798493, T06210, AW439008, |
| | | | | | AA130501, AW245331, AA737039, AA523695, AI366902, AA804866, AA523812, |
| | | | | | AI865375, AW021619, AI054339, AC006509, AC011456, AC002504, Z98750, |
| | | | | | AC006960, AC004526, AP000466, Z83844, AF048729, AC005261, AC007695, |
| | | | | | AC006285, AC003043, AC003010, AC004844, AC004067, AC005102, AC004841, |
| | | | | | AC007276, AC005844, AP000354, AC008372, AC016025, AC007546, AL031681, |
| | | | | | AC000029, AC007845, AL035398, AP000045, AP000113, U91326, AC005911, |
| | | | | | AL035086, AL023513, AC005081, AL049569, AL009183, AC005231, AL078581, |
| | | | | | AC004828, L78810, AL031005, AC005326, AC007993, AC005O15, AL022316, |
| | | | | | AC006262, Z98749, AL133246, AL008733, AC006480, AL132712, AC005821, |
| | | | | | AC007225, U95739, D86566, AC005328, AC002352, AC003108, AC005520, |
| | | | | | AL121653, AC005969, AC002425, AC007363, AC005562, AC005071, AJ010770, |
| | | | | | AC005632, AL020997, AC006241, AL080243, AL022313, L44140, AC006026, |
| | | | | | AC004985, AF001548, AC005037, AC004216, AL078638, AC005279, AF053356, |
| | | | | | AC003013, AC004815, AL133243, AC005225, U91323, AC005274, AC007686, |
| | | | | | AC006487, U91322, U89335, Z98941, AP000030, AF196969, AC006312, AP000208, |
| | | | | | AP000130, X99832, AC002544, Z99943, AC005578, AC005088, Z83840, |
| | | | | | AC006530, ALO31296, AC006947, AC002430, AC006011, L04193, AL133245, |
| | | | | | AL049776, AC003982, AC007878, AC006387, Z98036, AC007384, AL034549, |
| | | | | | AC004589, AC007283, AB003151, AL109627, AP000211, AP000133, AC004590, |
| | | | | | AC005914, AC009946, AL049835, AC004967, AC007938, AC002527, AL023281, |
| | | | | | AC005244, Z95114, AC004491, AC008498, AC004583, AC002126, AC004158, |
| | | | | | Z98742, AL079342, AF139813, AF030453, AC005324, AF111168, AC003684, |
| | | | | | AJ003147, AC000085, AF015262, AC004259, AC002476, AC004600, AI229043, |
| | | | | | AC006449, AL031670, AF064861, AC005921, AF020503, AL139054, AL132641, |
| | | | | | AC003015, AL049830, U62317, Z94056, AC004686, AC003025, AL031230, |
| | | | | | AC002395, AC005940, AC007773, AL031680, AL136504, AC004605, AL024507, |
| | | | | | AC006511, AC011311, AL031432, AC004953, AC005531, and AP000555. |
| HFOXM53 | 927 | 587972 | 1-546 | 15-560 | T95196. |
| HFOXL88 | 928 | 909839 | 1-412 | 15-426 | AA077980, AA010232, AA077893, AA149376, AA029227, AA077669, AA077229, |
| | | | | | AW386712, AW386708, AA076983, AA076893, R53155, AB011110, and |
| | | | | | AC004084. |
| HFOXK96 | 929 | 732057 | 1-549 | 15-563 | N95619, AI522016, AW418929, AI739123, AI589262, W81467, AA679593, |
| | | | | | AI358082, AI968962, H29504, W81348, AI802044, AA860722, AI299531, |
| | | | | | AA861993, AI240698, AW293669, AA946852, AI538012, AI872899, R40786, |
| | | | | | AA703596, AA426331, N45617, AC004918, and AL049792. |
| HFOXK42 | 930 | 587960 | 1-400 | 15-414 | AI369443, H40699, H38679, T10030, AI359972, AB032985, and AC006487. |
| HFOXF91 | 931 | 790103 | 1-640 | 15-654 | AW299538, AI700655, AA542898, AI201894, AW002387, AW299893, AW135284, |
| | | | | | N48798, AI953361, AI088991, AI381950, AI239629, AI206950, AI217419, |
| | | | | | AI361123, AI687555, N62233, AI669545, AI700194, W40211, AI537667, |
| | | | | | AW118331, AI569799, AI300682, H22991, AI686217, R45601, W45433, AI867656, |
| | | | | | AA402541, AA766044, AW156969, AW162279, AW157242, AW301566, and |
| | | | | | AL034379. |
| HFOXF42 | 932 | 854797 | 1-410 | 15-424 | F00438, AB029032, and AL137384. |
| HFOXD78 | 933 | 856499 | 1-320 | 15-334 | W00471, AW363484, H05198, F11931, T66107, and AL049471. |
| HFOXB33 | 934 | 701719 | 1-617 | 15-631 | AA070455, and AL049775. |
| HFOXB26 | 935 | 681593 | 1-455 | 15-469 | AA159285. |
| HFOXA62 | 936 | 743466 | 1-435 | 15-449 | T86297. |
| HFIZP86 | 937 | 785341 | 1-409 | 15-423 | AA418200, AI280402, and AI350784. |
| HFIZB62 | 938 | 743122 | 1-693 | 15-707 | AA131059. |
| HFIYX08 | 939 | 958977 | 1-443 | 15-457 | AA605145, AA702116, AA708181, and AL096678. |
| HFIYW79 | 940 | 858618 | 1-652 | 15-666 | R56716, AW075513, AW002149, H39705, H28690, F11371, AA768949, AA384664, |
| | | | | | AI337892, AI057281, AI458151, AI570407, AW134516, AI350058, AI470179, |
| | | | | | AI215812, AA854471, R26470, AA251002, AA573328, AI216845, AI200607, |
| | | | | | AI984370, AA411536, AI298938, AI818816, AW083096, AI300345, W92747, |
| | | | | | AI147626, AI948774, AI262533, AA725905, AA442075, AI565962, AI301560, |
| | | | | | N52183, AA935514, AW149691, AI194002, AI291200, AI304886, AI953743, |
| | | | | | AW270856, R63834, W35349, AW340470, AI765586, AI298116, and AA292171. |
| HFIYS11 | 941 | 966702 | 1-467 | 15-481 | N58560. |
| HFIYN50 | 942 | 724175 | 1-538 | 15-552 | AI458879, AA463632, AA496023, AI168467, AA778374, AI580056, AI056137, |
| | | | | | AI269041, and AI360731. |
| HFIYJ92 | 943 | 791305 | 1-462 | 15-476 | H96503, AI629004, AI436691, AW264067, AI796727, AW341625, N20097, H15455, |
| | | | | | N24619, AI949464, D62682, D63004, T65294, N23339, N94925, AA099864, |
| | | | | | AI095277, F09804, R40594, R60524, and N59847. |
| HF1YA08 | 944 | 962212 | 1-536 | 15-550 | AA458753, AI870866, W72843, AA772868, AI130854, AI083630, AA130359, |
| | | | | | AA056018, AA332556, AI199995, AA469081, AA661635, AI183475, AA457490, |
| | | | | | AA931966, W67545, W67527, W81565, AA826675, T12258, W76412, AA989066, |
| | | | | | W81612, AA630878, AI243042, AA027306, and AA056067. |
| HFIXZ95 | 945 | 915703 | 1-466 | 15-480 | AA126477, AW299841, AI742474, AI672617, AW001691, AW008181, R76817, |
| | | | | | R43164, AI990788, R22570, R28278, H95582, H95556, R75986, R92020, AI983816, |
| | | | | | and AC006055. |
| HFIXZ19 | 946 | 683033 | 1-600 | 15-614 | AA053791, AI755151, AI633860, AL046181, AA205728, AA211578, AA204943, |
| | | | | | AI635990, AI830932, AI949778, AI949366, AI634857, AI823973, AI423292, |
| | | | | | AI627291, AI418579, AI890410, AA836883, AI480105, AI669422, AI095121, |
| | | | | | AI057276, AI890178, AA205729, AI200542, AW078637, AA166692, AI669371, |
| | | | | | AI332344, AI217515, AI359771, AI378663, AA224514, AI554321, AI990118, |
| | | | | | AA630767, AA410286, AW264316, AW206186, AI669078, AI923406, AA468567, |
| | | | | | AA552010, AA121794, AI754877, N51861, AI823545, AI650324, AA099437, |
| | | | | | AI356067, AI038127, AW129642, AI273625, AI619475, AI767029, AI827395, |
| | | | | | AI022904, AI174419, AI765993, AI091669, AA165151, AA961611, AA780769, |
| | | | | | AW020059, AA169647, N90277, AA035739, AA788579, AA169822, AI830936, |
| | | | | | AA452593, AI002825, AA706408, AI583400, AI559181, AW023827, AA205712, |
| | | | | | D12323, AI367552, D11546, AI571708, AA807016, AW382024, AW382030, |
| | | | | | AW382019, D11548, AI349108, AA027830, AL045597, AI564852, AI914393, |
| | | | | | W35293, AW381974, AA746978, AW393593, AI685993, AA678665, AI392778, |
| | | | | | D54048, F37948, R44031, AI695043, AW382056, AI619567, AA431088, AA664873, |
| | | | | | AW381977, AA860448, F25971, AA760888, AI630054, AA214120, F37021, |
| | | | | | H11493, C15312, AI571876, AA216657, AA779052, AI521854, Z28566, AA436971, |
| | | | | | AA502233, AI300701, AI872541, AA256938, W38598, H13644, AA224488, |
| | | | | | AI567021, Z38535, F01833, AI245064, AA431553, AW382004, H43488, AA884498, |
| | | | | | R57005, H39529, AA912371, AF131807, Z99716, and AL008721. |
| HFIXR93 | 947 | 894013 | 1-572 | 15-586 | N25971,N29465, AW410261, and AI435020. |
| HFIXR68 | 948 | 752858 | 1-805 | 15-819 | R11083, and AA393561. |
| HFIXP31 | 949 | 697759 | 1-453 | 15-467 | AA227552, AI080405, AA227929, AI972469, and U69274. |
| HFIXP04 | 950 | 839910 | 1-549 | 15-563 | AA883171. |
| HFIXJ53 | 951 | 489122 | 1-409 | 15-423 | T72754, and AL049713. |
| HFIXB77 | 952 | 772116 | 1-501 | 15-515 | R82686, and H19381. |
| HFIVS81 | 953 | 387591 | 1-230 | 15-244 | AI420574, AW237773, AI375677, AI244780, AA528140, AI624970, AI624952, |
| | | | | | H15695, and Z39216. |
| HF1VS21 | 954 | 855131 | 1-267 | 15-281 | AA578341. |
| HFIVS08 | 955 | 959272 | 1-390 | 15-404 | C01483, and AC007032. |
| HFIUZ63 | 956 | 745033 | 1-554 | 15-568 | AI672293, N59774, AW014476, AI091467, AI740712, AI306424, AI215771, |
| | | | | | AI652127, AA683496, AA868095, AA436090, AI379664, AI419802, and |
| | | | | | AA435990, |
| HFIUY49 | 957 | 855133 | 1-394 | 15-408 | AA501785, T74524, AW274349, AW303196, AW301350, AL049539, AP000555, |
| | | | | | AP000223, and AP000086. |
| HFIUV58 | 958 | 735350 | 1-752 | 15-766 | N22766, AI094120, W94915, AI140008, AI339057, W91968, AI378174, AA628702, |
| | | | | | AA628693, AI080429, AI168313, H97684, AI868702, AI886569, and AA236390. |
| HFIUV18 | 959 | 787095 | 1-499 | 15-513 | H29983, AW298799, T86660, T79509, AA400497, AA400589, T96108, H54131, |
| | | | | | R98500, R98518, T80762, and AA359852. |
| HFIUM33 | 960 | 702319 | 1-359 | 15-373 | AA634147, AC006014, AC005488, AP000696, AC007226, AL109952, U80017, |
| | | | | | AL031985, Z95114, AC005578, Z85987, AL008715, AL031297, AL049576, |
| | | | | | AP000088, AC004765, AC002470, AC007899, Z97054, AL049843, AL022721, |
| | | | | | AC005081, AP000689, AC005924, AC003010, AC004002, AC004662, AC007934, |
| | | | | | AC005399, D87675, AC004966, Z95116, AL133245, Z49236, AC004033, |
| | | | | | AC005520, AC005368, AC007537, AP000047, AC004941, AC007285, AC005280, |
| | | | | | AL109628, AC004890, AL022313, AC002310, AL078475, AP000031, AC004019, |
| | | | | | AL031295, AC007731, AC005874, AF134471, AL022163, AC005500, AL121603, |
| | | | | | Z86090, AC005004, AC007842, AC004668, AL132712, AC005324, AL021918, |
| | | | | | AP000553, AC002425, AL031311, AC004985, AL049869, AC016026, AB023050, |
| | | | | | AC005082, AC005666, AC005527, AF109907, AF030876, AC007227, AC007536, |
| | | | | | Y07848, AC004526, AL024498, AC000025, AP000512, AC004858, AJ251973, |
| | | | | | AC004263, AC004531, AC005971, AC005409, AL049643, AP000115, AP000116, |
| | | | | | AP000049, AL109798, AC005881, AC003041, AC007358, AL021391, AL031670, |
| | | | | | AL021707, AC006026, AB003151, AC004686, AL096791, AC004228, Z81364, |
| | | | | | AL078581, AC002395, AC005736, AL049872, AC007845, AP000311, U95740, |
| | | | | | AC004491, AP000251, AC005598, AC004132, AC002546, AC009247, AL050332, |
| | | | | | Z99127, AC003665, AC004895, Z98742, AC003109, AC005730, AC002544, |
| | | | | | Y10196, AC002477, AF031078, AL133445, U95742, AL049697, AC005899, |
| | | | | | AC005841, AL034379, AC005529, AC016025, AF181896, AL132987, AC002059, |
| | | | | | AF129756, AL024474, AC005911, AC002996, AC005046, AC004067, AP000211, |
| | | | | | AP000133, AP000030, AC000120, AC006511, AC002350, U91323, AC003688, |
| | | | | | AF088219, AC004988, AL049776, AL117337, AL049759, AC005668, AC005839, |
| | | | | | AL009179, AC000134, AC006111, AC006211, AL049795, AC006597, AF196779, |
| | | | | | AD000864, AC007546, AC005233, AC005746, AL080243, AC004841, and |
| | | | | | AL034418. |
| HFIUH65 | 961 | 747836 | 1-517 | 15-531 | AI608715, AI422803, AI432163, W63666, H81684, C05948, W37721, AI493291, |
| | | | | | AI356167, H84536, AA988027, AA401876, AA872375, AA932978, H84219, |
| | | | | | AA868682, and H81685. |
| HFIUD47 | 962 | 720254 | 1-570 | 15-584 | W07634, AA194651, W94182, AA133411, and W07638. |
| HFITH46 | 963 | 718078 | 1-659 | 15-673 | H83995, R84314, AA813574, T05535, and AI915423. |
| HFIJG36 | 964 | 707883 | 1-733 | 15-747 | AA001287. |
| HFIJG20 | 965 | 669580 | 1-421 | 15-435 | R05639. |
| HFIJF58 | 966 | 735927 | 1-659 | 15-673 | AA242859, AA252126, AI693548, H99361, AL049780, and AC006530. |
| HFIIZ92 | 967 | 494044 | 1-461 | 15-475 | AA493255, and AL049781. |
| HFIIU85 | 968 | 793332 | 1-789 | 15-803 | AA486519, N75864, AA282436, AI311373, AA987662, AW378576, AA258100, |
| | | | | | D20734, AA398828, AI340090, AI806551, AI827300, AA322510, AW167535, |
| | | | | | AA486153, AI580840, AA307592, AI300646, AI365620, R63162, AW190730, |
| | | | | | N80417, AA074806, AI380183, AI807739, AI683461, AI817082, AI798145, |
| | | | | | AI423017, AI056695, AI590919, AI127969, AW055144, AA648622, AI860727, |
| | | | | | AI571273, AW173640, AW305299, AI445732, AI283109, AA173927, H13876, |
| | | | | | AA486091, AI692781, AI692782, AI475726, AI567671, AW368584, AW339198, |
| | | | | | AA598864, D57989, AA773684, AI347553, AW304900, AI310482, AW103494, |
| | | | | | AA135489, AA300795, AW377765, AA424654, W53016, AI950989, AA150819, |
| | | | | | AI024706, AA360720, AI751636, AI753529, AI950558, AA604851, AA579895, |
| | | | | | AA931400, AW129397, N39046, N35027, AI355248, AI805101, AA424557, |
| | | | | | H07110, AI860066, AW192391, AI469260, N67995, AA223733, AI863857, |
| | | | | | AI302384, AI355266, AI299079, AI148180, AI003944, AI934032, AI830970, |
| | | | | | N70657 AI340222, AW402035, AA554911, AA565608, AL080212, and U07795. |
| HFIIR63 | 969 | 744994 | 1-732 | 15-746 | R60665, H06153, and R14432. |
| HFIIL37 | 970 | 561375 | 1-337 | 15-351 | AI185219, Z99396, AL038837, AL037051, AL036725, AL036418, AA631969, |
| | | | | | AL039074, AW392670, AL036858, AL036924, AW372827, AL039564, AL039085, |
| | | | | | AL038509, AL039156, AL039108, AL039109, AL039128, AW384394, AL119497, |
| | | | | | AW363220, AL037094, AL039659, AL038531, AL036196, AL036190, AL119335, |
| | | | | | AL119443, AL037639, AL039625, AL039648, AL119319, AL045337, U46351, |
| | | | | | AL119457, AL036767, AL037082, U46350, AL037526, U46341, AL119496, |
| | | | | | AL119324, AL119484, AL119363, AL119391, AL119483, AL119522, AL039678, |
| | | | | | AL039629, AL119341, AL119355, AL039423, U46349, AL036238, AL119396, |
| | | | | | AL038447, AL039150, AL040992, AL134528, AL042909, AL042450, AL039386, |
| | | | | | U46346, AL134524, AL037077, AL036268, U46347, AL119418, AL042614, |
| | | | | | AL119444, AL037085, AL038520, AL037726, AL119439, AL036998, AL036733, |
| | | | | | AL042975, AL039410, AL037615, AL038851, AL134533, AL037205, U46345, |
| | | | | | AL134518, AL042965, AL134531, AL119399, AL037027, AL036719, AL037178, |
| | | | | | AL042984, AL042970, AL043029, AL042551, AL134538, AL119488, AL036679, |
| | | | | | AL134542, AL036191, AL042544, AL043019, AL042542, AL036765, AL043003, |
| | | | | | AL037054, AL119464, AL036774, AL037021, AL036836, AL036999, AL036886, |
| | | | | | AL036158, AC006001, AR060234, AR066494, A81671, AR023813, AR069079, |
| | | | | | AR064707, AR054110, and AB026436. |
| HFIIK75 | 971 | 767222 | 1-845 | 15-859 | AI458975, AW296300, R44335, AW452866, AI276446, AI700567, R40979, |
| | | | | | AI264364, AA884637, AA257160, Z17361, and AA257067. |
| HFIIK32 | 972 | 424259 | 1-396 | 15-410 | R81615. |
| HFIIK07 | 973 | 953034 | 1-481 | 15-495 | AI630872. |
| HFIIJ14 | 974 | 839523 | 1-694 | 15-708 | AI888852, AL046620, AL044458, AW085811, AI732327, AA780914, AA618132, |
| | | | | | AI679294, AI679871, AA525818, AA524604, AA640305, AA523718, AI828721, |
| | | | | | AI282322, AL121039, AI702049, AI732720, AI344906, AA313025, AI567676, |
| | | | | | AI285651, AA493245, AA054283, AA631915, AA577706, N27362, AA515727, |
| | | | | | AI984168, AA664963, AA935827, AW072963, AW265006, AA482682, AI049845, |
| | | | | | AI926102, AA493546, AI734075, AI246541, AI734076, AA831913, AI114494, |
| | | | | | AW238242, AI275631, AI570067, AW157128, AI813920, AI572680, AA554289, |
| | | | | | AI242236, N49298, AI733523, AI889177, AA507623, AI538404, AA618531, |
| | | | | | AI038029, AW085626, AA593168, AI174827, AW327673, AA601336, AI860423, |
| | | | | | AI609992, AA601376, AL044701, AA834891, AW419201, AI734119, AA523719, |
| | | | | | AI003068, AA404619, AI521525, W44797, AW268793, AW265468, AI434103, |
| | | | | | AA602939, AA493464, AA425283, AW301483, AA595508, AW021674, AA728954, |
| | | | | | AA723282, AA584360, AI753092, AA557945, AI889236, AI281622, AA676462, |
| | | | | | AI002950, AA629668, AA834799, AI312614, AI826857, AI350189, AA167656, |
| | | | | | AA493808, AI064968, AW057760, AI039257, H29593, AA847341, AA728952, |
| | | | | | R92703, AA299490, AA526542, AA491941, AI744890, AI884404, AA515728, |
| | | | | | AA811451, AW410844, AL118843, AA558488, AI342863, AI061158, AW339619, |
| | | | | | R61887, AA729004, AI745666, AA421536, AI148840, AW103990, AA197089, |
| | | | | | AA636077, AI003391, AA489390, AI889995, AI791720, AI791408, AP000512, |
| | | | | | AL009181, AC005081, AC005911, AC004491, AC004765, U62317, AC005231, |
| | | | | | AC004801, AB017602, AD000092, AL031666, AL117258, AC004967, AC006271, |
| | | | | | AF003626, AL049694, AL136504, AL020997, AC004000, AL031133, AC002310, |
| | | | | | AC005015, AC007637, U47924, AC004671, AL022323, AC004834, AL136295, |
| | | | | | AC005800, AC006449, AC005412, AC009247, AL049569, AC004752, AL133245, |
| | | | | | AL031311, AF111169, AC005046, AC005887, Z95116, AL080243, Z93241, |
| | | | | | AL031668, AP000692, AC005004, AC004805, AC005755, AL008582, AF053356, |
| | | | | | AF109907, AC002565, AL023575, AL031602, AC005088, AL109628, AP000356, |
| | | | | | AC007151, AP000211, AP000133, AL008719, AC004253, AF038458, AC004854, |
| | | | | | AC007934, AF003529, AC007030, AC005041, AL035423, AC007226, AC002477, |
| | | | | | AL096701, AC007666, AF111168, AC006211, AC004659, AF047825, AF067844, |
| | | | | | AL022316, AL031680, AL022326, AF064861, AC007707, AC005562, AB023051, |
| | | | | | AC016025, AP000131, Z99716, AC006450, AC005619, AC006080, AC004799, |
| | | | | | AL031733, AC005722, AL021395, AC006064, AC005089, AL031431, AC003007, |
| | | | | | AC004031, AC005881, AC002314, AP000503, AC005913, AC000353, AL031730, |
| | | | | | AC007055, AC004678, AC005519, AL035413, AC003006, AL133448, AC002425, |
| | | | | | AC005971, AC002404, AL035460, AC005406, AC003956, AL109758, AP000555, |
| | | | | | Z92542, AP000501, AC005067, AL031589, AL133163, AL049757, AL031846, |
| | | | | | AC008044, AF111167, AC005839, AC005102, AF165926, AC006285, AC005180, |
| | | | | | AC004382, AP000350, AC006261, AP000688, AJ003147, AC005696, AF134726, |
| | | | | | AL139054, L78833, AL050348, AC005808, AC002126, Z85986, AL049776, |
| | | | | | AL049780, AC007227, Z86090, AL031657, AL049759, AC006013, AC004703, |
| | | | | | Z98044, AC002381, AC006160, AC005225, AC002470, AC006011, AL031291, |
| | | | | | AC006006, AC005914, AC005280, AL034423, AL034429, AC004686, AC002400, |
| | | | | | AC004216, AC005258, AC003029, AC004983, AP000346, AC005537, AP000152, |
| | | | | | AL050321, AC005736, AC000003, AP000510, AC005527, AL034555, AJ246003, |
| | | | | | Z95114, AC007774, AL008726, AC006101, AL022311, AP000247, AC004560, |
| | | | | | AL121657, AL035587, AC005484, AC005480, AC007688, AC004887, AC004605, |
| | | | | | AL034451, AC000039, AC005632, AC007536, AL049745, U91328, AC002554, |
| | | | | | AC002073, AL050307, AC005921, AC005566, AC007011, AC003950, AC010077, |
| | | | | | AC002558, AC007216, AC004257, AC008009, AP000553, AL034417, AP000511, |
| | | | | | Z98051, AC006057, AC007371, AC006312, AC007450, AC004662, Z98742, |
| | | | | | AP000008, AC004263, AC007050, AL049576, AC004876, AC003982, AP000466, |
| | | | | | AC006205, AC003108, AL050341, AB000882, AC005245, ALI21825, U52112, |
| | | | | | AC004033, AJ011930, AC004477, AC004849, AB023048, AP000500, AC004526, |
| | | | | | AC004643, AC006115, AL022302, and AC008372. |
| HFIHW91 | 975 | 907618 | 1-515 | 15-529 | AI743173, AA909302, AA447375, AI470475, and AI066540. |
| HFIHW16 | 976 | 858594 | 1-659 | 15-673 | H42111, and AF142099. |
| HFIHW11 | 977 | 947856 | 1-269 | 15-283 | AA828809, and AA828563. |
| HFIHV56 | 978 | 470954 | 1-687 | 15-701 | AA160654. |
| HFIHU76 | 979 | 769948 | 1-347 | 15-361 | AW055256, T59260, H67680, AI002890, H68002, AC004883, and AC005412. |
| HFIHS86 | 980 | 785419 | 1-344 | 15-358 | H89010, AW021356, AW023646, and AL035694. |
| HFIHR78 | 981 | 773512 | 1-457 | 15-471 | H84598, AA777769, AA682587, AI090880, and AI862169. |
| HFIHN35 | 982 | 707075 | 1-895 | 15-909 | N54488, H47963, AA708179, H56418, R92521, H83039, and H60100, |
| HFIHK29 | 983 | 855174 | 1-834 | 15-848 | AW082328, AA056697, AA058386, AI582825, AW376061, AW204615, AA847499, |
| | | | | | AI923052, AI754105, AI755214, AI754567, AI278972, AA630854, AI962030, |
| | | | | | AW328202, AA584484, AA904211, AA503019, AA410788, T74524, AA704393, |
| | | | | | AI669421, AA084609, AI963720, AA713705, AI653776, AI249688, AW023111, |
| | | | | | AI904586, AI904594, AW272294, AW188427, H07953, AA126450, AW082104, |
| | | | | | AW328331, AI279417, AI635028, AA535216, AW193265, W96522, AA720582, |
| | | | | | AI609972, AI307201, AA613227, AA536040, AI038304, AA225406, AI431303, |
| | | | | | AI918419, AI674840, AI912401, W96277, AI471572, AW020088, AI056177, |
| | | | | | AA228778, AA572974, AI569100, AA634991, AI077941, AI350211, AA525293, |
| | | | | | AW020992, AW192599, AI587349, AA456924, AA838091, AI859438, AI049955, |
| | | | | | AA668455, AW265688, AL037683, AA559241, AW438643, AC005666, AC005288, |
| | | | | | AF053356, AC002563, AC005480, AC006317, Z83843, AC004552, AL022323, |
| | | | | | AC004386, AC002476, AC005914, AC004542, AC002504, AC005367, AL035685, |
| | | | | | AL096701, AL034549, AC005907, AC006211, AC003089, AL035555, AL133355, |
| | | | | | Z95115, AC007655, AC007681, AC006275, AC005726, AC009516, Z97987, |
| | | | | | AC005701, AL035045, AC005899, AC000025, AC004659, AP000208, AP000130, |
| | | | | | AL035405, AC005527, AP000247, U91325, AC002366, AC022517, AC004593, |
| | | | | | AL031283, AC004099, AL117354, AC004805, AL031657, AL035691, AL121825, |
| | | | | | AC003683, AC005808, AC004865, X87344, AL031293, AC007637, AC002407, |
| | | | | | AC004525, AL049869, AC005668, AL022313, AC005529, AL034429, AL050321, |
| | | | | | AC003666, AF001550, AP000045, AC007308, Y10196, AC005255, AC004834, |
| | | | | | AL049780, Z98047, AC004782, AC006441, AL031311, AC005189, AC002978, |
| | | | | | AL133244, AC004585, AC004828, AC004814, AC004815, U95743, AC002418, |
| | | | | | AC005562, AC007899, AL035634, AC007488, AC007686, AC005206, X99832, |
| | | | | | U91318, AF001548, AL008718, Z98884, Z93020, AC005243, AP000356, AC005531, |
| | | | | | AC006960, AL024509, AC005667, Z85986, AC006312, Z82203, AC005859, |
| | | | | | AC006080, AC005049, AL031230, AL031736, AC007055, AC007666, AC005261, |
| | | | | | AF001551, AC000353, AC004019, Z86064, AP000692, AC010202, AC008101, |
| | | | | | AC006974, U95737, AL031650, AL049776, AL035071, AC003043, AL022067, |
| | | | | | AL109758, AC007774, AC007536, AC006515, AC002477, AC002449, AL034379, |
| | | | | | U08988, AC005482, AL022311, AC016830, AL035587, AF001549, AC000118, |
| | | | | | AC005225, AL031575, AC003072, AC007528, AC007390, AC005920, Z95331, |
| | | | | | AC004559, AP000044, AP000112, U89335, AC006958, AL121603, AL031984, |
| | | | | | AC006581, AL024498, AJ246003, X55923, AC000378, Z84469, AC008033, |
| | | | | | AL031178, AL109963, X54181, AC004909, AC004526, Z98751, X54178, X55931, |
| | | | | | AC006111, AC004017, X55925, AL078463, AL031662, AF107885, AL031295, |
| | | | | | AC002990, AC002470, AC006050, AJ229043, U57007, AC005694, D88270, |
| | | | | | AL031276, AC005387, AC005730, AL031666, AF064858, AP000113, AL034417, |
| | | | | | AC006344, AL050332, AC005071, AC004106, AC004475, AC005002, AC009044, |
| | | | | | AF196779, AC005829, AC005952, AL020993, AL035423, AC002352, AL031589, |
| | | | | | AF031078, AL021939, AC002126, AL109952, AC000134, AC007225, AL031767, |
| | | | | | AC005410, AC007652, AC004253, AL031667, AC005409, AC004913, AC004020, |
| | | | | | Z81314, AC007993, AF134726, AP000563, AF111167, AL078581, AF030876, |
| | | | | | Y18000, AC002996, AL121658, AF067844, AC002551, AC004242, AC006120, |
| | | | | | AL035403, AC005375, Z93241, AC004150, AC000088, AL050341, and AC007688. |
| HFIHF53 | 984 | 728259 | 1-560 | 15-574 | R65697, R65696, AC007688, AF165926, AL022165, AC005702, and AC005519. |
| HFIHD20 | 985 | 669731 | 1-496 | 15-510 | T55518, AI762631, and AB002380. |
| HFIDL68 | 986 | 928475 | 1-516 | 15-530 | AI375172. |
| HFIDL06 | 987 | 837524 | 1-599 | 15-613 | AI141922, W51817, AA515912, AI925832, AA614027, and AL133051. |
| HFIBK83 | 988 | 939556 | 1-490 | 15-504 | R15292, AW339546, Z42543, AA251688, Z44339, W60548, F06562, AW377760, |
| | | | | | and AA011443. |
| HFIAX78 | 989 | 773445 | 1-280 | 15-294 | |
| HFIAS49 | 990 | 722728 | 1-599 | 15-613 | N35671, AI301181, and AC007093. |
| HFIAL66 | 991 | 587837 | 1-503 | 15-517 | AW172309, and N42465. |
| HCOKA10 | 992 | 907080 | 1-759 | 15-773 | AW327294, F31091, AA528669, AA505384, AW328419, AW328418, AW419243, |
| | | | | | AA187998, AA640483, F31092, AA420717, AI348852, W81029, AA482925, |
| | | | | | AI879569, AA946918, AA314600, AA825612, AA808869, W45176, AA316648, |
| | | | | | AA651658, AI735276, W52650, AA534263, AA314556, AA417254, AI342431, |
| | | | | | AA622408, AA181138, AA506547, W68664, AA635583, AA991834, AA187537, |
| | | | | | AA128015, W96306, AA505394, AA186606, AA524595, AI336250, AA862109, |
| | | | | | N90275, AA187128, AA737195, AA659642, AI879186, AA307087, AA991775, |
| | | | | | AA579430, AA643777, F32467, AA654628, F33074, AW082068, AA484856, |
| | | | | | AA653801, AA469168, AA420763, AI090379, AA421550, AA469285, AA775298, |
| | | | | | N78682, AA225075, AA314013, AI735264, C15999, AI004885, AI185905, |
| | | | | | AA155975, AA541346, AW006688, AA838376, AA507479, AA315116, AA147815, |
| | | | | | AW440264, F25989, AA528681, AI718105, AI185191, AI830011, AI074436, |
| | | | | | AI193986, AA483568, AA844667, F30622, AI598223, AI431978, AA157591, |
| | | | | | AW340929, AI718714, AA147943, AA960763, AI140252, AI131544, AA659113, |
| | | | | | C14408, F28423, AI193088, AI749326, C14506, AA181285, C14409, AI302400, |
| | | | | | AI570974, AI936281, AA229654, AA229788, AA302294, AI982992, F31208, |
| | | | | | AA935155, AI193847, H46476, AA838474, F20187, AA492052, AI609502, |
| | | | | | AI709111, AA469365, F32353, AA608589, AA643956, AA961534, AA226596, |
| | | | | | AI973135, AA128058, AA829205, AA501744, AW276969, AI721218, AI924736, |
| | | | | | AA147740, AA579354, AA995673, AI253661, AA022517, D52050, F27939, |
| | | | | | AA744974, D52103, C14325, F26226, C14332, AI440106, C14532, C14505, |
| | | | | | AA229085, AI205658, W38596, AA613651, H89629, AA029290, AA975314, |
| | | | | | C14296, P33568, W90547, F30424, AI748823, F25844, AA932252, AA229038, |
| | | | | | AA569478, AI300774, AA483111, AA631847, AI523368, AA363475, W81066, |
| | | | | | AI094402, AI440377, AA131139, F29490, AA554888, C14458, AW262694, N57388, |
| | | | | | AA658868, AA320538, P30326, F30077, AI718951, AA664723, W45081, C14216, |
| | | | | | AI151472, AA601532, C14355, AI032761, AI720880, F19339, AA594497, |
| | | | | | AA654880, AI510833, AA320738, AI718725, AA181139, T48033, AA082246, |
| | | | | | AA318164, AA023034, AI379782, AA501349, AI709200, AW020881, F26870, |
| | | | | | AI919316, AA985525, AA318175, AA375674, H47015, AI709292, AI580440, |
| | | | | | T78704, AA226675, AA595613, AA230292, AA528661, AA101676, AA188186, |
| | | | | | AA372741, AA320632, F34274, D51607, F32629, T54178, AI352694, AI720481, |
| | | | | | F31158, AA469169, AA642170, AA230044, AA661507, T40904, T57476, AI832316, |
| | | | | | AA373500, T57504, T54087, C14334, AA729378, F31962, AW272552, D51810, |
| | | | | | AI675421, N29450, AA679894, AA375716, AL021397, L38941, AF147334, |
| | | | | | AF084363, AC003061, AC005372, X14401, AC004796, AC006597, AL049714, |
| | | | | | AF109472, A75356, S76596, AB007181, Y11587, I48979, AF113690, AF118070, |
| | | | | | S78214, AP113691, AL133640, AF090934, AF090900, AF106862, AL050393, |
| | | | | | L31396, L31397, AF090943, AF078844, AL122093, AL117457, AF113694, |
| | | | | | AL117460, U42766, I89947, AL049938, AL050146, AF113013, AF118064, I89931, |
| | | | | | AL133016, AF125949, AL110196, AL110221, A93016, AL050108, AF090901, |
| | | | | | AL133606, AL122050, AF104032, AL050116, AF090896, AJ242859, AF090903, |
| | | | | | AF113676, S68736, AL049452, AB019565, AL137527, AL080060, AF113019, |
| | | | | | AF113677, A08913, AR059958, A08916, AF113689, X84990, AL050149, |
| | | | | | AF113699, AL049314, AL133075, AL049466, AL080124, AL133557, AL050277, |
| | | | | | AL080137, AF017152, AL096744, AF158248, I48978, E03348, AL133565, |
| | | | | | AL137557, E07361, AL133093, AL133080, AL137283, Y16645, AL122121, |
| | | | | | AF111851, AF017437, AL137459, Y11254, AJ000937, X63574, AL122123, X82434, |
| | | | | | AR011880, AF097996, U91329, AL050138, AP091084, AF125948, AF146568, |
| | | | | | AL137550, AL117394, AL110225, AF079765, A65341, AL117585, AL049430, |
| | | | | | AL117435, I49625, AF177401, AL133560, AL117583, A08912, AL049300, U00763, |
| | | | | | E02349, AL049464, A08910, E07108, AJ238278, X72889, AL049382, I33392, |
| | | | | | AL122098, A03736, AF067728, X70685, AL050024, A08909, A77033, A77035, |
| | | | | | AF183393, Z82022, I03321, A58524, A58523, AL122110, AL137271, AF118094, |
| | | | | | AC007390, AI2297, S61953, U35846, AL137648, AL137463, AF095901, U72620, |
| | | | | | AL049283, X96540, AC004093, AF061943, AF026816, AL133113, AL035458, |
| | | | | | AL137538, AL080127, X93495, U80742, X65873, E05822, AF087943, X98834, |
| | | | | | AF109906, AC006336, I42402, AL137521, Z72491, AL110197, I09360, U67958, |
| | | | | | AL080159, Y09972, Y07905, E08263, E08264, AL122049, AL133072, AJ012755, |
| | | | | | AF026124, AL137560, I26207, E15569, AC006112, AL050172, I17767, AF003737, |
| | | | | | AC006840, AF210052, AL137294, AF119337, AL133568, AF091512, AF162270, |
| | | | | | A93350, AC004878, AL110280, AF111112, AF057300, AF008439, AF057299, |
| | | | | | M30514, AC004690, AC002467, AL137526, A08911, AC004200, AR013797, |
| | | | | | L13297, I00734, L30117, E00617, E00717, E00778, AL133077, AL137523, |
| | | | | | AC004987, AF185576, AL137556, AR000496, U39656, I66342, AL133014, |
| | | | | | AF000145, AF061795, A07647, AF151685, AL133104, E04233, AL133098, |
| | | | | | AC006371, AF177767, AR038969, T39948, T48092, T53717, T54310, T58614, |
| | | | | | T58631, T58665, T58680, T59454, T59609, T60693, T60724, T61517, T40270, |
| | | | | | H89483, N31100, W15188, W79553, W90546, AA101675, AA177148, AA230059, |
| | | | | | AA230201, AA482934, AA501580, AA514483, AA523478, AA527911, AA533427, |
| | | | | | AA541546, AA548914, F15751, AA579103, AA654916, AA659893, AA662847, |
| | | | | | AA729739, AA746663, AA746696, AA746820, AA917622, AA953954, AA962129, |
| | | | | | N83299, N84751, N85724, N85940, C14425, C14487, C14529, AA090952, |
| | | | | | AA089892, C15916, AA094133, AA095139, AA652445, D11811, D11899, Z19815, |
| | | | | | F22033, AA722737, AA775136, T25716, AI302923, AI370276, AI474980, |
| | | | | | AI567460, AI198759, and AI292268. |
| HCDEL02 | 993 | 920831 | 1-279 | 15-293 | AI300611, and AI700656. |
| HCDDZ69 | 994 | 522220 | 1-329 | 15-343 | AA631784, T53408, AA427747, AA904211, AI473671, AA721530, AA721523, |
| | | | | | AA604831, AA017583, AA731361, R94436, AW080215, AW054936, AC002310, |
| | | | | | AC006312, AC005924, AC005519, AC004883, AP000501, U80017, AC009399, |
| | | | | | AP000359, AC004796, AL021154, AC004448, AC012384, AC005088, AC002365, |
| | | | | | AC003110, AC005722, AC005844, AC007666, AC005280, AP000555, AF024533, |
| | | | | | AC004983, AC003029, AC005899, AC005740, AL049759, AL022316, Z93023, |
| | | | | | AP000692, AL133353, AC005209, AB023049, AP000008, AC007308, AL031666, |
| | | | | | AL022318, AL023575, AC009247, AC004895, AC003101, AC002477, AC005932, |
| | | | | | AC005482, AC006057, AC004019, AC007066, Z99943, AC002432, AC006071, |
| | | | | | AC007934, AC003042, AL049709, AL022163, AC003690, AC007298, AC006084, |
| | | | | | and AC002301. |
| HCDDY54 | 995 | 529265 | 1-344 | 15-358 | |
| HCDDO80 | 996 | 778563 | 1-421 | 15-435 | AI732570, AA134460, AI871333, AI744693, AI610347, and AI563999. |
| HCDCD64 | 997 | 863415 | 1-389 | 15-403 | N31472, N29138, AI880074, and H85753. |
| HCDBW41 | 998 | 712648 | 1-463 | 15-477 | R43504, R59580, Z39594, T15652, F01654, and Z95118. |
| HCDB086 | 999 | 784617 | 1-672 | 15-686 | W93682, AW242652, AW173253, AI139152, AI553736, AI290544, N49727, |
| | | | | | N52656, Z41613, AI184287, D61097, AI918560, AA258656, and AF028333. |
| HCDAO39 | 1000 | 704504 | 1-264 | 15-278 | AA188026. |
| HCDAA68 | 1001 | 753814 | 1-617 | 15-631 | R95822, and AA019299. |
| HBSAP57 | 1002 | 531874 | 1-631 | 15-645 | AI500721, AA534064, AA829251, AI380617, AW304580, AI826761, AW020150, |
| | | | | | AA714110, AI560085, F35374, AI278972, AA904211, AW303196, AL042735, |
| | | | | | AW301350, AA282951, AW410354, AL079734, AW151541, AA515728, T50676, |
| | | | | | N23913, AA706495, AA983673, AA086318, AA613627, AI440117, AA515048, |
| | | | | | AA503298, AI962030, AI436433, AI683131, AA833875, AA833896, AI133083, |
| | | | | | AI249365, AI049709, AI279417, AI354333, AI755214, AW188427, T74524, |
| | | | | | AW237905, AA704393, AA456924, AI744199, AI754567, AI792521, AA526542, |
| | | | | | AW069769, AI754105, AA535216, AI053398, W96522, AA284247, AI114557, |
| | | | | | AI469577, H63660, AI565084, AI950963, AI114733, AI133552, AI216990, |
| | | | | | AL046746, AL041894, AA809546, AA225406, AI587349, AI355007, AI681962, |
| | | | | | AI186438, AA659832, AI192440, AI923052, AA420801, AW020094, AA502532, |
| | | | | | AA719524, AW272294, AA975779, AW271904, AW019964, H82636, AI343169, |
| | | | | | H73561, AW081303, AL048135, AW157731, AI801505, AI491765, F35097, |
| | | | | | AA654013, AW419389, AW021399, AI609972, AI859438, AA470578, AA524616, |
| | | | | | AI362442, AI499954, AI521525, AI635028, AW243793, AC005746, AC005288, |
| | | | | | AP001060, AC005015, AJ009610, AC005940, AL021453, AC007421, AP000501, |
| | | | | | AC005409, AC005412, Z99714, AC002565, AC010205, Z95331, AC004805, |
| | | | | | AC007376, AL049776, AC007227, AC005378, AL008627, AC006160, AC004242, |
| | | | | | AC007546, AL049869, AL139054, Z84480, AC004895, AC002375, AC006040, |
| | | | | | AC005747, AL022163, AC002302, AC007263, AC005212, AP000696, AB026898, |
| | | | | | AC005089, AL022165, AC005837, AC003101, AC004886, Z97054, U47924, |
| | | | | | AC008154, AL031587, AL022336, AC004134, AL117355, AC002430, AC005261, |
| | | | | | AC007014, AP000704, AL031281, AC003692, AC007384, AF053356, AC006538, |
| | | | | | AP000086, AC005828, AC004019, AC007934, AC006449, AC005041, AC005399, |
| | | | | | AP000555, AL022721, AC005531, AC005037, AF111167, AL022302, AL049766, |
| | | | | | AP000131, AP000209, AC007919, AP000553, AL117354, U91326, AC005722, |
| | | | | | AC007676, AC002299, AC005304, AC006468, AL109984, AP000694, AC007225, |
| | | | | | AL133245, AC011311, AC005071, Z95114, AC002551, Z99716, AC007051, |
| | | | | | AL024498, AC002425, AL050318, AL096701, AL050321, AL049569, AC007055, |
| | | | | | AC005529, AL049712, AC006480, AP000225, AC005102, AC000134, AC002369, |
| | | | | | AC002091, AF001548, L78833, AC007868, AC003109, Z97056, AC016830, |
| | | | | | AL031311, AL022345, AC002544, AC005881, AC004382, AL034451, AF134726, |
| | | | | | AL031602, AL020997, AC004079, AF111168, AC004883, AC005225, AC005829, |
| | | | | | AC004858, AC006211, AP000512, AF196779, AC005209, AL008636, AC003663, |
| | | | | | AL121652, AC004814, AC002563, U91323, AL109628, AP000252, AC007993, |
| | | | | | AL109758, AC004263, AL133163, AL133371, Z86090, AL049871, AC007308, |
| | | | | | AL049872, AC006450, AC005632, AL035071, AC004076, AC005081, AC005046, |
| | | | | | AL021939, AC003982, AC005678, AC006312, AF047825, AL020995, AC003043, |
| | | | | | U62317, L44140, AC004167, AC002070, AC007011, AL050324, AC016027, |
| | | | | | AC005859, AL049780, U78027, AC005808, AP000115, Z83844, AC004821, |
| | | | | | AC010582, AC004882, AC007685, AC005566, AL035461, AC005823, AP000503, |
| | | | | | U91322, AC003108, AC006141, AC005562, AL031666, AC005480, AC005736, |
| | | | | | AL021707, AC007537, AC005291, AL121825, AP000008, D87675, U80017, |
| | | | | | AC005701, AC004057, AC004099, AC006162, AL021918, AC006130, U96629, |
| | | | | | AL078581, AL133246, AC004552, AC007666, AC005921, AL078638, Z98742, |
| | | | | | AC002351, AL035587, M89651, AL096761, AC005004, AC006344, AL135744, |
| | | | | | AC000025, AC000052, AC004990, AC007390, AC005914, AC006463, AC002352, |
| | | | | | AC006333, AC005514, AC005284, AC004232, AL034548, AL034351, AL049757, |
| | | | | | AL024497, AC002115, AC004812, AL035072, AC005565, AC002504, AC005484, |
| | | | | | AC005377, AJ246003, AC004590, AC004985, AL031228, Z93241, AL021393, |
| | | | | | AL122021, AC004797, and U85195. |
| HBCKF23 | 1003 | 675613 | 1-505 | 15-519 | AA429449, AA428527, AA995146, and AI041267. |
| HBCGD25 | 1004 | 677689 | 1-462 | 15-476 | H40377, H51703, T70759, T69773, and H40323. |
| HAOAE95 | 1005 | 795674 | 1-304 | 15-318 | T39786, T39845, and AL034417. |
| HAOAD27 | 1006 | 848729 | 1-472 | 15-486 | AI123100, AW195077, and AL096776. |
| HANKG10 | 1007 | 963926 | 1-456 | 15-470 | AI373332, AW243457, AW235081, AA748692, and AW362939. |
| HANKB13 | 1008 | 827062 | 1-423 | 15-437 | AA278465, AI979103, and AI908300. |
| HAMAC79 | 1009 | 872774 | 1-1081 | 15-1095 | AI358042, AI874151, AL039730, AI400725, F37364, AI887268, AL080011, |
| | | | | | AW302924, AW193203, AW088899, AW409775, AI433206, AA807088, AA864562, |
| | | | | | AI355008, AI537677, AI434242, AI345347, AI918554, H89138, AI859464, |
| | | | | | AI800464, AW411235, AL038445, AI251221, AA911767, AW168503, AL046926, |
| | | | | | AI521386, AL119863, AI582483, AI886594, AW022682, AI829990, AI922577, |
| | | | | | AW089006, AA464646, AI954422, AL036638, AI612015, AW161579, AW168031, |
| | | | | | AI620093, AW058233, AI573026, AL120853, AI919593, AI590423, AA100772, |
| | | | | | AI539153, AI933992, AL042382, AI345224, AA127565, AL120526, AI917959, |
| | | | | | AI311892, AI697324, AA643261, AI280670, AA603709, AI344928, AI952064, |
| | | | | | AL038069, AA853213, AW021373, AI680498, AI698401, AI580674, AA853539, |
| | | | | | AI659795, AL048871, AI470293, AI570966, AW089932, AI344933, AI554343, |
| | | | | | AI916419, AI677797, AW238730, AI537617, AI494201, AW076127, AI920782, |
| | | | | | AL119791, AL04I150, AI335449, AL038076, AW265004, AI927755, AI963040, |
| | | | | | AI582871, W81248, AA761557, AI573093, AW029401, AA420758, AI537837, |
| | | | | | AL046463, AI241819, AI874166, AI340533, AW083804, AL038715, AI955945, |
| | | | | | AI334445, AI336575, AI696969, AW059828, AI073952, AI633477, AW078680, |
| | | | | | AW004886, AW082623, AI312399, AI648502, AW238688, AI802240, AI866127, |
| | | | | | AI335426, AL110306, AI348777, AW410969, AA572758, AI889168, AI671661, |
| | | | | | AI690663, AI929108, AL036772, AI500039, AW162194, AW305233, AI678355, |
| | | | | | AW074869, AI612014, AL037041, AI471361, AI866100, AW160376, AI343059, |
| | | | | | AI284509, AW193134, AI669639, AI866082, AI280661, AA493647, AL042365, |
| | | | | | AI349933, AA420722, AW268261, AI345608, AI285586, AI446124, AI923989, |
| | | | | | AI348897, D50977, AI174591, AI345251, AW020710, AI419650, AW081255, |
| | | | | | AI689420, AW301300, AI348847, AI251830, AI917963, AW193872, R36271, |
| | | | | | AI344819, AI862220, AI648567, AA291456, AW029579, AI434833, AL040241, |
| | | | | | AW075207, AA848053, AI345253, AW020397, AI312152, AI950688, AI343037, |
| | | | | | AW269097, AI345677, AA938383, AI696611, AI446373, AW075084, AW087385, |
| | | | | | AI523806, AW301409, AL047387, AI932458, AI473451, AI340603, AI919345, |
| | | | | | AI290153, AW151714, AW088903, AI364788, AW130863, AW129230, AI830030, |
| | | | | | AW084097, AI307543, AI249877, AI345370, AI932949, AI799234, AI345527, |
| | | | | | AW021717, AI289542, AI348854, AI817430, AI242736, AI699056, AI446092, |
| | | | | | AI307569, AI345471, AI344935, AI805638, AI334820, AI365256, AI366549, |
| | | | | | AI366992, AI636719, AI313320, AW190286, AI336495, AI478123, AI453487, |
| | | | | | AW085786, AW081034, AI539771, AL039086, AI866608, AI472536, AI307520, |
| | | | | | AL043981, AI805688, AI611743, AI340664, AI590686, AL040207, AI368816, |
| | | | | | AA830821, AW191844, AI309431, AI888621, AI348917, L78810, AL035407, |
| | | | | | AC005091, AC006013, AC004686, AC002454, AC004383, AC004878, AL022147, |
| | | | | | U62317, AL137705, AC004837, AC004797, AC007114, AL049594, AC004159, |
| | | | | | AC005250, AC005057, AL035587, AL033521, AC004883, AL031295, AC006222, |
| | | | | | AC004987, AC005488, AC002416, AC007406, AP000030, AL035458, AC007172, |
| | | | | | AL031984, AL137294, Z82206, AP000514, AC005048, AC006039, AC009286, |
| | | | | | AC006112, AF091512, and AP000344. |

[0114] TABLE 4

| | | | | Cell | | |
|---|---|---|---|---|---|---|
| Code | Description | Tissue | Organ | Line | Disease | Vector |
| AR022 | a_Heart | a_Heart | | | | |
| AR023 | a_Liver | a_Liver | | | | |
| AR024 | a_mammary gland | a_mammary gland | | | | |
| AR025 | a_Prostate | a_Prostate | | | | |
| AR026 | a_small intestine | a_small intestine | | | | |
| AR027 | a_Stomach | a_Stomach | | | | |
| AR028 | Blood B cells | Blood B cells | | | | |
| AR029 | Blood B cells activated | Blood B cells | | | | |
| | | activated | | | | |
| AR030 | Blood B cells resting | Blood B cells | | | | |
| | | resting | | | | |
| AR031 | Blood T cells activated | Blood T cells | | | | |
| | | activated | | | | |
| AR032 | Blood T cells resting | Blood T cells resting | | | | |
| AR033 | brain | brain | | | | |
| AR034 | breast | breast | | | | |
| AR035 | breast cancer | breast cancer | | | | |
| AR036 | Cell Line CAOV3 | Cell Line CAOV3 | | | | |
| AR037 | cell line PA-1 | cell line PA-1 | | | | |
| AR038 | cell line transformed | cell line transformed | | | | |
| AR039 | colon | colon | | | | |
| AR040 | colon (9808co65R) | colon (9808co65R) | | | | |
| AR041 | colon (9809co15) | colon (9809co15) | | | | |
| AR042 | colon cancer | colon cancer | | | | |
| AR043 | colon cancer | colon cancer | | | | |
| | (9808co64R) | (9808co64R) | | | | |
| AR044 | colon cancer 9809co14 | colon cancer | | | | |
| | | 9809co14 | | | | |
| AR045 | corn clone 5 | corn clone 5 | | | | |
| AR046 | corn clone 6 | corn clone 6 | | | | |
| AR047 | corn clone2 | corn clone2 | | | | |
| AR048 | corn clone3 | corn clone3 | | | | |
| AR049 | Corn Clone4 | Corn Clone4 | | | | |
| AR050 | Donor II B Cells 24 hrs | Donor II B Cells | | | | |
| | | 24 hrs | | | | |
| AR051 | Donor II B Cells 72 hrs | Donor II B Cells | | | | |
| | | 72 hrs | | | | |
| AR052 | Donor II B-Cells 24 hrs. | Donor II B-Cells 24 | | | | |
| | | hrs. | | | | |
| AR053 | Donor II B-Cells 72 hrs | Donor II B-Cells | | | | |
| | | 72 hrs | | | | |
| AR054 | Donor II Resting B Cells | Donor II Resting B | | | | |
| | | Cells | | | | |
| AR055 | Heart | Heart | | | | |
| AR056 | Human Lung | Human Lung | | | | |
| | (clonetech) | (clonetech) | | | | |
| AR057 | Human Mammary | Human Mammary | | | | |
| | (clontech) | (clontech) | | | | |
| AR058 | Human Thymus | Human Thymus | | | | |
| | (clonetech) | (clonetech) | | | | |
| AR059 | Jurkat (unstimulated) | Jurkat | | | | |
| | | (unstimulated) | | | | |
| AR060 | Kidney | Kidney | | | | |
| AR061 | Liver | Liver | | | | |
| AR062 | Liver (Clontech) | Liver (Clontech) | | | | |
| AR063 | Lymphocytes chronic | Lymphocytes | | | | |
| | lymphocytic leukaemia | chronic lymphocytic | | | | |
| | | leukaemia | | | | |
| AR064 | Lymphocytes diffuse | Lymphocytes | | | | |
| | large B cell lymphoma | diffuse large B cell | | | | |
| | | lymphoma | | | | |
| AR065 | Lymphocytes follicular | Lymphocytes | | | | |
| | lymphoma | follicular lymphoma | | | | |
| AR066 | normal breast | normal breast | | | | |
| AR067 | Normal Ovarian | Normal Ovarian | | | | |
| | (4004901) | (4004901) | | | | |
| AR068 | Normal Ovary | Normal Ovary | | | | |
| | 9508G045 | 9508G045 | | | | |
| AR069 | Normal Ovary | Normal Ovary | | | | |
| | 9701G208 | 9701G208 | | | | |
| AR070 | Normal Ovary | Normal Ovary | | | | |
| | 9806G005 | 9806G005 | | | | |
| AR071 | Ovarian Cancer | Ovarian Cancer | | | | |
| AR072 | Ovarian Cancer | Ovarian Cancer | | | | |
| | (9702G001) | (9702G001) | | | | |
| AR073 | Ovarian Cancer | Ovarian Cancer | | | | |
| | (9707G029) | (9707G029) | | | | |
| AR074 | Ovarian Cancer | Ovarian Cancer | | | | |
| | (9804G011) | (9804G011) | | | | |
| AR075 | Ovarian Cancer | Ovarian Cancer | | | | |
| | (9806G019) | (9806G019) | | | | |
| AR076 | Ovarian Cancer | Ovarian Cancer | | | | |
| | (9807G017) | (9807G017) | | | | |
| AR077 | Ovarian Cancer | Ovarian Cancer | | | | |
| | (9809G001) | (9809G001) | | | | |
| AR078 | ovarian cancer 15799 | ovarian cancer | | | | |
| | | 15799 | | | | |
| AR079 | Ovarian Cancer | Ovarian Cancer | | | | |
| | 17717AID | 17717AID | | | | |
| AR080 | Ovarian Cancer | Ovarian Cancer | | | | |
| | 4004664B1 | 4004664B1 | | | | |
| AR081 | Ovarian Cancer | Ovarian Cancer | | | | |
| | 4005315A1 | 4005315A1 | | | | |
| AR082 | ovarian cancer | ovarian cancer | | | | |
| | 94127303 | 94127303 | | | | |
| AR083 | Ovarian Cancer | Ovarian Cancer | | | | |
| | 96069304 | 96069304 | | | | |
| AR084 | Ovarian Cancer | Ovarian Cancer | | | | |
| | 9707G029 | 9707G029 | | | | |
| AR085 | Ovarian Cancer | Ovarian Cancer | | | | |
| | 9807G045 | 9807G045 | | | | |
| AR086 | ovarian cancer | ovarian cancer | | | | |
| | 9809G001 | 9809G001 | | | | |
| AR087 | Ovarian Cancer | Ovarian Cancer | | | | |
| | 9905C032RC | 9905C032RC | | | | |
| AR088 | Ovarian cancer 9907 | Ovarian cancer 9907 | | | | |
| | C00 3rd | C00 3rd | | | | |
| AR089 | Prostate | Prostate | | | | |
| AR090 | Prostate (clonetech) | Prostate (clonetech) | | | | |
| AR091 | prostate cancer | prostate cancer | | | | |
| AR092 | prostate cancer #15176 | prostate cancer | | | | |
| | | #15176 | | | | |
| AR093 | prostate cancer #15509 | prostate cancer | | | | |
| | | #15509 | | | | |
| AR094 | prostate cancer #15673 | prostate cancer | | | | |
| | | #15673 | | | | |
| AR095 | Small Intestine | Small Intestine | | | | |
| | (Clontech) | (Clontech) | | | | |
| AR096 | Spleen | Spleen | | | | |
| AR097 | Thymus T cells | Thymus T cells | | | | |
| | activated | activated | | | | |
| AR098 | Thymus T cells resting | Thymus T cells | | | | |
| | | resting | | | | |
| AR099 | Tonsil | Tonsil | | | | |
| AR100 | Tonsil geminal center | Tonsil geminal | | | | |
| | centroblast | center centroblast | | | | |
| AR101 | Tonsil germinal center B | Tonsil germinal | | | | |
| | cell | center B cell | | | | |
| AR102 | Tonsil lymph node | Tonsil lymph node | | | | |
| AR103 | Tonsil memory B cell | Tonsil memory B | | | | |
| | | cell | | | | |
| AR104 | Whole Brain | Whole Brain | | | | |
| AR105 | Xenograft ES-2 | Xenograft ES-2 | | | | |
| AR106 | Xenograft SW626 | Xenograft SW626 | | | | |
| H0041 | Human Fetal Bone | Human Fetal Bone | Bone | | | Uni-ZAP |
| | | | | | | XR |
| H0122 | Human Adult Skeletal | Human Skeletal | Sk Muscle | | | Uni-ZAP |
| | Muscle | Muscle | | | | XR |
| H0124 | Human | Human | Sk Muscle | | disease | Uni-ZAP |
| | Rhabdomyosarcoma | Rhabdomyosarcoma | | | | XR |
| H0135 | Human Synovial | Human Synovial | Synovium | | | Uni-ZAP |
| | Sarcoma | Sarcoma | | | | XR |
| H0251 | Human | Human | Cartilage | | disease | Uni-ZAP |
| | Chondrosarcoma | Chondrosarcoma | | | | XR |
| H0252 | Human Osteosarcoma | Human | Bone | | disease | Uni-ZAP |
| | | Osteosarcoma | | | | XR |
| H0381 | Bone Cancer | Bone Cancer | | | disease | Uni-ZAP |
| | | | | | | XR |
| H0419 | Bone Cancer, re- | Bone Cancer | | | | Uni-ZAP |
| | excision | | | | | XR |
| H0529 | Myoloid Progenitor Cell | TF-1 Cell Line; | | | | pCMVSport |
| | Line | Myoloid progenitor | | | | 3.0 |
| | | cell line | | | | |
| H0636 | Chondrocytes | Chondrocytes | | | | pSport1 |
| H0658 | Ovary, Cancer | 9809C332- Poorly | Ovary & | | disease | pSport1 |
| | (9809C332): Poorly | differentiate | Fallopian | | | |
| | differentiated | | Tubes | | | |
| | adenocarcinoma | | | | | |
| S0001 | Brain frontal cortex | Brain frontal cortex | Brain | | | Lambda |
| | | | | | | ZAP II |
| S0003 | Human Osteoclastoma | Osteoclastoma | bone | | disease | Uni-ZAP |
| | | | | | | XR |
| S0011 | STROMAL - | Osteoclastoma | bone | | disease | Uni-ZAP |
| | OSTEOCLASTOMA | | | | | XR |
| S0022 | Human Osteoclastoma | Osteoclastoma | | | | Uni-ZAP |
| | Stromal Cells - | Stromal Cells | | | | XR |
| | unamplified | | | | | |
| S0027 | Smooth muscle, serum | Smooth muscle | Pulmanary | Cell | | Uni-ZAP |
| | treated | | artery | Line | | XR |
| S0028 | Smooth muscle, control | Smooth muscle | Pulmanary | Cell | | Uni-ZAP |
| | | | artery | Line | | XR |
| S0032 | Smooth muscle-ILb | Smooth muscle | Pulmanary | Cell | | Uni-ZAP |
| | induced | | artery | Line | | XR |
| S0037 | Smooth muscle, IL1b | Smooth muscle | Pulmanary | Cell | | Uni-ZAP |
| | induced | | artery | Line | | XR |
| S0118 | Smooth muscle control | Smooth muscle | Pulmanary | Cell | | Uni-ZAP |
| | 2 | | artery | Line | | XR |
| S0122 | Osteoclastoma- | Osteoclastoma | bone | | disease | pBluescript |
| | normalized A | | | | | |
| S0126 | Osteoblasts | Osteoblasts | Knee | Cell | | Uni-ZAP |
| | | | | Line | | XR |
| S0192 | Synovial Fibroblasts | Synovial Fibroblasts | | | | pSport1 |
| | (control) | | | | | |
| S0194 | Synovial hypoxia | Synovial Fibroblasts | | | | pSport1 |
| S0196 | Synovial IL-1/TNF | Synovial Fibroblasts | | | | pSport1 |
| | stimulated | | | | | |
| S0206 | Smooth Muscle- | Smooth muscle | Pulmanary | Cell | | pBluescript |
| | HASTE normalized | | artery | Line | | |
| S0214 | Human Osteoclastoma, | Osteoclastoma | bone | | disease | Uni-ZAP |
| | re-excision | | | | | XR |
| S0242 | Synovial Fibroblasts | Synovial Fibroblasts | | | | pSport1 |
| | (Il1/TNF), subt | | | | | |
| S0250 | Human Osteoblasts II | Human Osteoblasts | Femur | | disease | pCMVSport |
| | | | | | | 2.0 |
| S0276 | Synovial hypoxia-RSF | Synovial fobroblasts | Synovial | | | pSport1 |
| | subtracted | (rheumatoid) | tissue | | | |
| S0312 | Human | Human | | | disease | pSport1 |
| | osteoarthritic; fraction II | osteoarthritic | | | | |
| | | cartilage | | | | |
| S0314 | Human | Human | | | disease | pSport1 |
| | osteoarthritis; fraction I | osteoarthritic | | | | |
| | | cartilage | | | | |
| S0316 | Human Normal | Human Normal | | | | pSport1 |
| | Cartilage, Fraction I | Cartilage | | | | |
| S0318 | Human Normal | Human Normal | | | | pSport1 |
| | Cartilage Fraction II | Cartilage | | | | |
| S0334 | Human Normal | Human Normal | | | | pSport1 |
| | Cartilage Fraction III | Cartilage | | | | |
| S0336 | Human Normal | Human Normal | | | | pSport1 |
| | Cartilage Fraction IV | Cartilage | | | | |
| S0338 | Human Osteoarthritic | Human | | | disease | pSport1 |
| | Cartilage Fraction III | osteoarthritic | | | | |
| | | cartilage | | | | |
| S0340 | Human Osteoarthritic | Human | | | disease | pSport1 |
| | Cartilage Fraction IV | osteoarthritic | | | | |
| | | cartilage | | | | |
| S0362 | Human Gastrocnemius | Gastrocnemius | | | | pSport1 |
| | | muscle | | | | |
| S0390 | Smooth muscle, control; | Smooth muscle | Pulmanary | Cell | | Uni-ZAP |
| | re-excision | | artery | Line | | XR |
| S3012 | Smooth Muscle Serum | Smooth muscle | Pulmanary | Cell | | pBluescript |
| | Treated, Norm | | artery | Line | | |
| S3014 | Smooth muscle, serum | Smooth muscle | Pulmanary | Cell | | pBluescript |
| | induced, re-exc | | artery | Line | | |
| L0021 | Human adult (K.Okubo) | | | | | |
| L0022 | Human adult lung 3″ | | | | | |
| | directed Mbol cDNA | | | | | |
| L0040 | Human colon mucosa | | | | | |
| L0055 | Human promyelocyte | | | | | |
| L0180 | Human GM-CSF- | | | GM- | | |
| | deprived TF-1 cell line | | | CSF- | | |
| | (Liu, Hongtao) | | | de- | | |
| | | | | prived | | |
| | | | | TF-1 | | |
| | | | | cell line | | |
| L0361 | Stratagene ovary | | ovary | | | Bluescript |
| | (#937217) | | | | | SK |
| L0362 | Stratagene ovarian | | | | | Bluescript |
| | cancer (#937219) | | | | | SK- |
| L0365 | NCI_CGAP_Phe1 | pheochromocytoma | | | | Bluescript |
| | | | | | | SK- |
| L0366 | Stratagene schizo brain | schizophrenic brain | | | | Bluescript |
| | S11 | S-11 frontal lobe | | | | SK- |
| L0369 | NCI_CGAP_AA1 | adrenal adenoma | adrenal | | | Bluescript |
| | | | gland | | | SK- |
| L0370 | Johnston frontal cortex | pooled frontal lobe | brain | | | Bluescript |
| | | | | | | SK- |
| L0375 | NCI_CGAP_Kid6 | kidney tumor | kidney | | | Bluescript |
| | | | | | | SK- |
| L0384 | NCI_CGAP_Pr23 | prostate tumor | prostate | | | Bluescript |
| | | | | | | SK- |
| L0387 | NCI_CGAP_GCB0 | germinal center B- | tonsil | | | Bluescript |
| | | cells | | | | SK- |
| L0415 | b4HB3MA Cot8-HAP- | | | | | Lafmid BA |
| | Ft | | | | | |
| L0435 | Infant brain, LLNL | | | | | lafmid BA |
| | array of Dr. M. Soares | | | | | |
| | 1NIB | | | | | |
| L0438 | normalized infant brain | total brain | brain | | | lafmid BA |
| | cDNA | | | | | |
| L0439 | Soares infant brain | | whole | | | Lafmid BA |
| | 1NIB | | brain | | | |
| L0455 | Human retina cDNA | retina | eye | | | lambda gt10 |
| | randomly primed | | | | | |
| | sublibrary | | | | | |
| L0465 | TEST1, Human adult | | | | | lambda |
| | Testis tissue | | | | | nm1149 |
| L0471 | Human fetal heart, | | | | | Lambda |
| | Lambda ZAP Express | | | | | ZAP |
| | | | | | | Express |
| L0485 | STRATAGENE Human | skeletal muscle | leg muscle | | | Lambda |
| | skeletal muscle cDNA | | | | | ZAPII |
| | library, cat. #936215. | | | | | |
| L0498 | NCI_CGAP_HSC3 | CD34+, T negative, | bone | | | pAMP1 |
| | | patient with chronic | marrow | | | |
| | | myelogenou | | | | |
| L0517 | NCI_CGAP_Pr1 | | | | | pAMP10 |
| L0518 | NCI_CGAP_Pr2 | | | | | pAMP10 |
| L0520 | NCI_CGAP_Alv1 | alveolar | | | | pAMP10 |
| | | rhabdomyosarcoma | | | | |
| L0521 | NCI_CGAP_Ew1 | Ewing″s sarcoma | | | | pAMP10 |
| L0523 | NCI_CGAP_Lip2 | liposarcoma | | | | pAMP10 |
| L0526 | NCI_CGAP_Pr12 | metastatic prostate | | | | pAMP10 |
| | | bone lesion | | | | |
| L0527 | NCI_CGAP_Ov2 | ovary | | | | pAMP10 |
| L0529 | NCI_CGAP_Pr6 | prostate | | | | pAMP10 |
| L0530 | NCI_CGAP_Pr8 | prostate | | | | pAMP10 |
| L0538 | NCI_CGAP_Ov5 | normal surface | ovary | | | pAMP10 |
| | | epithelium | | | | |
| L0545 | NCI_CGAP_Pr4.1 | prostatic | prostate | | | pAMP10 |
| | | intraepithelial | | | | |
| | | neoplasia - high | | | | |
| | | grade | | | | |
| L0559 | NCI_CGAP_Ov39 | papillary serous | ovary | | | pAMP10 |
| | | ovarian metastasis | | | | |
| L0562 | Chromosome 7 HeLa | | | HeLa | | pAMP10 |
| | cDNA Library | | | cell | | |
| | | | | line; | | |
| | | | | ATCC | | |
| L0581 | Stratagene liver | | liver | | | pBluescript |
| | (#937224) | | | | | SK |
| L0586 | HTCDL1 | | | | | pBluescript |
| | | | | | | SK(-) |
| L0588 | Stratagene endothelial | | | | | pBluescript |
| | cell 937223 | | | | | SK- |
| L0589 | Stratagene fetal retina | | | | | pBluescript |
| | 937202 | | | | | SK- |
| L0590 | Stratagene fibroblast | | | | | pBluescript |
| | (#937212) | | | | | SK- |
| L0591 | Stratagene HeLa cell s3 | | | | | pBluescript |
| | 937216 | | | | | SK- |
| L0592 | Stratagene hNT neuron | | | | | pBluescript |
| | (#937233) | | | | | SK- |
| L0594 | Stratagene | | | | | pBluescript |
| | neuroepithelium | | | | | SK- |
| | NT2RAMI 937234 | | | | | |
| L0595 | Stratagene NT2 | neuroepithelial cells | brain | | | pBluescript |
| | neuronal precursor | | | | | SK- |
| | 937230 | | | | | |
| L0596 | Stratagene colon | | colon | | | pBluescript |
| | (#937204) | | | | | SK- |
| L0597 | Stratagene corneal | | cornea | | | pBluescript |
| | stroma (#937222) | | | | | SK- |
| L0598 | Morton Fetal Cochlea | cochlea | ear | | | pBluescript |
| | | | | | | SK- |
| L0599 | Stratagene lung | | lung | | | pBluescript |
| | (#937210) | | | | | SK- |
| L0601 | Stratagene pancreas | | pancreas | | | pBluescript |
| | (#937208) | | | | | SK- |
| L0602 | Pancreatic Islet | pancreatic islet | pancreas | | | pBluescript |
| | | | | | | SK- |
| L0604 | Stratagene muscle | muscle | skeletal | | | pBluescript |
| | 937209 | | muscle | | | SK- |
| L0605 | Stratagene fetal spleen | fetal spleen | spleen | | | pBluescript |
| | (#937205) | | | | | SK- |
| L0606 | NCI_CGAP_Lym5 | follicular lymphoma | lymph | | | pBluescript |
| | | | node | | | SK- |
| L0607 | NCI_CGAP_Lym6 | mantle cell | lymph | | | pBluescript |
| | | lymphoma | node | | | SK- |
| L0608 | Stratagene lung | lung carcinoma | lung | NCI- | | pBluescript |
| | carcinoma 937218 | | | H69 | | SK- |
| L0623 | HM3 | pectoral muscle | | | | pcDNAII |
| | | (after mastectomy) | | | | (Invitrogen) |
| L0636 | NCI_CGAP_Pit1 | four pooled pituitary | brain | | | pCMV- |
| | | adenomas | | | | SPORT6 |
| L0640 | NCI_CGAP_Br18 | four pooled high- | breast | | | pCMV- |
| | | grade tumors, | | | | SPORT6 |
| | | including two prima | | | | |
| L0646 | NCI_CGAP_Co14 | moderately- | colon | | | pCMV- |
| | | differentiated | | | | SPORT6 |
| | | adenocarcinoma | | | | |
| L0653 | NCI_CGAP_Lu28 | two pooled | lung | | | pCMV- |
| | | squamous cell | | | | SPORT6 |
| | | carcinomas | | | | |
| L0655 | NCI_CGAP_Lym12 | lymphoma, | lymph | | | pCMV- |
| | | follicular mixed | node | | | SPORT6 |
| | | small and large cell | | | | |
| L0659 | NCI_CGAP_Pan1 | adenocarcinoma | pancreas | | | pCMV- |
| | | | | | | SPORT6 |
| L0661 | NCI_CGAP_Mel15 | malignant | skin | | | pCMV- |
| | | melanoma, | | | | SPORT6 |
| | | metastatic to lymph | | | | |
| | | node | | | | |
| L0662 | NCI_CGAP_Gas4 | poorly differentiated | stomach | | | pCMV- |
| | | adenocarcinoma | | | | SPORT6 |
| | | with signet r | | | | |
| L0663 | NCI_CGAP_Ut2 | moderately- | uterus | | | pCMV- |
| | | differentiated | | | | SPORT6 |
| | | endometrial | | | | |
| | | adenocarcino | | | | |
| L0665 | NCI_CGAP_Ut4 | serous papillary | uterus | | | pCMV- |
| | | carcinoma, high | | | | SPORT6 |
| | | grade, 2 pooled t | | | | |
| L0666 | NCI_CGAP_Ut1 | well-differentiated | uterus | | | pCMV- |
| | | endometrial | | | | SPORT6 |
| | | adenocarcinoma, 7 | | | | |
| L0731 | Soares_pregnant_uterus | | uterus | | | pT7T3-Pac |
| | _NbHPU | | | | | |
| L0740 | Soares melanocyte | melanocyte | | | | pT7T3D |
| | 2NbHM | | | | | (Pharmacia) |
| | | | | | | with a |
| | | | | | | modified |
| | | | | | | polylinker |
| L0741 | Soares adult brain | | brain | | | pT7T3D |
| | N2b4HB55Y | | | | | (Pharmacia) |
| | | | | | | with a |
| | | | | | | modified |
| | | | | | | polylinker |
| L0742 | Soares adult brain | | brain | | | pT7T3D |
| | N2b5HB55Y | | | | | (Pharmacia) |
| | | | | | | with a |
| | | | | | | modified |
| | | | | | | polylinker |
| L0743 | Soares breast 2NbHBst | | breast | | | pT7T3D |
| | | | | | | (Pharmacia) |
| | | | | | | with a |
| | | | | | | modified |
| | | | | | | polylinker |
| L0744 | Soares breast 3NbHBst | | breast | | | pT7T3D |
| | | | | | | (Pharmacia) |
| | | | | | | with a |
| | | | | | | modified |
| | | | | | | polylinker |
| L0745 | Soares retina N2b4HR | retina | eye | | | pT7T3D |
| | | | | | | (Pharmacia) |
| | | | | | | with a |
| | | | | | | modified |
| | | | | | | polylinker |
| L0746 | Soares retina N2b5HR | retina | eye | | | pT7T3D |
| | | | | | | (Pharmacia) |
| | | | | | | with a |
| | | | | | | modified |
| | | | | | | polylinker |
| L0747 | Soares_fetal_heart_NbH | | heart | | | pT7T3D |
| | H19W | | | | | (Pharmacia) |
| | | | | | | with a |
| | | | | | | modified |
| | | | | | | polylinker |
| L0748 | Soares fetal liver spleen | | Liver and | | | pT7T3D |
| | 1NFLS | | Spleen | | | (Pharmacia) |
| | | | | | | with a |
| | | | | | | modified |
| | | | | | | polylinker |
| L0749 | Soares_fetal_liver_spleen | | Liver and | | | pT7T3D |
| | _1NFLS_S1 | | Spleen | | | (Pharmacia) |
| | | | | | | with a |
| | | | | | | modified |
| | | | | | | polylinker |
| L0750 | Soares_fetal_lung_NbH | | lung | | | pT7T3D |
| | L19W | | | | | (Pharmacia) |
| | | | | | | with a |
| | | | | | | modified |
| | | | | | | polylinker |
| L0751 | Soares ovary tumor | ovarian tumor | ovary | | | pT7T3D |
| | NbHOT | | | | | (Pharmacia) |
| | | | | | | with a |
| | | | | | | modified |
| | | | | | | polylinker |
| L0752 | Soares_parathyroid_tu- | parathyroid tumor | parathyroid | | | pT7T3D |
| | mor_NbHPA | | gland | | | (Pharmacia) |
| | | | | | | with a |
| | | | | | | modified |
| | | | | | | polylinker |
| L0753 | Soares_pineal_gland_N | | pineal | | | pT7T3D |
| | 3HPG | | gland | | | (Pharmacia) |
| | | | | | | with a |
| | | | | | | modified |
| | | | | | | polylinker |
| L0754 | Soares placenta Nb2HP | | placenta | | | pT7T3D |
| | | | | | | (Pharmacia) |
| | | | | | | with a |
| | | | | | | modified |
| | | | | | | polylinker |
| L0755 | Soares_placenta_{—} | | placenta | | | pT7T3D |
| | 8to9weeks_2NbHP8to9W | | | | | (Pharmacia) |
| | | | | | | with a |
| | | | | | | modified |
| | | | | | | polylinker |
| L0756 | Soares_multiple_{—} | multiple sclerosis | | | | pT7T3D |
| | sclerosis_2NbHMSP | lesions | | | | (Pharmacia) |
| | | | | | | with a |
| | | | | | | modified |
| | | | | | | polylinker |
| | | | | | | V_TYPE |
| L0757 | Soares_senescent_fibro- | senescent fibroblast | | | | pT7T3D |
| | blasts_NbHSF | | | | | (Pharmacia) |
| | | | | | | with a |
| | | | | | | modified |
| | | | | | | polylinker |
| | | | | | | V_TYPE |
| L0758 | Soares_testis_NHT | | | | | pT13D-Pac |
| | | | | | | (Pharmacia) |
| | | | | | | with a |
| | | | | | | modified |
| | | | | | | polylinker |
| L0759 | Soares_total_fetus_Nb2 | | | | | pT7T3D-Pac |
| | HF8_9w | | | | | (Pharmacia) |
| | | | | | | with a |
| | | | | | | modified |
| | | | | | | polylinker |
| L0760 | Barstead aorta HPLRB3 | aorta | | | | pT7T3D-Pac |
| | | | | | | (Pharmacia) |
| | | | | | | with a |
| | | | | | | modified |
| | | | | | | polylinker |
| L0761 | NCI_CGAP_CLL1 | B-cell, chronic | | | | pT7T3D-Pac |
| | | lymphotic leukemia | | | | (Pharmacia) |
| | | | | | | with a |
| | | | | | | modified |
| | | | | | | polylinker |
| L0763 | NCI_CGAP_Br2 | breast | | | | pT7T3D-Pac |
| | | | | | | (Pharmacia) |
| | | | | | | with a |
| | | | | | | modified |
| | | | | | | polylinker |
| L0764 | NCI_CGAP_Co3 | colon | | | | pT7T3D-Pac |
| | | | | | | (Pharmacia) |
| | | | | | | with a |
| | | | | | | modified |
| | | | | | | polylinker |
| L0766 | NCI_CGAP_GCB1 | germinal center B | | | | pT7T3D-Pac |
| | | cell | | | | (Pharmacia) |
| | | | | | | with a |
| | | | | | | modified |
| | | | | | | polylinker |
| L0768 | NCI_CGAP_GC4 | pooled germ cell | | | | pT7T3D-Pac |
| | | tumors | | | | (Pharmacia) |
| | | | | | | with a |
| | | | | | | modified |
| | | | | | | polylinker |
| L0769 | NCI_CGAP_Brn25 | anaplastic | brain | | | pT7T3D-Pac |
| | | oligodendroglioma | | | | (Pharmacia) |
| | | | | | | with a |
| | | | | | | modified |
| | | | | | | polylinker |
| L0770 | NCI_CGAP_Brn23 | glioblastoma | brain | | | pT7T3D-Pac |
| | | (pooled) | | | | (Pharmacia) |
| | | | | | | with a |
| | | | | | | modified |
| | | | | | | polylinker |
| L0774 | NCI_CGAP_Kid3 | | kidney | | | pT7T3D-Pac |
| | | | | | | (Pharmacia) |
| | | | | | | with a |
| | | | | | | modified |
| | | | | | | polylinker |
| L0775 | NCI_CGAP_Kid5 | 2 pooled tumors | kidney | | | pT7T3D-Pac |
| | | (clear cell type) | | | | (Pharmacia) |
| | | | | | | with a |
| | | | | | | modified |
| | | | | | | polylinker |
| L0776 | NCI_CGAP_Lu5 | carcinoid | lung | | | pT7T3D-Pac |
| | | | | | | (Pharmacia) |
| | | | | | | with a |
| | | | | | | modified |
| | | | | | | polylinker |
| L0777 | Soares_NhHMPu_S1 | Pooled human | mixed (sec | | | pT7T3D-Pac |
| | | melanocyte, fetal | below) | | | (Pharmacia) |
| | | heart, and pregnant | | | | with a |
| | | | | | | modified |
| | | | | | | polylinker |
| L0779 | Soares_NFL_T_GBC_S1 | | pooled | | | pT7T3D-Pac |
| | | | | | | (Pharmacia) |
| | | | | | | with a |
| | | | | | | modified |
| | | | | | | polylinker |
| L0780 | Soares_NSF_F8_9W_{—} | | pooled | | | pT7T3D-Pac |
| | OT_PA_S1 | | | | | (Pharmacia) |
| | | | | | | with a |
| | | | | | | modified |
| | | | | | | polylinker |
| L0783 | NCI_CGAP_Pr22 | normal prostate | prostate | | | pT7T3D-Pac |
| | | | | | | (Pharmacia) |
| | | | | | | with a |
| | | | | | | modified |
| | | | | | | polylinker |
| L0787 | NCI_CGAP_Sub1 | | | | | pT7T3D-Pac |
| | | | | | | (Pharmacia) |
| | | | | | | with a |
| | | | | | | modified |
| | | | | | | polylinker |
| L0788 | NCI_CGAP_Sub2 | | | | | pT7T3D-Pac |
| | | | | | | (Pharmacia) |
| | | | | | | with a |
| | | | | | | modified |
| | | | | | | polylinker |
| L0789 | NCI_CGAP_Sub3 | | | | | pT7T3D-Pac |
| | | | | | | (Pharmacia) |
| | | | | | | with a |
| | | | | | | modified |
| | | | | | | polylinker |
| L0790 | NCI_CGAP_Sub4 | | | | | pT7T3D-Pac |
| | | | | | | (Pharmacia) |
| | | | | | | with a |
| | | | | | | modified |
| | | | | | | polylinker |
| L0792 | NCI_CGAP_Sub6 | | | | | pT7T3D-Pac |
| | | | | | | (Pharmacia) |
| | | | | | | with a |
| | | | | | | modified |
| | | | | | | polylinker |
| L0794 | NCI_CGAP_GC6 | pooled germ cell | | | | pT7T3D-Pac |
| | | tumors | | | | (Pharmacia) |
| | | | | | | with a |
| | | | | | | modified |
| | | | | | | polylinker |
| L0796 | NCI_CGAP_Brn50 | medulloblastoma | brain | | | pT7T3D-Pac |
| | | | | | | (Pharmacia) |
| | | | | | | with a |
| | | | | | | modified |
| | | | | | | polylinker |
| L0800 | NCI_CGAP_Co16 | colon tumor, RER+ | colon | | | pT7T3D-Pac |
| | | | | | | (Pharmacia) |
| | | | | | | with a |
| | | | | | | modified |
| | | | | | | polylinker |
| L0803 | NCI_CGAP_Kid11 | | kidney | | | pT7T3D-Pac |
| | | | | | | (Pharmacia) |
| | | | | | | with a |
| | | | | | | modified |
| | | | | | | polylinker |
| L0804 | NCI_CGAP_Kid12 | 2 pooled tumors | kidney | | | pT7T3D-Pac |
| | | (clear cell type) | | | | (Pharmacia) |
| | | | | | | with a |
| | | | | | | modified |
| | | | | | | polylinker |
| L0805 | NCI_CGAP_Lu24 | carcinoid | lung | | | pT7T3D-Pac |
| | | | | | | (Pharmacia) |
| | | | | | | with a |
| | | | | | | modified |
| | | | | | | polylinker |
| L0806 | NCI_CGAP_Lu19 | squamous cell | lung | | | pT7T3D-Pac |
| | | carcinoma, poorly | | | | (Pharmacia) |
| | | differentiated (4 | | | | with a |
| | | | | | | modified |
| | | | | | | polylinker |
| L0807 | NCI_CGAP_Ov18 | fibrotheoma | ovary | | | pT7T3D-Pac |
| | | | | | | (Pharmacia) |
| | | | | | | with a |
| | | | | | | modified |
| | | | | | | polylinker |
| L0809 | NCI_CGAP_Pr28 | | prostate | | | pT7T3D-Pac |
| | | | | | | (Pharmacia) |
| | | | | | | with a |
| | | | | | | modified |
| | | | | | | polylinker |
| L2245 | NEM subtracted human | | | | | pUEX1 |
| | fetal kidney cDNA | | | | | |
| L2251 | Human fetal lung | Fetal lung | | | | |

[0115] TABLE 5

| OMIM | |
|---|---|
| Reference | Description |
| 104770 | Amyloidosis, secondary, susceptibility to |
| 107670 | Apolipoprotein A-II deficiency |
| 109270 | Renal tubular acidosis, distal, 179800 |
| 109270 | Spherocytosis, hereditary |
| 109270 | [Acanthocytosis, one form] |
| 109270 | [Elliptocytosis, Malaysian-Melanesian type] |
| 109270 | Hemolytic anemia due to band 3 defect |
| 110700 | Vivax malaria, susceptibility to |
| 114208 | Malignant hyperthermia susceptibility 5, 601887 |
| 114208 | Hypokalemic periodic paralysis, 170400 |
| 114290 | Campomelic dysplasia with autosomal sex reversal |
| 118210 | Charcot-Marie-Tooth neuropathy-2A |
| 119300 | van der Woude syndrome |
| 120110 | Metaphyseal chondrodysplasia, Schmid type |
| 120150 | Osteogenesis imperfecta, 4 clinical forms, 166200, 166210, |
| | 259420, 166220 |
| 120150 | Osteoporosis, idiopathic, 166710 |
| 120150 | Ehlers-Danlos syndrome, type VIIA1, 130060 |
| 120160 | Osteogenesis imperfecta, 4 clinical forms, 166200, 166210, |
| | 259420, 166220 |
| 120160 | Osteoporosis, idiopathic, 166710 |
| 120160 | Ehlers-Danlos syndrome, type VIIA2, 130060 |
| 120160 | Marfan syndrome, atypical |
| 120550 | Clq deficiency, type A |
| 120570 | Clq deficiency, type B |
| 120575 | Clq deficiency, type C |
| 120620 | SLE susceptibility |
| 120620 | CR1 deficiency |
| 120920 | Measles, susceptibility to |
| 121014 | Heterotaxia, visceroatrial, autosomal recessive |
| 121800 | Corneal dystrophy, crystalline, Schnyder |
| 123829 | Melanoma |
| 126650 | Chloride diarrhea, congenital, Finnish type, 214700 |
| 126650 | Colon cancer |
| 130500 | Elliptocytosis-1 |
| 133200 | Erythrokeratodermia variabilis |
| 133701 | Exostoses, multiple, type 2 |
| 134370 | Factor H deficiency |
| 134370 | Hemolytic-uremic syndrome, 235400 |
| 134370 | Membroproliferative glomerulonephritis |
| 134580 | Factor XIIIB deficiency |
| 136550 | Macular dystrophy, North Carolina type |
| 138033 | Diabetes mellitus, type II |
| 138140 | Glucose transport defect, blood-brain barrier |
| 138971 | Kostmann neutropenia, 202700 |
| 139250 | Isolated growth hormone deficiency, Illig type with absent GH |
| | and Kowarski type with bioinactive GH |
| 144200 | Epidermolytic palmoplantar keratoderma |
| 145001 | Hyperparathyroidism-jaw tumor syndrome |
| 145260 | Pseudohypoaldosteronism, type II |
| 146760 | [IgG receptor I, phagocytic, familial deficiency of] |
| 146790 | Lupus nephritis, susceptibility to |
| 147570 | Interferon, immune, deficiency |
| 148065 | Whites sponge nevus, 193900 |
| 148066 | Epidermolysis bullosa simplex, Koebner, Dowling-Meara, and |
| | Weber-Cockayne types, 131900, 131760, 131800 |
| 148066 | Epidermolysis bullosa simplex, recessive, 601001 |
| 148067 | Nonepidermolytic palmoplantar keratoderma, 600962 |
| 148067 | Pachyonychia congenita, Jadassohn-Lewandowsky type, |
| | 167200 |
| 148069 | Pachyonychia congenita, Jackson-Lawler type, 167210 |
| 148080 | Epidermolytic hyperkeratosis, 113800 |
| 150200 | [Placental lactogen deficiency] |
| 150240 | Cutis laxa, marfanoid neonatal type |
| 150292 | Epidermolysis bullosa, Herlitz junctional type, 226700 |
| 150310 | Epidermolysis bullosa, Herlitz junctional type, 226700 |
| 150310 | Epidermolysis bullosa, generalized atrophic benign, 226650 |
| 152760 | Hypogonadotropic hypogonadism due to GNRH deficiency, |
| | 227200 |
| 153454 | Ehlers-Danlos syndrome, type VI, 225400 |
| 154275 | Malignant hyperthermia susceptibility 2 |
| 154276 | Malignant hyperthermia susceptibility 3 |
| 156490 | Neuroblastoma |
| 159001 | Muscular dystrophy, limb-girdle, type 1B |
| 162100 | Neuralgic amyotrophy with predilection for brachial plexus |
| 164731 | Ovarian carcinoma, 167000 |
| 168500 | Parietal foramina |
| 170500 | Myotonia congenita, atypical acetazolamide-responsive |
| 170500 | Paramyotonia congenita, 168300 |
| 170500 | Hyperkalemic periodic paralysis |
| 170995 | Zellweger syndrome-2 |
| 171190 | Hypertension, essential, 145500 |
| 171650 | Lysosomal acid phosphatase deficiency |
| 171760 | Hypophosphatasia, adult, 146300 |
| 171760 | Hypophosphatasia, infantile, 241500 |
| 172400 | Hemolytic anemia due to glucosephosphate isomerase |
| | deficiency |
| 172400 | Hydrops fetalis, one form |
| 172411 | Colorectal cancer, resistance to |
| 173360 | Thrombophilia due to excessive plasminogen activator |
| | inhibitor |
| 173360 | Hemorrhagic diathesis due to PAI1 deficiency |
| 173370 | Plasminogen activator deficiency |
| 175100 | Turcot syndrome, 276300 |
| 175100 | Adenomatous polyposis coli |
| 175100 | Adenomatous polyposis coli, attenuated |
| 175100 | Colorectal cancer |
| 175100 | Desmoid disease, hereditary, 135290 |
| 175100 | Gardner syndrome |
| 176930 | Dysprothrombinemia |
| 176930 | Hypoprothrombinemia |
| 176960 | Pituitary tumor, invasive |
| 179820 | [Hyperproreninemia] |
| 180100 | Retinitis pigmentosa-1 |
| 180105 | Retinitis pigmentosa-10 |
| 180240 | Leukemia, acute promyelocytic |
| 180860 | Russell-Silver syndrome |
| 180901 | Malignant hyperthermia susceptibility 1, 145600 |
| 180901 | Central core disease, 117000 |
| 181430 | Scapuloperoneal syndrome, myopathic type |
| 182138 | Anxiety-related personality traits |
| 185430 | Atherosclerosis, susceptibility to |
| 185470 | Myopathy due to succinate dehydrogenase deficiency |
| 185800 | Symphalangism, proximal |
| 190900 | Colorblindness, tritan |
| 191045 | Cardiomyopathy, familial hypertrophic, 2, 115195 |
| 191315 | Insensitivity to pain, congenital, with anhidrosis, 256800 |
| 191540 | [Urate oxidase deficiency] |
| 203310 | Ocular albinism, autosomal recessive |
| 208250 | Jacobs syndrome |
| 217300 | Cornea plana congenita, recessive |
| 221770 | Polycystic lipomembranous osteodysplasia with sclerosing |
| | leukencephalopathy |
| 221820 | Gliosis, familial progressive subcortical |
| 222800 | Hemolytic anemia due to bisphosphoglycerate mutase |
| | deficiency |
| 226450 | Epidermolysis bullosa inversa, junctional |
| 230350 | Galactose epimerase deficiency |
| 236250 | Homocystinuria due to MTHFR deficiency |
| 246900 | Lipoamide dehydrogenase deficiency |
| 248600 | Maple syrup urine disease, type Ia |
| 249000 | Meckel syndrome |
| 252940 | Sanfilippo syndrome, type D |
| 253200 | Maroteaux-Lamy syndrome, several forms |
| 253250 | Mulibrey nanism |
| 255800 | Schwartz-Jampel syndrome |
| 256700 | Neuroblastoma |
| 264470 | Adrenoleukodystrophy, pseudoneonatal |
| 264700 | Pseudo-vitamin D dependency rickets 1 |
| 270800 | Spastic paraplegia-5A |
| 274270 | Thymine-uraciluria |
| 274270 | Fluorouracil toxicity, sensitivity to |
| 277700 | Werner syndrome |
| 300031 | Mental retardation, X-linked, FRAXF type |
| 300044 | Wernicke-Korsakoff syndrome, susceptibility to |
| 300048 | Intestinal pseudoobstruction, neuronal, X-linked |
| 300049 | Nodular heterotopia, bilateral periventricular |
| 300049 | BPNH/MR syndrome |
| 300055 | Mental retardation with psychosis, pyramidal signs, and |
| | macroorchidism |
| 300100 | Adrenoleukodystrophy |
| 300100 | Adrenomyeloneuropathy |
| 300104 | Mental retardation, X-linked nonspecific, 309541 |
| 300126 | Dyskeratosis congenita-1, 305000 |
| 301201 | Amelogenesis imperfecta-3, hypoplastic type |
| 301590 | Anophthalmos-1 |
| 302060 | Noncompaction of left ventricular myocardium, isolated |
| 302060 | Barth syndrome |
| 302060 | Cardiomyopathy, X-linked dilated, 300069 |
| 302060 | Endocardial fibroelastosis-2 |
| 302960 | Chondrodysplasia punctata, X-linked dominant |
| 303700 | Colorblindness, blue monochromatic |
| 303800 | Colorblindness, deutan |
| 303900 | Colorblindness, protan |
| 304800 | Diabetes insipidus, nephrogenic |
| 305900 | Favism |
| 305900 | G6PD deficiency |
| 305900 | Hemolytic anemia due to G6PD deficiency |
| 306700 | Hemophilia A |
| 306995 | [Homosexuality, male] |
| 308310 | Incontinentia pigmenti, familial |
| 308840 | Spastic paraplegia, 312900 |
| 308840 | Hydrocephalus due to aqueductal stenosis, 307000 |
| 308840 | MASA syndrome, 303350 |
| 309200 | Manic-depressive illness, X-linked |
| 309548 | Mental retardation, X-linked, FRAXE type |
| 309620 | Mental retardation-skeletal dysplasia |
| 309900 | Mucopolysaccharidosis II |
| 310300 | Emery-Dreifuss muscular dystrophy |
| 310400 | Myotubular myopathy, X-linked |
| 310460 | Myopia-1 |
| 310460 | Bornholm eye disease |
| 311300 | Otopalatodigital syndrome, type I |
| 311510 | Waisman parkinsonism-mental retardation syndrome |
| 314300 | Goeminne TKCR syndrome |
| 314400 | Cardiac valvular dysplasia-1 |
| 600105 | Retinitis pigmentosa-12, autosomal recessive |
| 600119 | Muscular dystrophy, Duchenne-like, type 2 |
| 600119 | Adhalinopathy, primary |
| 600309 | Atrioventricular canal defect-1 |
| 600525 | Trichodontoosseous syndrome, 190320 |
| 600623 | Prostate cancer, 176807 |
| 600759 | Alzheimer disease-4 |
| 600808 | Enuresis, nocturnal, 2 |
| 600811 | Xeroderma pigmentosum, group E, DDB-negative subtype, |
| | 278740 |
| 600852 | Retinitis pigmentosa-17 |
| 600881 | Cataract, congenital, zonular, with sutural opacities |
| 600887 | Endometrial carcinoma |
| 600897 | Cataract, zonular pulverulent-1, 116200 |
| 600918 | Cystinuria, type III |
| 600958 | Cardiomyopathy, familial hypertrophic, 4, 115197 |
| 600995 | Nephrotic syndrome, idiopathic, steroid-resistant |
| 601284 | Hereditary hemorrhagic telangiectasia-2, 600376 |
| 601363 | Wilms tumor, type 4 |
| 601412 | Deafness, autosomal dominant 7 |
| 601414 | Retinitis pigmentosa-18 |
| 601494 | Cardiomyopathy, familial, dilated-2 |
| 601652 | Glaucoma 1A, primary open angle, juvenile-onset, 137750 |
| 601666 | Insulin-dependent diabetes mellitus-15 |
| 601687 | Meesmann corneal dystrophy, 122100 |
| 601769 | Osteoporosis, involutional |
| 601769 | Rickets, vitamin D-resistant, 277440 |
| 601844 | Pseudohypoaldosteronism type II |
| 601863 | Bare lymphocyte syndrome, complementation group C |
| 601954 | Muscular dystrophy, limb-girdle, type 2G |
| 601975 | Ectodermal dysplasia/skin fragility syndrome |
| 602094 | Lipodystrophy, familial partial |
| 602116 | Glioma |
| 602136 | Refsum disease, infantile, 266510 |
| 602136 | Zellweger syndrome-1, 214100 |
| 602136 | Adrenoleukodystrophy, neonatal, 202370 |
| 602447 | Coronary artery disease, susceptibility to |
| 602491 | Hyperlipidemia, familial combined, 1 |
| 602629 | Dystonia-6, torsion |
| 602716 | Nephrosis-1, congenital, Finnish type, 256300 |
| 602771 | Muscular dystrophy, congenital, with early spine rigidity |
| 602772 | Retinitis pitmentosa-24 |

[0116] Polynucleotide and Polypeptide Variants

[0117] The present invention is also directed to variants of the musculoskeletal system associated polynucleotide sequence disclosed in SEQ ID NO:X or the complementary strand thereto, nucleotide sequences encoding the polypeptide of SEQ ID NO:Y, the nucleotide sequence of SEQ ID NO:X encoding the polypeptide sequence as defined in column 6 of Table 1A, nucleotide sequences encoding the polypeptide as defined in column 6 of Table 1 A, the nucleotide sequence as defined in columns 8 and 9 of Table 2, nucleotide sequences encoding the polypeptide encoded by the nucleotide sequence as defined in columns 8 and 9 of Table 2, the nucleotide sequence as defined in column 6 of Table 1B, nucleotide sequences encoding the polypeptide encoded by the nucleotide sequence as defined in column 6 of Table 1B, the cDNA sequence contained in Clone ID NO:Z, and/or nucleotide sequences encoding a polypeptide encoded by the cDNA sequence contained in Clone ID NO:Z.

[0118] The present invention also encompasses variants of the polypeptide sequence disclosed in SEQ ID NO:Y, a polypeptide sequence as defined in column 6 Table 1A, a polypeptide sequence encoded by the polynucleotide sequence in SEQ ID NO:X, a polypeptide sequence encoded by the nucleotide sequence as defined in columns 8 and 9 of Table 2, a polypeptide sequence encoded by the nucleotide sequence as defined in column 6 of Table 1B, a polypeptide sequence encoded by the complement of the polynucleotide sequence in SEQ ID NO:X, and/or a polypeptide sequence encoded by the cDNA sequence contained in Clone ID NO:Z.

[0119] “Variant” refers to a polynucleotide or polypeptide differing from the polynucleotide or polypeptide of the present invention, but retaining essential properties thereof. Generally, variants are overall closely similar, and, in many regions, identical to the polynucleotide or polypeptide of the present invention.

[0120] Thus, one aspect of the invention provides an isolated nucleic acid molecule comprising, or alternatively consisting of, a polynucleotide having a nucleotide sequence selected from the group consisting of: (a) a nucleotide sequence described in SEQ ID NO:X or contained in the cDNA sequence of Clone ID NO:Z; (b) a nucleotide sequence in SEQ ID NO:X or the cDNA in Clone ID NO:Z which encodes a mature musculoskeletal system associated polypeptide; (c) a nucleotide sequence in SEQ ID NO:X or the cDNA sequence of Clone ID NO:Z, which encodes a biologically active fragment of a musculoskeletal system associated polypeptide; (d) a nucleotide sequence in SEQ ID NO:X or the cDNA sequence of Clone ID NO:Z, which encodes an antigenic fragment of a musculoskeletal system associated polypeptide; (e) a nucleotide sequence encoding a musculoskeletal system associated polypeptide having the complete amino acid sequence of SEQ ID NO:Y or the complete amino acid sequence encoded by the cDNA in Clone ID NO:Z; (f) a nucleotide sequence encoding a mature musculoskeletal system associated polypeptide of the amino acid sequence of SEQ ID NO:Y or the amino acid sequence encoded by the cDNA in Clone ID NO:Z; (g) a nucleotide sequence encoding a biologically active fragment of a musculoskeletal system associated polypeptide having the complete amino acid sequence of SEQ ID NO:Y or the complete amino acid sequence encoded by the cDNA in Clone ID NO:Z; (h) a nucleotide sequence encoding an antigenic fragment of a musculoskeletal system associated polypeptide having the complete amino acid sequence of SEQ ID NO:Y or the complete amino acid sequence encoded by the cDNA in Clone ID NO:Z; and (i) a nucleotide sequence complementary to any of the nucleotide sequences in (a), (b), (c), (d), (e), (f), (g), or (h), above.

[0121] The present invention is also directed to nucleic acid molecules which comprise, or alternatively consist of, a nucleotide sequence which is at least 80%, 85%, 90%, 95%, 96%, 97%, 98%, 99% or 100%, identical to, for example, any of the nucleotide sequences in (a), (b), (c), (d), (e), (f), (g), (h), or (i) above, the nucleotide coding sequence in SEQ ID NO:X or the complementary strand thereto, the nucleotide coding sequence of the cDNA contained in Clone ID NO:Z or the complementary strand thereto, a nucleotide sequence encoding the polypeptide of SEQ ID NO:Y, a nucleotide sequence encoding a polypeptide sequence encoded by the nucleotide sequence in SEQ ID NO:X, a polypeptide sequence encoded by the complement of the polynucleotide sequence in SEQ ID NO:X, a nucleotide sequence encoding the polypeptide encoded by the cDNA contained in Clone ID NO:Z, the nucleotide coding sequence in SEQ ID NO:X as defined in columns 8 and 9 of Table 2 or the complementary strand thereto, a nucleotide sequence encoding the polypeptide encoded by the nucleotide sequence in SEQ ID NO:X as defined in columns 8 and 9 of Table 2 or the complementary strand thereto, the nucleotide coding sequence in SEQ ID NO:B as defined in column 6 of Table 1B or the complementary strand thereto, a nucleotide sequence encoding the polypeptide encoded by the nucleotide sequence in SEQ ID NO:B as defined in column 6 of Table 1B or the complementary strand thereto, the nucleotide sequence in SEQ ID NO:X encoding the polypeptide sequence as defined in column 6 of Table 1A or the complementary strand thereto, nucleotide sequences encoding a polypeptide as defined in column 6 of Table 1A or the complementary strand thereto, and/or polynucleotide fragments of any of these nucleic acid molecules (e.g., those fragments described herein). Polynucleotides which hybridize to the complement of these nucleic acid molecules under stringent hybridization conditions or alternatively, under lower stringency conditions, are also encompassed by the invention, as are polypeptides encoded by these polynucleotides and nucleic acids.

[0122] In a preferred embodiment, the invention encompasses nucleic acid molecules which comprise, or alternatively, consist of a polynucleotide which hybridizes under stringent hybridization conditions, or alternatively, under lower stringency conditions, to a polynucleotide in (a), (b), (c), (d), (e), (f), (g), (h), or (i) above, as are polypeptides encoded by these polynucleotides. In another preferred embodiment, polynucleotides which hybridize to the complement of these nucleic acid molecules under stringent hybridization conditions or alternatively, under lower stringency conditions, are also encompassed by the invention, as are polypeptides encoded by these polynucleotides.

[0123] In another embodiment, the invention provides a purified protein comprising, or alternatively consisting of, a polypeptide having an amino acid sequence selected from the group consisting of: (a) the complete amino acid sequence of SEQ ID NO:Y or the complete amino acid sequence encoded by the cDNA in Clone ID NO:Z; (b) the amino acid sequence of a mature musculoskeletal system associated polypeptide having the amino acid sequence of SEQ ID NO:Y or the amino acid sequence encoded by the cDNA in Clone ID NO:Z; (c) the amino acid sequence of a biologically active fragment of a musculoskeletal system associated polypeptide having the complete amino acid sequence of SEQ ID NO:Y or the complete amino acid sequence encoded by the cDNA in Clone ID NO:Z; and (d) the amino acid sequence of an antigenic fragment of a musculoskeletal system associated polypeptide having the complete amino acid sequence of SEQ ID NO:Y or the complete amino acid sequence encoded by the cDNA in Clone ID NO:Z.

[0124] The present invention is also directed to proteins which comprise, or alternatively consist of, an amino acid sequence which is at least 80%, 85%, 90%, 95%, 96%, 97%, 98%, 99% or 100%, identical to, for example, any of the amino acid sequences in (a), (b), (c), or (d), above, the amino acid sequence shown in SEQ ID NO:Y, the amino acid sequence encoded by the cDNA contained in Clone ID NO:Z, the amino acid sequence of the polypeptide encoded by the nucleotide sequence in SEQ ID NO:X as defined in columns 8 and 9 of Table 2, the amino acid sequence of the polypeptide encoded by the nucleotide sequence in SEQ ID NO:B as defined in column 6 of Table 1B, the amino acid sequence as defined in column 6 of Table 1A, an amino acid sequence encoded by the nucleotide sequence in SEQ ID NO:X, and an amino acid sequence encoded by the complement of the polynucleotide sequence in SEQ ID NO:X. Fragments of these polypeptides are also provided (e.g., those fragments described herein). Further proteins encoded by polynucleotides which hybridize to the complement of the nucleic acid molecules encoding these amino acid sequences under stringent hybridization conditions or alternatively, under lower stringency conditions, are also encompassed by the invention, as are the polynucleotides encoding these proteins.

[0125] By a nucleic acid having a nucleotide sequence at least, for example, 95% “identical” to a reference nucleotide sequence of the present invention, it is intended that the nucleotide sequence of the nucleic acid is identical to the reference sequence except that the nucleotide sequence may include up to five point mutations per each 100 nucleotides of the reference nucleotide sequence encoding the polypeptide. In other words, to obtain a nucleic acid having a nucleotide sequence at least 95% identical to a reference nucleotide sequence, up to 5% of the nucleotides in the reference sequence may be deleted or substituted with another nucleotide, or a number of nucleotides up to 5% of the total nucleotides in the reference sequence may be inserted into the reference sequence. The query sequence may be an entire sequence referred to in Table 1A or 2 as the ORF (open reading frame), or any fragment specified, as described herein.

[0126] As a practical matter, whether any particular nucleic acid molecule or polypeptide is at least 80%, 85%, 90%, 95%, 96%, 97%, 98% or 99% identical to a nucleotide sequence of the present invention can be determined conventionally using known computer programs. A preferred method for determining the best overall match between a query sequence (a sequence of the present invention) and a subject sequence, also referred to as a global sequence alignment, can be determined using the FASTDB computer program based on the algorithm of Brutlag et al. (Comp. App. Biosci. 6:237-245 (1990)). In a sequence alignment the query and subject sequences are both DNA sequences. An RNA sequence can be compared by converting U's to T's. The result of said global sequence alignment is expressed as percent identity. Preferred parameters used in a FASTDB alignment of DNA sequences to calculate percent identity are: Matrix=Unitary, k-tuple=4, Mismatch Penalty=1, Joining Penalty=30, Randomization Group Length=0, Cutoff Score=1, Gap Penalty=5, Gap Size Penalty 0.05, Window Size=500 or the length of the subject nucleotide sequence, whichever is shorter.

[0127] If the subject sequence is shorter than the query sequence because of 5′ or 3′ deletions, not because of internal deletions, a manual correction must be made to the results. This is because the FASTDB program does not account for 5′ and 3′ truncations of the subject sequence when calculating percent identity. For subject sequences truncated at the 5′ or 3′ ends, relative to the query sequence, the percent identity is corrected by calculating the number of bases of the query sequence that are 5′ and 3′ of the subject sequence, which are not matched/aligned, as a percent of the total bases of the query sequence. Whether a nucleotide is matched/aligned is determined by results of the FASTDB sequence alignment. This percentage is then subtracted from the percent identity, calculated by the above FASTDB program using the specified parameters, to arrive at a final percent identity score. This corrected score is what is used for the purposes of the present invention. Only bases outside the 5′ and 3′ bases of the subject sequence, as displayed by the FASTDB alignment, which are not matched/aligned with the query sequence, are calculated for the purposes of manually adjusting the percent identity score.

[0128] For example, a 90 base subject sequence is aligned to a 100 base query sequence to determine percent identity. The deletions occur at the 5′ end of the subject sequence and therefore, the FASTDB alignment does not show a matched/alignment of the first 10 bases at 5′ end. The 10 unpaired bases represent 10% of the sequence (number of bases at the 5′ and 3′ ends not matched/total number of bases in the query sequence) so 10% is subtracted from the percent identity score calculated by the FASTDB program. If the remaining 90 bases were perfectly matched the final percent identity would be 90%. In another example, a 90 base subject sequence is compared with a 100 base query sequence. This time the deletions are internal deletions so that there are no bases on the 5′ or 3′ of the subject sequence which are not matched/aligned with the query. In this case the percent identity calculated by FASTDB is not manually corrected. Once again, only bases 5′ and 3′ of the subject sequence which are not matched/aligned with the query sequence are manually corrected for. No other manual corrections are to made for the purposes of the present invention.

[0129] By a polypeptide having an amino acid sequence at least, for example, 95% “identical” to a query amino acid sequence of the present invention, it is intended that the amino acid sequence of the subject polypeptide is identical to the query sequence except that the subject polypeptide sequence may include up to five amino acid alterations per each 100 amino acids of the query amino acid sequence. In other words, to obtain a polypeptide having an amino acid sequence at least 95% identical to a query amino acid sequence, up to 5% of the amino acid residues in the subject sequence may be inserted, deleted, (indels) or substituted with another amino acid. These alterations of the reference sequence may occur at the amino or carboxy terminal positions of the reference amino acid sequence or anywhere between those terminal positions, interspersed either individually among residues in the reference sequence or in one or more contiguous groups within the reference sequence.

[0130] As a practical matter, whether any particular polypeptide is at least 80%, 85%, 90%, 95%, 96%, 97%, 98% or 99% identical to, for instance, the amino acid sequence of a polypeptide referred to in Table 1A (e.g., an amino acid sequence identified in columns 5 or 6) or Table 2 (e.g., the amino acid sequence of the polypeptide encoded by the polynucleotide sequence defined in columns 8 and 9 of Table 2) or a fragment thereof, the amino acid sequence of the polypeptide encoded by the polynucleotide sequence in SEQ ID NO:B as defined in column 6 of Table 1B or a fragment thereof, the amino acid sequence of the polypeptide encoded by the nucleotide sequence in SEQ ID NO:X or a fragment thereof, or an amino acid sequence of the polypeptide encoded by cDNA contained in Clone ID NO:Z, or a fragment thereof, can be determined conventionally using known computer programs. A preferred method for determining the best overall match between a query sequence (a sequence of the present invention) and a subject sequence, also referred to as a global sequence alignment, can be determined using the FASTDB computer program based on the algorithm of Brutlag et al. (Comp. App. Biosci.6:237-245 (1990)). In a sequence alignment the query and subject sequences are either both nucleotide sequences or both amino acid sequences. The result of said global sequence alignment is expressed as percent identity. Preferred parameters used in a FASTDB amino acid alignment are: Matrix=PAM 0, k-tuple=2, Mismatch Penalty=1, Joining Penalty=20, Randomization Group Length=0, Cutoff Score=1, Window Size=sequence length, Gap Penalty=5, Gap Size Penalty=0.05, Window Size=500 or the length of the subject amino acid sequence, whichever is shorter.

[0131] If the subject sequence is shorter than the query sequence due to N- or C-terminal deletions, not because of internal deletions, a manual correction must be made to the results. This is because the FASTDB program does not account for N- and C-terminal truncations of the subject sequence when calculating global percent identity. For subject sequences truncated at the N- and C-termini, relative to the query sequence, the percent identity is corrected by calculating the number of residues of the query sequence that are N- and C-terminal of the subject sequence, which are not matched/aligned with a corresponding subject residue, as a percent of the total bases of the query sequence. Whether a residue is matched/aligned is determined by results of the FASTDB sequence alignment. This percentage is then subtracted from the percent identity, calculated by the above FASTDB program using the specified parameters, to arrive at a final percent identity score. This final percent identity score is what is used for the purposes of the present invention. Only residues to the N- and C-termini of the subject sequence, which are not matched/aligned with the query sequence, are considered for the purposes of manually adjusting the percent identity score. That is, only query residue positions outside the farthest N- and C-terminal residues of the subject sequence.

[0132] For example, a 90 amino acid residue subject sequence is aligned with a 100 residue query sequence to determine percent identity. The deletion occurs at the N-terminus of the subject sequence and therefore, the FASTDB alignment does not show a matching/alignment of the first 10 residues at the N-terminus. The 10 unpaired residues represent 10% of the sequence (number of residues at the N- and C-termini not matched/total number of residues in the query sequence) so 10% is subtracted from the percent identity score calculated by the FASTDB program. If the remaining 90 residues were perfectly matched the final percent identity would be 90%. In another example, a 90 residue subject sequence is compared with a 100 residue query sequence. This time the deletions are internal deletions so there are no residues at the N- or C-termini of the subject sequence which are not matched/aligned with the query. In this case the percent identity calculated by FASTDB is not manually corrected. Once again, only residue positions outside the N- and C-terminal ends of the subject sequence, as displayed in the FASTDB alignment, which are not matched/aligned with the query sequence are manually corrected for. No other manual corrections are to made for the purposes of the present invention.

[0133] The polynucleotide variants of the invention may contain alterations in the coding regions, non-coding regions, or both. Especially preferred are polynucleotide variants containing alterations, which produce silent substitutions, additions, or deletions, but do not alter the properties or activities of the encoded polypeptide. Nucleotide variants produced by silent substitutions due to the degeneracy of the genetic code are preferred. Moreover, polypeptide variants in which less than 50, less than 40, less than 30, less than 20, less than 10, or 5-50, 5-25, 5-10, 1-5, or 1-2 amino acids are substituted, deleted, or added in any combination are also preferred. Polynucleotide variants can be produced for a variety of reasons, e.g., to optimize codon expression for a particular host (change codons in the human mRNA to those preferred by a bacterial host such as E. coli).

[0134] Naturally occurring variants are called “allelic variants,” and refer to one of several alternate forms of a gene occupying a given locus on a chromosome of an organism. (Genes II, Lewin, B., ed., John Wiley & Sons, New York (1985).) These allelic variants can vary at either the polynucleotide and/or polypeptide level and are included in the present invention. Alternatively, non-naturally occurring variants may be produced by mutagenesis techniques or by direct synthesis.

[0135] Using known methods of protein engineering and recombinant DNA technology, variants may be generated to improve or alter the characteristics of the polypeptides of the present invention. For instance, one or more amino acids can be deleted from the N-terminus or C-terminus of the polypeptides of the present invention without substantial loss of biological function. As an example, the authors of Ron et al., J. Biol. Chem. 268: 2984-2988 (1993), reported variant KGF proteins having heparin binding activity even after deleting 3, 8, or 27 amino-terminal amino acid residues. Similarly, Interferon gamma exhibited up to ten times higher activity after deleting 8-10 amino acid residues from the carboxy terminus of this protein. (Dobeli et al., J. Biotechnology 7:199-216 (1988).)

[0136] Moreover, ample evidence demonstrates that variants often retain a biological activity similar to that of the naturally occurring protein. For example, Gayle and coworkers (J. Biol. Chem. 268:22105-22111 (1993)) conducted extensive mutational analysis of human cytokine IL-1a. They used random mutagenesis to generate over 3,500 individual IL-1a mutants that averaged 2.5 amino acid changes per variant over the entire length of the molecule. Multiple mutations were examined at every possible amino acid position. The investigators found that “[m]ost of the molecule could be altered with little effect on either [binding or biological activity].” In fact, only 23 unique amino acid sequences, out of more than 3,500 nucleotide sequences examined, produced a protein that significantly differed in activity from wild-type.

[0137] Furthermore, even if deleting one or more amino acids from the N-terminus or C-terminus of a polypeptide results in modification or loss of one or more biological functions, other biological activities may still be retained. For example, the ability of a deletion variant to induce and/or to bind antibodies which recognize the secreted form will likely be retained when less than the majority of the residues of the secreted form are removed from the N-terminus or C-terminus. Whether a particular polypeptide lacking N- or C-terminal residues of a protein retains such immunogenic activities can readily be determined by routine methods described herein and otherwise known in the art.

[0138] Thus, the invention further includes polypeptide variants which show a functional activity (e.g., biological activity) of the polypeptides of the invention. Such variants include deletions, insertions, inversions, repeats, and substitutions selected according to general rules known in the art so as have little effect on activity.

[0139] The present application is directed to nucleic acid molecules at least 80%, 85%, 90%, 95%, 96%, 97%, 98%, 99% or 100% identical to the nucleic acid sequences disclosed herein, (e.g., encoding a polypeptide having the amino acid sequence of an N and/or C terminal deletion), irrespective of whether they encode a polypeptide having functional activity. This is because even where a particular nucleic acid molecule does not encode a polypeptide having functional activity, one of skill in the art would still know how to use the nucleic acid molecule, for instance, as a hybridization probe or a polymerase chain reaction (PCR) primer. Uses of the nucleic acid molecules of the present invention that do not encode a polypeptide having functional activity include, inter alia, (1) isolating a gene or allelic or splice variants thereof in a cDNA library; (2) in situ hybridization (e.g., “FISH”) to metaphase chromosomal spreads to provide precise chromosomal location of the gene, as described in Verma et al., Human Chromosomes: A Manual of Basic Techniques, Pergamon Press, New York (1988); (3) Northern Blot analysis for detecting mRNA expression in specific tissues (e.g., normal musculoskeletal system tissue or diseased musculoskeletal system tissues); and (4) in situ hybridization (e.g., histochemistry) for detecting mRNA expression in specific tissues (e.g., normal musculoskeletal system tissue or diseased musculoskeletal system tissues).

[0140] Preferred, however, are nucleic acid molecules having sequences at least 80%, 85%, 90%, 95%, 96%, 97%, 98%, 99% or 100% identical to the nucleic acid sequences disclosed herein, which do, in fact, encode a polypeptide having functional activity. By a polypeptide having “functional activity” is meant, a polypeptide capable of displaying one or more known functional activities associated with a full-length (complete) protein of the invention. Such functional activities include, but are not limited to, biological activity, antigenicity [ability to bind (or compete with a polypeptide of the invention for binding) to an anti-polypeptide of the invention antibody], immunogenicity (ability to generate antibody which binds to a specific polypeptide of the invention), ability to form multimers with polypeptides of the invention, and ability to bind to a receptor or ligand for a polypeptide of the invention.

[0141] The functional activity of the polypeptides, and fragments, variants and derivatives of the invention, can be assayed by various methods.

[0142] For example, in one embodiment where one is assaying for the ability to bind or compete with full-length polypeptide of the present invention for binding to an anti-polypeptide of the invention antibody, various immunoassays known in the art can be used, including but not limited to, competitive and non-competitive assay systems using techniques such as radioimmunoassays, ELISA (enzyme linked immunosorbent assay), “sandwich” immunoassays, immunoradiometric assays, gel diffusion precipitation reactions, immunodiffusion assays, in situ immunoassays (using colloidal gold, enzyme or radioisotope labels, for example), western blots, precipitation reactions, agglutination assays (e.g., gel agglutination assays, hemagglutination assays), complement fixation assays, immunofluorescence assays, protein A assays, and immunoelectrophoresis assays, etc. In one embodiment, antibody binding is detected by detecting a label on the primary antibody. In another embodiment, the primary antibody is detected by detecting binding of a secondary antibody or reagent to the primary antibody. In a further embodiment, the secondary antibody is labeled. Many means are known in the art for detecting binding in an immunoassay and are within the scope of the present invention.

[0143] In another embodiment, where a ligand is identified, or the ability of a polypeptide fragment, variant or derivative of the invention to multimerize is being evaluated, binding can be assayed, e.g., by means well-known in the art, such as, for example, reducing and non-reducing gel chromatography, protein affinity chromatography, and affinity blotting. See generally, Phizicky et al., Microbiol. Rev. 59:94-123 (1995). In another embodiment, the ability of physiological correlates of a polypeptide of the present invention to bind to a substrate(s) of the polypeptide of the invention can be routinely assayed using techniques known in the art.

[0144] In addition, assays described herein (see Examples) and otherwise known in the art may routinely be applied to measure the ability of polypeptides of the present invention and fragments, variants and derivatives thereof to elicit polypeptide related biological activity (either in vitro or in vivo). Other methods will be known to the skilled artisan and are within the scope of the invention.

[0145] Of course, due to the degeneracy of the genetic code, one of ordinary skill in the art will immediately recognize that a large number of the nucleic acid molecules having a sequence at least 80%, 85%, 90%, 95%, 96%, 97%, 98%, 99%, or 100% identical to, for example, the nucleic acid sequence of the cDNA contained in Clone ID NO:Z, a nucleic acid sequence referred to in Table 1A (e.g., SEQ ID NO:X), a nucleic acid sequence disclosed in Table 2 (e.g., the nucleic acid sequence delineated in columns 8 and 9) or fragments thereof, will encode polypeptides “having functional activity.” In fact, since degenerate variants of any of these nucleotide sequences all encode the same polypeptide, in many instances, this will be clear to the skilled artisan even without performing the above described comparison assay. It will be further recognized in the art that, for such nucleic acid molecules that are not degenerate variants, a reasonable number will also encode a polypeptide having functional activity. This is because the skilled artisan is fully aware of amino acid substitutions that are either less likely or not likely to significantly effect protein function (e.g., replacing one aliphatic amino acid with a second aliphatic amino acid), as further described below.

[0146] For example, guidance concerning how to make phenotypically silent amino acid substitutions is provided in Bowie et al., “Deciphering the Message in Protein Sequences: Tolerance to Amino Acid Substitutions,” Science 247:1306-1310 (1990), wherein the authors indicate that there are two main strategies for studying the tolerance of an amino acid sequence to change.

[0147] The first strategy exploits the tolerance of amino acid substitutions by natural selection during the process of evolution. By comparing amino acid sequences in different species, conserved amino acids can be identified. These conserved amino acids are likely important for protein function. In contrast, the amino acid positions where substitutions have been tolerated by natural selection indicates that these positions are not critical for protein function. Thus, positions tolerating amino acid substitution could be modified while still maintaining biological activity of the protein.

[0148] The second strategy uses genetic engineering to introduce amino acid changes at specific positions of a cloned gene to identify regions critical for protein function. For example, site directed mutagenesis or alanine-scanning mutagenesis (introduction of single alanine mutations at every residue in the molecule) can be used. See Cunningham et al., Science 244:1081-1085 (1989). The resulting mutant molecules can then be tested for biological activity.

[0149] As the authors state, these two strategies have revealed that proteins are surprisingly tolerant of amino acid substitutions. The authors further indicate which amino acid changes are likely to be permissive at certain amino acid positions in the protein. For example, most buried (within the tertiary structure of the protein) amino acid residues require nonpolar side chains, whereas few features of surface side chains are generally conserved. Moreover, tolerated conservative amino acid substitutions involve replacement of the aliphatic or hydrophobic amino acids Ala, Val, Leu and Ile; replacement of the hydroxyl residues Ser and Thr; replacement of the acidic residues Asp and Glu; replacement of the amide residues Asn and Gln, replacement of the basic residues Lys, Arg, and His; replacement of the aromatic residues Phe, Tyr, and Trp, and replacement of the small-sized amino acids Ala, Ser, Thr, Met, and Gly. Besides conservative amino acid substitutions, variants of the present invention include (i) substitutions with one or more of the non-conserved amino acid residues, where the substituted amino acid residues may or may not be one encoded by the genetic code, or (ii) substitutions with one or more of the amino acid residues having a substituent group, or (iii) fusion of the mature polypeptide with another compound, such as a compound to increase the stability and/or solubility of the polypeptide (for example, polyethylene glycol), or (iv) fusion of the polypeptide with additional amino acids, such as, for example, an IgG Fc fusion region peptide, serum albumin (preferably human serum albumin) or a fragment or variant thereof, or leader or secretory sequence, or a sequence facilitating purification. Such variant polypeptides are deemed to be within the scope of those skilled in the art from the teachings herein.

[0150] For example, polypeptide variants containing amino acid substitutions of charged amino acids with other charged or neutral amino acids may produce proteins with improved characteristics, such as less aggregation. Aggregation of pharmaceutical formulations both reduces activity and increases clearance due to the aggregate's immunogenic activity. See Pinckard et al., Clin. Exp. Immunol. 2:331-340 (1967); Robbins et al., Diabetes 36: 838-845 (1987); Cleland et al., Crit. Rev. Therapeutic Drug Carrier Systems 10:307-377 (1993).

[0151] A further embodiment of the invention relates to polypeptides which comprise the amino acid sequence of a polypeptide having an amino acid sequence which contains at least one amino acid substitution, but not more than 50 amino acid substitutions, even more preferably, not more than 40 amino acid substitutions, still more preferably, not more than 30 amino acid substitutions, and still even more preferably, not more than 20 amino acid substitutions from a polypeptide sequence disclosed herein. Of course it is highly preferable for a polypeptide to have an amino acid sequence which comprises the amino acid sequence of a polypeptide of SEQ ID NO:Y, an amino acid sequence encoded by SEQ ID NO:X, an amino acid sequence encoded by the portion of SEQ ID NO:X as defined in columns 8 and 9 of Table 2, an amino acid sequence encoded by the complement of SEQ ID NO:X, and/or the amino acid sequence encoded by cDNA contained in Clone ID NO:Z which contains, in order of ever-increasing preference, at least one, but not more than 10, 9, 8, 7, 6, 5, 4, 3, 2 or 1 amino acid substitutions.

[0152] In specific embodiments, the polypeptides of the invention comprise, or alternatively, consist of, fragments or variants of a reference amino acid sequence selected from: (a) the amino acid sequence of SEQ ID NO:Y or fragments thereof (e.g., the mature form and/or other fragments described herein); (b) the amino acid sequence encoded by SEQ ID NO:X or fragments thereof; (c) the amino acid sequence encoded by the complement of SEQ ID NO:X or fragments thereof; (d) the amino acid sequence encoded by the portion of SEQ ID NO:X as defined in columns 8 and 9 of Table 2 or fragments thereof; and (e) the amino acid sequence encoded by cDNA contained in Clone ID NO:Z or fragments thereof; wherein the fragments or variants have 1-5, 5-10, 5-25, 5-50, 10-50 or 50-150, amino acid residue additions, substitutions, and/or deletions when compared to the reference amino acid sequence. In preferred embodiments, the amino acid substitutions are conservative. Polynucleotides encoding these polypeptides are also encompassed by the invention.

[0153] Polynucleotide and Polypeptide Fragments

[0154] The present invention is also directed to polynucleotide fragments of the polynucleotides (nucleic acids) of the invention. In the present invention, a “polynucleotide fragment” refers to a polynucleotide having a nucleic acid sequence which, for example: is a portion of the cDNA contained in Clone ID NO:Z or the complementary strand thereto; is a portion of the polynucleotide sequence encoding the polypeptide encoded by the cDNA contained in Clone ID NO:Z or the complementary strand thereto; is a portion of a polynucleotide sequence encoding the amino acid sequence encoded by the region of SEQ ID NO:X as defined in columns 8 and 9 of Table 2 or the complementary strand thereto; is a portion of the polynucleotide sequence of SEQ ID NO:X as defined in columns 8 and 9 of Table 2 or the complementary strand thereto; is a portion of the polynucleotide sequence in SEQ ID NO:X or the complementary strand thereto; is a polynucleotide sequence encoding a portion of the polypeptide of SEQ ID NO:Y; is a polynucleotide sequence encoding a portion of a polypeptide encoded by SEQ ID NO:X; is a polynucleotide sequence encoding a portion of a polypeptide encoded by the complement of the polynucleotide sequence in SEQ ID NO:X; is a portion of a polynucleotide sequence encoding the amino acid sequence encoded by the region of SEQ ID NO:B as defined in column 6 of Table 1B or the complementary strand thereto; or is a portion of the polynucleotide sequence of SEQ ID NO:B as defined in column 6 of Table 1B or the complementary strand thereto.

[0155] The polynucleotide fragments of the invention are preferably at least about 15 nt, and more preferably at least about 20 nt, still more preferably at least about 30 nt, and even more preferably, at least about 40 nt, at least about 50 nt, at least about 75 nt, or at least about 150 nt in length. A fragment “at least 20 nt in length,” for example, is intended to include 20 or more contiguous bases from the cDNA sequence contained in Clone ID NO:Z, or the nucleotide sequence shown in SEQ ID NO:X or the complementary stand thereto. In this context “about” includes the particularly recited value or a value larger or smaller by several (5, 4, 3, 2, or 1) nucleotides, at either terminus or at both termini. These nucleotide fragments have uses that include, but are not limited to, as diagnostic probes and primers as discussed herein. Of course, larger fragments (e.g., at least 160, 170, 180, 190, 200, 250, 500, 600, 1000, or 2000 nucleotides in length) are also encompassed by the invention.

[0156] Moreover, representative examples of polynucleotide fragments of the invention, comprise, or alternatively consist of, a sequence from about nucleotide number 1-50, 51-100, 101-150, 151-200, 201-250, 251-300, 301-350, 351-400, 401-450, 451-500, 501-550, 551-600, 651-700, 701-750, 751-800, 800-850, 851-900, 901-950, 951-1000, 1001-1050, 1051-1100, 1101-1150, 1151-1200, 1201-1250, 1251-1300, 1301-1350, 1351-1400, 1401-1450, 1451-1500, 1501-1550, 1551-1600, 1601-1650, 1651-1700, 1701-1750, 1751-1800, 1801-1850, 1851-1900, 1901-1950, 1951-2000, 2001-2050, 2051-2100, 2101-2150, 2151-2200, 2201-2250, 2251-2300, 2301-2350, 2351-2400, 2401-2450, 2451-2500, 2501-2550, 2551-2600, 2601-2650, 2651-2700, 2701-2750, 2751-2800, 2801-2850, 2851-2900, 2901-2950, 2951-3000, 3001-3050, 3051-3100, 3101-3150, 3151-3200, 3201-3250, 3251-3300, 3301-3350, 3351-3400, 3401-3450, 3451-3500, 3501-3550, 3551-3600, 3601-3650, 3651-3700, 3701-3750, 3751-3800, 3801-3850, 3851-3900, 3901-3950, 3951-4000, 4001-4050, 4051-4100, 4101-4150, 4151-4200, 4201-4250, 4251-4300, 4301-4350, 4351-4400, 4401-4450, 4451-4500, 4501-4550, 4551-4600, 4601-4650, 4651-4700, 4701-4750, 4751-4800, 4801-4850, 4851-4900, 4901-4950, 4951-5000, 5001-5050, 5051-5100, 5101-5150, 5151-5200, 5201-5250, 5251-5300, 5301-5350, 5351-5400, 5401-5450, 5451-5500, 5501-5550, 5551-5600, 5601-5650, 5651-5700, 5701-5750, 5751-5800, 5801-5850, 5851-5900, 5901-5950, 5951-6000, 6001-6050, 6051-6100, 6101-6150, 6151-6200, 6201-6250, 6251-6300, 6301-6350, 6351-6400, 6401-6450, 6451-6500, 6501-6550, 6551-6600, 6601-6650, 6651-6700, 6701-6750, 6751-6800, 6801-6850, 6851-6900, 6901-6950, 6951-7000, 7001-7050, 7051-7100, 7101-7150, 7151-7200, 7201-7250, 7251-7300 or 7301 to the end of SEQ ID NO:X, or the complementary strand thereto. In this context “about” includes the particularly recited range or a range larger or smaller by several (5, 4, 3, 2, or 1) nucleotides, at either terminus or at both termini. Preferably, these fragments encode a polypeptide which has a functional activity (e.g., biological activity). More preferably, these polynucleotides can be used as probes or primers as discussed herein. Polynucleotides which hybridize to one or more of these polynucleotides under stringent hybridization conditions or alternatively, under lower stringency conditions are also encompassed by the invention, as are polypeptides encoded by these polynucleotides.

[0157] Further representative examples of polynucleotide fragments of the invention, comprise, or alternatively consist of, a sequence from about nucleotide number 1-50, 51-100, 101-150, 151-200, 201-250, 251-300, 301-350, 351-400, 401-450, 451-500, 501-550, 551-600, 651-700, 701-750, 751-800, 800-850, 851-900, 901-950, 951-1000, 1001-1050, 1051-1100, 1101-1150, 1151-1200, 1201-1250, 1251-1300, 1301-1350, 1351-1400, 1401-1450, 1451-1500, 1501-1550, 1551-1600, 1601-1650, 1651-1700, 1701-1750, 1751-1800, 1801-1850, 1851-1900, 1901-1950, 1951-2000, 2001-2050, 2051-2100, 2101-2150, 2151-2200, 2201-2250, 2251-2300, 2301-2350, 2351-2400, 2401-2450, 2451-2500, 2501-2550, 2551-2600, 2601-2650, 2651-2700, 2701-2750, 2751-2800, 2801-2850, 2851-2900, 2901-2950, 2951-3000, 3001-3050, 3051-3100, 3101-3150, 3151-3200, 3201-3250, 3251-3300, 3301-3350, 3351-3400, 3401-3450, 3451-3500, 3501-3550, 3551-3600, 3601-3650, 3651-3700, 3701-3750, 3751-3800, 3801-3850, 3851-3900, 3901-3950, 3951-4000, 4001-4050, 4051-4100, 4101-4150, 4151-4200, 4201-4250, 4251-4300, 4301-4350, 4351-4400, 4401-4450, 4451-4500, 4501-4550, 4551-4600, 4601-4650, 4651-4700, 4701-4750, 4751-4800, 4801-4850, 4851-4900, 4901-4950, 4951-5000, 5001-5050, 5051-5100, 5101-5150, 5151-5200, 5201-5250, 5251-5300, 5301-5350, 5351-5400, 5401-5450, 5451-5500, 5501-5550, 5551-5600, 5601-5650, 5651-5700, 5701-5750, 5751-5800, 5801-5850, 5851-5900, 5901-5950, 5951-6000, 6001-6050, 6051-6100, 6101-6150, 6151-6200, 6201-6250, 6251-6300, 6301-6350, 6351-6400, 6401-6450, 6451-6500, 6501-6550, 6551-6600, 6601-6650, 6651-6700, 6701-6750, 6751-6800, 6801-6850, 6851-6900, 6901-6950, 6951-7000, 7001-7050, 7051-7100, 7101-7150, 7151-7200, 7201-7250, 7251-7300 or 7301 to the end of the cDNA sequence contained in Clone ID NO:Z, or the complementary strand thereto. In this context “about” includes the particularly recited range or a range larger or smaller by several (5, 4, 3, 2, or 1) nucleotides, at either terminus or at both termini. Preferably, these fragments encode a polypeptide which has a functional activity (e.g., biological activity). More preferably, these polynucleotides can be used as probes or primers as discussed herein. Polynucleotides which hybridize to one or more of these polynucleotides under stringent hybridization conditions or alternatively, under lower stringency conditions are also encompassed by the invention, as are polypeptides encoded by these polynucleotides.

[0158] Moreover, representative examples of polynucleotide fragments of the invention comprise, or alternatively consist of, a nucleic acid sequence comprising one, two, three, four, five, six, seven, eight, nine, ten, or more of the above described polynucleotide fragments of the invention in combination with a polynucleotide sequence delineated in Table 1B column 6. Additional, representative examples of polynucleotide fragments of the invention comprise, or alternatively consist of, a nucleic acid sequence comprising one, two, three, four, five, six, seven, eight, nine, ten, or more of the above described polynucleotide fragments of the invention in combination with a polynucleotide sequence that is the complementary strand of a sequence delineated in column 6 of Table 1B. In further embodiments, the above-described polynucleotide fragments of the invention comprise, or alternatively consist of, sequences delineated in Table 1B, column 6, and have a nucleic acid sequence which is different from that of the BAC fragment having the sequence disclosed in SEQ ID NO:B (see Table 1B, column 5). In additional embodiments, the above-described polynucleotide fragments of the invention comprise, or alternatively consist of, sequences delineated in Table 1B, column 6, and have a nucleic acid sequence which is different from that published for the BAC clone identified as BAC ID NO:A (see Table 1B, column 4). In additional embodiments, the above-described polynucleotides of the invention comprise, or alternatively consist of, sequences delineated Table 1B, column 6, and have a nucleic acid sequence which is different from that contained in the BAC clone identified as BAC ID NO:A (see Table 1B, column 4). Polypeptides encoded by these polynucleotides, other polynucleotides that encode these polypeptides, and antibodies that bind these polypeptides are also encompassed by the invention. Additionally, fragments and variants of the above-described polynucleotides and polypeptides are also encompassed by the invention.

[0159] In additional specific embodiments, polynucleotides of the invention comprise, or alternatively consist of, one, two, three, four, five, six, seven, eight, nine, ten, or more fragments of the sequences delineated in column 6 of Table 1B, and the polynucleotide sequence of SEQ ID NO:X (e.g., as defined in Table 1B, column 2) or fragments or variants thereof. Polypeptides encoded by these polynucleotides, other polynucleotides that encode these polypeptides, and antibodies that bind these polypeptides are also encompassed by the invention.

[0160] In additional specific embodiments, polynucleotides of the invention comprise, or alternatively consist of, one, two, three, four, five, six, seven, eight, nine, ten, or more fragments of the sequences delineated in column 6 of Table 1B which correspond to the same Clone ID NO:Z (see Table 1B, column 1), and the polynucleotide sequence of SEQ ID NO:X (e.g., as defined in Table 1A or 1B) or fragments or variants thereof. Polypeptides encoded by these polynucleotides, other polynucleotides that encode these polypeptides, and antibodies that bind these polypeptides are also encompassed by the invention.

[0161] In further specific embodiments, polynucleotides of the invention comprise, or alternatively consist of, one, two, three, four, five, six, seven, eight, nine, ten, or more fragments of the sequences delineated in the same row of column 6 of Table 1B, and the polynucleotide sequence of SEQ ID NO:X (e.g., as defined in Table 1A or 1B) or fragments or variants thereof. Polypeptides encoded by these polynucleotides, other polynucleotides that encode these polypeptides, and antibodies that bind these polypeptides are also encompassed by the invention.

[0162] In additional specific embodiments, polynucleotides of the invention comprise, or alternatively consist of a polynucleotide sequence in which the 3′ 10 polynucleotides of one of the sequences delineated in column 6 of Table 1B and the 5′ 10 polynucleotides of the sequence of SEQ ID NO:X are directly contiguous. Nucleic acids which hybridize to the complement of these 20 contiguous polynucleotides under stringent hybridization conditions or alternatively, under lower stringency conditions, are also encompassed by the invention. Polypeptides encoded by these polynucleotides and/or nucleic acids, other polynucleotides and/or nucleic acids that encode these polypeptides, and antibodies that bind these polypeptides are also encompassed by the invention. Additionally, fragments and variants of the above-described polynucleotides, nucleic acids, and polypeptides are also encompassed by the invention.

[0163] In additional specific embodiments, polynucleotides of the invention comprise, or alternatively consist of a polynucleotide sequence in which the 3′ 10 polynucleotides of one of the sequences delineated in column 6 of Table 1B and the 5′ 10 polynucleotides of a fragment or variant of the sequence of SEQ ID NO:X (e.g., as described herein) are directly contiguous Nucleic acids which hybridize to the complement of these 20 contiguous polynucleotides under stringent hybridization conditions or alternatively, under lower stringency conditions, are also encompassed by the invention. Polypeptides encoded by these polynucleotides and/or nucleic acids, other polynucleotides and/or nucleic acids encoding these polypeptides, and antibodies that bind these polypeptides are also encompassed by the invention. Additionally, fragments and variants of the above-described polynucleotides, nucleic acids, and polypeptides are also encompassed by the invention.

[0164] In further specific embodiments, polynucleotides of the invention comprise, or alternatively consist of a polynucleotide sequence in which the 3′ 10 polynucleotides of a fragment or variant of the sequence of SEQ ID NO:X and the 5′ 10 polynucleotides of the sequence of one of the sequences delineated in column 6 of Table 1 B are directly contiguous. Nucleic acids which hybridize to the complement of these 20 contiguous polynucleotides under stringent hybridization conditions or alternatively, under lower stringency conditions, are also encompassed by the invention. Polypeptides encoded by these polynucleotides and/or nucleic acids, other polynucleotides and/or nucleic acids encoding these polypeptides, and antibodies that bind these polypeptides are also encompassed by the invention. Additionally, fragments and variants of the above-described polynucleotides, nucleic acids, and polypeptides are also encompassed by the invention.

[0165] In specific embodiments, polynucleotides of the invention comprise, or alternatively consist of a polynucleotide sequence in which the 3′ 10 polynucleotides of one of the sequences delineated in column 6 of Table 1B and the 5′ 10 polynucleotides of another sequence in column 6 are directly contiguous. In preferred embodiments, the 3′ 10 polynucleotides of one of the sequences delineated in column 6 of Table 1B is directly contiguous with the 5′ 10 polynucleotides of the next sequential exon delineated in Table 1B, column 6. Nucleic acids which hybridize to the complement of these 20 contiguous polynucleotides under stringent hybridization conditions or alternatively, under lower stringency conditions, are also encompassed by the invention. Polypeptides encoded by these polynucleotides and/or nucleic acids, other polynucleotides and/or nucleic acids encoding these polypeptides, and antibodies that bind these polypeptides are also encompassed by the invention. Additionally, fragments and variants of the above-described polynucleotides, nucleic acids, and polypeptides are also encompassed by the invention.

[0166] In the present invention, a “polypeptide fragment” refers to an amino acid sequence which is a portion of that contained in SEQ ID NO:Y, a portion of an amino acid sequence encoded by the portion of SEQ ID NO:X as defined in columns 8 and 9 of Table 2, a portion of an amino acid sequence encoded by the polynucleotide sequence of SEQ ID NO:X, a portion of an amino acid sequence encoded by the complement of the polynucleotide sequence in SEQ ID NO:X, and/or a portion of an amino acid sequence encoded by the cDNA contained in Clone ID NO:Z. Protein (polypeptide) fragments may be “free-standing,” or comprised within a larger polypeptide of which the fragment forms a part or region, most preferably as a single continuous region. Representative examples of polypeptide fragments of the invention, include, for example, fragments comprising, or alternatively consisting of, from about amino acid number 1-20, 21-40, 41-60, 61-80, 81-100, 102-120, 121-140, 141-160, 161-180, 181-200, 201-220, 221-240, 241-260, 261-280, 281-300, 301-320, 321-340, 341-360, 361-380, 381-400, 401-420, 421-440, 441-460, 461-480, 481-500, 501-520, 521-540, 541-560, 561-580, 581-600, 601-620, 621-640, 641-660, 661-680, 681-700, 701-720, 721-740, 741-760, 761-780, 781-800, 801-820, 821-840, 841-860, 861-880, 881-900, 901-920, 921-940, 941-960, 961-980, 981-1000, 1001-1020, 1021-1040, 1041-1060, 1061-1080, 1081-1100, 1101-1120, 1121-1140, 1141-1160, 1161-1180, 1181-1200, 1201-1220, 1221-1240, 1241-1260, 1261-1280, 1281-1300, 1301-1320, 1321-1340, 1341-1360, 1361-1380, 1381-1400, 1401-1420, 1421-1440, or 1441 to the end of the coding region. In a preferred embodiment, polypeptide fragments of the invention include, for example, fragments comprising, or alternatively consisting of, from about amino acid number 1-20, 21-40, 41-60, 61-80, 81-100, 102-120, 121-140, 141-160, 161-180, 181-200, 201-220, 221-240, 241-260, 261-280, 281-300, 301-320, 321-340, 341-360, 361-380, 381-400, 401-420, 421-440, 441-460, 461-480, 481-500, 501-520, 521-540, 541-560, 561-580, 581-600, 601-620, 621-640, 641-660, 661-680, 681-700, 701-720, 721-740, 741-760, 761-780, 781-800, 801-820, 821-840, 841-860, 861-880, 881-900, 901-920, 921-940, 941-960, 961-980, 981-1000, 1001-1020, 1021-1040, 1041-1060, 1061-1080, 1081-1100, 1101-1120, 1121-1140, 1141-1160, 1161-1180, 1181-1200, 1201-1220, 1221-1240, 1241-1260, 1261-1280, 1281-1300, 1301-1320, 1321-1340, 1341-1360, 1361-1380, 1381-1400, 1401-1420, 1421-1440, or 1441 to the end of the coding region of SEQ ID NO:Y. Moreover, polypeptide fragments of the invention may be at least about 10, 15, 20, 25, 30, 35, 40, 45, 50, 55, 60, 65, 70, 75, 80, 85, 90, 100, 110, 120, 130, 140, or 150 amino acids in length. In this context “about” includes the particularly recited ranges or values, or ranges or values larger or smaller by several (5, 4, 3, 2, or 1) amino acids, at either extreme or at both extremes. Polynucleotides encoding these polypeptide fragments are also encompassed by the invention.

[0167] Even if deletion of one or more amino acids from the N-terminus of a protein results in modification of loss of one or more biological functions of the protein, other functional activities (e.g., biological activities, ability to multimerize, ability to bind a ligand) may still be retained. For example, the ability of shortened muteins to induce and/or bind to antibodies which recognize the complete or mature forms of the polypeptides generally will be retained when less than the majority of the residues of the complete or mature polypeptide are removed from the N-terminus. Whether a particular polypeptide lacking N-terminal residues of a complete polypeptide retains such immunologic activities can readily be determined by routine methods described herein and otherwise known in the art. It is not unlikely that a mutein with a large number of deleted N-terminal amino acid residues may retain some biological or immunogenic activities. In fact, peptides composed of as few as six amino acid residues may often evoke an immune response.

[0168] Accordingly, polypeptide fragments include the secreted protein as well as the mature form. Further preferred polypeptide fragments include the secreted protein or the mature form having a continuous series of deleted residues from the amino or the carboxy terminus, or both. For example, any number of amino acids, ranging from 1-60, can be deleted from the amino terminus of either the secreted polypeptide or the mature form. Similarly, any number of amino acids, ranging from 1-30, can be deleted from the carboxy terminus of the secreted protein or mature form. Furthermore, any combination of the above amino and carboxy terminus deletions is preferred. Similarly, polynucleotides encoding these polypeptide fragments are also preferred.

[0169] The present invention further provides polypeptides having one or more residues deleted from the amino terminus of the amino acid sequence of a polypeptide disclosed herein (e.g., a polypeptide of SEQ ID NO:Y, a polypeptide encoded by the polynucleotide sequence contained in SEQ ID NO:X or the complement thereof, a polypeptide encoded by the portion of SEQ ID NO:X as defined in columns 8 and 9 of Table 2, a polypeptide encoded by the portion of SEQ ID NO:B as defined in column 6 of Table 1B, and/or a polypeptide encoded by the cDNA contained in Clone ID NO:Z). In particular, N-terminal deletions may be described by the general formula m-q, where q is a whole integer representing the total number of amino acid residues in a polypeptide of the invention (e.g., the polypeptide disclosed in SEQ ID NO:Y, or the polypeptide encoded by the portion of SEQ ID NO:X as defined in columns 8 and 9 of Table 2), and m is defined as any integer ranging from 2 to q-6. Polynucleotides encoding these polypeptides are also encompassed by the invention.

[0170] The present invention further provides polypeptides having one or more residues from the carboxy terminus of the amino acid sequence of a polypeptide disclosed herein (e.g., a polypeptide of SEQ ID NO:Y, a polypeptide encoded by the polynucleotide sequence contained in SEQ ID NO:X, a polypeptide encoded by the portion of SEQ ID NO:X as defined in columns 8 and 9 of Table 2, and/or a polypeptide encoded by the cDNA contained in Clone ID NO:Z). In particular, C-terminal deletions may be described by the general formula 1-n, where n is any whole integer ranging from 6 to q-1, and where n corresponds to the position of amino acid residue in a polypeptide of the invention. Polynucleotides encoding these polypeptides are also encompassed by the invention.

[0171] In addition, any of the above described N- or C-terminal deletions can be combined to produce a N- and C-terminal deleted polypeptide. The invention also provides polypeptides having one or more amino acids deleted from both the amino and the carboxyl termini, which may be described generally as having residues m-n of a polypeptide encoded by SEQ ID NO:X (e.g., including, but not limited to, the preferred polypeptide disclosed as SEQ ID NO:Y and the polypeptide encoded by the portion of SEQ ID NO:X as defined in columns 8 and 9 of Table 2), the cDNA contained in Clone ID NO:Z, and/or the complement thereof, where n and m are integers as described above. Polynucleotides encoding these polypeptides are also encompassed by the invention.

[0172] Also as mentioned above, even if deletion of one or more amino acids from the C-terminus of a protein results in modification of loss of one or more biological functions of the protein, other functional activities (e.g., biological activities, ability to multimerize, ability to bind a ligand) may still be retained. For example the ability of the shortened mutein to induce and/or bind to antibodies which recognize the complete or mature forms of the polypeptide generally will be retained when less than the majority of the residues of the complete or mature polypeptide are removed from the C-terminus. Whether a particular polypeptide lacking C-terminal residues of a complete polypeptide retains such immunologic activities can readily be determined by routine methods described herein and otherwise known in the art. It is not unlikely that a mutein with a large number of deleted C-terminal amino acid residues may retain some biological or immunogenic activities. In fact, peptides composed of as few as six amino acid residues may often evoke an immune response.

[0173] The present application is also directed to proteins containing polypeptides at least 80%, 85%, 90%, 95%, 96%, 97%, 98% or 99% identical to a polypeptide sequence set forth herein. In preferred embodiments, the application is directed to proteins containing polypeptides at least 80%, 85%, 90%, 95%, 96%, 97%, 98% or 99% identical to polypeptides having the amino acid sequence of the specific N- and C-terminal deletions. Polynucleotides encoding these polypeptides are also encompassed by the invention.

[0174] Any polypeptide sequence encoded by, for example, the polynucleotide sequences set forth as SEQ ID NO:X or the complement thereof, (presented, for example, in Tables 1A and 2), the cDNA contained in Clone ID NO:Z, or the polynucleotide sequence as defined in column 6 of Table 1B, may be analyzed to determine certain preferred regions of the polypeptide. For example, the amino acid sequence of a polypeptide encoded by a polynucleotide sequence of SEQ ID NO:X (e.g., the polypeptide of SEQ ID NO:Y and the polypeptide encoded by the portion of SEQ ID NO:X as defined in columns 8 and 9 of Table 2) or the cDNA contained in Clone ID NO:Z may be analyzed using the default parameters of the DNASTAR computer algorithm (DNASTAR, Inc., 1228 S. Park St., Madison, Wis. 53715 USA; http://www.dnastar.com/).

[0175] Polypeptide regions that may be routinely obtained using the DNASTAR computer algorithm include, but are not limited to, Garnier-Robson alpha-regions, beta-regions, turn-regions, and coil-regions; Chou-Fasman alpha-regions, beta-regions, and turn-regions; Kyte-Doolittle hydrophilic regions and hydrophobic regions; Eisenberg alpha- and beta-amphipathic regions; Karplus-Schulz flexible regions; Emini surface-forming regions; and Jameson-Wolf regions of high antigenic index. Among highly preferred polynucleotides of the invention in this regard are those that encode polypeptides comprising regions that combine several structural features, such as several (e.g., 1, 2, 3 or 4) of the features set out above.

[0176] Additionally, Kyte-Doolittle hydrophilic regions and hydrophobic regions, Emini surface-forming regions, and Jameson-Wolf regions of high antigenic index (i.e., containing four or more contiguous amino acids having an antigenic index of greater than or equal to 1.5, as identified using the default parameters of the Jameson-Wolf program) can routinely be used to determine polypeptide regions that exhibit a high degree of potential for antigenicity. Regions of high antigenicity are determined from data by DNASTAR analysis by choosing values which represent regions of the polypeptide which are likely to be exposed on the surface of the polypeptide in an environment in which antigen recognition may occur in the process of initiation of an immune response.

[0177] Preferred polypeptide fragments of the invention are fragments comprising, or alternatively, consisting of, an amino acid sequence that displays a functional activity (e.g. biological activity) of the polypeptide sequence of which the amino acid sequence is a fragment. By a polypeptide displaying a “functional activity” is meant a polypeptide capable of one or more known functional activities associated with a full-length protein, such as, for example, biological activity, antigenicity, immunogenicity, and/or multimerization, as described herein.

[0178] Other preferred polypeptide fragments are biologically active fragments. Biologically active fragments are those exhibiting activity similar, but not necessarily identical, to an activity of the polypeptide of the present invention. The biological activity of the fragments may include an improved desired activity, or a decreased undesirable activity.

[0179] In preferred embodiments, polypeptides of the invention comprise, or alternatively consist of, one, two, three, four, five or more of the antigenic fragments of the polypeptide of SEQ ID NO:Y, or portions thereof. Polynucleotides encoding these polypeptides are also encompassed by the invention.

[0180] The present invention encompasses polypeptides comprising, or alternatively consisting of, an epitope of: the polypeptide sequence shown in SEQ ID NO:Y; a polypeptide sequence encoded by SEQ ID NO:X or the complementary strand thereto; the polypeptide sequence encoded by the portion of SEQ ID NO:X as defined in columns 8 and 9 of Table 2; the polypeptide sequence encoded by the portion of SEQ ID NO:B as defined in column 6 of Table 1B or the complement thereto; the polypeptide sequence encoded by the cDNA contained in Clone ID NO:Z; or the polypeptide sequence encoded by a polynucleotide that hybridizes to the sequence of SEQ ID NO:X, the complement of the sequence of SEQ ID NO:X, the complement of a portion of SEQ ID NO:X as defined in columns 8 and 9 of Table 2, or the cDNA sequence contained in Clone ID NO:Z under stringent hybridization conditions or alternatively, under lower stringency hybridization as defined supra. The present invention further encompasses polynucleotide sequences encoding an epitope of a polypeptide sequence of the invention (such as, for example, the sequence disclosed in SEQ ID NO:X, or a fragment thereof), polynucleotide sequences of the complementary strand of a polynucleotide sequence encoding an epitope of the invention, and polynucleotide sequences which hybridize to the complementary strand under stringent hybridization conditions or alternatively, under lower stringency hybridization conditions defined supra.

[0181] The term “epitopes,” as used herein, refers to portions of a polypeptide having antigenic or immunogenic activity in an animal, preferably a mammal, and most preferably in a human. In a preferred embodiment, the present invention encompasses a polypeptide comprising an epitope, as well as the polynucleotide encoding this polypeptide. An “immunogenic epitope,” as used herein, is defined as a portion of a protein that elicits an antibody response in an animal, as determined by any method known in the art, for example, by the methods for generating antibodies described infra. (See, for example, Geysen et al., Proc. Natl. Acad. Sci. USA 81:3998-4002 (1983)). The term “antigenic epitope,” as used herein, is defined as a portion of a protein to which an antibody can immunospecifically bind its antigen as determined by any method well known in the art, for example, by the immunoassays described herein. Immunospecific binding excludes non-specific binding but does not necessarily exclude cross-reactivity with other antigens. Antigenic epitopes need not necessarily be immunogenic.

[0182] Fragments, which function as epitopes may be produced by any conventional means. (See, e.g., Houghten, R. A., Proc. Natl. Acad. Sci. USA 82:5131-5135 (1985) further described in U.S. Pat. No. 4,631,211.)

[0183] In the present invention, antigenic epitopes preferably contain a sequence of at least 4, at least 5, at least 6, at least 7, more preferably at least 8, at least 9, at least 10, at least 11, at least 12, at least 13, at least 14, at least 15, at least 20, at least 25, at least 30, at least 40, at least 50, and, most preferably, between about 15 to about 30 amino acids. Preferred polypeptides comprising immunogenic or antigenic epitopes are at least 10, 15, 20, 25, 30, 35, 40, 45, 50, 55, 60, 65, 70, 75, 80, 85, 90, 95, or 100 amino acid residues in length. Additional non-exclusive preferred antigenic epitopes include the antigenic epitopes disclosed herein, as well as portions thereof. Antigenic epitopes are useful, for example, to raise antibodies, including monoclonal antibodies that specifically bind the epitope. Preferred antigenic epitopes include the antigenic epitopes disclosed herein, as well as any combination of two, three, four, five or more of these antigenic epitopes. Antigenic epitopes can be used as the target molecules in immunoassays. (See, for instance, Wilson et al., Cell 37:767-778 (1984); Sutcliffe et al., Science 219:660-666 (1983)).

[0184] Non-limiting examples of epitopes of polypeptides that can be used to generate antibodies of the invention include a polypeptide comprising, or alternatively consisting of, at least one, two, three, four, five, six or more of the portion(s) of SEQ ID NO:Y specified in column 6 of Table 1A. These polypeptide fragments have been determined to bear antigenic epitopes of the proteins of the invention by the analysis of the Jameson-Wolf antigenic index, which is included in the DNAStar suite of computer programs. By “comprise” it is intended that a polypeptide contains at least one, two, three, four, five, six or more of the portion(s) of SEQ ID NO:Y shown in column 6 of Table 1A, but it may contain additional flanking residues on either the amino or carboxyl termini of the recited portion. Such additional flanking sequences are preferably sequences naturally found adjacent to the portion; i.e., contiguous sequence shown in SEQ ID NO:Y. The flanking sequence may, however, be sequences from a heterologous polypeptide, such as from another protein described herein or from a heterologous polypeptide not described herein. In particular embodiments, epitope portions of a polypeptide of the invention comprise one, two, three, or more of the portions of SEQ ID NO:Y shown in column 6 of Table 1A. Polynucleotides encoding these polypeptides are also encompassed by the invention.

[0185] Similarly, immunogenic epitopes can be used, for example, to induce antibodies according to methods well known in the art. See, for instance, Sutcliffe et al., supra; Wilson et al., supra; Chow et al., Proc. Natl. Acad. Sci. USA 82:910-914; and Bittle et al., J. Gen. Virol. 66:2347-2354 (1985). Preferred immunogenic epitopes include the immunogenic epitopes disclosed herein, as well as any combination of two, three, four, five or more of these immunogenic epitopes. The polypeptides comprising one or more immunogenic epitopes may be presented for eliciting an antibody response together with a carrier protein, such as an albumin, to an animal system (such as rabbit or mouse), or, if the polypeptide is of sufficient length (at least about 25 amino acids), the polypeptide may be presented without a carrier. However, immunogenic epitopes comprising as few as 8 to 10 amino acids have been shown to be sufficient to raise antibodies capable of binding to, at the very least, linear epitopes in a denatured polypeptide (e.g., in Western blotting).

[0186] Epitope-bearing polypeptides of the present invention may be used to induce antibodies according to methods well known in the art including, but not limited to, in vivo immunization, in vitro immunization, and phage display methods. See, e.g., Sutcliffe et al., supra; Wilson et al., supra, and Bittle et al., J. Gen. Virol, 66:2347-2354 (1985). If in vivo immunization is used, animals may be immunized with free peptide; however, anti-peptide antibody titer may be boosted by coupling the peptide to a macromolecular carrier, such as keyhole limpet hemacyanin (KLH) or tetanus toxoid. For instance, peptides containing cysteine residues may be coupled to a carrier using a linker such as maleimidobenzoyl- N-hydroxysuccinimide ester (MBS), while other peptides may be coupled to carriers using a more general linking agent such as glutaraldehyde. Animals such as rabbits, rats and mice are immunized with either free or carrier-coupled peptides, for instance, by intraperitoneal and/or intradermal injection of emulsions containing about 100 μg of peptide or carrier protein and Freund's adjuvant or any other adjuvant known for stimulating an immune response. Several booster injections may be needed, for instance, at intervals of about two weeks, to provide a useful titer of anti-peptide antibody which can be detected, for example, by ELISA assay using free peptide adsorbed to a solid surface. The titer of anti-peptide antibodies in serum from an immunized animal may be increased by selection of anti-peptide antibodies, for instance, by adsorption to the peptide on a solid support and elution of the selected antibodies according to methods well known in the art.

[0187] As one of skill in the art will appreciate, and as discussed above, the polypeptides of the present invention (e.g., those comprising an immunogenic or antigenic epitope) can be fused to heterologous polypeptide sequences. For example, polypeptides of the present invention (including fragments or variants thereof), may be fused with the constant domain of immunoglobulins (IgA, IgE, IgG, IgM), or portions thereof (CH1, CH2, CH3, or any combination thereof and portions thereof, resulting in chimeric polypeptides. By way of another non-limiting example, polypeptides and/or antibodies of the present invention (including fragments or variants thereof) may be fused with albumin (including but not limited to recombinant human serum albumin or fragments or variants thereof (see, e.g., U.S. Pat. No. 5,876,969, issued Mar. 2, 1999, EP Patent 0 413 622, and U.S. Pat. No. 5,766,883, issued Jun. 16, 1998, herein incorporated by reference in their entirety)). In a preferred embodiment, polypeptides and/or antibodies of the present invention (including fragments or variants thereof) are fused with the mature form of human serum albumin (i.e., amino acids 1-585 of human serum albumin as shown in FIGS. 1 and 2 of EP Patent 0 322 094) which is herein incorporated by reference in its entirety. In another preferred embodiment, polypeptides and/or antibodies of the present invention (including fragments or variants thereof) are fused with polypeptide fragments comprising, or alternatively consisting of, amino acid residues 1-z of human serum albumin, where z is an integer from 369 to 419, as described in U.S. Pat. No. 5,766,883 herein incorporated by reference in its entirety. Polypeptides and/or antibodies of the present invention (including fragments or variants thereof) may be fused to either the N- or C-terminal end of the heterologous protein (e.g., immunoglobulin Fc polypeptide or human serum albumin polypeptide). Polynucleotides encoding fusion proteins of the invention are also encompassed by the invention.

[0188] Such fusion proteins as those described above may facilitate purification and may increase half-life in vivo. This has been shown for chimeric proteins consisting of the first two domains of the human CD4-polypeptide and various domains of the constant regions of the heavy or light chains of mammalian immunoglobulins. See, e.g., EP 394,827; Traunecker et al., Nature, 331:84-86 (1988). Enhanced delivery of an antigen across the epithelial barrier to the immune system has been demonstrated for antigens (e.g., insulin) conjugated to an FcRn binding partner such as IgG or Fc fragments (see, e.g., PCT Publications WO 96/22024 and WO 99/04813). IgG Fusion proteins that have a disulfide-linked dimeric structure due to the IgG portion desulfide bonds have also been found to be more efficient in binding and neutralizing other molecules than monomeric polypeptides or fragments thereof alone. See, e.g., Fountoulakis et al., J. Biochem, 270:3958-3964 (1995). Nucleic acids encoding the above epitopes can also be recombined with a gene of interest as an epitope tag (e.g., the hemagglutinin (HA) tag or flag tag) to aid in detection and purification of the expressed polypeptide. For example, a system described by Janknecht et al. allows for the ready purification of non-denatured fusion proteins expressed in human cell lines (Janknecht et al., 1991, Proc. Natl. Acad. Sci. USA 88:8972-897). In this system, the gene of interest is subcloned into a vaccinia recombination plasmid such that the open reading frame of the gene is translationally fused to an amino-terminal tag consisting of six histidine residues. The tag serves as a matrix binding domain for the fusion protein. Extracts from cells infected with the recombinant vaccinia virus are loaded onto Ni2+ nitriloacetic acid-agarose column and histidine-tagged proteins can be selectively eluted with imidazole-containing buffers.

[0189] Fusion Proteins

[0190] Any polypeptide of the present invention can be used to generate fusion proteins. For example, the polypeptide of the present invention, when fused to a second protein, can be used as an antigenic tag. Antibodies raised against the polypeptide of the present invention can be used to indirectly detect the second protein by binding to the polypeptide. Moreover, because secreted proteins target cellular locations based on trafficking signals, polypeptides of the present invention which are shown to be secreted can be used as targeting molecules once fused to other proteins.

[0191] Examples of domains that can be fused to polypeptides of the present invention include not only heterologous signal sequences, but also other heterologous functional regions. The fusion does not necessarily need to be direct, but may occur through linker sequences.

[0192] In certain preferred embodiments, proteins of the invention are fusion proteins comprising an amino acid sequence that is an N and/or C-terminal deletion of a polypeptide of the invention. In preferred embodiments, the invention is directed to a fusion protein comprising an amino acid sequence that is at least 80%, 85%, 90%, 95%, 96%, 97%, 98% or 99% identical to a polypeptide sequence of the invention. Polynucleotides encoding these proteins are also encompassed by the invention.

[0193] Moreover, fusion proteins may also be engineered to improve characteristics of the polypeptide of the present invention. For instance, a region of additional amino acids, particularly charged amino acids, may be added to the N-terminus of the polypeptide to improve stability and persistence during purification from the host cell or subsequent handling and storage. Also, peptide moieties may be added to the polypeptide to facilitate purification. Such regions may be removed prior to final preparation of the polypeptide. The addition of peptide moieties to facilitate handling of polypeptides are familiar and routine techniques in the art.

[0194] As one of skill in the art will appreciate that, as discussed above, polypeptides of the present invention, and epitope-bearing fragments thereof, can be combined with heterologous polypeptide sequences. For example, the polypeptides of the present invention may be fused with heterologous polypeptide sequences, for example, the polypeptides of the present invention may be fused with the constant domain of immunoglobulins (IgA, IgE, IgG, IgM) or portions thereof (CH1, CH2, CH3, and any combination thereof, including both entire domains and portions thereof), or albumin (including, but not limited to, native or recombinant human albumin or fragments or variants thereof (see, e.g., U.S. Pat. No. 5,876,969, issued Mar. 2, 1999, EP Patent 0 413 622, and U.S. Pat. No. 5,766,883, issued Jun. 16, 1998, herein incorporated by reference in their entirety)), resulting in chimeric polypeptides. For example, EP-A-O 464 533 (Canadian counterpart 2045869) discloses fusion proteins comprising various portions of constant region of immunoglobulin molecules together with another human protein or part thereof. In many cases, the Fc part in a fusion protein is beneficial in therapy and diagnosis, and thus can result in, for example, improved pharmacokinetic properties (EP-A 0232 262). Alternatively, deleting the Fc part after the fusion protein has been expressed, detected, and purified, would be desired. For example, the Fc portion may hinder therapy and diagnosis if the fusion protein is used as an antigen for immunizations. In drug discovery, for example, human proteins, such as hIL-5, have been fused with Fc portions for the purpose of high-throughput screening assays to identify antagonists of hIL-5. See, D. Bennett et al., J. Molecular Recognition 8:52-58 (1995); K. Johanson et al., J. Biol. Chem. 270:9459-9471 (1995).

[0195] Moreover, the polypeptides of the present invention can be fused to marker sequences, such as a polypeptide, which facilitates purification of the fused polypeptide. In preferred embodiments, the marker amino acid sequence is a hexa-histidine peptide, such as the tag provided in a pQE vector (QIAGEN, Inc., 9259 Eton Avenue, Chatsworth, Calif., 91311), among others, many of which are commercially available. As described in Gentz et al., Proc. Natl. Acad. Sci. USA 86:821-824 (1989), for instance, hexa-histidine provides for convenient purification of the fusion protein. Another peptide tag useful for purification, the “HA” tag, corresponds to an epitope derived from the influenza hemagglutinin protein (Wilson et al., Cell 37:767 (1984).)

[0196] Additional fusion proteins of the invention may be generated through the techniques of gene-shuffling, motif-shuffling, exon-shuffling, and/or codon-shuffling (collectively referred to as “DNA shuffling”), briefly described below, and further described herein. DNA shuffling may be employed to modulate the activities of polypeptides of the invention, such methods can be used to generate polypeptides with altered activity, as well as agonists and antagonists of the polypeptides. See, generally, U.S. Pat. Nos. 5,605,793; 5,811,238; 5,830,721; 5,834,252; and 5,837,458, and Patten et al., Curr. Opinion Biotechnol. 8:724-33 (1997); Harayama, Trends Biotechnol. 16(2):76-82 (1998); Hansson et al., J. Mol. Biol. 287:265-76 (1999); and Lorenzo and Blasco, Biotechniques 24(2):308-13 (1998); each of these patents and publications are hereby incorporated by reference in its entirety). In a preferred embodiment, one or more components, motifs, sections, parts, domains, fragments, etc., of a polynucleotide encoding a polypeptide of the invention may be recombined with one or more components, motifs, sections, parts, domains, fragments, etc., of one or more heterologous molecules encoding a heterologous polypeptide.

[0197] Thus, any of these above fusions can be engineered using the polynucleotides or the polypeptides of the present invention.

[0198] Recombinant and Synthetic Production of Polypeptides of the Invention

[0199] The present invention also relates to vectors containing the polynucleotide of the present invention, host cells, and the production of polypeptides by synthetic and recombinant techniques. The vector may be, for example, a phage, plasmid, viral, or retroviral vector. Retroviral vectors may be replication competent or replication defective. In the latter case, viral propagation generally will occur only in complementing host cells.

[0200] The polynucleotides of the invention may be joined to a vector containing a selectable marker for propagation in a host. Generally, a plasmid vector is introduced in a precipitate, such as a calcium phosphate precipitate, or in a complex with a charged lipid. If the vector is a virus, it may be packaged in vitro using an appropriate packaging cell line and then transduced into host cells.

[0201] The polynucleotide insert should be operatively linked to an appropriate promoter, such as the phage lambda PL promoter, the E. coli lac, trp, phoA and tac promoters, the SV40 early and late promoters and promoters of retroviral LTRs, to name a few. Other suitable promoters will be known to the skilled artisan. The expression constructs will further contain sites for transcription initiation, termination, and, in the transcribed region, a ribosome binding site for translation. The coding portion of the transcripts expressed by the constructs will preferably include a translation initiating codon at the beginning and a termination codon (UAA, UGA or UAG) appropriately positioned at the end of the polypeptide to be translated.

[0202] As indicated, the expression vectors will preferably include at least one selectable marker. Such markers include dihydrofolate reductase, G418 or neomycin resistance, glutamine synthase, for eukaryotic cell culture and tetracycline, kanamycin or ampicillin resistance genes for culturing in E. coli and other bacteria. Representative examples of appropriate hosts include, but are not limited to, bacterial cells, such as E. coli, Streptomyces and Salmonella typhimurium cells; fungal cells, such as yeast cells (e.g., Saccharomyces cerevisiae or Pichia pastoris (ATCC Accession No. 201178)); insect cells such as Drosophila S2 and Spodoptera Sf9 cells; animal cells such as CHO, COS, 293, NSO and Bowes melanoma cells; and plant cells. Appropriate culture mediums and conditions for the above-described host cells are known in the art.

[0203] Among vectors preferred for use in bacteria include pQE70, pQE60 and pQE-9, available from QIAGEN, Inc.; pBluescript vectors, Phagescript vectors, pNH8A, pNH16a, pNH18A, pNH46A, available from Stratagene Cloning Systems, Inc.; and ptrc99a, pKK223-3, pKK233-3, pDR540, pRIT5 available from Pharmacia Biotech, Inc. Among preferred eukaryotic vectors are pWLNEO, pSV2CAT, pOG44, pXT1 and pSG available from Stratagene; and pSVK3, pBPV, pMSG and pSVL available from Pharmacia. Preferred expression vectors for use in yeast systems include, but are not limited to pYES2, pYD1, pTEF1/Zeo, pYES2/GS, pPICZ, pGAPZ, pGAPZalph, pPIC9, pPIC3.5, pHIL-D2, pHIL-S1, pPIC3.5K, pPIC9K, and PAO815 (all available from Invitrogen, Carlsbad, Calif.). Other suitable vectors will be readily apparent to the skilled artisan.

[0204] Vectors which use glutamine synthase (GS) or DHFR as the selectable markers can be amplified in the presence of the drugs methionine sulphoximine or methotrexate, respectively. An advantage of glutamine synthase based vectors is the availabilty of cell lines (e.g., the murine myeloma cell line, NSO) which are glutamine synthase negative. Glutamine synthase expression systems can also function in glutamine synthase expressing cells (e.g., Chinese Hamster Ovary (CHO) cells) by providing additional inhibitor to prevent the functioning of the endogenous gene. A glutamine synthase expression system and components thereof are detailed in PCT publications: WO87/04462; WO86/05807; WO89/01036; WO89/10404; and WO91/06657, which are hereby incorporated in their entireties by reference herein. Additionally, glutamine synthase expression vectors can be obtained from Lonza Biologics, Inc. (Portsmouth, N.H.). Expression and production of monoclonal antibodies using a GS expression system in murine myeloma cells is described in Bebbington et al., Bio/technology 10:169(1992) and in Biblia and Robinson Biotechnol. Prog. 11:1 (1995) which are herein incorporated by reference.

[0205] The present invention also relates to host cells containing the above-described vector constructs described herein, and additionally encompasses host cells containing nucleotide sequences of the invention that are operably associated with one or more heterologous control regions (e.g., promoter and/or enhancer) using techniques known of in the art. The host cell can be a higher eukaryotic cell, such as a mammalian cell (e.g., a human derived cell), or a lower eukaryotic cell, such as a yeast cell, or the host cell can be a prokaryotic cell, such as a bacterial cell. A host strain may be chosen, which modulates the expression of the inserted gene sequences, or modifies and processes the gene product in the specific fashion desired. Expression from certain promoters can be elevated in the presence of certain inducers; thus expression of the genetically engineered polypeptide may be controlled. Furthermore, different host cells have characteristics and specific mechanisms for the translational and post-translational processing and modification (e.g., phosphorylation, cleavage) of proteins. Appropriate cell lines can be chosen to ensure the desired modifications and processing of the foreign protein expressed.

[0206] Introduction of the nucleic acids and nucleic acid constructs of the invention into the host cell can be effected by calcium phosphate transfection, DEAE-dextran mediated transfection, cationic lipid-mediated transfection, electroporation, transduction, infection, or other methods. Such methods are described in many standard laboratory manuals, such as Davis et al., Basic Methods In Molecular Biology (1986). It is specifically contemplated that the polypeptides of the present invention may in fact be expressed by a host cell lacking a recombinant vector.

[0207] In addition to encompassing host cells containing the vector constructs discussed herein, the invention also encompasses primary, secondary, and immortalized host cells of vertebrate origin, particularly mammalian origin, that have been engineered to delete or replace endogenous genetic material (e.g., musculoskeletal system antigen coding sequence), and/or to include genetic material (e.g., heterologous polynucleotide sequences) that is operably associated with musculoskeletal system associated polynucleotides of the invention, and which activates, alters, and/or amplifies endogenous musculoskeletal system associated polynucleotides. For example, techniques known in the art may be used to operably associate heterologous control regions (e.g., promoter and/or enhancer) and endogenous musculoskeletal system associated polynucleotide sequences via homologous recombination (see, e.g., U.S. Pat. No. 5,641,670, issued Jun. 24, 1997; International Publication Number WO 96/29411; International Publication Number WO 94112650; Koller et al., Proc. Natl. Acad. Sci. USA 86:8932-8935 (1989); and Zijlstra et al., Nature 342:435-438 (1989), the disclosures of each of which are incorporated by reference in their entireties).

[0208] Polypeptides of the present invention can also be recovered from: products purified from natural sources, including bodily fluids, tissues and cells, whether directly isolated or cultured; products of chemical synthetic procedures; and products produced by recombinant techniques from a prokaryotic or eukaryotic host, including, for example, bacterial, yeast, higher plant, insect, and mammalian cells. Depending upon the host employed in a recombinant production procedure, the polypeptides of the present invention may be glycosylated or may be non-glycosylated. In addition, polypeptides of the invention may also include an initial modified methionine residue, in some cases as a result of host-mediated processes. Thus, it is well known in the art that the N-terminal methionine encoded by the translation initiation codon generally is removed with high efficiency from any protein after translation in all eukaryotic cells. While the N-terminal methionine on most proteins also is efficiently removed in most prokaryotes, for some proteins, this prokaryotic removal process is inefficient, depending on the nature of the amino acid to which the N-terminal methionine is covalently linked.

[0209] In one embodiment, the yeast Pichia pastoris is used to express polypeptides of the invention in a eukaryotic system. Pichia pastoris is a methylotrophic yeast which can metabolize methanol as its sole carbon source. A main step in the methanol metabolization pathway is the oxidation of methanol to formaldehyde using O₂. This reaction is catalyzed by the enzyme alcohol oxidase. In order to metabolize methanol as its sole carbon source, Pichia pastoris must generate high levels of alcohol oxidase due, in part, to the relatively low affinity of alcohol oxidase for O₂. Consequently, in a growth medium depending on methanol as a main carbon source, the promoter region of one of the two alcohol oxidase genes (AOX1) is highly active. In the presence of methanol, alcohol oxidase produced from the AOX1 gene comprises up to approximately 30% of the total soluble protein in Pichia pastoris. See, Ellis, S. B., et al., Mol Cell. Biol. 5:1111-21 (1985); Koutz, P. J, et al., Yeast 5:167-77 (1989); Tschopp, J. F., et al, Nucl. Acids Res. 15:3859-76 (1987). Thus, a heterologous coding sequence, such as, for example, a polynucleotide of the present invention, under the transcriptional regulation of all or part of the AOX1 regulatory sequence is expressed at exceptionally high levels in Pichia yeast grown in the presence of methanol.

[0210] In one example, the plasmid vector pPIC9K is used to express DNA encoding a polypeptide of the invention, as set forth herein, in a Pichea yeast system essentially as described in “Pichia Protocols: Methods in Molecular Biology,” D. R. Higgins and J. Cregg, eds. The Humana Press, Totowa, N.J., 1998. This expression vector allows expression and secretion of a polypeptide of the invention by virtue of the strong AOX1 promoter linked to the Pichia pastoris alkaline phosphatase (PHO) secretory signal peptide (i.e., leader) located upstream of a multiple cloning site.

[0211] Many other yeast vectors could be used in place of pPIC9K, such as, pYES2, pYD1, pTEF1/Zeo, pYES2/GS, pPICZ, pGAPZ, pGAPZalpha, pPIC9, pPIC3.5, pHIL-D2, pHIL-S 1, pPIC3.5K, and PA0815, as one skilled in the art would readily appreciate, as long as the proposed expression construct provides appropriately located signals for transcription, translation, secretion (if desired), and the like, including an in-frame AUG as required.

[0212] In another embodiment, high-level expression of a heterologous coding sequence, such as, for example, a polynucleotide of the present invention, may be achieved by cloning the heterologous polynucleotide of the invention into an expression vector such as, for example, pGAPZ or pGAPZalpha, and growing the yeast culture in the absence of methanol.

[0213] In addition to encompassing host cells containing the vector constructs discussed herein, the invention also encompasses primary, secondary, and immortalized host cells of vertebrate origin, particularly mammalian origin, that have been engineered to delete or replace endogenous genetic material (e.g., coding sequence), and/or to include genetic material (e.g., heterologous polynucleotide sequences) that is operably associated with polynucleotides of the invention, and which activates, alters, and/or amplifies endogenous polynucleotides. For example, techniques known in the art may be used to operably associate heterologous control regions (e.g., promoter and/or enhancer) and endogenous polynucleotide sequences via homologous recombination (see, e.g., U.S. Pat. No. 5,641,670, issued Jun. 24, 1997; International Publication No. WO 96/29411, published Sep. 26, 1996; International Publication No. WO 94/12650, published Aug. 4, 1994; Koller et al., Proc. Natl. Acad. Sci. USA 86:8932-8935 (1989); and Zijlstra et al., Nature 342:435-438 (1989), the disclosures of each of which are incorporated by reference in their entireties).

[0214] In addition, polypeptides of the invention can be chemically synthesized using techniques known in the art (e.g., see Creighton, 1983, Proteins: Structures and Molecular Principles, W.H. Freeman & Co., N.Y., and Hunkapiller et al., Nature, 310:105-111 (1984)). For example, a polypeptide corresponding to a fragment of a polypeptide can be synthesized by use of a peptide synthesizer. Furthermore, if desired, nonclassical amino acids or chemical amino acid analogs can be introduced as a substitution or addition into the polypeptide sequence. Non-classical amino acids include, but are not limited to, to the D-isomers of the common amino acids, 2,4-diaminobutyric acid, a-amino isobutyric acid, 4-aminobutyric acid, Abu, 2-amino butyric acid, g-Abu, e-Ahx, 6-amino hexanoic acid, Aib, 2-amino isobutyric acid, 3-amino propionic acid, ornithine, norleucine, norvaline, hydroxyproline, sarcosine, citrulline, homocitrulline, cysteic acid, t-butylglycine, t-butylalanine, phenylglycine, cyclohexylalanine, b-alanine, fluoro-amino acids, designer amino acids such as b-methyl amino acids, Ca-methyl amino acids, Na-methyl amino acids, and amino acid analogs in general. Furthermore, the amino acid can be D (dextrorotary) or L (levorotary).

[0215] The invention encompasses polypeptides of the present invention which are differentially modified during or after translation, e.g., by glycosylation, acetylation, phosphorylation, amidation, derivatization by known protecting/blocking groups, proteolytic cleavage, linkage to an antibody molecule or other cellular ligand, etc. Any of numerous chemical modifications may be carried out by known techniques, including but not limited, to specific chemical cleavage by cyanogen bromide, trypsin, chymotrypsin, papain, V8 protease, NaBH₄; acetylation, formylation, oxidation, reduction; metabolic synthesis in the presence of tunicamycin; etc.

[0216] Additional post-translational modifications encompassed by the invention include, for example, e.g., N-linked or O-linked carbohydrate chains, processing of N-terminal or C-terminal ends), attachment of chemical moieties to the amino acid backbone, chemical modifications of N-linked or O-linked carbohydrate chains, and addition or deletion of an N-terminal methionine residue as a result of procaryotic host cell expression. The polypeptides may also be modified with a detectable label, such as an enzymatic, fluorescent, isotopic or affinity label to allow for detection and isolation of the protein.

[0217] Examples of suitable enzymes include horseradish peroxidase, alkaline phosphatase, beta-galactosidase, or acetylcholinesterase; examples of suitable prosthetic group complexes include streptavidin/biotin and avidin/biotin; examples of suitable fluorescent materials include umbelliferone, fluorescein, fluorescein isothiocyanate, rhodamine, dichlorotriazinylamine fluorescein, dansyl chloride or phycoerythrin; an example of a luminescent material includes luminol; examples of bioluminescent materials include luciferase, luciferin, and aequorin; and examples of suitable radioactive material include iodine (¹²¹I, ¹²³I, ¹²⁵I, ¹³¹I), carbon (¹⁴C), sulfur (³⁵S), tritium (³H), indium (¹¹¹In, ¹¹²In, ^{113m}In, ^{115m}In), technetium (⁹⁹Tc,99m Tc), thallium (²⁰¹Ti), gallium (⁶⁸Ga, ⁶⁷Ga), palladium (¹⁰³ Pd), molybdenum (⁹⁹Mo), xenon (¹³³Xe) fluorine (¹⁸F) ¹⁵³Sm, ¹⁷⁷Lu ¹⁵⁹Gd, ¹⁴⁹Pm, ¹⁴⁰La, ¹⁷⁵Yb, ¹⁶⁶Ho, ⁹⁰Y, ⁴⁷Sc, ¹⁸⁶Re ¹⁸⁸Re, ¹⁴²Pr, ¹⁰⁵Rh, and ⁹⁷Ru.

[0218] In specific embodiments, a polypeptide of the present invention or fragment or variant thereof is attached to macrocyclic chelators that associate with radiometal ions, including but not limited to, ¹⁷⁷Lu, ⁹⁰Y, ¹⁶⁶ Ho, and ¹⁵³Sm, to polypeptides. In a preferred embodiment, the radiometal ion associated with the macrocyclic chelators is ¹¹¹In. In another preferred embodiment, the radiometal ion associated with the macrocyclic chelator is ⁹⁰Y. In specific embodiments, the macrocyclic chelator is 1,4,7,10-tetraazacyclododecane-N,N′,N″,N″′-tetraacetic acid (DOTA). In other specific embodiments, DOTA is attached to an antibody of the invention or fragment thereof via a linker molecule. Examples of linker molecules useful for conjugating DOTA to a polypeptide are commonly known in the art—see, for example, DeNardo et al., Clin Cancer Res. 4(10):2483-90 (1998); Peterson et al., Bioconjug. Chem. 10(4):553-7 (1999); and Zimmerman et al, Nucl. Med. Biol. 26(8):943-50 (1999); which are hereby incorporated by reference in their entirety.

[0219] As mentioned, the musculoskeletal system associated proteins of the invention may be modified by either natural processes, such as posttranslational processing, or by chemical modification techniques which are well known in the art. It will be appreciated that the same type of modification may be present in the same or varying degrees at several sites in a given musculoskeletal system associated polypeptide. Musculoskeletal system associated polypeptides may be branched, for example, as a result of ubiquitination, and they may be cyclic, with or without branching. Cyclic, branched, and branched cyclic musculoskeletal system associated polypeptides may result from posttranslation natural processes or may be made by synthetic methods. Modifications include acetylation, acylation, ADP-ribosylation, amidation, covalent attachment of flavin, covalent attachment of a heme moiety, covalent attachment of a nucleotide or nucleotide derivative, covalent attachment of a lipid or lipid derivative, covalent attachment of phosphotidylinositol, cross-linking, cyclization, disulfide bond formation, demethylation, formation of covalent cross-links, formation of cysteine, formation of pyroglutamate, formylation, gamma-carboxylation, glycosylation, GPI anchor formation, hydroxylation, iodination, methylation, myristoylation, oxidation, pegylation, proteolytic processing, phosphorylation, prenylation, racemization, selenoylation, sulfation, transfer-RNA mediated addition of amino acids to proteins such as arginylation, and ubiquitination. (See, for instance, PROTEINS—STRUCTURE AND MOLECULAR PROPERTIES, 2nd Ed., T. E. Creighton, W. H. Freeman and Company, New York (1993); POSTTRANSLATIONAL COVALENT MODIFICATION OF PROTEINS, B. C. Johnson, Ed., Academic Press, New York, pgs. 1-12 (1983); Seifter et al., Meth. Enzymol. 182:626-646 (1990); Rattan et al., Ann. N.Y. Acad. Sci. 663:48-62 (1992)).

[0220] Also provided by the invention are chemically modified derivatives of the polypeptides of the invention which may provide additional advantages such as increased solubility, stability and circulating time of the polypeptide, or decreased immunogenicity (see U.S. Pat. No. 4,179,337). The chemical moieties for derivitization may be selected from water soluble polymers such as polyethylene glycol, ethylene glycol/propylene glycol copolymers, carboxymethylcellulose, dextran, polyvinyl alcohol and the like. The polypeptides may be modified at random positions within the molecule, or at predetermined positions within the molecule and may include one, two, three or more attached chemical moieties.

[0221] The polymer may be of any molecular weight, and may be branched or unbranched. For polyethylene glycol, the preferred molecular weight is between about 1 kDa and about 100 kDa (the term “about” indicating that in preparations of polyethylene glycol, some molecules will weigh more, some less, than the stated molecular weight) for ease in handling and manufacturing. Other sizes may be used, depending on the desired therapeutic profile (e.g., the duration of sustained release desired, the effects, if any on biological activity, the ease in handling, the degree or lack of antigenicity and other known effects of the polyethylene glycol to a therapeutic protein or analog). For example, the polyethylene glycol may have an average molecular weight of about 200, 500, 1000, 1500, 2000, 2500, 3000, 3500, 4000, 4500, 5000, 5500, 6000, 6500, 7000, 7500, 8000, 8500, 9000, 9500, 10,000, 10,500, 11,000, 11,500, 12,000, 12,500, 13,000, 13,500, 14,000, 14,500, 15,000, 15,500, 16,000, 16,500, 17,000, 17,500, 18,000, 18,500, 19,000, 19,500, 20,000, 25,000, 30,000, 35,000, 40,000, 50,000, 55,000, 60,000, 65,000, 70,000, 75,000, 80,000, 85,000, 90,000, 95,000, or 100,000 kDa.

[0222] As noted above, the polyethylene glycol may have a branched structure. Branched polyethylene glycols are described, for example, in U.S. Pat. No. 5,643,575; Morpurgo et al., Appl. Biochem. Biotechnol. 56:59-72 (1996); Vorobjev et al., Nucleosides Nucleotides 18:2745-2750 (1999); and Caliceti et al., Bioconjug. Chem. 10:638-646 (1999), the disclosures of each of which are incorporated herein by reference.

[0223] The polyethylene glycol molecules (or other chemical moieties) should be attached to the protein with consideration of effects on functional or antigenic domains of the protein. There are a number of attachment methods available to those skilled in the art, such as, for example, the method disclosed in EP 0 401 384 (coupling PEG to G-CSF), herein incorporated by reference; see also Malik et al., Exp. Hematol. 20:1028-1035 (1992), reporting pegylation of GM-CSF using tresyl chloride. For example, polyethylene glycol may be covalently bound through amino acid residues via a reactive group, such as a free amino or carboxyl group. Reactive groups are those to which an activated polyethylene glycol molecule may be bound. The amino acid residues having a free amino group may include lysine residues and the N-terminal amino acid residues; those having a free carboxyl group may include aspartic acid residues glutamic acid residues and the C-terminal amino acid residue. Sulfhydryl groups may also be used as a reactive group for attaching the polyethylene glycol molecules. Preferred for therapeutic purposes is attachment at an amino group, such as attachment at the N-terminus or lysine group.

[0224] As suggested above, polyethylene glycol may be attached to proteins via linkage to any of a number of amino acid residues. For example, polyethylene glycol can be linked to proteins via covalent bonds to lysine, histidine, aspartic acid, glutamic acid, or cysteine residues. One or more reaction chemistries may be employed to attach polyethylene glycol to specific amino acid residues (e.g., lysine, histidine, aspartic acid, glutamic acid, or cysteine) of the protein or to more than one type of amino acid residue (e.g., lysine, histidine, aspartic acid, glutamic acid, cysteine and combinations thereof) of the protein.

[0225] One may specifically desire proteins chemically modified at the N-terminus. Using polyethylene glycol as an illustration of the present composition, one may select from a variety of polyethylene glycol molecules (by molecular weight, branching, etc.), the proportion of polyethylene glycol molecules to protein (polypeptide) molecules in the reaction mix, the type of pegylation reaction to be performed, and the method of obtaining the selected N-terminally pegylated protein. The method of obtaining the N-terminally pegylated preparation (i.e., separating this moiety from other monopegylated moieties if necessary) may be by purification of the N-terminally pegylated material from a population of pegylated protein molecules. Selective proteins chemically modified at the N-terminus modification may be accomplished by reductive alkylation which exploits differential reactivity of different types of primary amino groups (lysine versus the N-terminal) available for derivatization in a particular protein. Under the appropriate reaction conditions, substantially selective derivatization of the protein at the N-terminus with a carbonyl group containing polymer is achieved.

[0226] As indicated above, pegylation of the proteins of the invention may be accomplished by any number of means. For example, polyethylene glycol may be attached to the protein either directly or by an intervening linker. Linkerless systems for attaching polyethylene glycol to proteins are described in Delgado et al., Crit. Rev. Thera. Drug Carrier Sys. 9:249-304 (1992); Francis et al., Intern. J. of Hematol. 68:1-18 (1998); U.S. Pat. No. 4,002,531; U.S. Pat. No. 5,349,052; WO 95/06058; and WO 98/32466, the disclosures of each of which are incorporated herein by reference.

[0227] One system for attaching polyethylene glycol directly to amino acid residues of proteins without an intervening linker employs tresylated MPEG, which is produced by the modification of monmethoxy polyethylene glycol (MPEG) using tresylchloride (ClSO₂CH₂CF₃). Upon reaction of protein with tresylated MPEG, polyethylene glycol is directly attached to amine groups of the protein. Thus, the invention includes protein-polyethylene glycol conjugates produced by reacting proteins of the invention with a polyethylene glycol molecule having a 2,2,2-trifluoreothane sulphonyl group.

[0228] Polyethylene glycol can also be attached to proteins using a number of different intervening linkers. For example, U.S. Pat. No. 5,612,460, the entire disclosure of which is incorporated herein by reference, discloses urethane linkers for connecting polyethylene glycol to proteins. Protein-polyethylene glycol conjugates wherein the polyethylene glycol is attached to the protein by a linker can also be produced by reaction of proteins with compounds such as MPEG-succinimidylsuccinate, MPEG activated with 1,1′-carbonyldiimidazole, MPEG-2,4,5-trichloropenylcarbonate, MPEG-p-nitrophenolcarbonate, and various MPEG-succinate derivatives. A number of additional polyethylene glycol derivatives and reaction chemistries for attaching polyethylene glycol to proteins are described in International Publication No. WO 98/32466, the entire disclosure of which is incorporated herein by reference. Pegylated protein products produced using the reaction chemistries set out herein are included within the scope of the invention.

[0229] The number of polyethylene glycol moieties attached to each protein of the invention (i.e., the degree of substitution) may also vary. For example, the pegylated proteins of the invention may be linked, on average, to 1, 2, 3, 4, 5, 6, 7, 8, 9, 10, 12, 15, 17, 20, or more polyethylene glycol molecules. Similarly, the average degree of substitution within ranges such as 1-3, 2-4, 3-5, 4-6, 5-7, 6-8, 7-9, 8-10, 9-11, 10-12, 11-13, 12-14, 13-15, 14-16, 15-17, 16-18, 17-19, or 18-20 polyethylene glycol moieties per protein molecule. Methods for determining the degree of substitution are discussed, for example, in Delgado et al., Crit. Rev. Thera. Drug Carrier Sys. 9:249-304 (1992).

[0230] The musculoskeletal system associated polypeptides of the invention can be recovered and purified from chemical synthesis and recombinant cell cultures by standard methods which include, but are not limited to, ammonium sulfate or ethanol precipitation, acid extraction, anion or cation exchange chromatography, phosphocellulose chromatography, hydrophobic interaction chromatography, affinity chromatography, hydroxylapatite chromatography and lectin chromatography. Most preferably, high performance liquid chromatography (“HPLC”) is employed for purification. Well known techniques for refolding protein may be employed to regenerate active conformation when the polypeptide is denatured during isolation and/or purification.

[0231] Musculoskeletal system associated polynucleotides and polypeptides may be used in accordance with the present invention for a variety of applications, particularly those that make use of the chemical and biological properties of musculoskeletal system associated antigens. Among these are applications in the detection, prevention, diagnosis and/or treatment of diseases associated with musculoskeletal system, such as e.g., bone disorders (e.g., osteoporosis, osteomyelitis, Paget's disease, and sciolosis); joint disorders (e.g., osteoarthritis, rheumatoid arthritis, infectious arthritis, systemic lupus erythematosus, gout, and Reiter's syndrome); ligament, tendon, and bursa disorders (e.g., bursitis, tendinitis, and tenosynovitis); muscle disorders (e.g., muscular dystrophy, Pompe's disease, periodic paralysis, polymyalgia rheumatica, polymyositis, and Steinert's disease), neoplasms and/or cancers of musculoskeletal tissues (e.g., osteochondroma, benign chondroma, chondroblastoma, osteoid osteoma, and giant cell tumor), and/or those disorders described under “Musculoskeletal System Disorders”. Additional applications relate to diagnosis and to treatment of disorders of cells, tissues and organisms. These aspects of the invention are discussed further below.

[0232] In a preferred embodiment, polynucleotides expressed in a particular tissue type are used to detect, diagnose, treat, prevent and/or prognose disorders associated with the tissue type.

[0233] The polypeptides of the invention may be in monomers or multimers (i.e., dimers, trimers, tetramers and higher multimers). Accordingly, the present invention relates to monomers and multimers of the polypeptides of the invention, their preparation, and compositions (preferably, Therapeutics) containing them. In specific embodiments, the polypeptides of the invention are monomers, dimers, trimers or tetramers. In additional embodiments, the multimers of the invention are at least dimers, at least trimers, or at least tetramers.

[0234] Multimers encompassed by the invention may be homomers or heteromers. As used herein, the term homomer refers to a multimer containing only polypeptides corresponding to a protein of the invention (e.g., the amino acid sequence of SEQ ID NO:Y, an amino acid sequence encoded by SEQ ID NO:X or the complement of SEQ ID NO:X, the amino acid sequence encoded by the portion of SEQ ID NO:X as defined in columns 8 and 9 of Table 2, and/or an amino acid sequence encoded by cDNA contained in Clone ID NO:Z (including fragments, variants, splice variants, and fusion proteins, corresponding to these as described herein)). These homomers may contain polypeptides having identical or different amino acid sequences. In a specific embodiment, a homomer of the invention is a multimer containing only polypeptides having an identical amino acid sequence. In another specific embodiment, a homomer of the invention is a multimer containing polypeptides having different amino acid sequences. In specific embodiments, the multimer of the invention is a homodimer (e.g., containing two polypeptides having identical or different amino acid sequences) or a homotrimer (e.g., containing three polypeptides having identical and/or different amino acid sequences). In additional embodiments, the homomeric multimer of the invention is at least a homodimer, at least a homotrimer, or at least a homotetramer.

[0235] As used herein, the term heteromer refers to a multimer containing two or more heterologous polypeptides (i.e., polypeptides of different proteins) in addition to the polypeptides of the invention. In a specific embodiment, the multimer of the invention is a heterodimer, a heterotrimer, or a heterotetramer. In additional embodiments, the heteromeric multimer of the invention is at least a heterodimer, at least a heterotrimer, or at least a heterotetramer.

[0236] Multimers of the invention may be the result of hydrophobic, hydrophilic, ionic and/or covalent associations and/or may be indirectly linked by, for example, liposome formation. Thus, in one embodiment, multimers of the invention, such as, for example, homodimers or homotrimers, are formed when polypeptides of the invention contact one another in solution. In another embodiment, heteromultimers of the invention, such as, for example, heterotrimers or heterotetramers, are formed when polypeptides of the invention contact antibodies to the polypeptides of the invention (including antibodies to the heterologous polypeptide sequence in a fusion protein of the invention) in solution. In other embodiments, multimers of the invention are formed by covalent associations with and/or between the polypeptides of the invention. Such covalent associations may involve one or more amino acid residues contained in the polypeptide sequence (e.g., that recited in SEQ ID NO:Y, encoded by the portion of SEQ ID NO:X as defined in columns 8 and 9 of Table 2, and/or encoded by the cDNA contained in Clone ID NO:Z). In one instance, the covalent associations are cross-linking between cysteine residues located within the polypeptide sequences which interact in the native (i.e., naturally occurring) polypeptide. In another instance, the covalent associations are the consequence of chemical or recombinant manipulation. Alternatively, such covalent associations may involve one or more amino acid residues contained in the heterologous polypeptide sequence in a fusion protein. In one example, covalent associations are between the heterologous sequence contained in a fusion protein of the invention (see, e.g., U.S. Pat. No. 5,478,925). In a specific example, the covalent associations are between the heterologous sequence contained in a Fc fusion protein of the invention (as described herein). In another specific example, covalent associations of fusion proteins of the invention are between heterologous polypeptide sequence from another protein that is capable of forming covalently associated multimers, such as for example, osteoprotegerin (see, e.g., International Publication NO: WO 98/49305, the contents of which are herein incorporated by reference in its entirety). In another embodiment, two or more polypeptides of the invention are joined through peptide linkers. Examples include those peptide linkers described in U.S. Pat. No. 5,073,627 (hereby incorporated by reference). Proteins comprising multiple polypeptides of the invention separated by peptide linkers may be produced using conventional recombinant DNA technology.

[0237] Another method for preparing multimer polypeptides of the invention involves use of polypeptides of the invention fused to a leucine zipper or isoleucine zipper polypeptide sequence. Leucine zipper and isoleucine zipper domains are polypeptides that promote multimerization of the proteins in which they are found. Leucine zippers were originally identified in several DNA-binding proteins (Landschulz et al., Science 240:1759, (1988)), and have since been found in a variety of different proteins. Among the known leucine zippers are naturally occurring peptides and derivatives thereof that dimerize or trimerize. Examples of leucine zipper domains suitable for producing soluble multimeric proteins of the invention are those described in PCT application WO 94/10308, hereby incorporated by reference. Recombinant fusion proteins comprising a polypeptide of the invention fused to a polypeptide sequence that dimerizes or trimerizes in solution are expressed in suitable host cells, and the resulting soluble multimeric fusion protein is recovered from the culture supernatant using techniques known in the art.

[0238] Trimeric polypeptides of the invention may offer the advantage of enhanced biological activity. Preferred leucine zipper moieties and isoleucine moieties are those that preferentially form trimers. One example is a leucine zipper derived from lung surfactant protein D (SPD), as described in Hoppe et al. (FEBS Letters 344:191, (1994)) and in U.S. patent application Ser. No. 08/446,922, hereby incorporated by reference. Other peptides derived from naturally occurring trimeric proteins may be employed in preparing trimeric polypeptides of the invention.

[0239] In another example, proteins of the invention are associated by interactions between Flag® polypeptide sequence contained in fusion proteins of the invention containing Flag® polypeptide sequence. In a further embodiment, proteins of the invention are associated by interactions between heterologous polypeptide sequence contained in Flag® fusion proteins of the invention and anti-Flag® antibody.

[0240] The multimers of the invention may be generated using chemical techniques known in the art. For example, polypeptides desired to be contained in the multimers of the invention may be chemically cross-linked using linker molecules and linker molecule length optimization techniques known in the art (see, e.g., U.S. Pat. No. 5,478,925, which is herein incorporated by reference in its entirety). Additionally, multimers of the invention may be generated using techniques known in the art to form one or more inter-molecule cross-links between the cysteine residues located within the sequence of the polypeptides desired to be contained in the multimer (see, e.g., U.S. Pat. No. 5,478,925, which is herein incorporated by reference in its entirety). Further, polypeptides of the invention may be routinely modified by the addition of cysteine or biotin to the C-terminus or N-terminus of the polypeptide and techniques known in the art may be applied to generate multimers containing one or more of these modified polypeptides (see, e.g., U.S. Pat. No. 5,478,925, which is herein incorporated by reference in its entirety). Additionally, techniques known in the art may be applied to generate liposomes containing the polypeptide components desired to be contained in the multimer of the invention (see, e.g., U.S. Pat. No. 5,478,925, which is herein incorporated by reference in its entirety).

[0241] Alternatively, multimers of the invention may be generated using genetic engineering techniques known in the art. In one embodiment, polypeptides contained in multimers of the invention are produced recombinantly using fusion protein technology described herein or otherwise known in the art (see, e.g., U.S. Pat. No. 5,478,925, which is herein incorporated by reference in its entirety). In a specific embodiment, polynucleotides coding for a homodimer of the invention are generated by ligating a polynucleotide sequence encoding a polypeptide of the invention to a sequence encoding a linker polypeptide and then further to a synthetic polynucleotide encoding the translated product of the polypeptide in the reverse orientation from the original C-terminus to the N-terminus (lacking the leader sequence) (see, e.g., U.S. Pat. No. 5,478,925, which is herein incorporated by reference in its entirety). In another embodiment, recombinant techniques described herein or otherwise known in the art are applied to generate recombinant polypeptides of the invention which contain a transmembrane domain (or hydrophobic or signal peptide) and which can be incorporated by membrane reconstitution techniques into liposomes (see, e.g., U.S. Pat. No. 5,478,925, which is herein incorporated by reference in its entirety).

[0242] Antibodies

[0243] Further polypeptides of the invention relate to antibodies and T-cell antigen receptors (TCR) which immunospecifically bind a polypeptide, polypeptide fragment, or variant of the invention (e.g., a polypeptide or fragment or variant of the amino acid sequence of SEQ ID NO:Y or a polypeptide encoded by the cDNA contained in Clone ID NO:Z, and/or an epitope, of the present invention) as determined by immunoassays well known in the art for assaying specific antibody-antigen binding. Antibodies of the invention include, but are not limited to, polyclonal, monoclonal, multispecific, human, humanized or chimeric antibodies, single chain antibodies, Fab fragments, F(ab′) fragments, fragments produced by a Fab expression library, anti-idiotypic (anti-Id) antibodies (including, e.g., anti-Id antibodies to antibodies of the invention), intracellularly-made antibodies (i.e., intrabodies), and epitope-binding fragments of any of the above. The term “antibody,” as used herein, refers to immunoglobulin molecules and immunologically active portions of immunoglobulin molecules, i.e., molecules that contain an antigen binding site that immunospecifically binds an antigen. The immunoglobulin molecules of the invention can be of any type (e.g., IgG, IgE, IgM, IgD, IgA and IgY), class (e.g., IgG1, IgG2, IgG3, IgG4, IgA1 and IgA2) or subclass of immunoglobulin molecule. In preferred embodiments, the immunoglobulin molecules of the invention are IgGI. In other preferred embodiments, the immunoglobulin molecules of the invention are IgG4.

[0244] Most preferably the antibodies are human antigen-binding antibody fragments of the present invention and include, but are not limited to, Fab, Fab′ and F(ab′)2, Fd, single-chain Fvs (scFv), single-chain antibodies, disulfide-linked Fvs (sdFv) and fragments comprising either a VL or VH domain. Antigen-binding antibody fragments, including single-chain antibodies, may comprise the variable region(s) alone or in combination with the entirety or a portion of the following: hinge region, CH1, CH2, and CH3 domains. Also included in the invention are antigen-binding fragments also comprising any combination of variable region(s) with a hinge region, CH1, CH2, and CH3 domains. The antibodies of the invention may be from any animal origin including birds and mammals. Preferably, the antibodies are human, murine (e.g., mouse and rat), donkey, ship rabbit, goat, guinea pig, camel, horse, or chicken. As used herein, “human” antibodies include antibodies having the amino acid sequence of a human immunoglobulin and include antibodies isolated from human immunoglobulin libraries or from animals transgenic for one or more human immunoglobulin and that do not express endogenous immunoglobulins, as described infra and, for example in, U.S. Pat. No. 5,939,598 by Kucherlapati et al.

[0245] The antibodies of the present invention may be monospecific, bispecific, trispecific or of greater multispecificity. Multispecific antibodies may be specific for different epitopes of a polypeptide of the present invention or may be specific for both a polypeptide of the present invention as well as for a heterologous epitope, such as a heterologous polypeptide or solid support material. See, e.g., PCT publications WO 93/17715; WO 92/08802; WO 91/00360; WO 92/05793; Tutt, et al., J. Immunol. 147:60-69 (1991); U.S. Pat. Nos. 4,474,893; 4,714,681; 4,925,648; 5,573,920; 5,601,819; Kostelny et al., J. Immunol. 148:1547-1553 (1992).

[0246] Antibodies of the present invention may be described or specified in terms of the epitope(s) or portion(s) of a polypeptide of the present invention, which they recognize or specifically bind. The epitope(s) or polypeptide portion(s) may be specified as described herein, e.g., by N-terminal and C-terminal positions, or by size in contiguous amino acid residues, or listed in the Tables and Figures. Preferred epitopes of the invention include those shown in column 6 of Table 1A, as well as polynucleotides that encode these epitopes. Antibodies which specifically bind any epitope or polypeptide of the present invention may also be excluded. Therefore, the present invention includes antibodies that specifically bind polypeptides of the present invention, and allows for the exclusion of the same.

[0247] Antibodies of the present invention may also be described or specified in terms of their cross-reactivity. Antibodies that do not bind any other analog, ortholog, or homolog of a polypeptide of the present invention are included. Antibodies that bind polypeptides with at least 95%, at least 90%, at least 85%, at least 80%, at least 75%, at least 70%, at least 65%, at least 60%, at least 55%, and at least 50% identity (as calculated using methods known in the art and described herein) to a polypeptide of the present invention are also included in the present invention. In specific embodiments, antibodies of the present invention cross-react with murine, rat and/or rabbit homologs of human proteins and the corresponding epitopes thereof. Antibodies that do not bind polypeptides with less than 95%, less than 90%, less than 85%, less than 80%, less than 75%, less than 70%, less than 65%, less than 60%, less than 55%, and less than 50% identity (as calculated using methods known in the art and described herein) to a polypeptide of the present invention are also included in the present invention. In a specific embodiment, the above-described cross-reactivity is with respect to any single specific antigenic or immunogenic polypeptide, or combination(s) of 2, 3, 4, 5, or more of the specific antigenic and/or immunogenic polypeptides disclosed herein. Further included in the present invention are antibodies, which bind polypeptides encoded by polynucleotides, which hybridize to a polynucleotide of the present invention under stringent hybridization conditions (as described herein). Antibodies of the present invention may also be described or specified in terms of their binding affinity to a polypeptide of the invention. Preferred binding affinities include those with a dissociation constant or Kd less than 5×10⁻² M, 10⁻² M, 5×10⁻³ M, 10⁻³ M, 5×10⁻⁴ M, 10⁻⁴ M, 5×10⁻⁵ M, 10⁻⁵ M, 5×10⁻⁶ M, 10⁻⁶ M, 5×10⁻⁷ M, 10⁷ M, 5×10⁻⁸ M, 10⁻⁸ M, 5×10⁻⁹ M, 10⁻⁹ M, 5×10⁻¹⁰ M, 10⁻¹⁰ M, 5×10⁻¹¹ M, 10⁻¹¹ M, 5×10⁻¹² M, 10⁻¹² M, 5×10⁻¹³ M, 10⁻¹³ M, 5×10⁻¹⁴ M, 10⁻¹⁴ M, 5×10⁻¹⁵ M, or 10⁻¹⁵ M.

[0248] The invention also provides antibodies that competitively inhibit binding of an antibody to an epitope of the invention as determined by any method known in the art for determining competitive binding, for example, the immunoassays described herei-n. In preferred embodiments, the antibody competitively inhibits binding to the epitope by at least 95%, at least 90%, at least 85%, at least 80%, at least 75%, at least 70%, at least 60%, or at least 50%.

[0249] Antibodies of the present invention may act as agonists or antagonists of the polypeptides of the present invention. For example, the present invention includes antibodies, which disrupt the receptor/ligand interactions with the polypeptides of the invention either partially or fully. Preferably, antibodies of the present invention bind an antigenic epitope disclosed herein, or a portion thereof. The invention features both receptor-specific antibodies and ligand-specific antibodies. The invention also features receptor-specific antibodies, which do not prevent ligand binding but prevent receptor activation. Receptor activation (i.e., signaling) may be determined by techniques described herein or otherwise known in the art. For example, receptor activation can be determined by detecting the phosphorylation (e.g., tyrosine or serine/threonine) of the receptor or its substrate by immunoprecipitation followed by western blot analysis (for example, as described supra). In specific embodiments, antibodies are provided that inhibit ligand activity or receptor activity by at least 95%, at least 90%, at least 85%, at least 80%, at least 75%, at least 70%, at least 60%, or at least 50% of the activity in absence of the antibody.

[0250] The invention also features receptor-specific antibodies which both prevent ligand binding and receptor activation as well as antibodies that recognize the receptor-ligand complex, and, preferably, do not specifically recognize the unbound receptor or the unbound ligand. Likewise, included in the invention are neutralizing antibodies which bind the ligand and prevent binding of the ligand to the receptor, as well as antibodies which bind the ligand, thereby preventing receptor activation, but do not prevent the ligand from binding the receptor. Further included in the invention are antibodies, which activate the receptor. These antibodies may act as receptor agonists, i.e., potentiate or activate either all or a subset of the biological activities of the ligand-mediated receptor activation, for example, by inducing dimerization of the receptor. The antibodies may be specified as agonists, antagonists or inverse agonists for biological activities comprising the specific biological activities of the peptides of the invention disclosed herein. The above antibody agonists can be made using methods known in the art. See, e.g., PCT publication WO 96/40281; U.S. Pat. No. 5,811,097; Deng et al., Blood 92(6):1981-1988 (1998); Chen et al., Cancer Res. 58(16):3668-3678 (1998); Harrop et al., J. Immunol. 161(4):1786-1794 (1998); Zhu et al., Cancer Res. 58(15):3209-3214 (1998); Yoon et al., J. Immunol. 160(7):3170-3179 (1998); Prat et al., J. Cell. Sci. l 1(Pt2):237-247 (1998); Pitard et al., J. Immunol. Methods 205(2):177-190 (1997); Liautard et al., Cytokine 9(4):233-241 (1997); Carlson et al., J. Biol. Chem. 272(17):11295-11301 (1997); Taryman et al., Neuron 14(4):755-762 (1995); Muller et al., Structure 6(9):1153-1167 (1998); Bartunek et al., Cytokine 8(l):14-20 (1996) (which are all incorporated by reference herein in their entireties).

[0251] Antibodies of the present invention may be used, for example, to purify, detect, and target the polypeptides of the present invention, including both in vitro and in vivo diagnostic and therapeutic methods. For example, the antibodies have utility in immunoassays for qualitatively and quantitatively measuring levels of the polypeptides of the present invention in biological samples. See, e.g., Harlow et al., Antibodies: A Laboratory Manual, (Cold Spring Harbor Laboratory Press, 2nd ed. 1988); incorporated by reference herein in its entirety.

[0252] As discussed in more detail below, the antibodies of the present invention may be used either alone or in combination with other compositions. The antibodies may further be recombinantly fused to a heterologous polypeptide at the N- or C-terminus or chemically conjugated (including covalent and non-covalent conjugations) to polypeptides or other compositions. For example, antibodies of the present invention may be recombinantly fused or conjugated to molecules useful as labels in detection assays and effector molecules such as heterologous polypeptides, drugs, radionuclides, or toxins. See, e.g., PCT publications WO 92/08495; WO 91/14438; WO 89/12624; U.S. Pat. No. 5,314,995; and EP 396,387; the disclosures of which are incorporated herein by reference in their entireties.

[0253] The antibodies of the invention include derivatives that are modified, i.e., by the covalent attachment of any type of molecule to the antibody such that covalent attachment does not prevent the antibody from generating an anti-idiotypic response. For example, but not by way of limitation, the antibody derivatives include antibodies that have been modified, e.g., by glycosylation, acetylation, pegylation, phosphylation, amidation, derivatization by known protecting/blocking groups, proteolytic cleavage, linkage to a cellular ligand or other protein, etc. Any of numerous chemical modifications may be carried out by known techniques, including, but not limited to specific chemical cleavage, acetylation, formylation, metabolic synthesis of tunicamycin, etc. Additionally, the derivative may contain one or more non-classical amino acids.

[0254] The antibodies of the present invention may be generated by any suitable method known in the art. Polyclonal antibodies to an antigen-of-interest can be produced by various procedures well known in the art. For example, a polypeptide of the invention can be administered to various host animals including, but not limited to, rabbits, mice, rats, etc. to induce the production of sera containing polyclonal antibodies specific for the antigen. Various adjuvants may be used to increase the immunological response, depending on the host species, and include but are not limited to, Freund's (complete and incomplete), mineral gels such as aluminum hydroxide, surface active substances such as lysolecithin, pluronic polyols, polyanions, peptides, oil emulsions, keyhole limpet hemocyanins, dinitrophenol, and potentially useful human adjuvants such as BCG (bacille Calmette-Guerin) and corynebacterium parvum. Such adjuvants are also well known in the art.

[0255] Monoclonal antibodies can be prepared using a wide variety of techniques known in the art including the use of hybridoma, recombinant, and phage display technologies, or a combination thereof. For example, monoclonal antibodies can be produced using hybridoma techniques including those known in the art and taught, for example, in Harlow et al., Antibodies: A Laboratory Manual, (Cold Spring Harbor Laboratory Press, 2nd ed. 1988); Hammerling, et al., in: Monoclonal Antibodies and T-Cell Hybridomas 563-681 (Elsevier, N.Y., 1981) (said references incorporated by reference in their entireties). The term “monoclonal antibody” as used herein is not limited to antibodies produced through hybridoma technology. The term “monoclonal antibody” refers to an antibody that is derived from a single clone, including any eukaryotic, prokaryotic, or phage clone, and not the method by which it is produced.

[0256] Methods for producing and screening for specific antibodies using hybridoma technology are routine and well known in the art and are discussed in detail in the Examples. In a non-limiting example, mice can be immunized with a polypeptide of the invention or a cell expressing such peptide. Once an immune response is detected, e.g., antibodies specific for the antigen are detected in the mouse serum, the mouse spleen is harvested and splenocytes isolated. The splenocytes are then fused by well known techniques to any suitable myeloma cells, for example cells from cell line SP20 available from the ATCC. Hybridomas are selected and cloned by limited dilution. The hybridoma clones are then assayed by methods known in the art for cells that secrete antibodies capable of binding a polypeptide of the invention. Ascites fluid, which generally contains high levels of antibodies, can be generated by immunizing mice with positive hybridoma clones.

[0257] Accordingly, the present invention provides methods of generating monoclonal antibodies, as well as antibodies produced by the method comprising culturing a hybridoma cell secreting an antibody of the invention wherein, preferably, the hybridoma is generated by fusing splenocytes isolated from a mouse immunized with an antigen of the invention with myeloma cells and then screening the hybridomas resulting from the fusion for hybridoma clones that secrete an antibody able to bind a polypeptide of the invention.

[0258] Another well known method for producing both polyclonal and monoclonal human B cell lines is transformation using Epstein Barr Virus (EBV). Protocols for generating EBV-transformed B cell lines are commonly known in the art, such as, for example, the protocol outlined in Chapter 7.22 of Current Protocols in Immunology, Coligan et al., Eds., 1994, John Wiley & Sons, NY, which is hereby incorporated in its entirety by reference herein. The source of B cells for transformation is commonly human peripheral blood, but B cells for transformation may also be derived from other sources including, but not limited to, lymph nodes, tonsil, spleen, tumor tissue, and infected tissues. Tissues are generally made into single cell suspensions prior to EBV transformation. Additionally, steps may be taken to either physically remove or inactivate T cells (e.g., by treatment with cyclosporin A) in B cell-containing samples, because T cells from individuals seropositive for anti-EBV antibodies can suppress B cell immortalization by EBV.

[0259] In general, the sample containing human B cells is innoculated with EBV, and cultured for 3-4 weeks. A typical source of EBV is the culture supernatant of the B95-8 cell line (ATCC #VR-1492). Physical signs of EBV transformation can generally be seen towards the end of the 3-4 week culture period. By phase-contrast microscopy, transformed cells may appear large, clear, hairy and tend to aggregate in tight clusters of cells. Initially, EBV lines are generally polyclonal. However, over prolonged periods of cell cultures, EBV lines may become monoclonal or polyclonal as a result of the selective outgrowth of particular B cell clones. Alternatively, polyclonal EBV transformed lines may be subcloned (e.g., by limiting dilution culture) or fused with a suitable fusion partner and plated at limiting dilution to obtain monoclonal B cell lines. Suitable fusion partners for EBV transformed cell lines include mouse myeloma cell lines (e.g., SP2/0,×63-Ag8.653), heteromyeloma cell lines (human x mouse; e.g, SPAM-8, SBC-H20, and CB-F7), and human cell lines (e.g., GM 1500, SKO-007, RPMI 8226, and KR-4). Thus, the present invention also provides a method of generating polyclonal or monoclonal human antibodies against polypeptides of the invention or fragments thereof, comprising EBV-transformation of human B cells.

[0260] Antibody fragments, which recognize specific epitopes may be generated by known techniques. For example, Fab and F(ab′)2 fragments of the invention may be produced by proteolytic cleavage of immunoglobulin molecules, using enzymes such as papain (to produce Fab fragments) or pepsin (to produce F(ab′)2 fragments). F(ab′)2 fragments contain the variable region, the light chain constant region and the CH1 domain of the heavy chain. For example, the antibodies of the present invention can also be generated using various phage display methods known in the art and as discussed in detail in the Examples (e.g., Example 10). In phage display methods, functional antibody domains are displayed on the surface of phage particles, which carry the polynucleotide sequences encoding them. In a particular embodiment, such phage can be utilized to display antigen binding domains expressed from a repertoire or combinatorial antibody library (e.g., human or murine). Phage expressing an antigen binding domain that binds the antigen of interest can be selected or identified with antigen, e.g., using labeled antigen or antigen bound or captured to a solid surface or bead. Phage used in these methods are typically filamentous phage including fd and M13 binding domains expressed from phage with Fab, Fv or disulfide stabilized Fv antibody domains recombinantly fused to either the phage gene III or gene VIII protein. Examples of phage display methods that can be used to make the antibodies of the present invention include those disclosed in Brinkman et al., J. Immunol. Methods 182:41-50 (1995); Ames et al., J. Immunol. Methods 184:177-186 (1995); Kettleborough et al., Eur. J. Immunol. 24:952-958 (1994); Persic et al., Gene 187 9-18 (1997); Burton et al., Advances in Immunology 57:191-280 (1994); PCT application No. PCT/GB91/01134; PCT publications WO 90/02809; WO 91/10737; WO 92/01047; WO 92/18619; WO 93/11236; WO 95/15982; WO 95/20401; and U.S. Pat. Nos. 5,698,426; 5,223,409; 5,403,484; 5,580,717; 5,427,908; 5,750,753; 5,821,047; 5,571,698; 5,427,908; 5,516,637; 5,780,225; 5,658,727; 5,733,743 and 5,969,108; each of which is incorporated herein by reference in its entirety.

[0261] As described in the above references, after phage selection, the antibody coding regions from the phage can be isolated and used to generate whole antibodies, including human antibodies, or any other desired antigen binding fragment, and expressed in any desired host, including mammalian cells, insect cells, plant cells, yeast, and bacteria, e.g., as described in detail below. For example, techniques to recombinantly produce Fab, Fab′ and F(ab′)2 fragments can also be employed using methods known in the art such as those disclosed in PCT publication WO 92/22324; Mullinax et al., BioTechniques 12(6):864-869 (1992); and Sawai et al., AJRI 34:26-34 (1995); and Better et al., Science 240:1041-1043 (1988) (said references incorporated by reference in their entireties).

[0262] Examples of techniques which can be used to produce single-chain Fvs and antibodies include those described in U.S. Pat. Nos. 4,946,778 and 5,258,498; Huston et al., Methods in Enzymology 203:46-88 (1991); Shu et al., PNAS 90:7995-7999 (1993); and Skerra et al., Science 240:1038-1040 (1988). For some uses, including in vivo use of antibodies in humans and in vitro detection assays, it may be preferable to use chimeric, humanized, or human antibodies. A chimeric antibody is a molecule in which different portions of the antibody are derived from different animal species, such as antibodies having a variable region derived from a murine monoclonal antibody and a human immunoglobulin constant region. Methods for producing chimeric antibodies are known in the art. See e.g., Morrison, Science 229:1202 (1985); Oi et al., BioTechniques 4:214 (1986); Gillies et al., (1989) J. Immunol. Methods 125:191-202; U.S. Pat. Nos. 5,807,715; 4,816,567; and 4,816397, which are incorporated herein by reference in their entirety. Humanized antibodies are antibody molecules from non-human species antibody that binds the desired antigen having one or more complementarity determining regions (CDRs) from the non-human species and a framework regions from a human immunoglobulin molecule. Often, framework residues in the human framework regions will be substituted with the corresponding residue from the CDR donor antibody to alter, preferably improve, antigen binding. These framework substitutions are identified by methods well known in the art, e.g., by modeling of the interactions of the CDR and framework residues to identify framework residues important for antigen binding and sequence comparison to identify unusual framework residues at particular positions. (See, e.g., Queen et al., U.S. Pat. No. 5,585,089; Riechmann et al., Nature 332:323 (1988), which are incorporated herein by reference in their entireties.) Antibodies can be humanized using a variety of techniques known in the art including, for example, CDR-grafting (EP 239,400; PCT publication WO 91/09967; U.S. Pat. Nos. 5,225,539; 5,530,101; and 5,585,089), veneering or resurfacing (EP 592,106; EP 519,596; Padlan, Molecular Immunology 28(4/5):489-498 (1991); Studnicka et al., Protein Engineering 7(6):805-814 (1994); Roguska. et al., PNAS 91:969-973 (1994)), and chain shuffling (U.S. Pat. No. 5,565,332).

[0263] Completely human antibodies are particularly desirable for therapeutic treatment of human patients. Human antibodies can be made by a variety of methods known in the art including phage display methods described above using antibody libraries derived from human immunoglobulin sequences. See also, U.S. Pat. Nos. 4,444,887 and 4,716,111; and PCT publications WO 98/46645, WO 98/50433, WO 98/24893, WO 98/16654, WO 96/34096, WO 96/33735, and WO 91/10741; each of which is incorporated herein by reference in its entirety.

[0264] Human antibodies can also be produced using transgenic mice which are incapable of expressing functional endogenous immunoglobulins, but which can express human immunoglobulin genes. For example, the human heavy and light chain immunoglobulin gene complexes may be introduced randomly or by homologous recombination into mouse embryonic stem cells. Alternatively, the human variable region, constant region, and diversity region may be introduced into mouse embryonic stem cells in addition to the human heavy and light chain genes. The mouse heavy and light chain immunoglobulin genes may be rendered non-functional separately or simultaneously with the introduction of human immunoglobulin loci by homologous recombination. In particular, homozygous deletion of the JH region prevents endogenous antibody production. The modified embryonic stem cells are expanded and microinjected into blastocysts to produce chimeric mice. The chimeric mice are then bred to produce homozygous offspring, which express human antibodies. The transgenic mice are immunized in the normal fashion with a selected antigen, e.g., all or a portion of a polypeptide of the invention. Monoclonal antibodies directed against the antigen can be obtained from the immunized, transgenic mice using conventional hybridoma technology. The human immunoglobulin transgenes harbored by the transgenic mice rearrange during B cell differentiation, and subsequently undergo class switching and somatic mutation. Thus, using such a technique, it is possible to produce therapeutically useful IgG, IgA, IgM and IgE antibodies. For an overview of this technology for producing human antibodies, see Lonberg and Huszar, Int. Rev. Immunol. 13:65-93 (1995). For a detailed discussion of this technology for producing human antibodies and human monoclonal antibodies and protocols for producing such antibodies, see, e.g., PCT publications WO 98/24893; WO 92/01047; WO 96/34096; WO 96/33735; European Patent No. 0 598 877; U.S. Pat. Nos. 5,413,923; 5,625,126; 5,633,425; 5,569,825; 5,661,016; 5,545,806; 5,814,318; 5,885,793; 5,916,771; 5,939,598; 6,075,181 and 6,114,598, which are incorporated by reference herein in their entirety. In addition, companies such as Abgenix, Inc. (Freemont, Calif.) and Genpharm (San Jose, Calif.) can be engaged to provide human antibodies directed against a selected antigen using technology similar to that described above.

[0265] Completely human antibodies, which recognize a selected epitope can be generated using a technique referred to as “guided selection.” In this approach a selected non-human monoclonal antibody, e.g., a mouse antibody, is used to guide the selection of a completely human antibody recognizing the same epitope. (Jespers et al., Bio/technology 12:899-903 (1988)).

[0266] Further, antibodies to the polypeptides of the invention can, in turn, be utilized to generate anti-idiotype antibodies that “mimic” polypeptides of the invention using techniques well known to those skilled in the art. (See, e.g., Greenspan & Bona, FASEB J. 7(5):437-444; (1989) and Nissinoff, J. Immunol. 147(8):2429-2438 (1991)). For example, antibodies which bind to and competitively inhibit polypeptide multimerization and/or binding of a polypeptide of the invention to a ligand can be used to generate anti-idiotypes that “mimic” the polypeptide multimerization and/or binding domain and, as a consequence, bind to and neutralize polypeptide and/or its ligand. Such neutralizing anti-idiotypes or Fab fragments of such anti-idiotypes can be used in therapeutic regimens to neutralize polypeptide ligand/receptor. For example, such anti-idiotypic antibodies can be used to bind a polypeptide of the invention and/or to bind its ligand(s)/receptor(s), and thereby block its biological activity. Alternatively, antibodies, which bind to and enhance polypeptide multimerization and/or binding, and/or receptor/ligand multimerization, binding and/or signaling can be used to generate anti-idiotypes that function as agonists of a polypeptide of the invention and/or its ligand/receptor. Such agonistic anti-idiotypes or Fab fragments of such anti-idiotypes can be used in therapeutic regimens as agonists of the polypeptides of the invention or its ligand(s)/receptor(s). For example, such anti-idiotypic antibodies can be used to bind a polypeptide of the invention and/or to bind its ligand(s)/receptor(s), and thereby promote or enhance its biological activity.

[0267] Intrabodies of the invention can be produced using methods known in the art, such as those disclosed and reviewed in Chen et al., Hum. Gene Ther. 5:595-601 (1994); Marasco, W. A., Gene Ther. 4:11-15 (1997); Rondon and Marasco, Annu. Rev. Microbiol. 51:257-283 (1997); Proba et al., J. Mol. Biol. 275:245-253 (1998); Cohen et al., Oncogene 17:2445-2456 (1998); Ohage and Steipe, J. Mol. Biol. 291:1119-1128 (1999); Ohage et al., J. Mol. Biol. 291:1129-1134 (1999); Wirtz and Steipe, Protein Sci. 8:2245-2250 (1999); Zhu et al., J. Immunol. Methods 231:207-222 (1999); and references cited therein.

[0268] Polynucleotides Encoding Antibodies

[0269] The invention further provides polynucleotides comprising a nucleotide sequence encoding an antibody of the invention and fragments thereof. The invention also encompasses polynucleotides that hybridize under stringent or alternatively, under lower stringency hybridization conditions, e.g., as defined supra, to polynucleotides that encode an antibody, preferably, that specifically binds to a polypeptide of the invention, preferably, an antibody that binds to a polypeptide having the amino acid sequence of SEQ ID NO:Y, to a polypeptide encoded by a portion of SEQ ID NO:X as defined in columns 8 and 9 of Table 2, and/or to a polypeptide encoded by the cDNA contained in Clone ID NO:Z.

[0270] The polynucleotides may be obtained, and the nucleotide sequence of the polynucleotides determined, by any method known in the art. For example, if the nucleotide sequence of the antibody is known, a polynucleotide encoding the antibody may be assembled from chemically synthesized oligonucleotides (e.g., as described in Kutmeier et al., BioTechniques 17:242 (1994)), which, briefly, involves the synthesis of overlapping oligonucleotides containing portions of the sequence encoding the antibody, annealing and ligating of those oligonucleotides, and then amplification of the ligated oligonucleotides by PCR.

[0271] Alternatively, a polynucleotide encoding an antibody may be generated from nucleic acid from a suitable source. If a clone containing a nucleic acid encoding a particular antibody is not available, but the sequence of the antibody molecule is known, a nucleic acid encoding the immunoglobulin may be chemically synthesized or obtained from a suitable source (e.g., an antibody cDNA library, or a cDNA library generated from, or nucleic acid, preferably poly A+ RNA, isolated from, any tissue or cells expressing the antibody, such as hybridoma cells selected to express an antibody of the invention) by PCR amplification using synthetic primers hybridizable to the 3′ and 5′ ends of the sequence or by cloning using an oligonucleotide probe specific for the particular gene sequence to identify, e.g., a cDNA clone from a cDNA library that encodes the antibody. Amplified nucleic acids generated by PCR may then be cloned into replicable cloning vectors using any method well known in the art.

[0272] Once the nucleotide sequence and corresponding amino acid sequence of the antibody is determined, the nucleotide sequence of the antibody may be manipulated using methods well known in the art for the manipulation of nucleotide sequences, e.g., recombinant DNA techniques, site directed mutagenesis, PCR, etc. (see, for example, the techniques described in Sambrook et al., 1990, Molecular Cloning, A Laboratory Manual, 2d Ed., Cold Spring Harbor Laboratory, Cold Spring Harbor, N.Y. and Ausubel et al., eds., 1998, Current Protocols in Molecular Biology, John Wiley & Sons, NY, which are both incorporated by reference herein in their entireties), to generate antibodies having a different amino acid sequence, for example to create amino acid substitutions, deletions, and/or insertions.

[0273] In a specific embodiment, the amino acid sequence of the heavy and/or light chain variable domains may be inspected to identify the sequences of the complementarity determining regions (CDRs) by methods that are well know in the art, e.g., by comparison to known amino acid sequences of other heavy and light chain variable regions to determine the regions of sequence hypervariability. Using routine recombinant DNA techniques, one or more of the CDRs may be inserted within framework regions, e.g., into human framework regions to humanize a non-human antibody, as described supra. The framework regions may be naturally occurring or consensus framework regions, and preferably human framework regions (see, e.g., Chothia et al., J. Mol. Biol. 278: 457-479 (1998) for a listing of human framework regions). Preferably, the polynucleotide generated by the combination of the framework regions and CDRs encodes an antibody that specifically binds a polypeptide of the invention. Preferably, as discussed supra, one or more amino acid substitutions may be made within the framework regions, and, preferably, the amino acid substitutions improve binding of the antibody to its antigen. Additionally, such methods may be used to make amino acid substitutions or deletions of one or more variable region cysteine residues participating in an intrachain disulfide bond to generate antibody molecules lacking one or more intrachain disulfide bonds. Other alterations to the polynucleotide are encompassed by the present invention and within the skill of the art.

[0274] In addition, techniques developed for the production of “chimeric antibodies” (Morrison et al., Proc. Natl. Acad. Sci. 81:851-855 (1984); Neuberger et al., Nature 312:604-608 (1984); Takeda et al., Nature 314:452-454 (1985)) by splicing genes from a mouse antibody molecule of appropriate antigen specificity together with genes from a human antibody molecule of appropriate biological activity can be used. As described supra, a chimeric antibody is a molecule in which different portions are derived from different animal species, such as those having a variable region derived from a murine mAb and a human immunoglobulin constant region, e.g., humanized antibodies.

[0275] Alternatively, techniques described for the production of single chain antibodies (U.S. Pat. No. 4,946,778; Bird, Science 242:423-42 (1988); Huston et al., Proc. Natl. Acad. Sci. USA 85:5879-5883 (1988); and Ward et al., Nature 334:544-54 (1989)) can be adapted to produce single chain antibodies. Single chain antibodies are formed by linking the heavy and light chain fragments of the Fv region via an amino acid bridge, resulting in a single chain polypeptide. Techniques for the assembly of functional Fv fragments in E. coli may also be used (Skerra et al., Science 242:1038-1041 (1988)).

[0276] Methods of Producing Antibodies

[0277] The antibodies of the invention can be produced by any method known in the art for the synthesis of antibodies, in particular, by chemical synthesis or preferably, by recombinant expression techniques. Methods of producing antibodies include, but are not limited to, hybridoma technology, EBV transformation, and other methods discussed herein as well as through the use recombinant DNA technology, as discussed below.

[0278] Recombinant expression of an antibody of the invention, or fragment, derivative or analog thereof, (e.g., a heavy or light chain of an antibody of the invention or a single chain antibody of the invention), requires construction of an expression vector containing a polynucleotide that encodes the antibody. Once a polynucleotide encoding an antibody molecule or a heavy or light chain of an antibody, or portion thereof (preferably containing the heavy or light chain variable domain), of the invention has been obtained, the vector for the production of the antibody molecule may be produced by recombinant DNA technology using techniques well known in the art. Thus, methods for preparing a protein by expressing a polynucleotide containing an antibody encoding nucleotide sequence are described herein. Methods which are well known to those skilled in the art can be used to construct expression vectors containing antibody coding sequences and appropriate transcriptional and translational control signals. These methods include, for example, in vitro recombinant DNA techniques, synthetic techniques, and in vivo genetic recombination. The invention, thus, provides replicable vectors comprising a nucleotide sequence encoding an antibody molecule of the invention, or a heavy or light chain thereof, or a heavy or light chain variable domain, operably linked to a promoter. Such vectors may include the nucleotide sequence encoding the constant region of the antibody molecule (see, e.g., PCT Publication WO 86/05807; PCT Publication WO 89/01036; and U.S. Pat. No. 5,122,464) and the variable domain of the antibody may be cloned into such a vector for expression of the entire heavy or light chain.

[0279] The expression vector is transferred to a host cell by conventional techniques and the transfected cells are then cultured by conventional techniques to produce an antibody of the invention. Thus, the invention includes host cells containing a polynucleotide encoding an antibody of the invention, or a heavy or light chain thereof, or a single chain antibody of the invention, operably linked to a heterologous promoter. In preferred embodiments for the expression of double-chained antibodies, vectors encoding both the heavy and light chains may be co-expressed in the host cell for expression of the entire immunoglobulin molecule, as detailed below.

[0280] A variety of host-expression vector systems may be utilized to express the antibody molecules of the invention. Such host-expression systems represent vehicles by which the coding sequences of interest may be produced and subsequently purified, but also represent cells which may, when transformed or transfected with the appropriate nucleotide coding sequences, express an antibody molecule of the invention in situ. These include but are not limited to microorganisms such as bacteria (e.g., E. coli, B. subtilis) transformed with recombinant bacteriophage DNA, plasmid DNA or cosmid DNA expression vectors containing antibody coding sequences; yeast (e.g., Saccharomyces, Pichia) transformed with recombinant yeast expression vectors containing antibody coding sequences; insect cell systems infected with recombinant virus expression vectors (e.g., baculovirus) containing antibody coding sequences; plant cell systems infected with recombinant virus expression vectors (e.g., cauliflower mosaic virus, CaMV; tobacco mosaic virus, TMV) or transformed with recombinant plasmid expression vectors (e.g., Ti plasmid) containing antibody coding sequences; or mammalian cell systems (e.g., COS, CHO, BHK, 293, 3T3 cells) harboring recombinant expression constructs containing promoters derived from the genome of mammalian cells (e.g., metallothionein promoter) or from mammalian viruses (e.g., the adenovirus late promoter; the vaccinia virus 7.5K promoter). Preferably, bacterial cells such as Escherichia coli, and more preferably, eukaryotic cells, especially for the expression of whole recombinant antibody molecule, are used for the expression of a recombinant antibody molecule. For example, mammalian cells such as Chinese hamster ovary cells (CHO), in conjunction with a vector such as the major intermediate early gene promoter element from human cytomegalovirus is an effective expression system for antibodies (Foecking et al., Gene 45:101 (1986); Cockett et al., Bio/Technology 8:2 (1990)).

[0281] In bacterial systems, a number of expression vectors may be advantageously selected depending upon the use intended for the antibody molecule being expressed. For example, when a large quantity of such a protein is to be produced, for the generation of pharmaceutical compositions of an antibody molecule, vectors which direct the expression of high levels of fusion protein products that are readily purified may be desirable. Such vectors include, but are not limited, to the E. coli expression vector pUR278 (Ruther et al., EMBO J. 2:1791 (1983)), in which the antibody coding sequence may be ligated individually into the vector in frame with the lac Z coding region so that a fusion protein is produced; pIN vectors (Inouye & Inouye, Nucleic Acids Res. 13:3101-3109 (1985); Van Heeke & Schuster, J. Biol. Chem. 24:5503-5509 (1989)); and the like. pGEX vectors may also be used to express foreign polypeptides as fusion proteins with glutathione S-transferase (GST). In general, such fusion proteins are soluble and can easily be purified from lysed cells by adsorption and binding to matrix glutathione-agarose beads followed by elution in the presence of free glutathione. The pGEX vectors are designed to include thrombin or factor Xa protease cleavage sites so that the cloned target gene product can be released from the GST moiety.

[0282] In an insect system, Autographa californica nuclear polyhedrosis virus (AcNPV) is used as a vector to express foreign genes. The virus grows in Spodoptera frugiperda cells. The antibody coding sequence may be cloned individually into non-essential regions (for example the polyhedrin gene) of the virus and placed under control of an AcNPV promoter (for example the polyhedrin promoter).

[0283] In mammalian host cells, a number of viral-based expression systems may be utilized. In cases where an adenovirus is used as an expression vector, the antibody coding sequence of interest may be ligated to an adenovirus transcription/translation control complex, e.g., the late promoter and tripartite leader sequence. This chimeric gene may then be inserted in the adenovirus genome by in vitro or in vivo recombination. Insertion in a non-essential region of the viral genome (e.g., region E1 or E3) will result in a recombinant virus that is viable and capable of expressing the antibody molecule in infected hosts. (e.g., see Logan & Shenk, Proc. Natl. Acad. Sci. USA 81:355-359 (1984)). Specific initiation signals may also be required for efficient translation of inserted antibody coding sequences. These signals include the ATG initiation codon and adjacent sequences. Furthermore, the initiation codon must be in phase with the reading frame of the desired coding sequence to ensure translation of the entire insert. These exogenous translational control signals and initiation codons can be of a variety of origins, both natural and synthetic. The efficiency of expression may be enhanced by the inclusion of appropriate transcription enhancer elements, transcription terminators, etc. (see Bittner et al., Methods in Enzymol. 153:51-544 (1987)).

[0284] In addition, a host cell strain may be chosen, which modulates the expression of the inserted sequences, or modifies and processes the gene product in the specific fashion desired. Such modifications (e.g., glycosylation) and processing (e.g., cleavage) of protein products may be important for the function of the protein. Different host cells have characteristic and specific mechanisms for the post-translational processing and modification of proteins and gene products. Appropriate cell lines or host systems can be chosen to ensure the correct modification and processing of the foreign protein expressed. To this end, eukaryotic host cells, which possess the cellular machinery for proper processing of the primary transcript, glycosylation, and phosphorylation of the gene product may be used. Such mammalian host cells include but are not limited to CHO, VERY, BHK, Hela, COS, MDCK, 293, 3T3, W138, and in particular, breast cancer cell lines such as, for example, BT483, Hs578T, HTB2, BT20 and T47D, and normal mammary gland cell line such as, for example, CRL7030 and Hs578Bst.

[0285] For long-term, high-yield production of recombinant proteins, stable expression is preferred. For example, cell lines, which stably express the antibody molecule may be engineered. Rather than using expression vectors which contain viral origins of replication, host cells can be transformed with DNA controlled by appropriate expression control elements (e.g., promoter, enhancer, sequences, transcription terminators, polyadenylation sites, etc.), and a selectable marker. Following the introduction of the foreign DNA, engineered cells may be allowed to grow for 1-2 days in an enriched media, and then are switched to a selective media. The selectable marker in the recombinant plasmid confers resistance to the selection and allows cells to stably integrate the plasmid into their chromosomes and grow to form foci which in turn can be cloned and expanded into cell lines. This method may advantageously be used to engineer cell lines, which express the antibody molecule. Such engineered cell lines may be particularly useful in screening and evaluation of compounds that interact directly or indirectly with the antibody molecule.

[0286] A number of selection systems may be used, including but not limited to the herpes simplex virus thymidine kinase (Wigler et al., Cell 11:223 (1977)), hypoxanthine-guanine phosphoribosyltransferase (Szybalska & Szybalski, Proc. Natl. Acad. Sci. USA 48:202 (1992)), and adenine phosphoribosyltransferase (Lowy et al., Cell 22:817 (1980)) genes can be employed in tk-, hgprt- or aprt- cells, respectively. Also, antimetabolite resistance can be used as the basis of selection for the following genes: dhfr, which confers resistance to methotrexate (Wigler et al., Natl. Acad. Sci. USA 77:357 (1980); O'Hare et al., Proc. Natl. Acad. Sci. USA 78:1527 (1981)); gpt, which confers resistance to mycophenolic acid (Mulligan & Berg, Proc. Natl. Acad. Sci. USA 78:2072 (1981)); neo, which confers resistance to the aminoglycoside G-418 Clinical Pharmacy 12:488-505; Wu and Wu, Biotherapy 3:87-95 (1991); Tolstoshev, Ann. Rev. Pharmacol. Toxicol. 32:573-596 (1993); Mulligan, Science 260:926-932 (1993); and Morgan and Anderson, Ann. Rev. Biochem. 62:191-217 (1993); TIB TECH 11(5):155-215 (1993)); and hygro, which confers resistance to hygromycin (Santerre et al., Gene 30:147 (1984)). Methods commonly known in the art of recombinant DNA technology may be routinely applied to select the desired recombinant clone, and such methods are described, for example, in Ausubel et al. (eds.), Current Protocols in Molecular Biology, John Wiley & Sons, NY (1993); Kriegler, Gene Transfer and Expression, A Laboratory Manual, Stockton Press, NY (1990); and in Chapters 12 and 13, Dracopoli et al. (eds), Current Protocols in Human Genetics, John Wiley & Sons, NY (1994); Colberre-Garapin et al., J. Mol. Biol. 150:1 (1981), which are incorporated by reference herein in their entireties.

[0287] The expression levels of an antibody molecule can be increased by vector amplification (for a review, see Bebbington and Hentschel, The use of vectors based on gene amplification for the expression of cloned genes in mammalian cells in DNA cloning, Vol.3. (Academic Press, New York, 1987)). When a marker in the vector system expressing antibody is amplifiable, increase in the level of inhibitor present in culture of host cell will increase the number of copies of the marker gene. Since the amplified region is associated with the antibody gene, production of the antibody will also increase (Crouse et al., Mol. Cell. Biol. 3:257 (1983)).

[0288] Vectors which use glutamine synthase (GS) or DHFR as the selectable markers can be amplified in the presence of the drugs methionine sulphoximine or methotrexate, respectively. An advantage of glutamine synthase based vectors are the availabilty of cell lines (e.g., the murine myeloma cell line, NSO) which are glutamine synthase negative. Glutamine synthase expression systems can also function in glutamine synthase expressing cells (e.g., Chinese Hamster Ovary (CHO) cells) by providing additional inhibitor to prevent the functioning of the endogenous gene. A glutamine synthase expression system and components thereof are detailed in PCT publications: WO87/04462; WO86/05807; WO89/01036; WO89/10404; and WO91/06657 which are incorporated in their entireties by reference herein. Additionally, glutamine synthase expression vectors that may be used according to the present invention are commercially available from suplliers, including, for example Lonza Biologics, Inc. (Portsmouth, N.H.). Expression and production of monoclonal antibodies using a GS expression system in murine myeloma cells is described in Bebbington et al., Bio/technology 10:169(1992) and in Biblia and Robinson Biotechnol. Prog. 11:1 (1995) which are incorporated in their entirities by reference herein.

[0289] The host cell may be co-transfected with two expression vectors of the invention, the first vector encoding a heavy chain derived polypeptide and the second vector encoding a light chain derived polypeptide. The two vectors may contain identical selectable markers which enable equal expression of heavy and light chain polypeptides. Alternatively, a single vector may be used which encodes, and is capable of expressing, both heavy and light chain polypeptides. In such situations, the light chain should be placed before the heavy chain to avoid an excess of toxic free heavy chain (Proudfoot, Nature 322:52 (1986); Kohler, Proc. Natl. Acad. Sci. USA 77:2197 (1980)). The coding sequences for the heavy and light chains may comprise cDNA or genomic DNA.

[0290] Once an antibody molecule of the invention has been produced by an animal, chemically synthesized, or recombinantly expressed, it may be purified by any method known in the art for purification of an immunoglobulin molecule, for example, by chromatography (e.g., ion exchange, affinity, particularly by affinity for the specific antigen after Protein A, and sizing column chromatography), centrifugation, differential solubility, or by any other standard technique for the purification of proteins. In addition, the antibodies of the present invention or fragments thereof can be fused to heterologous polypeptide sequences described herein or otherwise known in the art, to facilitate purification.

[0291] The present invention encompasses antibodies recombinantly fused or chemically conjugated (including both covalently and non-covalently conjugations) to a polypeptide (or portion thereof, preferably at least 10, 20, 30, 40, 50, 60, 70, 80, 90 or 100 amino acids of the polypeptide) of the present invention to generate fusion proteins. The fusion does not necessarily need to be direct, but may occur through linker sequences. The antibodies may be specific for antigens other than polypeptides (or portion thereof, preferably at least 10, 20, 30, 40, 50, 60, 70, 80, 90 or 100 amino acids of the polypeptide) of the present invention. For example, antibodies may be used to target the polypeptides of the present invention to particular cell types, either in vitro or in vivo, by fusing or conjugating the polypeptides of the present invention to antibodies specific for particular cell surface receptors. Antibodies fused or conjugated to the polypeptides of the present invention may also be used in in vitro immunoassays and purification methods using methods known in the art. See e.g., Harbor et al., supra, and PCT publication WO 93/21232; EP 439,095; Naramura et al., Immunol. Lett. 39:91-99 (1994); U.S. Pat. No. 5,474,981; Gillies et al., PNAS 89:1428-1432 (1992); Fell et al., J. Immunol. 146:2446-2452 (1991), which are incorporated by reference in their entireties.

[0292] The present invention further includes compositions comprising the polypeptides of the present invention fused or conjugated to antibody domains other than the variable regions. For example, the polypeptides of the present invention may be fused or conjugated to an antibody Fc region, or portion thereof. The antibody portion fused to a polypeptide of the present invention may comprise the constant region, hinge region, CH1 domain, CH2 domain, and CH3 domain or any combination of whole domains or portions thereof. The polypeptides may also be fused or conjugated to the above antibody portions to form multimers. For example, Fc portions fused to the polypeptides of the present invention can form dimers through disulfide bonding between the Fc portions. Higher multimeric forms can be made by fusing the polypeptides to portions of IgA and IgM. Methods for fusing or conjugating the polypeptides of the present invention to antibody portions are known in the art. See, e.g., U.S. Pat. Nos. 5,336,603; 5,622,929; 5,359,046; 5,349,053; 5,447,851; 5,112,946; EP 307,434; EP 367,166; PCT publications WO 96/04388; WO 91/06570; Ashkenazi et al., Proc. Natl. Acad. Sci. USA 88:10535-10539 (1991); Zheng et al., J. Immunol. 154:5590-5600 (1995); and Vil et al., Proc. Natl. Acad. Sci. USA 89:11337-11341 (1992) (said references incorporated by reference in their entireties).

[0293] As discussed, supra, the polypeptides corresponding to a polypeptide, polypeptide fragment, or a variant of SEQ ID NO:Y may be fused or conjugated to the above antibody portions to increase the in vivo half life of the polypeptides or for use in immunoassays using methods known in the art. Further, the polypeptides corresponding to SEQ ID NO:Y may be fused or conjugated to the above antibody portions to facilitate purification. One reported example describes chimeric proteins consisting of the first two domains of the human CD4-polypeptide and various domains of the constant regions of the heavy or light chains of mammalian immunoglobulins. See EP 394,827; Traunecker et al., Nature 331:84-86 (1988). The polypeptides of the present invention fused or conjugated to an antibody having disulfide-linked dimeric structures (due to the IgG) may also be more efficient in binding and neutralizing other molecules, than the monomeric secreted protein or protein fragment alone. See, for example, Fountoulakis et al., J. Biochem. 270:3958-3964 (1995). In many cases, the Fc part in a fusion protein is beneficial in therapy and diagnosis, and thus can result in, for example, improved pharmacokinetic properties. See, for example, EP A 232,262. Alternatively, deleting the Fc part after the fusion protein has been expressed, detected, and purified, would be desired. For example, the Fc portion may hinder therapy and diagnosis if the fusion protein is used as an antigen for immunizations. In drug discovery, for example, human proteins, such as hIL-5, have been fused with Fc portions for the purpose of high-throughput screening assays to identify antagonists of hIL-5. (See, Bennett et al., J. Molecular Recognition 8:52-58 (1995); Johanson et al., J. Biol. Chem. 270:9459-9471 (1995)).

[0294] Moreover, the antibodies or fragments thereof of the present invention can be fused to marker sequences, such as a peptide to facilitate purification. In preferred embodiments, the marker amino acid sequence is a hexa-histidine peptide, such as the tag provided in a pQE vector (QIAGEN, Inc., 9259 Eton Avenue, Chatsworth, CA, 91311), among others, many of which are commercially available. As described in Gentz et al., Proc. Natl. Acad. Sci. USA 86:821-824 (1989), for instance, hexa-histidine provides for convenient purification of the fusion protein. Other peptide tags useful for purification include, but are not limited to, the “HA” tag, which corresponds to an epitope derived from the influenza hemagglutinin protein (Wilson et al., Cell 37:767 (1984)) and the “flag” tag.

[0295] The present invention further encompasses antibodies or fragments thereof conjugated to a diagnostic or therapeutic agent. The antibodies can be used diagnostically to, for example, monitor the development or progression of a tumor as part of a clinical testing procedure to, e.g., determine the efficacy of a given treatment regimen. Detection can be facilitated by coupling the antibody to a detectable substance. Examples of detectable substances include various enzymes, prosthetic groups, fluorescent materials, luminescent materials, bioluminescent materials, radioactive materials, positron emitting metals using various positron emission tomographies, and nonradioactive paramagnetic metal ions. The detectable substance may be coupled or conjugated either directly to the antibody (or fragment thereof) or indirectly, through an intermediate (such as, for example, a linker known in the art) using techniques known in the art. See, for example, U.S. Pat. No. 4,741,900 for metal ions which can be conjugated to antibodies for use as diagnostics according to the present invention.

[0296] Further, an antibody or fragment thereof may be conjugated to a therapeutic moiety such as a cytotoxin, e.g., a cytostatic or cytocidal agent, a therapeutic agent or a radioactive metal ion, e.g., alpha-emitters such as, for example, 213Bi. A cytotoxin or cytotoxic agent includes any agent that is detrimental to cells. Examples include paclitaxol, cytochalasin B, gramicidin D, ethidium bromide, emetine, mitomycin, etoposide, tenoposide, vincristine, vinblastine, colchicin, doxorubicin, daunorubicin, dihydroxy anthracin dione, mitoxantrone, mithramycin, actinomycin D, 1-dehydrotestosterone, glucocorticoids, procaine, tetracaine, lidocaine, propranolol, and puromycin and analogs or homologs thereof. Therapeutic agents include, but are not limited to, antimetabolites (e.g., methotrexate, 6-mercaptopurine, 6-thioguanine, cytarabine, 5-fluorouracil decarbazine), alkylating agents (e.g., mechlorethamine, thioepa chlorambucil, melphalan, carmustine (BSNU) and lomustine (CCNU), cyclothosphamide, busulfan, dibromomannitol, streptozotocin, mitomycin C, and cis-dichlorodiamine platinum (II) (DDP) cisplatin), anthracyclines (e.g., daunorubicin (formerly daunomycin) and doxorubicin), antibiotics (e.g., dactinomycin (formerly actinomycin), bleomycin, mithramycin, and anthramycin (AMC)), and anti-mitotic agents (e.g., vincristine and vinblastine).

[0297] The conjugates of the invention can be used for modifying a given biological response, the therapeutic agent or drug moiety is not to be construed as limited to classical chemical therapeutic agents. For example, the drug moiety may be a protein or polypeptide possessing a desired biological activity. Such proteins may include, for example, a toxin such as abrin, ricin A, pseudomonas exotoxin, or diphtheria toxin; a protein such as tumor necrosis factor, a-interferon, β-interferon, nerve growth factor, platelet derived growth factor, tissue plasminogen activator, an apoptotic agent, e.g., TNF-alpha, TNF-beta, AIM I (See, International Publication No. WO 97/33899), AIM II (See, International Publication No. WO 97/34911), Fas Ligand (Takahashi et al., Int. Immunol., 6:1567-1574 (1994)), VEGI (See, International Publication No. WO 99/23105), a thrombotic agent or an anti-angiogenic agent, e.g., angiostatin or endostatin; or, biological response modifiers such as, for example, lymphokines, interleukin-1 (“IL-1”), interleukin-2 (“IL-2”), interleukin-6 (“IL-6”), granulocyte macrophage colony stimulating factor (“GM-CSF”), granulocyte colony stimulating factor (“G-CSF”), or other growth factors.

[0298] Antibodies may also be attached to solid supports, which are particularly useful for immunoassays or purification of the target antigen. Such solid supports include, but are not limited to, glass, cellulose, polyacrylamide, nylon, polystyrene, polyvinyl chloride or polypropylene.

[0299] Techniques for conjugating such therapeutic moiety to antibodies are well known. See, for example., Arnon et al., “Monoclonal Antibodies For Immunotargeting Of Drugs In Cancer Therapy”, in Monoclonal Antibodies And Cancer Therapy, Reisfeld et al. (eds.), pp. 243-56 (Alan R. Liss, Inc. 1985); Hellstrom et al., “Antibodies For Drug Delivery”, in Controlled Drug Delivery (2nd Ed.), Robinson et al. (eds.), pp. 623-53 (Marcel Dekker, Inc. 1987); Thorpe, “Antibody Carriers Of Cytotoxic Agents In Cancer Therapy: A Review”, in Monoclonal Antibodies '84: Biological And Clinical Applications, Pinchera et al. (eds.), pp. 475-506 (1985); “Analysis, Results, And Future Prospective Of The Therapeutic Use Of Radiolabeled Antibody In Cancer Therapy”, in Monoclonal Antibodies For Cancer Detection And Therapy, Baldwin et al. (eds.), pp. 303-16 (Academic Press 1985), and Thorpe et al., “The Preparation And Cytotoxic Properties Of Antibody-Toxin Conjugates”, Immunol. Rev. 62:119-58 (1982).

[0300] Alternatively, an antibody can be conjugated to a second antibody to form an antibody heteroconjugate as described by Segal in U.S. Pat. No. 4,676,980, which is incorporated herein by reference in its entirety.

[0301] An antibody, with or without a therapeutic moiety conjugated to it, administered alone or in combination with cytotoxic factor(s) and/or cytokine(s) can be used as a therapeutic.

[0302] Immunophenotyping

[0303] The antibodies of the invention may be utilized for immunophenotyping of cell lines and biological samples. Translation products of the genes of the present invention may be useful as cell specific markers, or more specifically as cellular markers that are differentially expressed at various stages of differentiation and/or maturation of particular cell types. Monoclonal antibodies directed against a specific epitope, or combination of epitopes, will allow for the screening of cellular populations expressing the marker. Various techniques can be utilized using monoclonal antibodies to screen for cellular populations expressing the marker(s), and include magnetic separation using antibody-coated magnetic beads, “panning” with antibody attached to a solid matrix (i.e., plate), and flow cytometry (See, e.g., U.S. Pat. No. 5,985,660; and Morrison et al., Cell, 96:737-49 (1999)).

[0304] These techniques allow for the screening of particular populations of cells, such as might be found with hematological malignancies (i.e. minimal residual disease (MRD) in acute leukemic patients) and “non-self” cells in transplantations to prevent Graft-versus-Host Disease (GVHD). Alternatively, these techniques allow for the screening of hematopoietic stem and progenitor cells capable of undergoing proliferation and/or differentiation, as might be found in human umbilical cord blood.

[0305] Assays For Antibody Binding

[0306] The antibodies of the invention may be assayed for immunospecific binding by any method known in the art. The immunoassays, which can be used, include but are not limited to, competitive and non-competitive assay systems using techniques such as western blots, radioimmunoassays, ELISA (enzyme linked immunosorbent assay), “sandwich” immunoassays, immunoprecipitation assays, precipitin reactions, gel diffusion precipitin reactions, immunodiffusion assays, agglutination assays, complement-fixation assays, immunoradiometric assays, fluorescent immunoassays, and protein A immunoassays, to name but a few. Such assays are routine and well known in the art (see, e.g., Ausubel et al, eds, 1994, Current Protocols in Molecular Biology, Vol. 1, John Wiley & Sons, Inc., New York, which is incorporated by reference herein in its entirety). Exemplary immunoassays are described briefly below (but are not intended by way of limitation).

[0307] Immunoprecipitation protocols generally comprise lysing a population of cells in a lysis buffer such as RIPA buffer (1% NP-40 or Triton X-100, 1% sodium deoxycholate, 0.1% SDS, 0.15 M NaCl, 0.01 M sodium phosphate at pH 7.2, 1% Trasylol) supplemented with protein phosphatase and/or protease inhibitors (e.g., EDTA, PMSF, aprotinin, sodium vanadate), adding the antibody of interest to the cell lysate, incubating for a period of time (e.g., 1-4 hours) at 4° C., adding protein A and/or protein G sepharose beads to the cell lysate, incubating for about an hour or more at 4° C., washing the beads in lysis buffer and resuspending the beads in SDS/sample buffer. The ability of the antibody of interest to immunoprecipitate a particular antigen can be assessed by, e.g., western blot analysis. One of skill in the art would be knowledgeable as to the parameters that can be modified to increase the binding of the antibody to an antigen and decrease the background (e.g., pre-clearing the cell lysate with sepharose beads). For further discussion regarding immunoprecipitation protocols see, e.g., Ausubel et al., eds., (1994), Current Protocols in Molecular Biology, Vol. 1, John Wiley & Sons, Inc., New York, section 10.16.1.

[0308] Western blot analysis generally comprises preparing protein samples, electrophoresis of the protein samples in a polyacrylamide gel (e.g., 8%-20% SDS-PAGE depending on the molecular weight of the antigen), transferring the protein sample from the polyacrylamide gel to a membrane such as nitrocellulose, PVDF or nylon, blocking the membrane in blocking solution (e.g., PBS with 3% BSA or non-fat milk), washing the membrane in washing buffer (e.g., PBS-Tween 20), blocking the membrane with primary antibody (the antibody of interest) diluted in blocking buffer, washing the membrane in washing buffer, blocking the membrane with a secondary antibody (which recognizes the primary antibody, e.g., an anti-human antibody) conjugated to an enzymatic substrate (e.g., horseradish peroxidase or alkaline phosphatase) or radioactive molecule (e.g., 32P or 125I) diluted in blocking buffer, washing the membrane in wash buffer, and detecting the presence of the antigen. One of skill in the art would be knowledgeable as to the parameters that can be modified to increase the signal detected and to reduce the background noise. For further discussion regarding western blot protocols see, e.g., Ausubel et al., eds., (1994), Current Protocols in Molecular Biology, Vol. 1, John Wiley & Sons, Inc., New York, section 10.8.1.

[0309] ELISAs comprise preparing antigen, coating the well of a 96 well microtiter plate with the antigen, adding the antibody of interest conjugated to a detectable compound such as an enzymatic substrate (e.g., horseradish peroxidase or alkaline phosphatase) to the well and incubating for a period of time, and detecting the presence of the antigen. In ELISAs the antibody of interest does not have to be conjugated to a detectable compound; instead, a second antibody (which recognizes the antibody of interest) conjugated to a detectable compound may be added to the well. Further, instead of coating the well with the antigen, the antibody may be coated to the well. In this case, a second antibody conjugated to a detectable compound may be added following the addition of the antigen of interest to the coated well. One of skill in the art would be knowledgeable as to the parameters that can be modified to increase the signal detected as well as other variations of ELISAs known in the art. For further discussion regarding ELISAs see, e.g., Ausubel et al., eds., (1994), Current Protocols in Molecular Biology, Vol. 1, John Wiley & Sons, Inc., New York, section 11.2.1.

[0310] The binding affinity of an antibody to an antigen and the off-rate of an antibody-antigen interaction can be determined by competitive binding assays. One example of a competitive binding assay is a radioimmunoassay comprising the incubation of labeled antigen (e.g., 3H or 1251) with the antibody of interest in the presence of increasing amounts of unlabeled antigen, and the detection of the antibody bound to the labeled antigen. The affinity of the antibody of interest for a particular antigen and the binding off-rates can be determined from the data by scatchard plot analysis. Competition with a second antibody can also be determined using radioimmunoassays. In this case, the antigen is incubated with antibody of interest conjugated to a labeled compound (e.g., 3H or 1251) in the presence of increasing amounts of an unlabeled second antibody.

[0311] Antibodies of the invention may be characterized using immunocytochemisty methods on cells (e.g., mammalian cells, such as CHO cells) transfected with a vector enabling the expression of a musculoskeletal system antigen or with vector alone using techniques commonly known in the art. Antibodies that bind musculoskeletal system antigen transfected cells, but not vector-only transfected cells, are musculoskeletal system antigen specific.

[0312] Therapeutic Uses

[0313] The present invention is further directed to antibody-based therapies which involve administering antibodies of the invention to an animal, preferably a mammal, and most preferably a human, patient for treating one or more of the disclosed diseases, disorders, or conditions. Therapeutic compounds of the invention include, but are not limited to, antibodies of the invention (including fragments, analogs and derivatives thereof as described herein) and nucleic acids encoding antibodies of the invention (including fragments, analogs and derivatives thereof and anti-idiotypic antibodies as described herein). The antibodies of the invention can be used to treat, inhibit or prevent diseases, disorders or conditions associated with aberrant expression and/or activity of a polypeptide of the invention, including, but not limited to, any one or more of the diseases, disorders, or conditions described herein. The treatment and/or prevention of diseases, disorders, or conditions associated with aberrant expression and/or activity of a polypeptide of the invention includes, but is not limited to, alleviating symptoms associated with those diseases, disorders or conditions. Antibodies of the invention may be provided in pharmaceutically acceptable compositions as known in the art or as described herein.

[0314] In a specific and preferred embodiment, the present invention is directed to antibody-based therapies which involve administering antibodies of the invention to an animal, preferably a mammal, and most preferably a human, patient for treating one or more of the diseases, disorders, or conditions of the musculoskeletal system, including, but not limited to, bone disorders (e.g., osteoporosis, osteomyelitis, Paget's disease, and sciolosis); joint disorders (e.g., osteoarthritis, rheumatoid arthritis, infectious arthritis, systemic lupus erythematosus, gout, and Reiter's syndrome); ligament, tendon, and bursa disorders (e.g., bursitis, tendinitis, and tenosynovitis); muscle disorders (e.g., muscular dystrophy, Pompe's disease, periodic paralysis, polymyalgia rheumatica, polymyositis, and Steinert's disease), neoplasms and/or cancers of musculoskeletal tissues (e.g., osteochondroma, benign chondroma, chondroblastoma, osteoid osteoma, and giant cell tumor), and/or those disorders described under “Musculoskeletal System Disorders”. Therapeutic compounds of the invention include, but are not limited to, antibodies of the invention (e.g., antibodies directed to the full length protein expressed on the cell surface of a mammalian cell; antibodies directed to an epitope of a musculoskeletal system associated polypeptide of the invention (such as, a linear epitope (shown in Table 1A, column 6) or a conformational epitope), including fragments, analogs and derivatives thereof as described herein) and nucleic acids encoding antibodies of the invention (including fragments, analogs and derivatives thereof and anti-idiotypic antibodies as described herein). The antibodies of the invention can be used to treat, inhibit or prevent diseases, disorders or conditions associated with aberrant expression and/or activity of a polypeptide of the invention, including, but not limited to, any one or more of the diseases, disorders, or conditions of the musculoskeletal system described herein. The treatment and/or prevention of diseases, disorders, or conditions of the musculoskeletal system associated with aberrant expression and/or activity of a polypeptide of the invention includes, but is not limited to, alleviating symptoms associated with those diseases, disorders or conditions. Antibodies of the invention may be provided in pharmaceutically acceptable compositions as known in the art or as described herein.

[0315] A summary of the ways in which the antibodies of the present invention may be used therapeutically includes binding polynucleotides or polypeptides of the present invention locally or systemically in the body or by direct cytotoxicity of the antibody, e.g. as mediated by complement (CDC) or by effector cells (ADCC). Some of these approaches are described in more detail below. Armed with the teachings provided herein, one of ordinary skill in the art will know how to use the antibodies of the present invention for diagnostic, monitoring or therapeutic purposes without undue experimentation.

[0316] The antibodies of this invention may be advantageously utilized in combination with other monoclonal or chimeric antibodies, or with lymphokines or hematopoietic growth factors (such as, e.g., IL-2, IL-3 and IL-7), for example, which serve to increase the number or activity of effector cells, which interact with the antibodies.

[0317] The antibodies of the invention may be administered alone or in combination with other types of treatments (e.g., radiation therapy, chemotherapy, hormonal therapy, immunotherapy and anti-tumor agents). Generally, administration of products of a species origin or species reactivity (in the case of antibodies) that is the same species as that of the patient is preferred. Thus, in a preferred embodiment, human antibodies, fragments derivatives, analogs, or nucleic acids, are administered to a human patient for therapy or prophylaxis.

[0318] It is preferred to use high affinity and/or potent in vivo inhibiting and/or neutralizing antibodies against polypeptides or polynucleotides of the present invention, fragments or regions thereof, for both immunoassays directed to and therapy of disorders related to polynucleotides or polypeptides, including fragments thereof, of the present invention. Such antibodies, fragments, or regions, will preferably have an affinity for polynucleotides or polypeptides of the invention, including fragments thereof. Preferred binding affinities include those with a dissociation constant or Kd less than 5×10⁻² M, 10⁻² M, 5×10⁻³ M, 10⁻³ M, 5×10⁻⁴ M, 10⁻⁴ M, 5×10⁻⁵ M, 10⁻⁵ M, 5×10⁻⁶ M, 10⁻⁶ M, 5×10⁻⁷ M, 10⁻⁷ M, 5×10⁻⁸ M, 10⁻⁸ M, 5×10⁻⁹ M, 10⁻⁹ M, 5×10⁻¹⁰ M, 10⁻¹⁰ M, 5×10⁻¹¹ M, 10⁻¹¹ M, 5×10⁻¹² M, 10⁻¹² M, 5×10⁻¹³ M, 10⁻¹³ M, 5×10⁻¹⁴ M, 10⁻¹⁴ M, 5×10⁻¹⁵ M, and 10⁻¹⁵ M.

[0319] Gene Therapy

[0320] In a specific embodiment, nucleic acids comprising sequences encoding antibodies or functional derivatives thereof, are administered to treat, inhibit or prevent a disease or disorder associated with aberrant expression and/or activity of a polypeptide of the invention, by way of gene therapy. Gene therapy refers to therapy performed by the administration to a subject of an expressed or expressible nucleic acid. In this embodiment of the invention, the nucleic acids produce their encoded protein that mediates a therapeutic effect.

[0321] Any of the methods for gene therapy available in the art can be used according to the present invention. Exemplary methods are described below.

[0322] For general reviews of the methods of gene therapy, see Goldspiel et al., Clinical Pharmacy 12:488-505 (1993); Wu and Wu, Biotherapy 3:87-95 (1991); Tolstoshev, Ann. Rev. Pharmacol. Toxicol. 32:573-596 (1993); Mulligan, Science 260:926-932 (1993); and Morgan and Anderson, Ann. Rev. Biochem. 62:191-217 (1993); May, TIBTECH 11(5):155-215 (1993). Methods commonly known in the art of recombinant DNA technology which can be used are described in Ausubel et al. (eds.), Current Protocols in Molecular Biology, John Wiley & Sons, NY (1993); and Kriegler, Gene Transfer and Expression, A Laboratory Manual, Stockton Press, NY (1990).

[0323] In a preferred embodiment, the compound comprises nucleic acid sequences encoding an antibody, said nucleic acid sequences being part of expression vectors that express the antibody or fragments or chimeric proteins or heavy or light chains thereof in a suitable host. In particular, such nucleic acid sequences have promoters operably linked to the antibody coding region, said promoter being inducible or constitutive, and, optionally, tissue-specific. In another particular embodiment, nucleic acid molecules are used in which the antibody coding sequences and any other desired sequences are flanked by regions that promote homologous recombination at a desired site in the genome, thus providing for intrachromosomal expression of the antibody encoding nucleic acids (Koller and Smithies, Proc. Natl. Acad. Sci. USA 86:8932-8935 (1989); Zijlstra et al., Nature 342:435-438 (1989). In specific embodiments, the expressed antibody molecule is a single chain antibody; alternatively, the nucleic acid sequences include sequences encoding both the heavy and light chains, or fragments thereof, of the antibody.

[0324] Delivery of the nucleic acids into a patient may be either direct, in which case the patient is directly exposed to the nucleic acid or nucleic acid-carrying vectors, or indirect, in which case, cells are first transformed with the nucleic acids in vitro, then transplanted into the patient. These two approaches are known, respectively, as in vivo or ex vivo gene therapy.

[0325] In a specific embodiment, the nucleic acid sequences are directly administered in vivo, where it is expressed to produce the encoded product. This can be accomplished by any of numerous methods known in the art, e.g., by constructing them as part of an appropriate nucleic acid expression vector and administering it so that they become intracellular, e.g., by infection using defective or attenuated retrovirals or other viral vectors (see U.S. Pat. No. 4,980,286), or by direct injection of naked DNA, or by use of microparticle bombardment (e.g., a gene gun; Biolistic, Dupont), or coating with lipids or cell-surface receptors or transfecting agents, encapsulation in liposomes, microparticles, or microcapsules, or by administering them in linkage to a peptide which is known to enter the nucleus, by administering it in linkage to a ligand subject to receptor-mediated endocytosis (see, e.g., Wu and Wu, J. Biol. Chem. 262:4429-4432 (1987)) (which can be used to target cell types specifically expressing the receptors), etc. In another embodiment, nucleic acid-ligand complexes can be formed in which the ligand comprises a fusogenic viral peptide to disrupt endosomes, allowing the nucleic acid to avoid lysosomal degradation. In yet another embodiment, the nucleic acid can be targeted in vivo for cell specific uptake and expression, by targeting a specific receptor (see, e.g., PCT Publications WO 92/06180; WO 92/22635; WO92/20316; WO93/14188, WO 93/20221). Alternatively, the nucleic acid can be introduced intracellularly and incorporated within host cell DNA for expression, by homologous recombination (Koller and Smithies, Proc. Natl. Acad. Sci. USA 86:8932-8935 (1989); Zijlstra et al., Nature 342:435-438 (1989)).

[0326] In a specific embodiment, viral vectors that contains nucleic acid sequences encoding an antibody of the invention are used. For example, a retroviral vector can be used (see Miller et al., Meth. Enzymol. 217:581-599 (1993)). These retroviral vectors contain the components necessary for the correct packaging of the viral genome and integration into the host cell DNA. The nucleic acid sequences encoding the antibody to be used in gene therapy are cloned into one or more vectors, which facilitates delivery of the gene into a patient. More detail about retroviral vectors can be found in Boesen et al., Biotherapy 6:291-302 (1994), which describes the use of a retroviral vector to deliver the mdr1 gene to hematopoietic stem cells in order to make the stem cells more resistant to chemotherapy. Other references illustrating the use of retroviral vectors in gene therapy are: Clowes et al., J. Clin. Invest. 93:644-651 (1994); Kiem et al., Blood 83:1467-1473 (1994); Salmons and Gunzberg, Human Gene Therapy 4:129-141 (1993); and Grossman and Wilson, Curr. Opin. in Genetics and Devel. 3:110-114 (1993).

[0327] Adenoviruses are other viral vectors that can be used in gene therapy. Adenoviruses are especially attractive vehicles for delivering genes to respiratory epithelia. Adenoviruses naturally infect respiratory epithelia where they cause a mild disease. Other targets for adenovirus-based delivery systems are liver, the central nervous system, endothelial cells, and muscle. Adenoviruses have the advantage of being capable of infecting non-dividing cells. Kozarsky and Wilson, Current Opinion in Genetics and Development 3:499-503 (1993) present a review of adenovirus-based gene therapy. Bout et al., Human Gene Therapy 5:3-10 (1994) demonstrated the use of adenovirus vectors to transfer genes to the respiratory epithelia of rhesus monkeys. Other instances of the use of adenoviruses in gene therapy can be found in Rosenfeld et al., Science 252:431-434 (1991); Rosenfeld et al., Cell 68:143-155 (1992); Mastrangeli et al., J. Clin. Invest. 91:225-234 (1993); PCT Publication WO94/12649; and Wang, et al., Gene Therapy 2:775-783 (1995). In a preferred embodiment, adenovirus vectors are used.

[0328] Adeno-associated virus (AAV) has also been proposed for use in gene therapy (Walsh et al., Proc. Soc. Exp. Biol. Med. 204:289-300 (1993); U.S. Pat. No. 5,436,146).

[0329] Another approach to gene therapy involves transferring a gene to cells in tissue culture by such methods as electroporation, lipofection, calcium phosphate mediated transfection, or viral infection. Usually, the method of transfer includes the transfer of a selectable marker to the cells. The cells are then placed under selection to isolate those cells that have taken up and are expressing the transferred gene. Those cells are then delivered to a patient.

[0330] In this embodiment, the nucleic acid is introduced into a cell prior to administration in vivo of the resulting recombinant cell. Such introduction can be carried out by any method known in the art, including but not limited to transfection, electroporation, microinjection, infection with a viral or bacteriophage vector containing the nucleic acid sequences, cell fusion, chromosome-mediated gene transfer, microcell-mediated gene transfer, spheroplast fusion, etc. Numerous techniques are known in the art for the introduction of foreign genes into cells (see, e.g., Loeffler and Behr, Meth. Enzymol. 217:599-618 (1993); Cohen et al., Meth. Enzymol. 217:618-644 (1993); Cline, Pharmac. Ther. 29:69-92m (1985) and may be used in accordance with the present invention, provided that the necessary developmental and physiological functions of the recipient cells are not disrupted. The technique should provide for the stable transfer of the nucleic acid to the cell, so that the nucleic acid is expressible by the cell and preferably heritable and expressible by its cell progeny.

[0331] The resulting recombinant cells can be delivered to a patient by various methods known in the art. Recombinant blood cells (e.g., hematopoietic stem or progenitor cells) are preferably administered intravenously. The amount of cells envisioned for use depends on the desired effect, patient state, etc., and can be determined by one skilled in the art.

[0332] Cells into which a nucleic acid can be introduced for purposes of gene therapy encompass any desired, available cell type, and include but are not limited to, epithelial cells, endothelial cells, keratinocytes, fibroblasts, muscle cells, hepatocytes; blood cells such as T lymphocytes, B lymphocytes, monocytes, macrophages, neutrophils, eosinophils, megakaryocytes, granulocytes; various stem or progenitor cells, in particular hematopoietic stem or progenitor cells, e.g., as obtained from bone marrow, umbilical cord blood, peripheral blood, fetal liver, etc.

[0333] In a preferred embodiment, the cell used for gene therapy is autologous to the patient.

[0334] In an embodiment in which recombinant cells are used in gene therapy, nucleic acid sequences encoding an antibody are introduced into the cells such that they are expressible by the cells or their progeny, and the recombinant cells are then administered in vivo for therapeutic effect. In a specific embodiment, stem or progenitor cells are used. Any stem and/or progenitor cells which can be isolated and maintained in vitro can potentially be used in accordance with this embodiment of the present invention (see e.g. PCT Publication WO 94/08598; Stemple and Anderson, Cell 71:973-985 (1992); Rheinwald, Meth. Cell Bio. 21A:229 (1980); and Pittelkow and Scott, Mayo Clinic Proc. 61:771 (1986)).

[0335] In a specific embodiment, the nucleic acid to be introduced for purposes of gene therapy comprises an inducible promoter operably linked to the coding region, such that expression of the nucleic acid is controllable by the presence or absence of an appropriate inducer of transcription.

[0336] Demonstration of Therapeutic or Prophylactic Activity

[0337] The compounds or pharmaceutical compositions of the invention are preferably tested in vitro, and then in vivo for the desired therapeutic or prophylactic activity, prior to use in humans. For example, in vitro assays to demonstrate the therapeutic or prophylactic utility of a compound or pharmaceutical composition include, the effect of a compound on a cell line or a patient tissue sample. The effect of the compound or composition on the cell line and/or tissue sample can be determined utilizing techniques known to those of skill in the art including, but not limited to, rosette formation assays and cell lysis assays. In accordance with the invention, in vitro assays which can be used to determine whether administration of a specific compound is indicated, include in vitro cell culture assays in which a patient tissue sample is grown in culture, and exposed to or otherwise administered a compound, and the effect of such compound upon the tissue sample is observed.

[0338] Therapeutic/Prophylactic Administration and Composition

[0339] The invention provides methods of treatment, inhibition and prophylaxis by administration to a subject of an effective amount of a compound or pharmaceutical composition of the invention, preferably a polypeptide or antibody of the invention. In a preferred embodiment, the compound is substantially purified (e.g., substantially free from substances that limit its effect or produce undesired side-effects). The subject is preferably an animal, including but not limited to animals such as cows, pigs, horses, chickens, cats, dogs, etc., and is preferably a mammal, and most preferably human.

[0340] Formulations and methods of administration that can be employed when the compound comprises a nucleic acid or an immunoglobulin are described above; additional appropriate formulations and routes of administration can be selected from among those described herein below.

[0341] Various delivery systems are known and can be used to administer a compound of the invention, e.g., encapsulation in liposomes, microparticles, microcapsules, recombinant cells capable of expressing the compound, receptor-mediated endocytosis (see, e.g., Wu and Wu, J. Biol. Chem. 262:4429-4432 (1987)), construction of a nucleic acid as part of a retroviral or other vector, etc. Methods of introduction include but are not limited to intradermal, intramuscular, intraperitoneal, intravenous, subcutaneous, intranasal, epidural, and oral routes. The compounds or compositions may be administered by any convenient route, for example by infusion or bolus injection, by absorption through epithelial or mucocutaneous linings (e.g., oral mucosa, rectal and intestinal mucosa, etc.) and may be administered together with other biologically active agents. Administration can be systemic or local. In addition, it may be desirable to introduce the pharmaceutical compounds or compositions of the invention into the central nervous system by any suitable route, including intraventricular and intrathecal injection; intraventricular injection may be facilitated by an intraventricular catheter, for example, attached to a reservoir, such as an Ommaya reservoir. Pulmonary administration can also be employed, e.g., by use of an inhaler or nebulizer, and formulation with an aerosolizing agent.

[0342] In a specific embodiment, it may be desirable to administer the pharmaceutical compounds or compositions of the invention locally to the area in need of treatment; this may be achieved by, for example, and not by way of limitation, local infusion during surgery, topical application, e.g., in conjunction with a wound dressing after surgery, by injection, by means of a catheter, by means of a suppository, or by means of an implant, said implant being of a porous, non-porous, or gelatinous material, including membranes, such as sialastic membranes, or fibers. Preferably, when administering a protein, including an antibody, of the invention, care must be taken to use materials to which the protein does not absorb.

[0343] In another embodiment, the compound or composition can be delivered in a vesicle, in particular a liposome (see Langer, Science 249:1527-1533 (1990); Treat et al., in Liposomes in the Therapy of Infectious Disease and Cancer, Lopez-Berestein and Fidler (eds.), Liss, New York, pp. 353-365 (1989); Lopez-Berestein, ibid., pp. 317-327; see generally ibid.)

[0344] In yet another embodiment, the compound or composition can be delivered in a controlled release system. In one embodiment, a pump may be used (see Langer, supra; Sefton, CRC Crit. Ref. Biomed. Eng. 14:201 (1987); Buchwald et al., Surgery 88:507 (1980); Saudek et al., N. Engl. J. Med. 321:574 (1989)). In another embodiment, polymeric materials can be used (see Medical Applications of Controlled Release, Langer and Wise (eds.), CRC Pres., Boca Raton, Fla. (1974); Controlled Drug Bioavailability, Drug Product Design and Performance, Smolen and Ball (eds.), Wiley, New York (1984); Ranger and Peppas, J., Macromol. Sci. Rev. Macromol. Chem. 23:61 (1983); see also Levy et al., Science 228:190 (1985); During et al., Ann. Neurol. 25:351 (1989); Howard et al., J.Neurosurg. 71:105 (1989)). In yet another embodiment, a controlled release system can be placed in proximity of the therapeutic target, e.g., the brain, thus requiring only a fraction of the systemic dose (see, e.g., Goodson, in Medical Applications of Controlled Release, supra, vol. 2, pp. 115-138 (1984)).

[0345] Other controlled release systems are discussed in the review by Langer (Science 249:1527-1533 (1990)).

[0346] In a specific embodiment where the compound of the invention is a nucleic acid encoding a protein, the nucleic acid can be administered in vivo to promote expression of its encoded protein, by constructing it as part of an appropriate nucleic acid expression vector and administering it so that it becomes intracellular, e.g., by use of a retroviral vector (see U.S. Pat. No. 4,980,286), or by direct injection, or by use of microparticle bombardment (e.g., a gene gun; Biolistic, Dupont), or coating with lipids or cell-surface receptors or transfecting agents, or by administering it in linkage to a homeobox-like peptide which is known to enter the nucleus (see e.g., Joliot et al., Proc. Natl. Acad. Sci. USA 88:1864-1868 (1991)), etc. Alternatively, a nucleic acid can be introduced intracellularly and incorporated within host cell DNA for expression, by homologous recombination.

[0347] The present invention also provides pharmaceutical compositions. Such compositions comprise a therapeutically effective amount of a compound, and a pharmaceutically acceptable carrier. In a specific embodiment, the term “pharmaceutically acceptable” means approved by a regulatory agency of the Federal or a state government or listed in the U.S. Pharmacopeia or other generally recognized pharmacopeia for use in animals, and more particularly in humans. The term “carrier” refers to a diluent, adjuvant, excipient, or vehicle with which the therapeutic is administered. Such pharmaceutical carriers can be sterile liquids, such as water and oils, including those of petroleum, animal, vegetable or synthetic origin, such as peanut oil, soybean oil, mineral oil, sesame oil and the like. Water is a preferred carrier when the pharmaceutical composition is administered intravenously. Saline solutions and aqueous dextrose and glycerol solutions can also be employed as liquid carriers, particularly for injectable solutions. Suitable pharmaceutical excipients include starch, glucose, lactose, sucrose, gelatin, malt, rice, flour, chalk, silica gel, sodium stearate, glycerol monostearate, talc, sodium chloride, dried skim milk, glycerol, propylene, glycol, water, ethanol and the like. The composition, if desired, can also contain minor amounts of wetting or emulsifying agents, or pH buffering agents. These compositions can take the form of solutions, suspensions, emulsion, tablets, pills, capsules, powders, sustained-release formulations and the like. The composition can be formulated as a suppository, with traditional binders and carriers such as triglycerides. Oral formulation can include standard carriers such as pharmaceutical grades of mannitol, lactose, starch, magnesium stearate, sodium saccharine, cellulose, magnesium carbonate, etc. Examples of suitable pharmaceutical carriers are described in “Remington's Pharmaceutical Sciences” by E. W. Martin. Such compositions will contain a therapeutically effective amount of the compound, preferably in purified form, together with a suitable amount of carrier so as to provide the form for proper administration to the patient. The formulation should suit the mode of administration.

[0348] In a preferred embodiment, the composition is formulated in accordance with routine procedures as a pharmaceutical composition adapted for intravenous administration to human beings. Typically, compositions for intravenous administration are solutions in sterile isotonic aqueous buffer. Where necessary, the composition may also include a solubilizing agent and a local anesthetic such as lignocaine to ease pain at the site of the injection. Generally, the ingredients are supplied either separately or mixed together in unit dosage form, for example, as a dry lyophilized powder or water free concentrate in a hermetically sealed container such as an ampoule or sachette indicating the quantity of active agent. Where the composition is to be administered by infusion, it can be dispensed with an infusion bottle containing sterile pharmaceutical grade water or saline. Where the composition is administered by injection, an ampoule of sterile water for injection or saline can be provided so that the ingredients may be mixed prior to administration.

[0349] The compounds of the invention can be formulated as neutral or salt forms. Pharmaceutically acceptable salts include those formed with anions such as those derived from hydrochloric, phosphoric, acetic, oxalic, tartaric acids, etc., and those formed with cations such as those derived from sodium, potassium, ammonium, calcium, ferric hydroxides, isopropylamine, triethylamine, 2-ethylamino ethanol, histidine, procaine, etc.

[0350] The amount of the compound of the invention, which will be effective in the treatment, inhibition and prevention of a disease or disorder associated with aberrant expression and/or activity of a polypeptide of the invention can be determined by standard clinical techniques. In addition, in vitro assays may optionally be employed to help identify optimal dosage ranges. The precise dose to be employed in the formulation will also depend on the route of administration, and the seriousness of the disease or disorder, and should be decided according to the judgment of the practitioner and each patient's circumstances. Effective doses may be extrapolated from dose-response curves derived from in vitro or animal model test systems.

[0351] For antibodies, the dosage administered to a patient is typically 0.1 mg/kg to 100 mg/kg of the patient's body weight. Preferably, the dosage administered to a patient is between 0.1 mg/kg and 20 mg/kg of the patient's body weight, more preferably 1 mg/kg to 10 mg/kg of the patient's body weight. Generally, human antibodies have a longer half-life within the human body than antibodies from other species due to the immune response to the foreign polypeptides. Thus, lower dosages of human antibodies and less frequent administration is often possible. Further, the dosage and frequency of administration of antibodies of the invention may be reduced by enhancing uptake and tissue penetration (e.g., into the brain) of the antibodies by modifications such as, for example, lipidation.

[0352] The invention also provides a pharmaceutical pack or kit comprising one or more containers filled with one or more of the ingredients of the pharmaceutical compositions of the invention. Optionally associated with such container(s) can be a notice in the form prescribed by a governmental agency regulating the manufacture, use or sale of pharmaceuticals or biological products, which notice reflects approval by the agency of manufacture, use or sale for human administration.

[0353] Diagnosis and Imaging

[0354] Labeled antibodies, and derivatives and analogs thereof, which specifically bind to a polypeptide of interest can be used for diagnostic purposes to detect, diagnose, or monitor diseases, disorders, and/or conditions associated with the aberrant expression and/or activity of a polypeptide of the invention. The invention provides for the detection of aberrant expression of a polypeptide of interest, comprising (a) assaying the expression of the polypeptide of interest in cells or body fluid of an individual using one or more antibodies specific to the polypeptide interest and (b) comparing the level of gene expression with a standard gene expression level, whereby an increase or decrease in the assayed polypeptide gene expression level compared to the standard expression level is indicative of aberrant expression.

[0355] The invention provides a diagnostic assay for diagnosing a musculoskeletal system disorder, comprising (a) assaying the expression of the polypeptide of interest in cells or body fluid of an individual using one or more antibodies specific to the polypeptide interest and (b) comparing the level of gene expression with a standard gene expression level, whereby an increase or decrease in the assayed polypeptide gene expression level compared to the standard expression level is indicative of a particular disorder. With respect to cancer, the presence of a relatively high amount of transcript in biopsied tissue from an individual may indicate a predisposition for the development of the disease, or may provide a means for detecting the disease prior to the appearance of actual clinical symptoms. A more definitive diagnosis of this type may allow health professionals to employ preventative measures or aggressive treatment earlier thereby preventing the development or further progression of the cancer.

[0356] Antibodies of the invention can be used to assay protein levels in a biological sample using classical immunohistological methods known to those of skill in the art (e.g., see Jalkanen et al., J. Cell. Biol. 101:976-985 (1985); Jalkanen et al., J. Cell. Biol. 105:3087-3096 (1987)). Other antibody-based methods useful for detecting protein gene expression include immunoassays, such as the enzyme linked immunosorbent assay (ELISA) and the radioimmunoassay (RIA). Suitable antibody assay labels are known in the art and include enzyme labels, such as, glucose oxidase; radioisotopes, such as iodine (125I, 121I), carbon (14C), sulfur (35S), tritium (3H), indium (112In), and technetium (99Tc); luminescent labels, such as luminol; and fluorescent labels, such as fluorescein and rhodamine, and biotin.

[0357] One facet of the invention is the detection and diagnosis of a disease or disorder associated with aberrant expression of a polypeptide of interest in an animal, preferably a mammal and most preferably a human. A preferred embodiment of the invention is the detection and diagnosis of a disease or disorder of the musculoskeletal system associated with aberrant expression of a musculoskeletal system antigen in an animal, preferably a mammal and most preferably a human. In one embodiment, diagnosis comprises: a) administering (for example, parenterally, subcutaneously, or intraperitoneally) to a subject an effective amount of a labeled molecule which specifically binds to the polypeptide of interest; b) waiting for a time interval following the administering for permitting the labeled molecule to preferentially concentrate at sites in the subject where the polypeptide is expressed (and for unbound labeled molecule to be cleared to background level); c) determining background level; and d) detecting the labeled molecule in the subject, such that detection of labeled molecule above the background level indicates that the subject has a particular disease or disorder associated with aberrant expression of the polypeptide of interest. Background level can be determined by various methods including, comparing the amount of labeled molecule detected to a standard value previously determined for a particular system.

[0358] It will be understood in the art that the size of the subject and the imaging system used will determine the quantity of imaging moiety needed to produce diagnostic images. In the case of a radioisotope moiety, for a human subject, the quantity of radioactivity injected will normally range from about 5 to 20 millicuries of 99mTc. The labeled antibody or antibody fragment will then preferentially accumulate at the location of cells which contain the specific protein. In vivo tumor imaging is described in S. W. Burchiel et al., “Immunopharmacokinetics of Radiolabeled Antibodies and Their Fragments.” (Chapter 13 in Tumor Imaging: The Radiochemical Detection of Cancer, S. W. Burchiel and B. A. Rhodes, eds., Masson Publishing Inc. (1982)).

[0359] Depending on several variables, including the type of label used and the mode of administration, the time interval following the administration for permitting the labeled molecule to preferentially concentrate at sites in the subject and for unbound labeled molecule to be cleared to background level is 6 to 48 hours or 6 to 24 hours or 6 to 12 hours. In another embodiment the time interval following administration is 5 to 20 days or 5 to 10 days.

[0360] In an embodiment, monitoring of the disease or disorder is carried out by repeating the method for diagnosing the disease or disorder, for example, one month after initial diagnosis, six months after initial diagnosis, one year after initial diagnosis, etc.

[0361] Presence of the labeled molecule can be detected in the patient using methods known in the art for in vivo scanning. These methods depend upon the type of label used. Skilled artisans will be able to determine the appropriate method for detecting a particular label. Methods and devices that may be used in the diagnostic methods of the invention include, but are not limited to, computed tomography (CT), whole body scan such as position emission tomography (PET), magnetic resonance imaging (MRI), and sonography.

[0362] In a specific embodiment, the molecule is labeled with a radioisotope and is detected in the patient using a radiation responsive surgical instrument (Thurston et al., U.S. Pat. No. 5,441,050). In another embodiment, the molecule is labeled with a fluorescent compound and is detected in the patient using a fluorescence responsive scanning instrument. In another embodiment, the molecule is labeled with a positron emitting metal and is detected in the patent using positron emission-tomography. In yet another embodiment, the molecule is labeled with a paramagnetic label and is detected in a patient using magnetic resonance imaging (MRI).

[0363] Kits

[0364] The present invention provides kits that can be used in the above methods. In one embodiment, a kit comprises an antibody of the invention, preferably a purified antibody, in one or more containers. In a specific embodiment, the kits of the present invention contain a substantially isolated polypeptide comprising an epitope which is specifically immunoreactive with an antibody included in the kit. Preferably, the kits of the present invention further comprise a control antibody, which does not react with the polypeptide of interest. In another specific embodiment, the kits of the present invention contain a means for detecting the binding of an antibody to a polyp eptide of interest (e.g., the antibody may be conjugated to a detectable substrate such as a fluorescent compound, an enzymatic substrate, a radioactive compound or a luminescent compound, or a second antibody which recognizes the first antibody may be conjugated to a detectable substrate).

[0365] In another specific embodiment of the present invention, the kit is a diagnostic kit for use in screening serum-containing antibodies specific against proliferative and/or cancerous polynucleotides and polypeptides. Such a kit may include a control antibody that does not react with the polypeptide of interest. Such a kit may include a substantially isolated polypeptide antigen comprising an epitope, which is specifically immunoreactive with at least one anti-polypeptide antigen antibody. Further, such a kit includes means for detecting the binding of said antibody to the antigen (e.g., the antibody may be conjugated to a fluorescent compound such as fluorescein or rhodamine, which can be detected by flow cytometry). In specific embodiments, the kit may include a recombinantly produced or chemically synthesized polypeptide antigen. The polypeptide antigen of the kit may also be attached to a solid support.

[0366] In a more specific embodiment, the detecting means of the above-described kit includes a solid support to which said polypeptide antigen is attached. Such a kit may also include a non-attached reporter-labeled anti-human antibody. In this embodiment, binding of the antibody to the polypeptide antigen can be detected by binding of the said reporter-labeled antibody.

[0367] In an additional embodiment, the invention includes a diagnostic kit for use in screening serum-containing antigens of the polypeptide of the invention. The diagnostic kit includes a substantially isolated antibody specifically immunoreactive with polypeptide or polynucleotide antigens, and means for detecting the binding of the polynucleotide or polypeptide antigen to the antibody. In one embodiment, the antibody is attached to a solid support. In a specific embodiment, the antibody may be a monoclonal antibody. The detecting means of the kit may include a second, labeled monoclonal antibody. Alternatively, or in addition, the detecting means may include a labeled, competing antigen.

[0368] In one diagnostic configuration, test serum is reacted with a solid phase reagent having a surface-bound antigen obtained by the methods of the present invention. After binding with specific antigen antibody to the reagent and removing unbound serum components by washing, the reagent is reacted with reporter-labeled anti-human antibody to bind reporter to the reagent in proportion to the amount of bound anti-antigen antibody on the solid support. The reagent is again washed to remove unbound labeled antibody, and the amount of reporter associated with the reagent is determined. Typically, the reporter is an enzyme which is detected by incubating the solid phase in the presence of a suitable fluorometric, luminescent or colorimetric substrate (Sigma, St. Louis, Mo.).

[0369] The solid surface reagent in the above assay is prepared by known techniques for attaching protein material to solid support material, such as polymeric beads, dip sticks, 96-well plate or filter material. These attachment methods generally include non-specific adsorption of the protein to the support or covalent attachment of the protein, typically through a free amine group, to a chemically reactive group on the solid support, such as an activated carboxyl, hydroxyl, or aldehyde group. Alternatively, streptavidin coated plates can be used in conjunction with biotinylated antigen(s).

[0370] Thus, the invention provides an assay system or kit for carrying out this diagnostic method. The kit generally includes a support with surface-bound recombinant antigens, and a reporter-labeled anti-human antibody for detecting surface-bound anti-antigen antibody.

[0371] Uses of the Polynucleotides

[0372] Each of the polynucleotides identified herein can be used in numerous ways as reagents. The following description should be considered exemplary and utilizes known techniques.

[0373] The polynucleotides of the present invention are useful for chromosome identification. There exists an ongoing need to identify new chromosome markers, since few chromosome marking reagents, based on actual sequence data (repeat polymorphisms), are presently available. Each sequence is specifically targeted to and can hybridize with a particular location on an individual human chromosome, thus each polynucleotide of the present invention can routinely be used as a chromosome marker using techniques known in the art. Table 1A, column 8 provides the chromosome location of some of the polynucleotides of the invention.

[0374] Briefly, sequences can be mapped to chromosomes by preparing PCR primers (preferably at least 15 bp (e.g., 15-25 bp) from the sequences shown in SEQ ID NO:X. Primers can optionally be selected using computer analysis so that primers do not span more than one predicted exon in the genomic DNA. These primers are then used for PCR screening of somatic cell hybrids containing individual human chromosomes. Only those hybrids containing the human gene corresponding to SEQ ID NO:X will yield an amplified fragment.

[0375] Similarly, somatic hybrids provide a rapid method of PCR mapping the polynucleotides to particular chromosomes. Three or more clones can be assigned per day using a single thermal cycler. Moreover, sublocalization of the polynucleotides can be achieved with panels of specific chromosome fragments. Other gene mapping strategies that can be used include in situ hybridization, prescreening with labeled flow-sorted chromosomes, preselection by hybridization to construct chromosome specific-cDNA libraries, and computer mapping techniques (See, e.g., Shuler, Trends Biotechnol 16:456-459 (1998) which is hereby incorporated by reference in its entirety).

[0376] Precise chromosomal location of the polynucleotides can also be achieved using fluorescence in situ hybridization (FISH) of a metaphase chromosomal spread. This technique uses polynucleotides as short as 500 or 600 bases; however, polynucleotides 2,000-4,000 bp are preferred. For a review of this technique, see Verma et al., “Human Chromosomes: a Manual of Basic Techniques,” Pergamon Press, New York (1988).

[0377] For chromosome mapping, the polynucleotides can be used individually (to mark a single chromosome or a single site on that chromosome) or in panels (for marking multiple sites and/or multiple chromosomes).

[0378] Thus, the present invention also provides a method for chromosomal localization which involves (a) preparing PCR primers from the polynucleotide sequences in Table 1A and/or Table 2 and SEQ ID NO:X and (b) screening somatic cell hybrids containing individual chromosomes.

[0379] The polynucleotides of the present invention would likewise be useful for radiation hybrid mapping, HAPPY mapping, and long range restriction mapping. For a review of these techniques and others known in the art, see, e.g. Dear, “Genome Mapping: A Practical Approach,” IRL Press at Oxford University Press, London (1997); Aydin, J. Mol. Med. 77:691-694 (1999); Hacia et al., Mol. Psychiatry 3:483-492 (1998); Herrick et al., Chromosome Res. 7:409-423 (1999); Hamilton et al., Methods Cell Biol. 62:265-280 (2000); and/or Ott, J. Hered. 90:68-70 (1999), each of which is hereby incorporated by reference in its entirety.

[0380] Once a polynucleotide has been mapped to a precise chromosomal location, the physical position of the polynucleotide can be used in linkage analysis. Linkage analysis establishes coinheritance between a chromosomal location and presentation of a particular disease. (Disease mapping data are found, for example, in V. McKusick, Mendelian Inheritance in Man (available on line through Johns Hopkins University Welch Medical Library).) Column 9 of Table 1A provides an OMIM reference identification number of diseases associated with the cytologic band disclosed in column 8 of Table 1A, as determined using techniques described herein and by reference to Table 5. Assuming 1 megabase mapping resolution and one gene per 20 kb, a cDNA precisely localized to a chromosomal region associated with the disease could be one of 50-500 potential causative genes.

[0381] Thus, once coinheritance is established, differences in a polynucleotide of the invention and the corresponding gene between affected and unaffected individuals can be examined. First, visible structural alterations in the chromosomes, such as deletions or translocations, are examined in chromosome spreads or by PCR. If no structural alterations exist, the presence of point mutations are ascertained. Mutations observed in some or all affected individuals, but not in normal individuals, indicate that the mutation may cause the disease. However, complete sequencing of the polypeptide and the corresponding gene from several normal individuals is required to distinguish the mutation from a polymorphism. If a new polymorphism is identified, this polymorphic polypeptide can be used for further linkage analysis.

[0382] Furthermore, increased or decreased expression of the gene in affected individuals as compared to unaffected individuals can be assessed using the polynucleotides of the invention. Any of these alterations (altered expression, chromosomal rearrangement, or mutation) can be used as a diagnostic or prognostic marker. Diagnostic and prognostic methods, kits and reagents encompassed by the present invention are briefly described below and more thoroughly elsewhere herein (see e.g., the sections labeled “Antibodies”, “Diagnostic Assays”, and “Methods for Detecting Musculoskeletal System Disease, Including Cancer”).

[0383] Thus, the invention also provides a diagnostic method useful during diagnosis of a disorder, involving measuring the expression level of polynucleotides of the present invention in cells or body fluid from an individual and comparing the measured gene expression level with a standard level of polynucleotide expression level, whereby an increase or decrease in the gene expression level compared to the standard is indicative of a disorder. Additional non-limiting examples of diagnostic methods encompassed by the present invention are more thoroughly described elsewhere herein (see, e.g., Example 12).

[0384] In still another embodiment, the invention includes a kit for analyzing samples for the presence of proliferative and/or cancerous polynucleotides derived from a test subject, as further described herein. In a general embodiment, the kit includes at least one polynucleotide probe containing a nucleotide sequence that will specifically hybridize with a polynucleotide of the invention and a suitable container. In a specific embodiment, the kit includes two polynucleotide probes defining an internal region of the polynucleotide of the invention, where each probe has one strand containing a 31'mer-end internal to the region. In a further embodiment, the probes may be useful as primers for polymerase chain reaction amplification.

[0385] Where a diagnosis of a related disorder, including, for example, diagnosis of a tumor, has already been made according to conventional methods, the present invention is useful as a prognostic indicator, whereby patients exhibiting enhanced or depressed polynucleotide of the invention expression will experience a worse clinical outcome relative to patients expressing the gene at a level nearer the standard level.

[0386] By “measuring the expression level of polynucleotides of the invention” is intended qualitatively or quantitatively measuring or estimating the level of the polypeptide of the invention or the level of the mRNA encoding the polypeptide of the invention in a first biological sample either directly (e.g., by determining or estimating absolute protein level or mRNA level) or relatively (e.g., by comparing to the polypeptide level or mRNA level in a second biological sample). Preferably, the polypeptide level or mRNA level in the first biological sample is measured or estimated and compared to a standard polypeptide level or mRNA level, the standard being taken from a second biological sample obtained from an individual not having the related disorder or being determined by averaging levels from a population of individuals not having a related disorder. As will be appreciated in the art, once a standard polypeptide level or mRNA level is known, it can be used repeatedly as a standard for comparison.

[0387] By “biological sample” is intended any biological sample obtained from an individual, body fluid, cell line, tissue culture, or other source which contains polypeptide of the present invention or the corresponding mRNA. As indicated, biological samples include body fluids (such as semen, lymph, vaginal pool, sera, plasma, urine, synovial fluid and spinal fluid) which contain the polypeptide of the present invention, and tissue sources found to express the polypeptide of the present invention. Methods for obtaining tissue biopsies and body fluids from mammals are well known in the art. Where the biological sample is to include mRNA, a tissue biopsy is the preferred source.

[0388] The method(s) provided above may preferably be applied in a diagnostic method and/or kits in which polynucleotides and/or polypeptides of the invention are attached to a solid support. In one exemplary method, the support may be a “gene chip” or a “biological chip” as described in U.S. Pat. Nos. 5,837,832, 5,874,219, and 5,856,174. Further, such a gene chip with polynucleotides of the invention attached may be used to identify polymorphisms between the isolated polynucleotide sequences of the invention, with polynucleotides isolated from a test subject. The knowledge of such polymorphisms (i.e., their location, as well as, their existence) would be beneficial in identifying disease loci for many disorders, such as for example, in neural disorders, immune system disorders, muscular disorders, reproductive disorders, gastrointestinal disorders, pulmonary disorders, digestive disorders, cardiovascular disorders, renal disorders, proliferative disorders, and/or cancerous diseases and conditions. Such a method is described in U.S. Pat. Nos. 5,858,659 and 5,856,104. The U.S. Patents referenced supra are hereby incorporated by reference in their entirety herein.

[0389] The present invention encompasses polynucleotides of the present invention that are chemically synthesized, or reproduced as peptide nucleic acids (PNA), or according to other methods known in the art. The use of PNAs would serve as the preferred form if the polynucleotides of the invention are incorporated onto a solid support, or gene chip. For the purposes of the present invention, a peptide nucleic acid (PNA) is a polyamide type of DNA analog and the monomeric units for adenine, guanine, thymine and cytosine are available commercially (Perceptive Biosystems). Certain components of DNA, such as phosphorus, phosphorus oxides, or deoxyribose derivatives, are not present in PNAs. As disclosed by Nielsen et al., Science 254:1497 (1991); and Egholm et al., Nature 365:666 (1993), PNAs bind specifically and tightly to complementary DNA strands and are not degraded by nucleases. In fact, PNA binds more strongly to DNA than DNA itself does. This is probably because there is no electrostatic repulsion between the two strands, and also the polyamide backbone is more flexible. Because of this, PNA/DNA duplexes bind under a wider range of stringency conditions than DNA/DNA duplexes, making it easier to perform multiplex hybridization. Smaller probes can be used than with DNA due to the strong binding. In addition, it is more likely that single base mismatches can be determined with PNA/DNA hybridization because a single mismatch in a PNA/DNA 15-mer lowers the melting point (T.sub.m) by 8°-20° C., vs. 4°-16° C. for the DNA/DNA 15-mer duplex. Also, the absence of charge groups in PNA means that hybridization can be done at low ionic strengths and reduce possible interference by salt during the analysis.

[0390] The compounds of the present invention have uses, which include, but are not limited to, detecting cancer in mammals. In particular the invention is useful during diagnosis of pathological cell proliferative neoplasias which include, but are not limited to: acute myelogenous leukemias including acute monocytic leukemia, acute myeloblastic leukemia, acute promyelocytic leukemia, acute myelomonocytic leukemia, acute erythroleukemia, acute megakaryocytic leukemia, and acute undifferentiated leukemia, etc.; and chronic myelogenous leukemias including chronic myelomonocytic leukemia, chronic granulocytic leukemia, etc. Preferred mammals include monkeys, apes, cats, dogs, cows, pigs, horses, rabbits and humans. Particularly preferred are humans.

[0391] The compounds of the present invention have preferred uses, which include, but are not limited to, detecting cancer of musculoskeletal system tissues in mammals. In particular the invention is useful during diagnosis of pathological cell proliferative neoplasias which include, but are not limited to: osteochondroma, benign chondroma, chondroblastoma, chondromyxoid fibroma, osteoid osteoma, giant cell tumor, multiple myeloma, osteosarcoma, fibrosarcoma, malignant fibrous histiocytoma, chondrosarcoma, Ewing's tumor, and malignant lymphoma of bone. Preferred mammals include monkeys, apes, cats, dogs, cows, pigs, horses, rabbits and humans. Particularly preferred are humans.

[0392] Pathological cell proliferative disorders are often associated with inappropriate activation of proto-oncogenes. (Gelmann, E. P. et al., “The Etiology of Acute Leukemia: Molecular Genetics and Viral Oncology,” in Neoplastic Diseases of the Blood, Vol 1., Wiernik, P. H. et al. eds., 161-182 (1985)). Neoplasias are now believed to result from the qualitative alteration of a normal cellular gene product, or from the quantitative modification of gene expression by insertion into the chromosome of a viral sequence, by chromosomal translocation of a gene to a more actively transcribed region, or by some other mechanism. (Gelmann et al., supra) It is likely that mutated or altered expression of specific genes is involved in the pathogenesis of some leukemias, among other tissues and cell types. (Gelmann et al., supra) Indeed, the human counterparts of the oncogenes involved in some animal neoplasias have been amplified or translocated in some cases of human leukemia and carcinoma. (Gelmann et al., supra)

[0393] For example, c-myc expression is highly amplified in the non-lymphocytic leukemia cell line HL-60. When HL-60 cells are chemically induced to stop proliferation, the level of c-myc is found to be downregulated. (International Publication Number WO 91/15580). However, it has been shown that exposure of HL-60 cells to a DNA construct that is complementary to the 5′ end of c-myc or c-myb blocks translation of the corresponding mRNAs which downregulates expression of the c-myc or c-myb proteins and causes arrest of cell proliferation and differentiation of the treated cells. (International Publication Number WO 91/15580; Wickstrom et al., Proc. Natl. Acad. Sci. 85:1028 (1988); Anfossi et al., Proc. Natl. Acad. Sci. 86:3379 (1989)). However, the skilled artisan would appreciate the present invention's usefulness is not be limited to treatment, prevention, diagnosis and/or prognosis, of proliferative disorders of cells and tissues of hematopoietic origin, in light of the numerous cells and cell types of varying origins which are known to exhibit proliferative phenotypes. In preferred embodiments, the compounds and/or methods of the invention are used to treat, prevent, diagnose, and/or prognose, proliferative disorders of musculoskeletal system cells and tissues.

[0394] In addition to the foregoing, a polynucleotide of the present invention can be used to control gene expression through triple helix formation or through antisense DNA or RNA. Antisense techniques are discussed, for example, in Okano, J. Neurochem. 56: 560 (1991); “Oligodeoxynucleotides as Antisense Inhibitors of Gene Expression, CRC Press, Boca Raton, Fla. (1988). Triple helix formation is discussed in, for instance Lee et al., Nucleic Acids Research 6: 3073 (1979); Cooney et al., Science 241: 456 (1988); and Dervan et al., Science 251: 1360 (1991). Both methods rely on binding of the polynucleotide to a complementary DNA or RNA. For these techniques, preferred polynucleotides are usually oligonucleotides 20 to 40 bases in length and complementary to either the region of the gene involved in transcription (triple helix—see Lee et al., Nucl. Acids Res. 6:3073 (1979); Cooney et al., Science 241:456 (1988); and Dervan et al., Science 251:1360 (1991)) or to the mRNA itself (antisense—Okano, J. Neurochem. 56:560 (1991); Oligodeoxy-nucleotides as Antisense Inhibitors of Gene Expression, CRC Press, Boca Raton, Fla. (1988).) Triple helix formation optimally results in a shut-off of RNA transcription from DNA, while antisense RNA hybridization blocks translation of an mRNA molecule into polypeptide. The oligonucleotide described above can also be delivered to cells such that the antisense RNA or DNA may be expressed in vivo to inhibit production of polypeptide of the present invention antigens. Both techniques are effective in model systems, and the information disclosed herein can be used to design antisense or triple helix polynucleotides in an effort to treat disease, and in particular, for the treatment of proliferative diseases and/or conditions. Non-limiting antisense and triple helix methods encompassed by the present invention are more thoroughly described elsewhere herein (see, e.g., the section labeled “Antisense and Ribozyme (Antagonists)”).

[0395] Polynucleotides of the present invention are also useful in gene therapy. One goal of gene therapy is to insert a normal gene into an organism having a defective gene, in an effort to correct the genetic defect. The polynucleotides disclosed in the present invention offer a means of targeting such genetic defects in a highly accurate manner. Another goal is to insert a new gene that was not present in the host genome, thereby producing a new trait in the host cell. Additional non-limiting examples of gene therapy methods encompassed by the present invention are more thoroughly described elsewhere herein (see, e.g., the sections labeled “Gene Therapy Methods” and Examples 16, 17 and 18).

[0396] The polynucleotides are also useful for identifying individuals from minute biological samples. The United States military, for example, is considering the use of restriction fragment length polymorphism (RFLP) for identification of its personnel. In this technique, an individual's genomic DNA is digested with one or more restriction enzymes, and probed on a Southern blot to yield unique bands for identifying personnel. This method does not suffer from the current limitations of “Dog Tags” which can be lost, switched, or stolen, making positive identification difficult. The polynucleotides of the present invention can be used as additional DNA markers for RFLP.

[0397] The polynucleotides of the present invention can also be used as an alternative to RFLP, by determining the actual base-by-base DNA sequence of selected portions of an individual's genome. These sequences can be used to prepare PCR primers for amplifying and isolating such selected DNA, which can then be sequenced. Using this technique, individuals can be identified because each individual will have a unique set of DNA sequences. Once an unique ID database is established for an individual, positive identification of that individual, living or dead, can be made from extremely small tissue samples.

[0398] Forensic biology also benefits from using DNA-based identification techniques as disclosed herein. DNA sequences taken from very small biological samples such as tissues, e.g., hair or skin, or body fluids, e.g., blood, saliva, semen, synovial fluid, amniotic fluid, breast milk, lymph, pulmonary sputum or surfactant, urine, fecal matter, etc., can be amplified using PCR. In one prior art technique, gene sequences amplified from polymorphic loci, such as DQa class II HLA gene, are used in forensic biology to identify individuals. (Erlich, H., PCR Technology, Freeman and Co. (1992).) Once these specific polymorphic loci are amplified, they are digested with one or more restriction enzymes, yielding an identifying set of bands on a Southern blot probed with DNA corresponding to the DQa class II HLA gene. Similarly, polynucleotides of the present invention can be used as polymorphic markers for forensic purposes.

[0399] There is also a need for reagents capable of identifying the source of a particular tissue. Such need arises, for example, in forensics when presented with tissue of unknown origin. Appropriate reagents can comprise, for example, DNA probes or primers prepared from the sequences of the present invention, specific to tissues, including but not limited to, those sequences referred to in Table 1A. Panels of such reagents can identify tissue by species and/or by organ type. In a similar fashion, these reagents can be used to screen tissue cultures for contamination. Additional non-limiting examples of such uses are further described herein.

[0400] Because musculoskeletal system antigens are found expressed in musculoskeletal system tissues, the polynucleotides of the present invention are also useful as hybridization probes for differential identification of the tissue(s) or cell type(s) present in a biological sample. Similarly, polypeptides and antibodies directed to polypeptides of the present invention are useful to provide immunological probes for differential identification of the tissue(s) (e.g., immunohistochemistry assays) or cell type(s) (e.g., immunocytochemistry assays). In a specific embodiment, the polynucleotides of the present invention are also useful as hybridization probes for differential identification of musculoskeletal system tissue(s) or cell type(s) present in a biological sample. Similarly, polypeptides and antibodies directed to polypeptides of the present invention are useful to provide immunological probes for differential identification of musculoskeletal system tissue(s) (e.g., immunohistochemistry assays) or cell type(s) (e.g., immunocytochemistry assays). In addition, for a number of disorders of the above tissues or cells, significantly higher or lower levels of gene expression of the polynucleotides/polypeptides of the present invention may be detected in certain tissues (e.g., tissues expressing polypeptides and/or polynucleotides of the present invention, for example, normal musculoskeletal system tissues or diseased musculoskeletal system tissues, and/or those tissues/cells corresponding to the library source relating to a polynucleotide sequence of the invention as disclosed in column 7 of Table 1A, and/or cancerous and/or wounded tissues) or bodily fluids (e.g., semen, lymph, vaginal pool, serum, plasma, urine, synovial fluid or spinal fluid) taken from an individual having such a disorder, relative to a “standard” gene expression level, i.e., the expression level in healthy tissue from an individual not having the disorder.

[0401] Thus, the invention provides a diagnostic method of a disorder, which involves: (a) assaying gene expression level in cells or body fluid of an individual; (b) comparing the gene expression level with a standard gene expression level, whereby an increase or decrease in the assayed gene expression level compared to the standard expression level is indicative of a disorder.

[0402] In the very least, the polynucleotides of the present invention can be used as molecular weight markers on Southern gels, as diagnostic probes for the presence of a specific mRNA in a particular cell type, as a probe to “subtract-out” known sequences in the process of discovering novel polynucleotides, for selecting and making oligomers for attachment to a “gene chip” or other support, to raise anti-DNA antibodies using DNA immunization techniques, and as an antigen to elicit an immune response.

[0403] Uses of the Polypeptides

[0404] Each of the polypeptides identified herein can be used in numerous ways. The following description should be considered exemplary and utilizes known techniques.

[0405] Polypeptides and antibodies directed to polypeptides of the present invention are useful to provide immunological probes for differential identification of the tissue(s) (e.g., immunohistochemistry assays such as, for example, ABC immunoperoxidase (Hsu et al., J. Histochem. Cytochem. 29:577-580 (1981)) or cell type(s) (e.g., immunocytochemistry assays).

[0406] Antibodies can be used to assay levels of polypeptides encoded by polynucleotides of the invention in a biological sample using classical immunohistological methods known to those of skill in the art (see, e.g., Jalkanen, et al., J. Cell. Biol. 101:976-985 (1985); Jalkanen, et al., J. Cell. Biol. 105:3087-3096 (1987)). Other antibody-based methods useful for detecting protein gene expression include immunoassays, such as the enzyme linked immunosorbent assay (ELISA) and the radioimmunoassay (RIA). Suitable antibody assay labels are known in the art and include enzyme labels, such as, glucose oxidase; radioisotopes, such as iodine (¹³¹I, ¹²⁵I, ¹²³I, ¹²¹I), carbon (¹⁴C), sulfur (³⁵S), tritium (³H), indium (^{115m}In, ^{113m}In, ¹¹²In, ¹¹¹In), and technetium (⁹⁹Tc, ^{99m}Tc), thallium (²⁰¹Ti), gallium (⁶⁸Ga, ⁶⁷Ga), palladium (¹⁰³Pd), molybdenum (⁹⁹Mo), xenon (¹³³Xe), fluorine (¹⁸F), ¹⁵³Sm, ¹⁷⁷Lu, ¹⁵⁹Gd, ¹⁴⁹Pm, ¹⁴⁰La, ¹⁷⁵Yb, ¹⁶⁶Ho, ⁹⁰Y, ⁴⁷Sc, 186Re, ¹⁸⁸Re, ¹⁴²Pr, ¹⁰⁵Rh, ⁹⁷Ru; luminescent labels, such as luminol; and fluorescent labels, such as fluorescein and rhodamine, and biotin.

[0407] In addition to assaying levels of polypeptide of the present invention in a biological sample, proteins can also be detected in vivo by imaging. Antibody labels or markers for in vivo imaging of protein include those detectable by X-radiography, NMR or ESR. For X-radiography, suitable labels include radioisotopes such as barium or cesium, which emit detectable radiation but are not overtly harmful to the subject. Suitable markers for NMR and ESR include those with a detectable characteristic spin, such as deuterium, which may be incorporated into the antibody by labeling of nutrients for the relevant hybridoma.

[0408] A musculoskeletal system antigen-specific antibody or antibody fragment which has been labeled with an appropriate detectable imaging moiety, such as a radioisotope (for example, ¹³¹I, ¹¹²In, ^{99m}Tc, (131I, ¹²⁵I, ¹²³I, ¹²¹I), carbon (¹⁴C), sulfur (³⁵S), tritium (³H), indium (^{115m}In, ^{113m}In, ¹¹²In, ¹¹¹In), and technetium (⁹⁹Tc, ^{99m}Tc), thallium (²⁰¹Ti), gallium (⁶⁸Ga, ⁶⁷Ga), palladium (¹⁰³Pd), molybdenum (⁹⁹Mo), xenon (¹³³ Xe), fluorine (¹⁸F, ¹⁵³Sm, ¹⁷⁷Lu, ¹⁵⁹Gd, ¹⁴⁹Pm, ¹⁴⁰La, ¹⁷⁵Yb, ¹⁶⁶Ho, ⁹⁰Y, ⁴⁷Sc, ¹⁸⁶Re, ¹⁸⁸Re, ¹⁴²Pr, ¹⁰⁵Rh, ⁹⁷Ru), a radio-opaque substance, or a material detectable by nuclear magnetic resonance, is introduced (for example, parenterally, subcutaneously or intraperitoneally) into the mammal to be examined for musculoskeletal system disorder. It will be understood in the art that the size of the subject and the imaging system used will determine the quantity of imaging moiety needed to produce diagnostic images. In the case of a radioisotope moiety, for a human subject, the quantity of radioactivity injected will normally range from about 5 to 20 millicuries of ^{99m}Tc. The labeled antibody or antibody fragment will then preferentially accumulate at the location of cells which express the polypeptide encoded by a polynucleotide of the invention. In vivo tumor imaging is described in S. W. Burchiel et al., “Immunopharmacokinetics of Radiolabeled Antibodies and Their Fragments” (Chapter 13 in Tumor Imaging: The Radiochemical Detection of Cancer, S. W. Burchiel and B. A. Rhodes, eds., Masson Publishing Inc. (1982)).

[0409] In one embodiment, the invention provides a method for the specific delivery of compositions of the invention to cells by administering polypeptides of the invention (e.g., polypeptides encoded by polynucleotides of the invention and/or antibodies) that are associated with heterologous polypeptides or nucleic acids. In one example, the invention provides a method for delivering a therapeutic protein into the targeted cell. In another example, the invention provides a method for delivering a single stranded nucleic acid (e.g., antisense or ribozymes) or double stranded nucleic acid (e.g., DNA that can integrate into the cell's genome or replicate episomally and that can be transcribed) into the targeted cell.

[0410] In another embodiment, the invention provides a method for the specific destruction of cells (e.g., the destruction of tumor cells) by administering polypeptides of the invention in association with toxins or cytotoxic prodrugs.

[0411] In a preferred embodiment, the invention provides a method for the specific destruction of musculoskeletal system cells (e.g., aberrant musculoskeletal system cells, musculoskeletal system neoplasm) by administering polypeptides of the invention (e.g., polypeptides encoded by polynucleotides of the invention and/or antibodies) in association with toxins or cytotoxic prodrugs. In another preferred embodiment the invention provides a method for the specific destruction of tissues/cells corresponding to the library source relating to a polynucleotide sequence of the invention as disclosed in column 7 of Table 1A by administering polypeptides of the invention in association with toxins or cytotoxic prodrugs.

[0412] By “toxin” is meant one or more compounds that bind and activate endogenous cytotoxic effector systems, radioisotopes, holotoxins, modified toxins, catalytic subunits of toxins, or any molecules or enzymes not normally present in or on the surface of a cell that under defined conditions cause the cell's death. Toxins that may be used according to the methods of the invention include, but are not limited to, radioisotopes known in the art, compounds such as, for example, antibodies (or complement fixing containing portions thereof) that bind an inherent or induced endogenous cytotoxic effector system, thymidine kinase, endonuclease, RNAse, alpha toxin, ricin, abrin, Pseudomonas exotoxin A, diphtheria toxin, saporin, momordin, gelonin, pokeweed antiviral protein, alpha-sarcin and cholera toxin. “Toxin” also includes a cytostatic or cytocidal agent, a therapeutic agent or a radioactive metal ion, e.g., alpha-emitters such as, for example, ²¹³Bi, or other radioisotopes such as, for example, ¹⁰³Pd, ¹³³Xe, ¹³¹I, ¹¹¹In, 68Ge, ⁵⁷Co, ⁶⁵Zn, ⁸⁵Sr, ³²P, ³⁵S, ⁹⁰Y, ¹⁵³Sm, ⁵³Gd, ¹⁶⁹Yb, ⁵¹Cr, ⁵⁴Mn, ⁷⁵Se, ¹¹³Sn, ⁹⁰Yttrium, ¹¹⁷Tin, ¹⁸⁶Rhenium, ¹⁶⁶Holmium, and ¹⁸⁸Rhenium; luminescent labels, such as luminol; and fluorescent labels, such as fluorescein and rhodamine, and biotin.

[0413] In a specific embodiment, the invention provides a method for the specific destruction of cells (e.g., the destruction of tumor cells) by administering polypeptides of the invention or antibodies of the invention in association with the radioisotope ⁹⁰Y. In another specific embodiment, the invention provides a method for the specific destruction of cells (e.g., the destruction of tumor cells) by administering polypeptides of the invention or antibodies of the invention in association with the radioisotope ¹¹¹In. In a further specific embodiment, the invention provides a method for the specific destruction of cells (e.g., the destruction of tumor cells) by administering polypeptides of the invention or antibodies of the invention in association with the radioisotope ¹³¹i.

[0414] Techniques known in the art may be applied to label polypeptides of the invention (including antibodies). Such techniques include, but are not limited to, the use of bifunctional conjugating agents (see e.g., U.S. Pat. Nos. 5,756,065; 5,714,631; 5,696,239; 5,652,361; 5,505,931; 5,489,425; 5,435,990; 5,428,139; 5,342,604; 5,274,119; 4,994,560; and 5,808,003; the contents of each of which are hereby incorporated by reference in its entirety).

[0415] Thus, the invention provides a diagnostic method of a disorder, which involves (a) assaying the expression level of a polypeptide of the present invention in cells or body fluid of an individual; and (b) comparing the assayed polypeptide expression level with a standard polypeptide expression level, whereby an increase or decrease in the assayed polypeptide expression level compared to the standard expression level is indicative of a disorder. With respect to cancer, the presence of a relatively high amount of transcript in biopsied tissue from an individual may indicate a predisposition for the development of the disease, or may provide a means for detecting the disease prior to the appearance of actual clinical symptoms. A more definitive diagnosis of this type may allow health professionals to employ preventative measures or aggressive treatment earlier thereby preventing the development or further progression of the cancer.

[0416] Moreover, polypeptides of the present invention can be used to treat or prevent diseases or conditions of the musculoskeletal system such as, for example, bone disorders (e.g., osteoporosis, osteomyelitis, Paget's disease, and sciolosis); joint disorders (e.g., osteoarthritis, rheumatoid arthritis, infectious arthritis, systemic lupus erythematosus, gout, and Reiter's syndrome); ligament, tendon, and bursa disorders (e.g., bursitis, tendinitis, and tenosynovitis); muscle disorders (e.g., muscular dystrophy, Pompe's disease, periodic paralysis, polymyalgia rheumatica, polymyositis, and Steinert's disease), neoplasms and/or cancers of musculoskeletal tissues (e.g., osteochondroma, benign chondroma, chondroblastoma, osteoid osteoma, and giant cell tumor), and/or those disorders described under “Musculoskeletal System Disorders”. In preferred embodiments, polynucleotides expressed in a particular tissue type (see, e.g., Table 1A, column 7) are used to diagnose, detect, prevent, treat and/or prognose disorders associated with the tissue type. For example, patients can be administered a polypeptide of the present invention in an effort to replace absent or decreased levels of the polypeptide (e.g., insulin), to supplement absent or decreased levels of a different polypeptide (e.g., hemoglobin S for hemoglobin B, SOD, catalase, DNA repair proteins), to inhibit the activity of a polypeptide (e.g., an oncogene or tumor supressor), to activate the activity of a polypeptide (e.g., by binding to a receptor), to reduce the activity of a membrane bound receptor by competing with it for free ligand (e.g., soluble TNF receptors used in reducing inflammation), or to bring about a desired response (e.g., blood vessel growth inhibition, enhancement of the immune response to proliferative cells or tissues).

[0417] Similarly, antibodies directed to a polypeptide of the present invention can also be used to treat disease (as described supra, and elsewhere herein). For example, administration of an antibody directed to a polypeptide of the present invention can bind, and/or neutralize the polypeptide, and/or reduce overproduction of the polypeptide. Similarly, administration of an antibody can activate the polypeptide, such as by binding to a polypeptide bound to a membrane (receptor).

[0418] At the very least, the polypeptides of the present invention can be used as molecular weight markers on SDS-PAGE gels or on molecular sieve gel filtration columns using methods well known to those of skill in the art. Polypeptides can also be used to raise antibodies, which in turn are used to measure protein expression from a recombinant cell, as a way of assessing transformation of the host cell. Moreover, the polypeptides of the present invention can be used to test the biological activities described herein.

[0419] Diagnostic Asssays

[0420] The compounds of the present invention are useful for diagnosis, treatment, prevention and/or prognosis of various musculoskeletal system related disorders in mammals, preferably humans. Such disorders include, but are not limited to bone disorders (e.g., osteoporosis, osteomyelitis, Paget's disease, and sciolosis); joint disorders (e.g., osteoarthritis, rheumatoid arthritis, infectious arthritis, systemic lupus erythematosus, gout, and Reiter's syndrome); ligament, tendon, and bursa disorders (e.g., bursitis, tendinitis, and tenosynovitis); muscle disorders (e.g., muscular dystrophy, Pompe's disease, periodic paralysis, polymyalgia rheumatica, polymyositis, and Steinert's disease), neoplasms and/or cancers of musculoskeletal tissues (e.g., osteochondroma, benign chondroma, chondroblastoma, osteoid osteoma, and giant cell tumor), and/or those disorders described under “Musculoskeletal System Disorders”. In preferred embodiments, polynucleotides expressed in a particular tissue type (see, e.g., Table 1A, column 7) are used to diagnose, detect, prevent, treat and/or prognose disorders associated with the tissue type.

[0421] Musculoskeletal system antigens are expressed in the musculoskeletal system, with an increased expression level in musculoskeletal system tissues. For a number of musculoskeletal system-related disorders, substantially altered (increased or decreased) levels of musculoskeletal system antigen gene expression can be detected in musculoskeletal system tissue or other cells or bodily fluids (e.g., sera, plasma, urine, semen, synovial fluid or spinal fluid) taken from an individual having such a disorder, relative to a “standard” musculoskeletal system antigen gene expression level, that is, the musculoskeletal system antigen expression level in musculoskeletal system tissues or bodily fluids from an individual not having the musculoskeletal system disorder. Thus, the invention provides a diagnostic method useful during diagnosis of a musculoskeletal system disorder, which involves measuring the expression level of the gene encoding the musculoskeletal system associated polypeptide in musculoskeletal system tissue or other cells or body fluid from an individual and comparing the measured gene expression level with a standard musculoskeletal system antigens gene expression level, whereby an increase or decrease in the gene expression level(s) compared to the standard is indicative of a musculoskeletal system disorder.

[0422] In specific embodiments, the invention provides a diagnostic method useful during diagnosis of a disorder of a normal or diseased tissue/cell source corresponding to column 7 of Table 1 A, which involves measuring the expression level of the coding sequence of a polynucleotide sequence associated with this tissue/cell source as disclosed in Table 1A in the tissue/cell source or other cells or body fluid from an individual and comparing the expression level of the coding sequence with a standard expression level of the coding sequence of a polynucleotide sequence, whereby an increase or decrease in the gene expression level(s) compared to the standard is indicative of a disorder of a normal or diseased tissue/cell source corresponding to column 7 of Table 1A.

[0423] In particular, it is believed that certain tissues in mammals with cancer of cells or tissue of the musculoskeletal system express significantly enhanced or reduced levels of normal or altered musculoskeletal system antigen expression and mRNA encoding the musculoskeletal system associated polypeptide when compared to a corresponding “standard” level. Further, it is believed that enhanced or depressed levels of the musculoskeletal system associated polypeptide can be detected in certain body fluids (e.g., sera, plasma, urine, and spinal fluid) or cells or tissue from mammals with such a cancer when compared to sera from mammals of the same species not having the cancer.

[0424] For example, as disclosed herein, musculoskeletal system associated polypeptides of the invention are expressed in musculoskeletal system tissues. Accordingly, polynucleotides of the invention (e.g., polynucleotide sequences complementary to all or a portion of a musculoskeletal system antigen mRNA nucleotide sequence of SEQ ID NO:X, nucleotide sequence encoding SEQ ID NO:Y, nucleotide sequence encoding a polypeptide encoded by SEQ ID NO:X and/or a nucleotide sequence delineated by columns 8 and 9 of Table 2) and antibodies (and antibody fragments) directed against the polypeptides of the invention may be used to quantitate or qualitate concentrations of cells of the musculoskeletal system expressing musculoskeletal system antigens, preferrably on their cell surfaces. These polynucleotides and antibodies additionally have diagnostic applications in detecting abnormalities in the level of musculoskeletal system antigens gene expression, or abnormalities in the structure and/or temporal, tissue, cellular, or subcellular location of musculoskeletal system antigens. These diagnostic assays may be performed in vivo or in vitro, such as, for example, on blood samples, biopsy tissue or autopsy tissue. In specific embodiments, polynucleotides and antibodies of the invention are used to quantitate or qualitate tissues/cells corresponding to the library source disclosed in column 7 of Table 1A expressing the corresponding musculoskeletal system sequence disclosed in the same row of Table 1A, preferrably on their cell surface.

[0425] Thus, the invention provides a diagnostic method useful during diagnosis of a musculoskeletal system disorder, including cancers, which involves measuring the expression level of the gene encoding the musculoskeletal system antigen polypeptide in musculoskeletal system tissue or other cells or body fluid from an individual and comparing the measured gene expression level with a standard musculoskeletal system antigen gene expression level, whereby an increase or decrease in the gene expression level compared to the standard is indicative of a musculoskeletal system disorder. In specific embodiments, polynucleotides and antibodies of the invention are used to quantitate or qualitate tissues/cells corresponding to the library source disclosed in column 7 of Table 1A expressing the corresponding musculoskeletal system sequence disclosed in the same row of Table 1A, preferrably on their cell surface.

[0426] Where a diagnosis of a disorder in the musculoskeletal system, including diagnosis of a tumor, has already been made according to conventional methods, the present invention is useful as a prognostic indicator, whereby patients exhibiting enhanced or depressed musculoskeletal system antigen gene expression will experience a worse clinical outcome relative to patients expressing the gene at a level nearer the standard level.

[0427] By “assaying the expression level of the gene encoding the musculoskeletal system associated polypeptide” is intended qualitatively or quantitatively measuring or estimating the level of the musculoskeletal system antigen polypeptide or the level of the mRNA encoding the musculoskeletal system antigen polypeptide in a first biological sample either directly (e.g., by determining or estimating absolute protein level or mRNA level) or relatively (e.g., by comparing to the musculoskeletal system associated polypeptide level or mRNA level in a second biological sample). Preferably, the musculoskeletal system antigen polypeptide expression level or mRNA level in the first biological sample is measured or estimated and compared to a standard musculoskeletal system antigen polypeptide level or mRNA level, the standard being taken from a second biological sample obtained from an individual not having the disorder or being determined by averaging levels from a population of individuals not having a disorder of the musculoskeletal system. As will be appreciated in the art, once a standard musculoskeletal system antigen polypeptide level or mRNA level is known, it can be used repeatedly as a standard for comparison.

[0428] By “biological sample” is intended any biological sample obtained from an individual, cell line, tissue culture, or other source containing musculoskeletal system antigen polypeptides (including portions thereof) or mRNA. As indicated, biological samples include body fluids (such as sera, plasma, urine, synovial fluid and spinal fluid) which contain cells expressing musculoskeletal system antigen polypeptides, musculoskeletal system tissue, and other tissue sources found to express the full length or fragments thereof of a musculoskeletal system antigen. Methods for obtaining tissue biopsies and body fluids from mammals are well known in the art. Where the biological sample is to include mRNA, a tissue biopsy is the preferred source.

[0429] Total cellular RNA can be isolated from a biological sample using any suitable technique such as the single-step guanidinium-thiocyanate-phenol-chloroform method described in Chomczynski and Sacchi, Anal. Biochem. 162:156-159 (1987). Levels of mRNA encoding the musculoskeletal system antigen polypeptides are then assayed using any appropriate method. These include Northern blot analysis, S1 nuclease mapping, the polymerase chain reaction (PCR), reverse transcription in combination with the polymerase chain reaction (RT-PCR), and reverse transcription in combination with the ligase chain reaction (RT-LCR).

[0430] The present invention also relates to diagnostic assays such as quantitative and diagnostic assays for detecting levels of musculoskeletal system antigen polypeptides, in a biological sample (e.g., cells and tissues), including determination of normal and abnormal levels of polypeptides. Thus, for instance, a diagnostic assay in accordance with the invention for detecting over-expression of musculoskeletal system antigens compared to normal control tissue samples may be used to detect the presence of tumors. Assay techniques that can be used to determine levels of a polypeptide, such as a musculoskeletal system antigen polypeptide of the present invention in a sample derived from a host are well-known to those of skill in the art. Such assay methods include radioimmunoassays, competitive-binding assays, Western Blot analysis and ELISA assays. Assaying musculoskeletal system antigen polypeptide levels in a biological sample can occur using any art-known method.

[0431] Assaying musculoskeletal system antigen polypeptide levels in a biological sample can occur using antibody-based techniques. For example, musculoskeletal system antigen polypeptide expression in tissues can be studied with classical immunohistological methods (Jalkanen et al., J. Cell. Biol. 101:976-985 (1985); Jalkanen, M., et al., J. Cell. Biol. 105:3087-3096 (1987)). Other antibody-based methods useful for detecting musculoskeletal system antigen polypeptide gene expression include immunoassays, such as the enzyme linked immunosorbent assay (ELISA) and the radioimmunoassay (RIA). Suitable antibody assay labels are known in the art and include enzyme labels, such as, glucose oxidase, and radioisotopes, such as iodine (¹²⁵I, ¹²¹I), carbon (¹⁴C), sulfur (³⁵S), tritium (³H), indium (¹¹²In), and technetium (^{99m}Tc), and fluorescent labels, such as fluorescein and rhodamine, and biotin.

[0432] The tissue or cell type to be analyzed will generally include those, which are known, or suspected, to express the musculoskeletal system antigen gene (such as, for example, cells of the musculoskeletal system or cancer of musculoskeletal system tissues). The protein isolation methods employed herein may, for example, be such as those described in Harlow and Lane (Harlow, E. and Lane, D., 1988, “Antibodies: A Laboratory Manual”, Cold Spring Harbor Laboratory Press, Cold Spring Harbor, New York), which is incorporated herein by reference in its entirety. The isolated cells can be derived from cell culture or from a patient. The analysis of cells taken from culture may be a necessary step in the assessment of cells that could be used as part of a cell-based gene therapy technique or, alternatively, to test the effect of compounds on the expression of the musculoskeletal system antigen gene.

[0433] For example, antibodies, or fragments of antibodies, such as those described herein, may be used to quantitatively or qualitatively detect the presence of musculoskeletal system antigen gene products or conserved variants or peptide fragments thereof. This can be accomplished, for example, by immunofluorescence techniques employing a fluorescently labeled antibody coupled with light microscopic, flow cytometric, or fluorimetric detection.

[0434] In a preferred embodiment, antibodies, or fragments of antibodies directed to any one or all of the predicted epitope domains of the musculoskeletal system antigen polypeptides (Shown in Table 1A, column 6) may be used to quantitatively or qualitatively detect the presence of musculoskeletal system antigen gene products or conserved variants or peptide fragments thereof. This can be accomplished, for example, by immunofluorescence techniques employing a fluorescently labeled antibody coupled with light microscopic, flow cytometric, or fluorimetric detection.

[0435] In an additional preferred embodiment, antibodies, or fragments of antibodies directed to a conformational epitope of a musculoskeletal system antigen may be used to quantitatively or qualitatively detect the presence of musculoskeletal system antigen gene products or conserved variants or peptide fragments thereof. This can be accomplished, for example, by immunofluorescence techniques employing a fluorescently labeled antibody coupled with light microscopic, flow cytometric, or fluorimetric detection.

[0436] The antibodies (or fragments thereof), and/or musculoskeletal system antigen polypeptides of the present invention may, additionally, be employed histologically, as in immunofluorescence, immunoelectron microscopy or non-immunological assays, for in situ detection of musculoskeletal system antigen gene products or conserved variants or peptide fragments thereof. In situ detection may be accomplished by removing a histological specimen from a patient, and applying thereto a labeled antibody or musculoskeletal system antigen polypeptide of the present invention. The antibody (or fragment thereof) or musculoskeletal system antigen polypeptide is preferably applied by overlaying the labeled antibody (or fragment) onto a biological sample. Through the use of such a procedure, it is possible to determine not only the presence of the musculoskeletal system antigen gene product, or conserved variants or peptide fragments, or musculoskeletal system antigen polypeptide binding, but also its distribution in the examined tissue. Using the present invention, those of ordinary skill will readily perceive that any of a wide variety of histological methods (such as staining procedures) can be modified in order to achieve such in situ detection.

[0437] Immunoassays and non-immunoassays for musculoskeletal system antigen gene products or conserved variants or peptide fragments thereof will typically comprise incubating a sample, such as a biological fluid, a tissue extract, freshly harvested cells, or lysates of cells which have been incubated in cell culture, in the presence of a detectably labeled antibody capable of binding musculoskeletal system antigen gene products or conserved variants or peptide fragments thereof, and detecting the bound antibody by any of a number of techniques well-known in the art.

[0438] The biological sample may be brought in contact with and immobilized onto a solid phase support or carrier such as nitrocellulose, or other solid support which is capable of immobilizing cells, cell particles or soluble proteins. The support may then be washed with suitable buffers followed by treatment with the detectably labeled anti-musculoskeletal system antigen antibody or detectable musculoskeletal system antigen polypeptide. The solid phase support may then be washed with the buffer a second time to remove unbound antibody or polypeptide. Optionally the antibody is subsequently labeled. The amount of bound label on solid support may then be detected by conventional means.

[0439] By “solid phase support or carrier” is intended any support capable of binding an antigen or an antibody. Well-known supports or carriers include glass, polystyrene, polypropylene, polyethylene, dextran, nylon, amylases, natural and modified celluloses, polyacrylamides, gabbros, and magnetite. The nature of the carrier can be either soluble to some extent or insoluble for the purposes of the present invention. The support material may have virtually any possible structural configuration so long as the coupled molecule is capable of binding to an antigen or antibody. Thus, the support configuration may be spherical, as in a bead, or cylindrical, as in the inside surface of a test tube, or the external surface of a rod. Alternatively, the surface may be flat such as a sheet, test strip, etc. Preferred supports include polystyrene beads. Those skilled in the art will know many other suitable carriers for binding antibody or antigen, or will be able to ascertain the same by use of routine experimentation.

[0440] The binding activity of a given lot of anti-musculoskeletal system antigen antibody or musculoskeletal system antigen polypeptide may be determined according to well-known methods. Those skilled in the art will be able to determine operative and optimal assay conditions for each determination by employing routine experimentation.

[0441] In addition to assaying musculoskeletal system antigen polypeptide levels or polynucleotide levels in a biological sample obtained from an individual, musculoskeletal system antigen polypeptide or polynucleotide can also be detected in vivo by imaging. For example, in one embodiment of the invention, musculoskeletal system antigen polypeptide and/or anti-musculoskeletal system antigen antibodies are used to image musculoskeletal system diseased cells, such as neoplasms. In another embodiment, musculoskeletal system antigen polynucleotides of the invention (e.g., polynucleotides complementary to all or a portion of musculoskeletal system antigen mRNA) and/or anti-musculoskeletal system antigen antibodies (e.g., antibodies directed to any one or a combination of the epitopes of musculoskeletal system antigens, antibodies directed to a conformational epitope of musculoskeletal system antigens, antibodies directed to the full length polypeptide expressed on the cell surface of a mammalian cell) are used to image diseased or neoplastic cells of the musculoskeletal system.

[0442] Antibody labels or markers for in vivo imaging of musculoskeletal system antigen polypeptides include those detectable by X-radiography, NMR, MRI, CAT-scans or ESR. For X-radiography, suitable labels include radioisotopes such as barium or cesium, which emit detectable radiation but are not overtly harmful to the subject. Suitable markers for NMR and ESR include those with a detectable characteristic spin, such as deuterium, which may be incorporated into the antibody by labeling of nutrients for the relevant hybridoma. Where in vivo imaging is used to detect enhanced levels of musculoskeletal system antigen polypeptides for diagnosis in humans, it may be preferable to use human antibodies or “humanized” chimeric monoclonal antibodies. Such antibodies can be produced using techniques described herein or otherwise known in the art. For example methods for producing chimeric antibodies are known in the art. See, for review, Morrison, Science 229:1202 (1985); Oi et al., BioTechniques 4:214 (1986); Cabilly et al., U.S. Pat. No. 4,816,567; Taniguchi et al., EP 171496; Morrison et al., EP 173494; Neuberger et al., WO 8601533; Robinson et al., WO 8702671; Boulianne et al, Nature 312:643 (1984); Neuberger et al., Nature 314:268 (1985).

[0443] Additionally, any musculoskeletal system antigen polypeptides whose presence can be detected, can be administered. For example, musculoskeletal system antigen polypeptides labeled with a radio-opaque or other appropriate compound can be administered and visualized in vivo, as discussed, above for labeled antibodies. Further such musculoskeletal system antigen polypeptides can be utilized for in vitro diagnostic procedures.

[0444] A musculoskeletal system antigen polypeptide-specific antibody or antibody fragment which has been labeled with an appropriate detectable imaging moiety, such as a radioisotope (for example, ¹³¹I, ¹¹²In, ^{99m}Tc), a radio-opaque substance, or a material detectable by nuclear magnetic resonance, is introduced (for example, parenterally, subcutaneously or intraperitoneally) into the mammal to be examined for a musculoskeletal system disorder. It will be understood in the art that the size of the subject and the imaging system used will determine the quantity of imaging moiety needed to produce diagnostic images. In the case of a radioisotope moiety, for a human subject, the quantity of radioactivity injected will normally range from about 5 to 20 millicuries of ^{99m}Tc. The labeled antibody or antibody fragment will then preferentially accumulate at the location of cells which contain musculoskeletal system antigen protein. In vivo tumor imaging is described in S. W. Burchiel et al., “Immunopharmacokinetics of Radiolabeled Antibodies and Their Fragments” (Chapter 13 in Tumor Imaging: The Radiochemical Detection of Cancer, S. W. Burchiel and B. A. Rhodes, eds., Masson Publishing Inc. (1982)).

[0445] With respect to antibodies, one of the ways in which the anti-musculoskeletal system antigen antibody can be detectably labeled is by linking the same to an enzyme and using the linked product in an enzyme immunoassay (EIA) (Voller, A., “The Enzyme Linked Immunosorbent Assay (ELISA)”, 1978, Diagnostic Horizons 2:1-7, Microbiological Associates Quarterly Publication, Walkersville, Md.); Voller et al., J. Clin. Pathol. 31:507-520 (1978); Butler, J. E., Meth. Enzymol. 73:482-523 (1981); Maggio, E. (ed.), 1980, Enzyme Immunoassay, CRC Press, Boca Raton, Fla.,; Ishikawa, E. et al., (eds.), 1981, Enzyme Immunoassay, Kgaku Shoin, Tokyo). The enzyme, which is bound to the antibody will react with an appropriate substrate, preferably a chromogenic substrate, in such a manner as to produce a chemical moiety which can be detected, for example, by spectrophotometric, fluorimetric or by visual means. Enzymes which can be used to detectably label the antibody include, but are not limited to, malate dehydrogenase, staphylococcal nuclease, delta-5-steroid isomerase, yeast alcohol dehydrogenase, alpha-glycerophosphate, dehydrogenase, triose phosphate isomerase, horseradish peroxidase, alkaline phosphatase, asparaginase, glucose oxidase, beta-galactosidase, ribonuclease, urease, catalase, glucose-6-phosphate dehydrogenase, glucoamylase and acetylcholinesterase. Additionally, the detection can be accomplished by calorimetric methods, which employ a chromogenic substrate for the enzyme. Detection may also be accomplished by visual comparison of the extent of enzymatic reaction of a substrate in comparison with similarly prepared standards.

[0446] Detection may also be accomplished using any of a variety of other immunoassays. For example, by radioactively labeling the antibodies or antibody fragments, it is possible to detect musculoskeletal system antigens through the use of a radioimmunoassay (RIA) (see, for example, Weintraub, B., Principles of Radioimmunoassays, Seventh Training Course on Radioligand Assay Techniques, The Endocrine Society, March, 1986, which is incorporated by reference herein). The radioactive isotope can be detected by means including, but not limited to, a gamma counter, a scintillation counter, or autoradiography.

[0447] It is also possible to label the antibody with a fluorescent compound. When the fluorescently labeled antibody is exposed to light of the proper wave length, its presence can then be detected due to fluorescence. Among the most commonly used fluorescent labeling compounds are fluorescein isothiocyanate, rhodamine, phycoerythrin, phycocyanin, allophycocyanin, ophthaldehyde and fluorescamine.

[0448] The antibody can also be detectably labeled using fluorescence emitting metals such as ¹⁵²Eu, or others of the lanthanide series. These metals can be attached to the antibody using such metal chelating groups as diethylenetriaminepentacetic acid (DTPA) or ethylenediaminetetraacetic acid (EDTA).

[0449] The antibody also can be detectably labeled by coupling it to a chemiluminescent compound. The presence of the chemiluminescent-tagged antibody is then determined by detecting the presence of luminescence that arises during the course of a chemical reaction. Examples of particularly useful chemiluminescent labeling compounds are luminol, isoluminol, theromatic acridinium ester, imidazole, acridinium salt and oxalate ester.

[0450] Likewise, a bioluminescent compound may be used to label the antibody of the present invention. Bioluminescence is a type of chemiluminescence found in biological systems in, which a catalytic protein increases the efficiency of the chemiluminescent reaction. The presence of a bioluminescent protein is determined by detecting the presence of luminescence. Important bioluminescent compounds for purposes of labeling are luciferin, luciferase and aequorin.

[0451] Methods for Detecting Musculoskeletal System Disease, Including Cancer

[0452] In general, a musculoskeletal system disease or cancer may be detected in a patient based on the presence of one or more musculoskeletal system antigen proteins of the invention and/or polynucleotides encoding such proteins in a biological sample (for example, blood, sera, urine, and/or tumor biopsies) obtained from the patient. In other words, such proteins and/or polynucleotides may be used as markers to indicate the presence or absence of a musculoskeletal system disease or disorder, including cancer. Cancers that may be diagnosed, and/or prognosed using the compositions of the invention include but are not limited to, cancer of musculoskeletal system tissues. In addition, such proteins and/or polynucleotides may be useful for the detection of other diseases and cancers, including cancers of tissues/cells corresponding to the library source disclosed in column 7 of Table 1A expressing the corresponding musculoskeletal system sequence disclosed in the same row of Table 1A. The binding agents provided herein generally permit detection of the level of antigen that binds to the agent in the biological sample. Polynucleotide primers and probes may be used to detect the level of mRNA encoding musculoskeletal system antigen polypeptides, which is also indicative of the presence or absence of a musculoskeletal system disease or disorder, including cancer. In general, musculoskeletal system antigen polypeptides should be present at a level that is at least three fold higher in diseased tissue than in normal tissue.

[0453] There are a variety of assay formats known to those of ordinary skill in the art for using a binding agent to detect polypeptide markers in a sample. See, e.g., Harlow and Lane, supra. In general, the presence or absence of a musculoskeletal system disease in a patient may be determined by (a) contacting a biological sample obtained from a patient with a binding agent; (b) detecting in the sample a level of polypeptide that binds to the binding agent; and (c) comparing the level of polypeptide with a predetermined cut-off value.

[0454] In a preferred embodiment, the assay involves the use of binding agent immobilized on a solid support to bind to and remove the musculoskeletal system antigen polypeptide of the invention from the remainder of the sample. The bound polypeptide may then be detected using a detection reagent that contains a reporter group and specifically binds to the binding agent/polypeptide complex. Such detection reagents may comprise, for example, a binding agent that specifically binds to the polypeptide or an antibody or other agent that specifically binds to the binding agent, such as an anti-immunoglobulin, protein G, protein A or a lectin. Alternatively, a competitive assay may be utilized, in which a polypeptide is labeled with a reporter group and allowed to bind to the immobilized binding agent after incubation of the binding agent with the sample. The extent to which components of the sample inhibit the binding of the labeled polypeptide to the binding agent is indicative of the reactivity of the sample with the immobilized binding agent. Suitable polypeptides for use within such assays include musculoskeletal system antigen polypeptides and portions thereof, or antibodies, to which the binding agent binds, as described above.

[0455] The solid support may be any material known to those of skill in the art to which musculoskeletal system antigen polypeptides of the invention may be attached. For example, the solid support may be a test well in a microtiter plate or a nitrocellulose or other suitable membrane. Alternatively, the support may be a bead or disc, such as glass fiberglass, latex or a plastic material such as polystyrene or polyvinylchloride. The support may also be a magnetic particle or a fiber optic sensor, such as those disclosed, for example, in U.S. Pat. No. 5,359,681. The binding agent may be immobilized on the solid support using a variety of techniques known to those of skill in the art, which are amply described in the patent and scientific literature. In the context of the present invention, the term “immobilization” refers to both noncovalent association, such as adsorption, and covalent attachment (which may be a direct linkage between the agent and functional groups on the support or may be a linkage by way of a cross-linking agent). Immobilization by adsorption to a well in a microtiter plate or to a membrane is preferred. In such cases, adsorption may be achieved by contacting the binding agent, in a suitable buffer, with the solid support for the suitable amount of time. The contact time varies with temperature, but is typically between about 1 hour and about 1 day. In general, contacting a well of plastic microtiter plate (such as polystyrene or polyvinylchloride) with an amount of binding agent ranging from about 10 ng to about 10 ug, and preferably about 100 ng to about 1 ug, is sufficient to immobilize an adequate amount of binding agent.

[0456] Covalent attachment of binding agent to a solid support may generally be achieved by first reacting the support with a bifunctional reagent that will react with both the support and a functional group, such as a hydroxyl or amino group, on the binding agent. For example, the binding agent may be covalently attached to supports having an appropriate polymer coating using benzoquinone or by condensation of an aldehyde group on the support with an amine and an active hydrogen on the binding partner (see, e.g., Pierce Immunotechnology Catalog and Handbook, 1991, at A12-A13).

[0457] Gene Therapy Methods

[0458] Also encompassed by the present invention are gene therapy methods for treating or preventing disorders, diseases and conditions. The gene therapy methods relate to the introduction of nucleic acid (DNA, RNA and antisense DNA or RNA) sequences into an animal to achieve expression of a musculoskeletal system antigen of the present invention. This method requires a polynucleotide, which codes for a polypeptide of the present invention operatively linked to a promoter and any other genetic elements necessary for the expression of the polypeptide by the target tissue. Such gene therapy and delivery techniques are known in the art, see, for example, WO90/11092, which is herein incorporated by reference.

[0459] Thus, for example, cells from a patient may be engineered with a polynucleotide (DNA or RNA) comprising a promoter operably linked to a polynucleotide of the present invention ex vivo, with the engineered cells then being provided to a patient to be treated with the polypeptide of the present invention. Such methods are well-known in the art. For example, see Belldegrun, A., et al., J. Natl. Cancer Inst. 85: 207-216 (1993); Ferrantini, M. et al., Cancer Research 53: 1107-1112 (1993); Ferrantini, M. et al., J. Immunology 153: 4604-4615 (1994); Kaido, T., et al., Int. J. Cancer 60: 221-229 (1995); Ogura, H., et al., Cancer Research 50: 5102-5106 (1990); Santodonato, L., et al., Human Gene Therapy 7:1-10 (1996); Santodonato, L., et al., Gene Therapy 4:1246-1255 (1997); and Zhang, J.-F. et al., Cancer Gene Therapy 3: 31-38 (1996)), which are herein incorporated by reference. In one embodiment, the cells, which are engineered are arterial cells. The arterial cells may be reintroduced into the patient through direct injection to the artery, the tissues surrounding the artery, or through catheter injection.

[0460] As discussed in more detail below, the polynucleotide constructs can be delivered by any method that delivers injectable materials to the cells of an animal, such as, injection into the interstitial space of tissues (heart, muscle, skin, lung, liver, and the like). The polynucleotide constructs may be delivered in a pharmaceutically acceptable liquid or aqueous carrier.

[0461] In one embodiment, the polynucleotide of the present invention is delivered as a naked polynucleotide. The term “naked” polynucleotide, DNA or RNA refers to sequences that are free from any delivery vehicle that acts to assist, promote or facilitate entry into the cell, including viral sequences, viral particles, liposome formulations, lipofectin or precipitating agents and the like. However, the polynucleotide of the present invention can also be delivered in liposome formulations and lipofectin formulations and the like can be prepared by methods well known to those skilled in the art. Such methods are described, for example, in U.S. Pat. Nos. 5,593,972, 5,589,466, and 5,580,859, which are herein incorporated by reference.

[0462] The polynucleotide vector constructs used in the gene therapy method are preferably constructs that will not integrate into the host genome nor will they contain sequences that allow for replication. Appropriate vectors include pWLNEO, pSV2CAT, pOG44, pXT1 and pSG available from Stratagene; pSVK3, pBPV, pMSG and pSVL available from Pharmacia; and pEF1/V5, pcDNA3.1, and pRc/CMV2 available from Invitrogen. Other suitable vectors will be readily apparent to the skilled artisan.

[0463] Any strong promoter known to those skilled in the art can be used for driving the expression of the polynucleotide sequence. Suitable promoters include adenoviral promoters, such as the adenoviral major late promoter; or heterologous promoters, such as the cytomegalovirus (CMV) promoter; the respiratory syncytial virus (RSV) promoter; inducible promoters, such as the MMT promoter, the metallothionein promoter; heat shock promoters; the albumin promoter; the ApoAI promoter; human globin promoters; viral thymidine kinase promoters, such as the Herpes Simplex thymidine kinase promoter; retroviral LTRs; the b-actin promoter; and human growth hormone promoters. The promoter also may be the native promoter for the polynucleotide of the present invention.

[0464] Unlike other gene therapy techniques, one major advantage of introducing naked nucleic acid sequences into target cells is the transitory nature of the polynucleotide synthesis in the cells. Studies have shown that non-replicating DNA sequences can be introduced into cells to provide production of the desired polypeptide for periods of up to six months.

[0465] The polynucleotide construct can be delivered to the interstitial space of tissues within the an animal, including of muscle, skin, brain, lung, liver, spleen, bone marrow, thymus, heart, lymph, blood, bone, cartilage, pancreas, kidney, gall bladder, stomach, intestine, testis, ovary, uterus, rectum, nervous system, eye, gland, and connective tissue. Interstitial space of the tissues comprises the intercellular, fluid, mucopolysaccharide matrix among the reticular fibers of organ tissues, elastic fibers in the walls of vessels or chambers, collagen fibers of fibrous tissues, or that same matrix within connective tissue ensheathing muscle cells or in the lacunae of bone. It is similarly the space occupied by the plasma of the circulation and the lymph fluid of the lymphatic channels. Delivery to the interstitial space of muscle tissue is preferred for the reasons discussed below. They may be conveniently delivered by injection into the tissues comprising these cells. They are preferably delivered to and expressed in persistent, non-dividing cells which are differentiated, although delivery and expression may be achieved in non-differentiated or less completely differentiated cells, such as, for example, stem cells of blood or skin fibroblasts. In vivo muscle cells are particularly competent in their ability to take up and express polynucleotides.

[0466] For the naked nucleic acid sequence injection, an effective dosage amount of DNA or RNA will be in the range of from about 0.05 mg/kg body weight to about 50 mg/kg body weight. Preferably the dosage will be from about 0.005 mg/kg to about 20 mg/kg and more preferably from about 0.05 mg/kg to about 5 mg/kg. Of course, as the artisan of ordinary skill will appreciate, this dosage will vary according to the tissue site of injection. The appropriate and effective dosage of nucleic acid sequence can readily be determined by those of ordinary skill in the art and may depend on the condition being treated and the route of administration.

[0467] The preferred route of administration is by the parenteral route of injection into the interstitial space of tissues. However, other parenteral routes may also be used, such as, inhalation of an aerosol formulation particularly for delivery to lungs or bronchial tissues, throat or mucous membranes of the nose. In addition, naked DNA constructs can be delivered to arteries during angioplasty by the catheter used in the procedure.

[0468] The naked polynucleotides are delivered by any method known in the art, including, but not limited to, direct needle injection at the delivery site, intravenous injection, topical administration, catheter infusion, and so-called “gene guns”. These delivery methods are known in the art.

[0469] The constructs may also be delivered with delivery vehicles such as viral sequences, viral particles, liposome formulations, lipofectin, precipitating agents, etc. Such methods of delivery are known in the art.

[0470] In certain embodiments, the polynucleotide constructs are complexed in a liposome preparation. Liposomal preparations for use in the instant invention include cationic (positively charged), anionic (negatively charged) and neutral preparations. However, cationic liposomes are particularly preferred because a tight charge complex can be formed between the cationic liposome and the polyanionic nucleic acid. Cationic liposomes have been shown to mediate intracellular delivery of plasmid DNA (Felgner et al., Proc. Natl. Acad. Sci. USA (1987) 84:7413-7416, which is herein incorporated by reference); mRNA (Malone et al., Proc. Natl. Acad. Sci. USA (1989) 86:6077-6081, which is herein incorporated by reference); and purified transcription factors (Debs et al., J. Biol. Chem. (1990) 265:10189-10192, which is herein incorporated by reference), in functional form.

[0471] Cationic liposomes are readily available. For example, N[1-2,3-dioleyloxy)propyl]-N,N,N-triethylammonium (DOTMA) liposomes are particularly useful and are available under the trademark Lipofectin, from GIBCO BRL, Grand Island, N.Y., (see, also, Felgner et al., Proc. Natl Acad. Sci. USA (1987) 84:7413-7416, which is herein incorporated by reference). Other commercially available liposomes include transfectace (DDAB/DOPE) and DOTAP/DOPE (Boehringer).

[0472] Other cationic liposomes can be prepared from readily available materials using techniques well known in the art. See, e.g. PCT Publication No. WO 90/11092 (which is herein incorporated by reference) for a description of the synthesis of DOTAP (1,2-bis(oleoyloxy)-3-(trimethylammonio)propane) liposomes. Preparation of DOTMA liposomes is explained in the literature, see, e.g., P. Felgner et al., Proc. Natl. Acad. Sci. USA 84:7413-7417, which is herein incorporated by reference. Similar methods can be used to prepare liposomes from other cationic lipid materials.

[0473] Similarly, anionic and neutral liposomes are readily available, such as from Avanti Polar Lipids (Birmingham, Ala.), or can be easily prepared using readily available materials. Such materials include phosphatidyl choline, cholesterol, phosphatidyl ethanolamine, dioleoylphosphatidyl choline (DOPC), dioleoylphosphatidyl glycerol (DOPG), dioleoylphoshatidyl ethanolamine (DOPE), among others. These materials can also be mixed with the DOTMA and DOTAP starting materials in appropriate ratios. Methods for making liposomes using these materials are well known in the art.

[0474] For example, commercially dioleoylphosphatidyl choline (DOPC), dioleoylphosphatidyl glycerol (DOPG), and dioleoylphosphatidyl ethanolamine (DOPE) can be used in various combinations to make conventional liposomes, with or without the addition of cholesterol. Thus, for example, DOPG/DOPC vesicles can be prepared by drying 50 mg each of DOPG and DOPC under a stream of nitrogen gas into a sonication vial. The sample is placed under a vacuum pump overnight and is hydrated the following day with deionized water. The sample is then sonicated for 2 hours in a capped vial, using a Heat Systems model 350 sonicator equipped with an inverted cup (bath type) probe at the maximum setting while the bath is circulated at 15EC. Alternatively, negatively charged vesicles can be prepared without sonication to produce multilamellar vesicles or by extrusion through nucleopore membranes to produce unilamellar vesicles of discrete size. Other methods are known and available to those of skill in the art.

[0475] The liposomes can comprise multilamellar vesicles (MLVs), small unilamellar vesicles (SUVs), or large unilamellar vesicles (LUVs), with SUVs being preferred. The various liposome-nucleic acid complexes are prepared using methods well known in the art. See, e.g., Straubinger et al., Methods of Immunology (1983), 101:512-527, which is herein incorporated by reference. For example, MLVs containing nucleic acid can be prepared by depositing a thin film of phospholipid on the walls of a glass tube and subsequently hydrating with a solution of the material to be encapsulated. SUVs are prepared by extended sonication of MLVs to produce a homogeneous population of unilamellar liposomes. The material to be entrapped is added to a suspension of preformed MLVs and then sonicated. When using liposomes containing cationic lipids, the dried lipid film is resuspended in an appropriate solution such as sterile water or an isotonic buffer solution such as 10 mM Tris/NaCl, sonicated, and then the preformed liposomes are mixed directly with the DNA. The liposome and DNA form a very stable complex due to binding of the positively charged liposomes to the cationic DNA. SUVs find use with small nucleic acid fragments. LUVs are prepared by a number of methods, well known in the art. Commonly used methods include Ca²⁺-EDTA chelation (Papahadjopoulos et al., Biochim. Biophys. Acta (1975) 394:483; Wilson et al., Cell 17:77 (1979); ether injection (Deamer, D. and Bangham, A., Biochim. Biophys. Acta 443:629 (1976); Ostro et al., Biochem. Biophys. Res. Commun. 76:836 (1977); Fraley et al., Proc. Natl. Acad. Sci. USA 76:3348 (1979)); detergent dialysis (Enoch, H. and Strittmatter, P., Proc. Natl. Acad. Sci. USA 76:145 (1979)); and reverse-phase evaporation (REV) (Fraley et al., J. Biol. Chem. 255:10431 (1980); Szoka et al., Proc. Natl. Acad. Sci. USA 75:145 (1978); Schaefer-Ridder et al., Science 215:166 (1982)), which are herein incorporated by reference.

[0476] Generally, the ratio of DNA to liposomes will be from about 10:1 to about 1:10. Preferably, the ration will be from about 5:1 to about 1:5. More preferably, the ration will be about 3:1 to about 1:3. Still more preferably, the ratio will be about 1:1.

[0477] U.S. Pat. No. 5,676,954 (which is herein incorporated by reference) reports on the injection of genetic material, complexed with cationic liposomes carriers, into mice. U.S. Pat. Nos. 4,897,355, 4,946,787, 5,049,386, 5,459,127, 5,589,466, 5,693,622, 5,580,859, 5,703,055, and international publication no. WO 94/9469 (which are herein incorporated by reference) provide cationic lipids for use in transfecting DNA into cells and mammals. U.S. Pat. Nos. 5,589,466, 5,693,622, 5,580,859, 5,703,055, and International Publication No. WO 94/9469 provide methods for delivering DNA-cationic lipid complexes to mammals.

[0478] In certain embodiments, cells are engineered, ex vivo or in vivo, using a retroviral particle containing RNA, which comprises a sequence encoding a polypeptide of the present invention. Retroviruses from which the retroviral plasmid vectors may be derived include, but are not limited to, Moloney Murine Leukemia Virus, spleen necrosis virus, Rous sarcoma Virus, Harvey Sarcoma Virus, avian leukosis virus, gibbon ape leukemia virus, human immunodeficiency virus, Myeloproliferative Sarcoma Virus, and mammary tumor virus.

[0479] The retroviral plasmid vector is employed to transduce packaging cell lines to form producer cell lines. Examples of packaging cells which may be transfected include, but are not limited to, the PE501, PA317, R-2, R-AM, PA12, T19-14X, VT-19-17-H2, RCRE, RCRIP, GP+E-86, GP+envAm12, and DAN cell lines as described in Miller, Human Gene Therapy 1:5-14 (1990), which is incorporated herein by reference in its entirety. The vector may transduce the packaging cells through any means known in the art. Such means include, but are not limited to, electroporation, the use of liposomes, and CaPO₄ precipitation. In one alternative, the retroviral plasmid vector may be encapsulated into a liposome, or coupled to a lipid, and then administered to a host.

[0480] The producer cell line generates infectious retroviral vector particles, which include polynucleotide encoding a polypeptide of the present invention. Such retroviral vector particles then may be employed, to transduce eukaryotic cells, either in vitro or in vivo. The transduced eukaryotic cells will express a polypeptide of the present invention.

[0481] In certain other embodiments, cells are engineered, ex vivo or in vivo, with polynucleotide contained in an adenovirus vector. Adenovirus can be manipulated such that it encodes and expresses a polypeptide of the present invention, and at the same time is inactivated in terms of its ability to replicate in a normal lytic viral life cycle. Adenovirus expression is achieved without integration of the viral DNA into the host cell chromosome, thereby alleviating concerns about insertional mutagenesis. Furthermore, adenoviruses have been used as live enteric vaccines for many years with an excellent safety profile (Schwartz, et al., Am. Rev. Respir. Dis.109:233-238 (1974)). Finally, adenovirus mediated gene transfer has been demonstrated in a number of instances including transfer of alpha-1-antitrypsin and CFTR to the lungs of cotton rats (Rosenfeld et al., Science 252:431-434 (1991); Rosenfeld et al., Cell 68:143-155 (1991)). Furthermore, extensive studies to attempt to establish adenovirus as a causative agent in human cancer were uniformly negative (Green et al., Proc. Natl. Acad. Sci. USA 76:6606 (1979)).

[0482] Suitable adenoviral vectors useful in the present invention are described, for example, in Kozarsky and Wilson, Curr. Opin. Genet. Devel. 3:499-503 (1993); Rosenfeld et al., Cell 68:143-155 (1992); Engelhardt et al., Human Genet. Ther. 4:759-769 (1993); Yang et al., Nature Genet. 7:362-369 (1994); Wilson et al., Nature 365:691-692 (1993); and U.S. Pat. No. 5,652,224, which are herein incorporated by reference. For example, the adenovirus vector Ad2 is useful and can be grown in human 293 cells. These cells contain the E1 region of adenovirus and constitutively express E1a and E1b, which complement the defective adenoviruses by providing the products of the genes deleted from the vector. In addition to Ad2, other varieties of adenovirus (e.g., Ad3, Ad5, and Ad7) are also useful in the present invention.

[0483] Preferably, the adenoviruses used in the present invention are replication deficient. Replication deficient adenoviruses require the aid of a helper virus and/or packaging cell line to form infectious particles. The resulting virus is capable of infecting cells and can express a polynucleotide of interest, which is operably linked to a promoter, but cannot replicate in most cells. Replication deficient adenoviruses may be deleted in one or more of all or a portion of the following genes: E1a, E1b, E3, E4, E2a, or L1 through L5.

[0484] In certain other embodiments, the cells are engineered, ex vivo or in vivo, using an adeno-associated virus (AAV). AAVs are naturally occurring defective viruses that require helper viruses to produce infectious particles (Muzyczka, N., Curr. Topics in Microbiol. Immunol. 158:97 (1992)). It is also one of the few viruses that may integrate its DNA into non-dividing cells. Vectors containing as little as 300 base pairs of AAV can be packaged and can integrate, but space for exogenous DNA is limited to about 4.5 kb. Methods for producing and using such AAVs are known in the art. See, for example, U.S. Pat. Nos. 5,139,941, 5,173,414, 5,354,678, 5,436,146, 5,474,935, 5,478,745, and 5,589,377.

[0485] For example, an appropriate AAV vector for use in the present invention will include all the sequences necessary for DNA replication, encapsidation, and host-cell integration. The polynucleotide construct is inserted into the AAV vector using standard cloning methods, such as those found in Sambrook et al., Molecular Cloning: A Laboratory Manual, Cold Spring Harbor Press (1989). The recombinant AAV vector is then transfected into packaging cells which are infected with a helper virus, using any standard technique, including lipofection, electroporation, calcium phosphate precipitation, etc. Appropriate helper viruses include adenoviruses, cytomegaloviruses, vaccinia viruses, or herpes viruses. Once the packaging cells are transfected and infected, they will produce infectious AAV viral particles, which contain the polynucleotide construct. These viral particles are then used to transduce eukaryotic cells, either ex vivo or in vivo. The transduced cells will contain the polynucleotide construct integrated into its genome, and will express a polypeptide of the invention.

[0486] Another method of gene therapy involves operably associating heterologous control regions and endogenous musculoskeletal system antigen polynucleotide sequences (e.g., encoding a musculoskeletal system antigen polypeptide of the present invention) via homologous recombination (see, e.g., U.S. Pat. No. 5,641,670, issued Jun. 24, 1997; International Publication No. WO 96/29411, published Sep. 26, 1996; International Publication No. WO 94/12650, published Aug. 4, 1994; Koller et al., Proc. Natl. Acad. Sci. USA 86:8932-8935 (1989); and Zijlstra et al., Nature 342:435-438 (1989), which are herein incorporated by reference. This method involves the activation of a gene which is present in the target cells, but which is not normally expressed in the cells, or is expressed at a lower level than desired.

[0487] Polynucleotide constructs are made, using standard techniques known in the art, which contain the promoter with targeting sequences flanking the promoter. Suitable promoters are described herein. The targeting sequence is sufficiently complementary to an endogenous sequence to permit homologous recombination of the promoter-targeting sequence with the endogenous sequence. The targeting sequence will be sufficiently near the 5′ end of the desired endogenous polynucleotide sequence so the promoter will be operably linked to the endogenous sequence upon homologous recombination.

[0488] The promoter and the targeting sequences can be amplified using PCR. Preferably, the amplified promoter contains distinct restriction enzyme sites on the 5′ and 3′ ends. Preferably, the 3′ end of the first targeting sequence contains the same restriction enzyme site as the 5′ end of the amplified promoter and the 5′ end of the second targeting sequence contains the same restriction site as the 3′ end of the amplified promoter. The amplified promoter and targeting sequences are digested and ligated together.

[0489] The promoter-targeting sequence construct is delivered to the cells, either as naked polynucleotide, or in conjunction with transfection-facilitating agents, such as liposomes, viral sequences, viral particles, whole viruses, lipofection, precipitating agents, etc., described in more detail above. The P promoter-targeting sequence can be delivered by any method, included direct needle injection, intravenous injection, topical administration, catheter infusion, particle accelerators, etc. The methods are described in more detail below.

[0490] The promoter-targeting sequence construct is taken up by cells. Homologous recombination between the construct and the endogenous sequence takes place, such that an endogenous sequence is placed under the control of the promoter. The promoter then drives the expression of the endogenous sequence.

[0491] The polynucleotide encoding a polypeptide of the present invention may contain a secretory signal sequence that facilitates secretion of the protein. Typically, the signal sequence is positioned in the coding region of the polynucleotide to be expressed towards or at the 5′ end of the coding region. The signal sequence may be homologous or heterologous to the musculoskeletal system antigen polynucleotide of interest and may be homologous or heterologous to the cells to be transfected. Additionally, the signal sequence may be chemically synthesized using methods known in the art.

[0492] Any mode of administration of any of the above-described polynucleotides constructs can be used so long as the mode results in the expression of one or more molecules in an amount sufficient to provide a therapeutic effect. This includes direct needle injection, systemic injection, catheter infusion, biolistic injectors, particle accelerators (i.e., “gene guns”), gelfoam sponge depots, other commercially available depot materials, osmotic pumps (e.g., Alza minipumps), oral or suppositorial solid (tablet or pill) pharmaceutical formulations, and decanting or topical applications during surgery. For example, direct injection of naked calcium phosphate-precipitated plasmid into rat liver and rat spleen or a protein-coated plasmid into the portal vein has resulted in gene expression of the foreign gene in the rat livers (Kaneda et al., Science 243:375 (1989)).

[0493] A preferred method of local administration is by direct injection. Preferably, a recombinant molecule of the present invention complexed with a delivery vehicle is administered by direct injection into or locally within the area of arteries. Administration of a composition locally within the area of arteries refers to injecting the composition centimeters and preferably, millimeters within arteries.

[0494] Another method of local administration is to contact a polynucleotide construct of the present invention in or around a surgical wound. For example, a patient can undergo surgery and the polynucleotide construct can be coated on the surface of tissue inside the wound or the construct can be injected into areas of tissue inside the wound.

[0495] Therapeutic compositions useful in systemic administration, include recombinant molecules of the present invention complexed to a targeted delivery vehicle of the present invention. Suitable delivery vehicles for use with systemic administration comprise liposomes comprising ligands for targeting the vehicle to a particular site. In specific embodiments, suitable delivery vehicles for use with systemic administration comprise liposomes comprising polypeptides of the invention for targeting the vehicle to a particular site.

[0496] Preferred methods of systemic administration, include intravenous injection, aerosol, oral and percutaneous (topical) delivery. Intravenous injections can be performed using methods standard in the art. Aerosol delivery can also be performed using methods standard in the art (see, for example, Stribling et al., Proc. Natl. Acad. Sci. USA 189:11277-11281, 1992, which is incorporated herein by reference). Oral delivery can be performed by complexing a polynucleotide construct of the present invention to a carrier capable of withstanding degradation by digestive enzymes in the gut of an animal. Examples of such carriers, include plastic capsules or tablets, such as those known in the art. Topical delivery can be performed by mixing a polynucleotide construct of the present invention with a lipophilic reagent (e.g., DMSO) that is capable of passing into the skin.

[0497] Determining an effective amount of substance to be delivered can depend upon a number of factors including, for example, the chemical structure and biological activity of the substance, the age and weight of the animal, the precise condition requiring treatment and its severity, and the route of administration. The frequency of treatments depends upon a number of factors, such as the amount of polynucleotide constructs administered per dose, as well as the health and history of the subject. The precise amount, number of doses, and timing of doses will be determined by the attending physician or veterinarian.

[0498] Therapeutic compositions of the present invention can be administered to any animal, preferably to mammals and birds. Preferred mammals include humans, dogs, cats, mice, rats, rabbits sheep, cattle, horses and pigs, with humans being particularly preferred.

[0499] Biological Activities

[0500] Polynucleotides or polypeptides, or agonists or antagonists of the present invention, can be used in assays to test for one or more biological activities. If these polynucleotides or polypeptides, or agonists or antagonists of the present invention, do exhibit activity in a particular assay, it is likely that these molecules may be involved in the diseases associated with the biological activity. Thus, the polynucleotides and polypeptides, and agonists or antagonists could be used to treat, prevent diagnose and/or prognose the associated disease.

[0501] The musculoskeletal system antigen polynucleotides and polypeptides of the invention are predicted to have predominant expression in musculoskeletal system tissues.

[0502] Thus, the musculoskeletal system antigens of the invention may be useful as therapeutic molecules. Each would be useful for diagnosis, detection, treatment and/or prevention of diseases or disorders of the musculoskeletal system, including but not limited to bone disorders (e.g., osteoporosis, osteomyelitis, Paget's disease, and sciolosis); joint disorders (e.g., osteoarthritis, rheumatoid arthritis, infectious arthritis, systemic lupus erythematosus, gout, and Reiter's syndrome); ligament, tendon, and bursa disorders (e.g., bursitis, tendinitis, and tenosynovitis); muscle disorders (e.g., muscular dystrophy, Pompe's disease, periodic paralysis, polymyalgia rheumatica, polymyositis, and Steinert's disease), neoplasms and/or cancers of musculoskeletal tissues (e.g., osteochondroma, benign chondroma, chondroblastoma, osteoid osteoma, and giant cell tumor), and/or those disorders described under “Musculoskeletal System Disorders”.

[0503] In a preferred embodiment, polynucleotides of the invention (e.g., a nucleic acid sequence of SEQ ID NO:X or the complement thereof; or the cDNA sequence contained in Clone ID NO:Z, or fragments or variants thereof) and/or polypeptides of the invention (e.g., an amino acid sequence contained in SEQ ID NO:Y, an amino acid sequence encoded by SEQ ID NO:X, or the complement threof, an amino acid sequence encoded by the cDNA sequence contained in Clone ID NO:Z and fragments or variants thereof as described herein) are useful for the diagnosis, detection, treatement, and/or prevention of diseases or disorders of the tissues/cells corresponding to the library source disclosed in column 7 of Table 1A expressing the corresponding musculoskeletal system sequence disclosed in the same row of Table 1A.

[0504] Particularly, the musculoskeletal system antigens may be a useful therapeutic for cancer of musculoskeletal system tissues. Treatment, diagnosis, detection, and/or prevention of musculoskeletal system disorders could be carried out using a musculoskeletal system antigen or soluble form of a musculoskeletal system antigen, a musculoskeletal system antigen ligand, gene therapy, or ex vivo applications. Moreover, inhibitors of a musculoskeletal system antigen, either blocking antibodies or mutant forms, could modulate the expression of the musculoskeletal system antigen. These inhibitors may be useful to treat, diagnose, detect, and/or prevent diseases associated with the misregulation of a musculoskeletal system antigen.

[0505] In one embodiment, the invention provides a method for the specific delivery of compositions of the invention to cells (e.g., normal or diseased musculoskeletal system cells) by administering polypeptides of the invention (e.g., musculoskeletal system antigen polypeptides or anti-musculoskeletal system antigen antibodies) that are associated with heterologous polypeptides or nucleic acids. In one example, the invention provides a method for delivering a therapeutic protein into the targeted cell (e.g., an aberrant musculoskeletal system cell or musculoskeletal system cancer cell). In another example, the invention provides a method for delivering a single stranded nucleic acid (e.g., antisense or ribozymes) or double stranded nucleic acid (e.g., DNA that can integrate into the cell's genome or replicate episomally and that can be transcribed) into the targeted cell.

[0506] In another embodiment, the invention provides a method for the specific destruction of cells (e.g., the destruction of aberrant musculoskeletal system cells, including, but not limited to, musculoskeletal system tumor cells) by administering polypeptides of the invention (e.g., musculoskeletal system antigen polypeptides or fragments thereof, or anti-musculoskeletal system antigen antibodies) in association with toxins or cytotoxic prodrugs.

[0507] By “toxin” is meant compounds that bind and activate endogenous cytotoxic effector systems, radioisotopes, holotoxins, modified toxins, catalytic subunits of toxins, cytotoxins (cytotoxic agents), or any molecules or enzymes not normally present in or on the surface of a cell that under defined conditions cause the cell's death. Toxins that may be used according to the methods of the invention include, but are not limited to, radioisotopes known in the art, compounds such as, for example, antibodies (or complement fixing containing portions thereof) that bind an inherent or induced endogenous cytotoxic effector system, thymidine kinase, endonuclease, RNAse, alpha toxin, ricin, abrin, Pseudomonas exotoxin A, diphtheria toxin, saporin, momordin, gelonin, pokeweed antiviral protein, alpha-sarcin and cholera toxin. “Toxin” also includes a cytostatic or cytocidal agent, a therapeutic agent or a radioactive metal ion, e.g., alpha-emitters such as, for example, ²¹³Bi, or other radioisotopes such as, for example, ¹⁰³Pd, ¹³³Xe, ¹³¹I, ⁶⁸Ge, ⁵⁷Co, ⁶⁵Zn, ⁸⁵Sr, ³²P, ³⁵S, ⁹⁰Y, ¹⁵³Sm, ¹⁵³Gd, ¹⁶⁹Yb, ⁵¹Cr, ⁵⁴Mn, ⁷⁵Se, ¹¹³Sn, ⁹⁰Yttrium, ¹¹⁷Tin, ¹⁸⁶Rhenium, ¹⁶⁶Holmium, and ¹⁸⁸Rhenium; luminescent labels, such as luminol; and fluorescent labels, such as fluorescein and rhodamine, and biotin.

[0508] Techniques known in the art may be applied to label antibodies of the invention. Such techniques include, but are not limited to, the use of bifunctional conjugating agents (see e.g., U.S. Pat. Nos. 5,756,065; 5,714,631; 5,696,239; 5,652,361; 5,505,931; 5,489,425; 5,435,990; 5,428,139; 5,342,604; 5,274,119; 4,994,560; and 5,808,003; the contents of each of which are hereby incorporated by reference in its entirety). A cytotoxin or cytotoxic agent includes any agent that is detrimental to cells. Examples include paclitaxol, cytochalasin B, gramicidin D, ethidium bromide, emetine, mitomycin, etoposide, tenoposide, vincristine, vinblastine, colchicin, doxorubicin, daunorubicin, dihydroxy anthracin dione, mitoxantrone, mithramycin, actinomycin D, 1-dehydrotestosterone, glucocorticoids, procaine, tetracaine, lidocaine, propranolol, and puromycin and analogs or homologs thereof. Therapeutic agents include, but are not limited to, antimetabolites (e.g., methotrexate, 6-mercaptopurine, 6-thioguanine, cytarabine, 5-fluorouracil decarbazine), alkylating agents (e.g., mechlorethamine, thioepa chlorambucil, melphalan, carmustine (BSNU) and lomustine (CCNU), cyclothosphamide, busulfan, dibromomannitol, streptozotocin, mitomycin C, and cis-dichlorodiamine platinum (II) (DDP) cisplatin), anthracyclines (e.g., daunorubicin (formerly daunomycin) and doxorubicin), antibiotics (e.g., dactinomycin (formerly actinomycin), bleomycin, mithramycin, and anthramycin (AMC)), and anti-mitotic agents (e.g., vincristine and vinblastine).

[0509] By “cytotoxic prodrug” is meant a non-toxic compound that is converted by an enzyme, normally present in the cell, into a cytotoxic compound. Cytotoxic prodrugs that may be used according to the methods of the invention include, but are not limited to, glutamyl derivatives of benzoic acid mustard alkylating agent, phosphate derivatives of etoposide or mitomycin C, cytosine arabinoside, daunorubisin, and phenoxyacetamide derivatives of doxorubicin.

[0510] It will be appreciated that conditions caused by a decrease in the standard or normal level of a musculoskeletal system antigen activity in an individual, particularly disorders of the musculoskeletal system, can be treated by administration of a musculoskeletal system antigen polypeptide (e.g., such as, for example, the complete musculoskeletal system antigen polypeptide, the soluble form of the extracellular domain of a musculoskeletal system antigen polypeptide, or cells expressing the complete protein) or agonist. Thus, the invention also provides a method of treatment of an individual in need of an increased level of musculoskeletal system antigen activity comprising administering to such an individual a pharmaceutical composition comprising an amount of an isolated musculoskeletal system antigen polypeptide of the invention, or agonist thereof (e.g., an agonistic anti-musculoskeletal system antigen antibody), effective to increase the musculoskeletal system antigen activity level in such an individual.

[0511] It will also be appreciated that conditions caused by a increase in the standard or normal level of musculoskeletal system antigen activity in an individual, particularly disorders of the musculoskeletal system, can be treated by administration of musculoskeletal system antigen polypeptides (e.g., such as, for example, the complete musculoskeletal system antigen polypeptide, the soluble form of the extracellular domain of a musculoskeletal system antigen polypeptide, or cells expressing the complete protein) or antagonist (e.g., an antagonistic musculoskeletal system antigen antibody). Thus, the invention also provides a method of treatment of an individual in need of an decreased level of musculoskeletal system antigen activity comprising administering to such an individual a pharmaceutical composition comprising an amount of an isolated musculoskeletal system antigen polypeptide of the invention, or antagonist thereof (e.g., an antagonistic anti-musculoskeletal system antigen antibody), effective to decrease the musculoskeletal system antigen activity level in such an individual.

[0512] In certain embodiments, a polypeptide of the invention, or polynucleotides, antibodies, agonists, or antagonists corresponding to that polypeptide, may be used to diagnose and/or prognose diseases and/or disorders associated with the tissue(s) in which the polypeptide of the invention is expressed, including one, two, three, four, five, or more tissues disclosed in Table 1A, column 7 (Tissue Distribution Library Code).

[0513] More generally, polynucleotides, translation products and antibodies corresponding to this gene may be useful for the diagnosis, prognosis, prevention, and/or treatment of diseases and/or disorders associated with the following systems.

[0514] Musculoskeletal System Disorders

[0515] Polynucleotides, polypeptides, antibodies, and/or agonists or antagonists of the present invention, may be used to treat, prevent, diagnose, and/or prognose disorders of the musculoskeletal system, including but not limited to, disorders of the bone, joints, ligaments, tendons, bursa, muscle, and/or neoplasms and cancers associated with musculoskeletal tissue.

[0516] Diseases or disorders of the bone include, but are not limited to, Albers-Schönberg disease, bowlegs, heel spurs, Köhler's bone disease, knock-knees, Legg-Calvé-Perthes disease, Marfan's syndrome, mucopolysaccharidoses, Osgood-Schlatter disease, osteochondroses, osteochondrodysplasia, osteomyelitis, osteopetroses, osteoporosis (postmenopausal, senile, and juvenile), Paget's disease, Scheuermann's disease, scoliosis, Sever's disease, and patellofemoral stress syndrome.

[0517] Joint diseases or disorders include, but are not limited to, ankylosing spondylitis, Behcet's syndrome, CREST syndrome, Ehlers-Danlos syndrome, infectious arthritis, discoid lupus erythematosus, systemic lupus erythematosus, Lyme disease, osteoarthritis, psoriatic arthritis, relapsing polychondrites, Reiter's syndrome, rheumatoid arthritis (adult and juvenile), scleroderma, and Still's disease.

[0518] Diseases or disorders affecting ligaments, tendons, or bursa include, but are not limited to, ankle sprain, bursitis, posterior Achilles tendon bursitis (Haglund's deformity), anterior Achilles tendon bursitis (Albert's disease), tendinitis, tenosynovitis, poplieus tendinitis, Achilles tendinitis, medial or lateral epicondylitis, rotator cuff tendinitis, spasmodic torticollis, and fibromyalgia syndrome.

[0519] Muscle diseases or disorders include, but are not limited to, Becker's muscular dystrophy, Duchenne's muscular dystrophy, Landouzy-Dejerine muscular dystrophy, Leyden-Möbius muscular dystrophy, Erb's muscular dystrophy, Charcot's joints, dermatomyositis, gout, pseudogout, glycogen storage diseases, Pompe's disease, mitochondrial myopathy, periodic paralysis, polymyalgia rheumatica, polymyositis, Steinert's disease, Thomsen's disease, anterolateral and posteromedial shin splints, posterior femoral muscle strain, and fibromyositis.

[0520] Musculoskeletal tissue may also develop cancers and/or neoplasms that include, but are not limited to, osteochondroma, benign chondroma, chondroblastoma, chondromyxoid fibroma, osteoid osteoma, giant cell tumor, multiple myeloma, osteosarcoma, fibrosarcoma, malignant fibrous histiocytoma, chondrosarcoma, Ewing's tumor, and malignant lymphoma of bone.

[0521] Immune Activity

[0522] Polynucleotides, polypeptides, antibodies, and/or agonists or antagonists of the present invention may be useful in treating, preventing, diagnosing and/or prognosing diseases, disorders, and/or conditions of the immune system, by, for example, activating or inhibiting the proliferation, differentiation, or mobilization (chemotaxis) of immune cells. Immune cells develop through a process called hematopoiesis, producing myeloid (platelets, red blood cells, neutrophils, and macrophages) and lymphoid (B and T lymphocytes) cells from pluripotent stem cells. The etiology of these immune diseases, disorders, and/or conditions may be genetic, somatic, such as cancer and some autoimmune diseases, acquired (e.g., by chemotherapy or toxins), or infectious. Moreover, polynucleotides, polypeptides, antibodies, and/or agonists or antagonists of the present invention can be used as a marker or detector of a particular immune system disease or disorder.

[0523] In another embodiment, a polypeptide of the invention, or polynucleotides, antibodies, agonists, or antagonists corresponding to that polypeptide, may be used to treat diseases and disorders of the immune system and/or to inhibit or enhance an immune response generated by cells associated with the tissue(s) in which the polypeptide of the invention is expressed, including one, two, three, four, five, or more tissues disclosed in Table 1A, column 7 (Tissue Distribution Library Code).

[0524] Polynucleotides, polypeptides, antibodies, and/or agonists or antagonists of the present invention may be useful in treating, preventing, diagnosing, and/or prognosing immunodeficiencies, including both congenital and acquired immunodeficiencies. Examples of B cell immunodeficiencies in which immunoglobulin levels B cell function and/or B cell numbers are decreased include: X-linked agammaglobulinemia (Bruton's disease), X-linked infantile agammaglobulinemia, X-linked immunodeficiency with hyper IgM, non X-linked immunodeficiency with hyper IgM, X-linked lymphoproliferative syndrome (XLP), agammaglobulinemia including congenital and acquired agammaglobulinemia, adult onset agammaglobulinemia, late-onset agammaglobulinemia, dysgammaglobulinemia, hypogammaglobulinemia, unspecified hypogammaglobulinemia, recessive agammaglobulinemia (Swiss type), Selective IgM deficiency, selective IgA deficiency, selective IgG subclass deficiencies, IgG subclass deficiency (with or without IgA deficiency), Ig deficiency with increased IgM, IgG and IgA deficiency with increased IgM, antibody deficiency with normal or elevated Igs, Ig heavy chain deletions, kappa chain deficiency, B cell lymphoproliferative disorder (BLPD), common variable immunodeficiency (CVID), common variable immunodeficiency (CVI) (acquired), and transient hypogammaglobulinemia of infancy.

[0525] In specific embodiments, ataxia-telangiectasia or conditions associated with ataxia-telangiectasia are treated, prevented, diagnosed, and/or prognosing using the polypeptides or polynucleotides of the invention, and/or agonists or antagonists thereof.

[0526] Examples of congenital immunodeficiencies in which T cell and/or B cell function and/or number is decreased include, but are not limited to: DiGeorge anomaly, severe combined immunodeficiencies (SCID) (including, but not limited to, X-linked SCID, autosomal recessive SCID, adenosine deaminase deficiency, purine nucleoside phosphorylase (PNP) deficiency, Class II MHC deficiency (Bare lymphocyte syndrome), Wiskott-Aldrich syndrome, and ataxia telangiectasia), thymic hypoplasia, third and fourth pharyngeal pouch syndrome, 22q11.2 deletion, chronic mucocutaneous candidiasis, natural killer cell deficiency (NK), idiopathic CD4+T-lymphocytopenia, immunodeficiency with predominant T cell defect (unspecified), and unspecified immunodeficiency of cell mediated immunity.

[0527] In specific embodiments, DiGeorge anomaly or conditions associated with DiGeorge anomaly are treated, prevented, diagnosed, and/or prognosed using polypeptides or polynucleotides of the invention, or antagonists or agonists thereof.

[0528] Other immunodeficiencies that may be treated, prevented, diagnosed, and/or prognosed using polypeptides or polynucleotides of the invention, and/or agonists or antagonists thereof, include, but are not limited to, chronic granulomatous disease, Chediak-Higashi syndrome, myeloperoxidase deficiency, leukocyte glucose-6-phosphate dehydrogenase deficiency, X-linked lymphoproliferative syndrome (XLP), leukocyte adhesion deficiency, complement component deficiencies (including C1, C2, C3, C4, C5, C6, C7, C8 and/or C9 deficiencies), reticular dysgenesis, thymic alymphoplasia-aplasia, immunodeficiency with thymoma, severe congenital leukopenia, dysplasia with immunodeficiency, neonatal neutropenia, short limbed dwarfism, and Nezelof syndrome-combined immunodeficiency with Igs.

[0529] In a preferred embodiment, the immunodeficiencies and/or conditions associated with the immunodeficiencies recited above are treated, prevented, diagnosed and/or prognosed using polynucleotides, polypeptides, antibodies, and/or agonists or antagonists of the present invention.

[0530] In a preferred embodiment polynucleotides, polypeptides, antibodies, and/or agonists or antagonists of the present invention could be used as an agent to boost immunoresponsiveness among immunodeficient individuals. In specific embodiments, polynucleotides, polypeptides, antibodies, and/or agonists or antagonists of the present invention could be used as an agent to boost immunoresponsiveness among B cell and/or T cell immunodeficient individuals.

[0531] The polynucleotides, polypeptides, antibodies, and/or agonists or antagonists of the present invention may be useful in treating, preventing, diagnosing and/or prognosing autoimmune disorders. Many autoimmune disorders result from inappropriate recognition of self as foreign material by immune cells. This inappropriate recognition results in an immune response leading to the destruction of the host tissue. Therefore, the administration of polynucleotides and polypeptides of the invention that can inhibit an immune response, particularly the proliferation, differentiation, or chemotaxis of T-cells, may be an effective therapy in preventing autoimmune disorders.

[0532] Autoimmune diseases or disorders that may be treated, prevented, diagnosed and/or prognosed by polynucleotides, polypeptides, antibodies, and/or agonists or antagonists of the present invention include, but are not limited to, one or more of the following: systemic lupus erythematosus, rheumatoid arthritis, ankylosing spondylitis, multiple sclerosis, autoimmune thyroiditis, Hashimoto's thyroiditis, autoimmune hemolytic anemia, hemolytic anemia, thrombocytopenia, autoimmune thrombocytopenia purpura, autoimmune neonatal thrombocytopenia, idiopathic thrombocytopenia purpura, purpura (e.g., Henloch-Scoenlein purpura), autoimmunocytopenia, Goodpasture's syndrome, Pemphigus vulgaris, myasthenia gravis, Grave's disease (hyperthyroidism), and insulin-resistant diabetes mellitus.

[0533] Additional disorders that are likely to have an autoimmune component that may be treated, prevented, and/or diagnosed with the compositions of the invention include, but are not limited to, type II collagen-induced arthritis, antiphospholipid syndrome, dermatitis, allergic encephalomyelitis, myocarditis, relapsing polychondritis, rheumatic heart disease, neuritis, uveitis ophthalmia, polyendocrinopathies, Reiter's Disease, Stiff-Man Syndrome, autoimmune pulmonary inflammation, autism, Guillain-Barre Syndrome, insulin dependent diabetes mellitus, and autoimmune inflammatory eye disorders.

[0534] Additional disorders that are likely to have an autoimmune component that may be treated, prevented, diagnosed and/or prognosed with the compositions of the invention include, but are not limited to, scleroderma with anti-collagen antibodies (often characterized, e.g., by nucleolar and other nuclear antibodies), mixed connective tissue disease (often characterized, e.g., by antibodies to extractable nuclear antigens (e.g., ribonucleoprotein)), polymyositis (often characterized, e.g., by nonhistone ANA), pernicious anemia (often characterized, e.g., by antiparietal cell, microsomes, and intrinsic factor antibodies), idiopathic Addison's disease (often characterized, e.g., by humoral and cell-mediated adrenal cytotoxicity, infertility (often characterized, e.g., by antispermatozoal antibodies), glomerulonephritis (often characterized, e.g., by glomerular basement membrane antibodies or immune complexes), bullous pemphigoid (often characterized, e.g., by IgG and complement in basement membrane), Sjogren's syndrome (often characterized, e.g., by multiple tissue antibodies, and/or a specific nonhistone ANA (SS-B)), diabetes mellitus (often characterized, e.g., by cell-mediated and humoral islet cell antibodies), and adrenergic drug resistance (including adrenergic drug resistance with asthma or cystic fibrosis) (often characterized, e.g., by beta-adrenergic receptor antibodies).

[0535] Additional disorders that may have an autoimmune component that may be treated, prevented, diagnosed and/or prognosed with the compositions of the invention include, but are not limited to, chronic active hepatitis (often characterized, e.g., by smooth muscle antibodies), primary biliary cirrhosis (often characterized, e.g., by mitochondria antibodies), other endocrine gland failure (often characterized, e.g., by specific tissue antibodies in some cases), vitiligo (often characterized, e.g., by melanocyte antibodies), vasculitis (often characterized, e.g., by Ig and complement in vessel walls and/or low serum complement), post-MI (often characterized, e.g., by myocardial antibodies), cardiotomy syndrome (often characterized, e.g., by myocardial antibodies), urticaria (often characterized, e.g., by IgG and IgM antibodies to IgE), atopic dermatitis (often characterized, e.g., by IgG and IgM antibodies to IgE), asthma (often characterized, e.g., by IgG and IgM antibodies to IgE), and many other inflammatory, granulomatous, degenerative, and atrophic disorders.

[0536] In a preferred embodiment, the autoimmune diseases and disorders and/or conditions associated with the diseases and disorders recited above are treated, prevented, diagnosed and/or prognosed using for example, antagonists or agonists, polypeptides or polynucleotides, or antibodies of the present invention. In a specific preferred embodiment, rheumatoid arthritis is treated, prevented, and/or diagnosed using polynucleotides, polypeptides, antibodies, and/or agonists or antagonists of the present invention.

[0537] In another specific preferred embodiment, systemic lupus erythematosus is treated, prevented, and/or diagnosed using polynucleotides, polypeptides, antibodies, and/or agonists or antagonists of the present invention. In another specific preferred embodiment, idiopathic thrombocytopenia purpura is treated, prevented, and/or diagnosed using polynucleotides, polypeptides, antibodies, and/or agonists or antagonists of the present invention.

[0538] In another specific preferred embodiment IgA nephropathy is treated, prevented, and/or diagnosed using polynucleotides, polypeptides, antibodies, and/or agonists or antagonists of the present invention.

[0539] In a preferred embodiment, the autoimmune diseases and disorders and/or conditions associated with the diseases and disorders recited above are treated, prevented, diagnosed and/or prognosed using polynucleotides, polypeptides, antibodies, and/or agonists or antagonists of the present invention.

[0540] In preferred embodiments, polypeptides, antibodies, polynucleotides and/or agonists or antagonists of the present invention are used as a immunosuppressive agent(s).

[0541] Polynucleotides, polypeptides, antibodies, and/or agonists or antagonists of the present invention may be useful in treating, preventing, prognosing, and/or diagnosing diseases, disorders, and/or conditions of hematopoietic cells. Polynucleotides, polypeptides, antibodies, and/or agonists or antagonists of the present invention could be used to increase differentiation and proliferation of hematopoietic cells, including the pluripotent stem cells, in an effort to treat or prevent those diseases, disorders, and/or conditions associated with a decrease in certain (or many) types hematopoietic cells, including but not limited to, leukopenia, neutropenia, anemia, and thrombocytopenia. Alternatively, Polynucleotides, polypeptides, antibodies, and/or agonists or antagonists of the present invention could be used to increase differentiation and proliferation of hematopoietic cells, including the pluripotent stem cells, in an effort to treat or prevent those diseases, disorders, and/or conditions associated with an increase in certain (or many) types of hematopoietic cells, including but not limited to, histiocytosis.

[0542] Allergic reactions and conditions, such as asthma (particularly allergic asthma) or other respiratory problems, may also be treated, prevented, diagnosed and/or prognosed using polypeptides, antibodies, or polynucleotides of the invention, and/or agonists or antagonists thereof. Moreover, these molecules can be used to treat, prevent, prognose, and/or diagnose anaphylaxis, hypersensitivity to an antigenic molecule, or blood group incompatibility.

[0543] Additionally, polypeptides or polynucleotides of the invention, and/or agonists or antagonists thereof, may be used to treat, prevent, diagnose and/or prognose IgE-mediated allergic reactions. Such allergic reactions include, but are not limited to, asthma, rhinitis, and eczema. In specific embodiments, polynucleotides, polypeptides, antibodies, and/or agonists or antagonists of the present invention may be used to modulate IgE concentrations in vitro or in vivo.

[0544] Moreover, polynucleotides, polypeptides, antibodies, and/or agonists or antagonists of the present invention have uses in the diagnosis, prognosis, prevention, and/or treatment of inflammatory conditions. For example, since polypeptides, antibodies, or polynucleotides of the invention, and/or agonists or antagonists of the invention may inhibit the activation, proliferation and/or differentiation of cells involved in an inflammatory response, these molecules can be used to prevent and/or treat chronic and acute inflammatory conditions. Such inflammatory conditions include, but are not limited to, for example, inflammation associated with infection (e.g., septic shock, sepsis, or systemic inflammatory response syndrome), ischemia-reperfusion injury, endotoxin lethality, complement-mediated hyperacute rejection, nephritis, cytokine or chemokine induced lung injury, inflammatory bowel disease, Crohn's disease, over production of cytokines (e.g., TNF or IL-1.), respiratory disorders (e.g., asthma and allergy); gastrointestinal disorders (e.g., inflammatory bowel disease); cancers (e.g., gastric, ovarian, lung, bladder, liver, and breast); CNS disorders (e.g., multiple sclerosis; ischemic brain injury and/or stroke, traumatic brain injury, neurodegenerative disorders (e.g., Parkinson's disease and Alzheimer's disease); AIDS-related dementia; and prion disease); cardiovascular disorders (e.g., atherosclerosis, myocarditis, cardiovascular disease, and cardiopulmonary bypass complications); as well as many additional diseases, conditions, and disorders that are characterized by inflammation (e.g., hepatitis, rheumatoid arthritis, gout, trauma, pancreatitis, sarcoidosis, dermatitis, renal ischemia-reperfusion injury, Grave's disease, systemic lupus erythematosus, diabetes mellitus, and allogenic transplant rejection).

[0545] Because inflammation is a fundamental defense mechanism, inflammatory disorders can effect virtually any tissue of the body. Accordingly, polynucleotides, polypeptides, and antibodies of the invention, as well as agonists or antagonists thereof, have uses in the treatment of tissue-specific inflammatory disorders, including, but not limited to, adrenalitis, alveolitis, angiocholecystitis, appendicitis, balanitis, blepharitis, bronchitis, bursitis, carditis, cellulitis, cervicitis, cholecystitis, chorditis, cochlitis, colitis, conjunctivitis, cystitis, dermatitis, diverticulitis, encephalitis, endocarditis, esophagitis, eustachitis, fibrositis, folliculitis, gastritis, gastroenteritis, gingivitis, glossitis, hepatosplenitis, keratitis, labyrinthitis, laryngitis, lymphangitis, mastitis, media otitis, meningitis, metritis, mucitis, myocarditis, myosititis, myringitis, nephritis, neuritis, orchitis, osteochondritis, otitis, pericarditis, peritendonitis, peritonitis, pharyngitis, phlebitis, poliomyelitis, prostatitis, pulpitis, retinitis, rhinitis, salpingitis, scleritis, sclerochoroiditis, scrotitis, sinusitis, spondylitis, steatitis, stomatitis, synovitis, syringitis, tendonitis, tonsillitis, urethritis, and vaginitis.

[0546] In specific embodiments, polypeptides, antibodies, or polynucleotides of the invention, and/or agonists or antagonists thereof, are useful to diagnose, prognose, prevent, and/or treat organ transplant rejections and graft-versus-host disease. Organ rejection occurs by host immune cell destruction of the transplanted tissue through an immune response. Similarly, an immune response is also involved in GVHD, but, in this case, the foreign transplanted immune cells destroy the host tissues. Polypeptides, antibodies, or polynucleotides of the invention, and/or agonists or antagonists thereof, that inhibit an immune response, particularly the activation, proliferation, differentiation, or chemotaxis of T-cells, may be an effective therapy in preventing organ rejection or GVHD. In specific embodiments, polypeptides, antibodies, or polynucleotides of the invention, and/or agonists or antagonists thereof, that inhibit an immune response, particularly the activation, proliferation, differentiation, or chemotaxis of T-cells, may be an effective therapy in preventing experimental allergic and hyperacute xenograft rejection.

[0547] In other embodiments, polypeptides, antibodies, or polynucleotides of the invention, and/or agonists or antagonists thereof, are useful to diagnose, prognose, prevent, and/or treat immune complex diseases, including, but not limited to, serum sickness, post streptococcal glomerulonephritis, polyarteritis nodosa, and immune complex-induced vasculitis.

[0548] Polypeptides, antibodies, polynucleotides and/or agonists or antagonists of the invention can be used to treat, detect, and/or prevent infectious agents. For example, by increasing the immune response, particularly increasing the proliferation activation and/or differentiation of B and/or T cells, infectious diseases may be treated, detected, and/or prevented. The immune response may be increased by either enhancing an existing immune response, or by initiating a new immune response. Alternatively, polynucleotides, polypeptides, antibodies, and/or agonists or antagonists of the present invention may also directly inhibit the infectious agent (refer to section of application listing infectious agents, etc), without necessarily eliciting an immune response.

[0549] In another embodiment, polypeptides, antibodies, polynucleotides and/or agonists or antagonists of the present invention are used as a vaccine adjuvant that enhances immune responsiveness to an antigen. In a specific embodiment, polypeptides, antibodies, polynucleotides and/or agonists or antagonists of the present invention are used as an adjuvant to enhance tumor-specific immune responses.

[0550] In another specific embodiment, polypeptides, antibodies, polynucleotides and/or agonists or antagonists of the present invention are used as an adjuvant to enhance anti-viral immune responses. Anti-viral immune responses that may be enhanced using the compositions of the invention as an adjuvant, include virus and virus associated diseases or symptoms described herein or otherwise known in the art. In specific embodiments, the compositions of the invention are used as an adjuvant to enhance an immune response to a virus, disease, or symptom selected from the group consisting of: AIDS, meningitis, Dengue, EBV, and hepatitis (e.g., hepatitis B). In another specific embodiment, the compositions of the invention are used as an adjuvant to enhance an immune response to a virus, disease, or symptom selected from the group consisting of: HIV/AIDS, respiratory syncytial virus, Dengue, rotavirus, Japanese B encephalitis, influenza A and B, parainfluenza, measles, cytomegalovirus, rabies, Junin, Chikungunya, Rift Valley Fever, herpes simplex, and yellow fever.

[0551] In another specific embodiment, polypeptides, antibodies, polynucleotides and/or agonists or antagonists of the present invention are used as an adjuvant to enhance anti-bacterial or anti-fungal immune responses. Anti-bacterial or anti-fungal immune responses that may be enhanced using the compositions of the invention as an adjuvant, include bacteria or fungus and bacteria or fungus associated diseases or symptoms described herein or otherwise known in the art. In specific embodiments, the compositions of the invention are used as an adjuvant to enhance an immune response to a bacteria or fungus, disease, or symptom selected from the group consisting of: tetanus, Diphtheria, botulism, and meningitis type B.

[0552] In another specific embodiment, the compositions of the invention are used as an adjuvant to enhance an immune response to a bacteria or fungus, disease, or symptom selected from the group consisting of: Vibrio cholerae, Mycobacterium leprae, Salmonella typhi, Salmonella paratyphi, Meisseria meningitidis, Streptococcus pneumoniae, Group B streptococcus, Shigella spp., Enterotoxigenic Escherichia coli, Enterohemorrhagic E. coli, and Borrelia burgdorferi.

[0553] In another specific embodiment, polypeptides, antibodies, polynucleotides and/or agonists or antagonists of the present invention are used as an adjuvant to enhance anti-parasitic immune responses. Anti-parasitic immune responses that may be enhanced using the compositions of the invention as an adjuvant, include parasite and parasite associated diseases or symptoms described herein or otherwise known in the art. In specific embodiments, the compositions of the invention are used as an adjuvant to enhance an immune response to a parasite. In another specific embodiment, the compositions of the invention are used as an adjuvant to enhance an immune response to Plasmodium (malaria) or Leishmania.

[0554] In another specific embodiment, polypeptides, antibodies, polynucleotides and/or agonists or antagonists of the present invention may also be employed to treat infectious diseases including silicosis, sarcoidosis, and idiopathic pulmonary fibrosis; for example, by preventing the recruitment and activation of mononuclear phagocytes.

[0555] In another specific embodiment, polypeptides, antibodies, polynucleotides and/or agonists or antagonists of the present invention are used as an antigen for the generation of antibodies to inhibit or enhance immune mediated responses against polypeptides of the invention.

[0556] In one embodiment, polypeptides, antibodies, polynucleotides and/or agonists or antagonists of the present invention are administered to an animal (e.g., mouse, rat, rabbit, hamster, guinea pig, pigs, micro-pig, chicken, camel, goat, horse, cow, sheep, dog, cat, non-human primate, and human, most preferably human) to boost the immune system to produce increased quantities of one or more antibodies (e.g., IgG, IgA, IgM, and IgE), to induce higher affinity antibody production and immunoglobulin class switching (e.g., IgG, IgA, IgM, and IgE), and/or to increase an immune response.

[0557] In another specific embodiment, polypeptides, antibodies, polynucleotides and/or agonists or antagonists of the present invention are used as a stimulator of B cell responsiveness to pathogens.

[0558] In another specific embodiment, polypeptides, antibodies, polynucleotides and/or agonists or antagonists of the present invention are used as an activator of T cells.

[0559] In another specific embodiment, polypeptides, antibodies, polynucleotides and/or agonists or antagonists of the present invention are used as an agent that elevates the immune status of an individual prior to their receipt of immunosuppressive therapies.

[0560] In another specific embodiment, polypeptides, antibodies, polynucleotides and/or agonists or antagonists of the present invention are used as an agent to induce higher affinity antibodies.

[0561] In another specific embodiment, polypeptides, antibodies, polynucleotides and/or agonists or antagonists of the present invention are used as an agent to increase serum immunoglobulin concentrations.

[0562] In another specific embodiment, polypeptides, antibodies, polynucleotides and/or agonists or antagonists of the present invention are used as an agent to accelerate recovery of immunocompromised individuals.

[0563] In another specific embodiment, polypeptides, antibodies, polynucleotides and/or agonists or antagonists of the present invention are used as an agent to boost immunoresponsiveness among aged populations and/or neonates.

[0564] In another specific embodiment, polypeptides, antibodies, polynucleotides and/or agonists or antagonists of the present invention are used as an immune system enhancer prior to, during, or after bone marrow transplant and/or other transplants (e.g., allogeneic or xenogeneic organ transplantation). With respect to transplantation, compositions of the invention may be administered prior to, concomitant with, and/or after transplantation. In a specific embodiment, compositions of the invention are administered after transplantation, prior to the beginning of recovery of T-cell populations. In another specific embodiment, compositions of the invention are first administered after transplantation after the beginning of recovery of T cell populations, but prior to full recovery of B cell populations.

[0565] In another specific embodiment, polypeptides, antibodies, polynucleotides and/or agonists or antagonists of the present invention are used as an agent to boost immunoresponsiveness among individuals having an acquired loss of B cell function. Conditions resulting in an acquired loss of B cell function that may be ameliorated or treated by administering the polypeptides, antibodies, polynucleotides and/or agonists or antagonists thereof, include, but are not limited to, HIV Infection, AIDS, bone marrow transplant, and B cell chronic lymphocytic leukemia (CLL).

[0566] In another specific embodiment, polypeptides, antibodies, polynucleotides and/or agonists or antagonists of the present invention are used as an agent to boost immunoresponsiveness among individuals having a temporary immune deficiency. Conditions resulting in a temporary immune deficiency that may be ameliorated or treated by administering the polypeptides, antibodies, polynucleotides and/or agonists or antagonists thereof, include, but are not limited to, recovery from viral infections (e.g., influenza), conditions associated with malnutrition, recovery from infectious mononucleosis, or conditions associated with stress, recovery from measles, recovery from blood transfusion, and recovery from surgery.

[0567] In another specific embodiment, polypeptides, antibodies, polynucleotides and/or agonists or antagonists of the present invention are used as a regulator of antigen presentation by monocytes, dendritic cells, and/or B-cells. In one embodiment, polynucleotides, polypeptides, antibodies, and/or agonists or antagonists of the present invention enhance antigen presentation or antagonizes antigen presentation in vitro or in vivo. Moreover, in related embodiments, said enhancement or antagonism of antigen presentation may be useful as an anti-tumor treatment or to modulate the immune system.

[0568] In another specific embodiment, polypeptides, antibodies, polynucleotides and/or agonists or antagonists of the present invention are used as an agent to direct an individual's immune system towards development of a humoral response (i.e. TH2) as opposed to a TH1 cellular response.

[0569] In another specific embodiment, polypeptides, antibodies, polynucleotides and/or agonists or antagonists of the present invention are used as a means to induce tumor proliferation and thus make it more susceptible to anti-neoplastic agents. For example, multiple myeloma is a slowly dividing disease and is thus refractory to virtually all anti-neoplastic regimens. If these cells were forced to proliferate more rapidly their susceptibility profile would likely change.

[0570] In another specific embodiment, polypeptides, antibodies, polynucleotides and/or agonists or antagonists of the present invention are used as a stimulator of B cell production in pathologies such as AIDS, chronic lymphocyte disorder and/or Common Variable Immunodificiency.

[0571] In another specific embodiment, polypeptides, antibodies, polynucleotides and/or agonists or antagonists of the present invention are used as a therapy for generation and/or regeneration of lymphoid tissues following surgery, trauma or genetic defect. In another specific embodiment, polypeptides, antibodies, polynucleotides and/or agonists or antagonists of the present invention are used in the pretreatment of bone marrow samples prior to transplant.

[0572] In another specific embodiment, polypeptides, antibodies, polynucleotides and/or agonists or antagonists of the present invention are used as a gene-based therapy for genetically inherited disorders resulting in immuno-incompetence/immunodeficiency such as observed among SCID patients.

[0573] In another specific embodiment, polypeptides, antibodies, polynucleotides and/or agonists or antagonists of the present invention are used as a means of activating monocytes/macrophages to defend against parasitic diseases that effect monocytes such as Leishmania.

[0574] In another specific embodiment, polypeptides, antibodies, polynucleotides and/or agonists or antagonists of the present invention are used as a means of regulating secreted cytokines that are elicited by polypeptides of the invention.

[0575] In another embodiment, polypeptides, antibodies, polynucleotides and/or agonists or antagonists of the present invention are used in one or more of the applications decribed herein, as they may apply to veterinary medicine.

[0576] In another specific embodiment, polypeptides, antibodies, polynucleotides and/or agonists or antagonists of the present invention are used as a means of blocking various aspects of immune responses to foreign agents or self. Examples of diseases or conditions in which blocking of certain aspects of immune responses may be desired include autoimmune disorders such as lupus, and arthritis, as well as immunoresponsiveness to skin allergies, inflammation, bowel disease, injury and diseases/disorders associated with pathogens.

[0577] In another specific embodiment, polypeptides, antibodies, polynucleotides and/or agonists or antagonists of the present invention are used as a therapy for preventing the B cell proliferation and Ig secretion associated with autoimmune diseases such as idiopathic thrombocytopenic purpura, systemic lupus erythematosus and multiple sclerosis.

[0578] In another specific embodiment, polypeptides, antibodies, polynucleotides and/or agonists or antagonists of the present invention are used as a inhibitor of B and/or T cell migration in endothelial cells. This activity disrupts tissue architecture or cognate responses and is useful, for example in disrupting immune responses, and blocking sepsis.

[0579] In another specific embodiment, polypeptides, antibodies, polynucleotides and/or agonists or antagonists of the present invention are used as a therapy for chronic hypergammaglobulinemia evident in such diseases as monoclonal gammopathy of undetermined significance (MGUS), Waldenstrom's disease, related idiopathic monoclonal gammopathies, and plasmacytomas.

[0580] In another specific embodiment, polypeptides, antibodies, polynucleotides and/or agonists or antagonists of the present invention may be employed for instance to inhibit polypeptide chemotaxis and activation of macrophages and their precursors, and of neutrophils, basophils, B lymphocytes and some T-cell subsets, e.g., activated and CD8 cytotoxic T cells and natural killer cells, in certain autoimmune and chronic inflammatory and infective diseases. Examples of autoimmune diseases are described herein and include multiple sclerosis, and insulin-dependent diabetes.

[0581] The polypeptides, antibodies, polynucleotides and/or agonists or antagonists of the present invention may also be employed to treat idiopathic hyper-eosinophilic syndrome by, for example, preventing eosinophil production and migration.

[0582] In another specific embodiment, polypeptides, antibodies, polynucleotides and/or agonists or antagonists of the present invention are used to enhance or inhibit complement mediated cell lysis.

[0583] In another specific embodiment, polypeptides, antibodies, polynucleotides and/or agonists or antagonists of the present invention are used to enhance or inhibit antibody dependent cellular cytotoxicity.

[0584] In another specific embodiment, polypeptides, antibodies, polynucleotides and/or agonists or antagonists of the present invention may also be employed for treating atherosclerosis, for example, by preventing monocyte infiltration in the artery wall.

[0585] In another specific embodiment, polypeptides, antibodies, polynucleotides and/or agonists or antagonists of the present invention may be employed to treat adult respiratory distress syndrome (ARDS).

[0586] In another specific embodiment, polypeptides, antibodies, polynucleotides and/or agonists or antagonists of the present invention may be useful for stimulating wound and tissue repair, stimulating angiogenesis, and/or stimulating the repair of vascular or lymphatic diseases or disorders. Additionally, agonists and antagonists of the invention may be used to stimulate the regeneration of mucosal surfaces.

[0587] In a specific embodiment, polynucleotides or polypeptides, and/or agonists thereof are used to diagnose, prognose, treat, and/or prevent a disorder characterized by primary or acquired immunodeficiency, deficient serum immunoglobulin production, recurrent infections, and/or immune system dysfunction. Moreover, polynucleotides or polypeptides, and/or agonists thereof may be used to treat or prevent infections of the joints, bones, skin, and/or parotid glands, blood-borne infections (e.g., sepsis, meningitis, septic arthritis, and/or osteomyelitis), autoimmune diseases (e.g., those disclosed herein), inflammatory disorders, and malignancies, and/or any disease or disorder or condition associated with these infections, diseases, disorders and/or malignancies) including, but not limited to, CVID, other primary immune deficiencies, HIV disease, CLL, recurrent bronchitis, sinusitis, otitis media, conjunctivitis, pneumonia, hepatitis, meningitis, herpes zoster (e.g., severe herpes zoster), and/or pneumocystis carnii. Other diseases and disorders that may be prevented, diagnosed, prognosed, and/or treated with polynucleotides or polypeptides, and/or agonists of the present invention include, but are not limited to, HIV infection, HTLV-BLV infection, lymphopenia, phagocyte bactericidal dysfunction anemia, thrombocytopenia, and hemoglobinuria.

[0588] In another embodiment, polynucleotides, polypeptides, antibodies, and/or agonists or antagonists of the present invention are used to treat, and/or diagnose an individual having common variable immunodeficiency disease (“CVID”; also known as “acquired agammaglobulinemia” and “acquired hypogammaglobulinemia”) or a subset of this disease.

[0589] In a specific embodiment, polynucleotides, polypeptides, antibodies, and/or agonists or antagonists of the present invention may be used to diagnose, prognose, prevent, and/or treat cancers or neoplasms including immune cell or immune tissue-related cancers or neoplasms. Examples of cancers or neoplasms that may be prevented, diagnosed, or treated by polynucleotides, polypeptides, antibodies, and/or agonists or antagonists of the present invention include, but are not limited to, acute myelogenous leukemia, chronic myelogenous leukemia, Hodgkin's disease, non-Hodgkin's lymphoma, acute lymphocytic anemia (ALL) Chronic lymphocyte leukemia, plasmacytomas, multiple myeloma, Burkitt's lymphoma, EBV-transformed diseases, and/or diseases and disorders described in the section entitled “Hyperproliferative Disorders” elsewhere herein.

[0590] In another specific embodiment, polypeptides, antibodies, polynucleotides and/or agonists or antagonists of the present invention are used as a therapy for decreasing cellular proliferation of Large B-cell Lymphomas.

[0591] In another specific embodiment, polypeptides, antibodies, polynucleotides and/or agonists or antagonists of the present invention are used as a means of decreasing the involvement of B cells and Ig associated with Chronic Myelogenous Leukemia.

[0592] In specific embodiments, the compositions of the invention are used as an agent to boost immunoresponsiveness among B cell immunodeficient individuals, such as, for example, an individual who has undergone a partial or complete splenectomy.

[0593] Antagonists of the invention include, for example, binding and/or inhibitory antibodies, antisense nucleic acids, ribozymes or soluble forms of the polypeptides of the present invention (e.g., Fc fusion protein; see, e.g., Example 9). Agonists of the invention include, for example, binding or stimulatory antibodies, and soluble forms of the polypeptides (e.g., Fc fusion proteins; see, e.g., Example 9). polypeptides, antibodies, polynucleotides and/or agonists or antagonists of the present invention may be employed in a composition with a pharmaceutically acceptable carrier, e.g., as described herein.

[0594] In another embodiment, polypeptides, antibodies, polynucleotides and/or agonists or antagonists of the present invention are administered to an animal (including, but not limited to, those listed above, and also including transgenic animals) incapable of producing functional endogenous antibody molecules or having an otherwise compromised endogenous immune system, but which is capable of producing human immunoglobulin molecules by means of a reconstituted or partially reconstituted immune system from another animal (see, e.g., published PCT Application Nos. WO98/24893, WO/9634096, WO/9633735, and WO/9110741). Administration of polypeptides, antibodies, polynucleotides and/or agonists or antagonists of the present invention to such animals is useful for the generation of monoclonal antibodies against the polypeptides, antibodies, polynucleotides and/or agonists or antagonists of the present invention.

[0595] Blood-Related Disorders

[0596] The polynucleotides, polypeptides, antibodies, and/or agonists or antagonists of the present invention may be used to modulate hemostatic (the stopping of bleeding) or thrombolytic (clot dissolving) activity. For example, by increasing hemostatic or thrombolytic activity, polynucleotides or polypeptides, and/or agonists or antagonists of the present invention could be used to treat or prevent blood coagulation diseases, disorders, and/or conditions (e.g., afibrinogenemia, factor deficiencies, hemophilia), blood platelet diseases, disorders, and/or conditions (e.g., thrombocytopenia), or wounds resulting from trauma, surgery, or other causes. Alternatively, polynucleotides, polypeptides, antibodies, and/or agonists or antagonists of the present invention that can decrease hemostatic or thrombolytic activity could be used to inhibit or dissolve clotting. These molecules could be important in the treatment or prevention of heart attacks (infarction), strokes, or scarring.

[0597] In specific embodiments, the polynucleotides, polypeptides, antibodies, and/or agonists or antagonists of the present invention may be used to prevent, diagnose, prognose, and/or treat thrombosis, arterial thrombosis, venous thrombosis, thromboembolism, pulmonary embolism, atherosclerosis, myocardial infarction, transient ischemic attack, unstable angina. In specific embodiments, the polynucleotides, polypeptides, antibodies, and/or agonists or antagonists of the present invention may be used for the prevention of occulsion of saphenous grafts, for reducing the risk of periprocedural thrombosis as might accompany angioplasty procedures, for reducing the risk of stroke in patients with atrial fibrillation including nonrheumatic atrial fibrillation, for reducing the risk of embolism associated with mechanical heart valves and or mitral valves disease. Other uses for the polynucleotides, polypeptides, antibodies, and/or agonists or antagonists of the present invention, include, but are not limited to, the prevention of occlusions in extrcorporeal devices (e.g., intravascular canulas, vascular access shunts in hemodialysis patients, hemodialysis machines, and cardiopulmonary bypass machines).

[0598] In another embodiment, a polypeptide of the invention, or polynucleotides, antibodies, agonists, or antagonists corresponding to that polypeptide, may be used to prevent, diagnose, prognose, and/or treat diseases and disorders of the blood and/or blood forming organs associated with the tissue(s) in which the polypeptide of the invention is expressed, including one, two, three, four, five, or more tissues disclosed in Table 1A, column 7 (Tissue Distribution Library Code).

[0599] The polynucleotides, polypeptides, antibodies, and/or agonists or antagonists of the present invention may be used to modulate hematopoietic activity (the formation of blood cells). For example, the polynucleotides, polypeptides, antibodies, and/or agonists or antagonists of the present invention may be used to increase the quantity of all or subsets of blood cells, such as, for example, erythrocytes, lymphocytes (B or T cells), myeloid cells (e.g., basophils, eosinophils, neutrophils, mast cells, macrophages) and platelets. The ability to decrease the quantity of blood cells or subsets of blood cells may be useful in the prevention, detection, diagnosis and/or treatment of anemias and leukopenias described below. Alternatively, the polynucleotides, polypeptides, antibodies, and/or agonists or antagonists of the present invention may be used to decrease the quantity of all or subsets of blood cells, such as, for example, erythrocytes, lymphocytes (B or T cells), myeloid cells (e.g., basophils, eosinophils, neutrophils, mast cells, macrophages) and platelets. The ability to decrease the quantity of blood cells or subsets of blood cells may be useful in the prevention, detection, diagnosis and/or treatment of leukocytoses, such as, for example eosinophilia.

[0600] The polynucleotides, polypeptides, antibodies, and/or agonists or antagonists of the present invention may be used to prevent, treat, or diagnose blood dyscrasia.

[0601] Anemias are conditions in which the number of red blood cells or amount of hemoglobin (the protein that carries oxygen) in them is below normal. Anemia may be caused by excessive bleeding, decreased red blood cell production, or increased red blood cell destruction (hemolysis). The polynucleotides, polypeptides, antibodies, and/or agonists or antagonists of the present invention may be useful in treating, preventing, and/or diagnosing anemias. Anemias that may be treated prevented or diagnosed by the polynucleotides, polypeptides, antibodies, and/or agonists or antagonists of the present invention include iron deficiency anemia, hypochromic anemia, microcytic anemia, chlorosis, hereditary siderob;astic anemia, idiopathic acquired sideroblastic anemia, red cell aplasia, megaloblastic anemia (e.g., pernicious anemia, (vitamin B12 deficiency) and folic acid deficiency anemia), aplastic anemia, hemolytic anemias (e.g., autoimmune helolytic anemia, microangiopathic hemolytic anemia, and paroxysmal nocturnal hemoglobinuria). The polynucleotides, polypeptides, antibodies, and/or agonists or antagonists of the present invention may be useful in treating, preventing, and/or diagnosing anemias associated with diseases including but not limited to, anemias associated with systemic lupus erythematosus, cancers, lymphomas, chronic renal disease, and enlarged spleens. The polynucleotides, polypeptides, antibodies, and/or agonists or antagonists of the present invention may be useful in treating, preventing, and/or diagnosing anemias arising from drug treatments such as anemias associated with methyldopa, dapsone, and/or sulfadrugs. Additionally, rhe polynucleotides, polypeptides, antibodies, and/or agonists or antagonists of the present invention may be useful in treating, preventing, and/or diagnosing anemias associated with abnormal red blood cell architecture including but not limited to, hereditary spherocytosis, hereditary elliptocytosis, glucose-6-phosphate dehydrogenase deficiency, and sickle cell anemia.

[0602] The polynucleotides, polypeptides, antibodies, and/or agonists or antagonists of the present invention may be useful in treating, preventing, and/or diagnosing hemoglobin abnormalities, (e.g., those associated with sickle cell anemia, hemoglobin C disease, hemoglobin S-C disease, and hemoglobin E disease). Additionally, the polynucleotides, polypeptides, antibodies, and/or agonists or antagonists of the present invention may be useful in diagnosing, prognosing, preventing, and/or treating thalassemias, including, but not limited to major and minor forms of alpha-thalassemia and beta-thalassemia.

[0603] In another embodiment, the polynucleotides, polypeptides, antibodies, and/or agonists or antagonists of the present invention may be useful in diagnosing, prognosing, preventing, and/or treating bleeding disorders including, but not limited to, thrombocytopenia (e.g., idiopathic thrombocytopenic purpura, and thrombotic thrombocytopenic purpura), Von Willebrand's disease, hereditary platelet disorders (e.g., storage pool disease such as Chediak-Higashi and Hermansky-Pudlak syndromes, thromboxane A2 dysfunction, thromboasthenia, and Bernard-Soulier syndrome), hemolytic-uremic syndrome, hemophelias such as hemophelia A or Factor VII deficiency and Christmas disease or Factor IX deficiency, Hereditary Hemorhhagic Telangiectsia, also known as Rendu-Osler-Weber syndrome, allergic purpura (Henoch Schonlein purpura) and disseminated intravascular coagulation.

[0604] The effect of the polynucleotides, polypeptides, antibodies, and/or agonists or antagonists of the present invention on the clotting time of blood may be monitored using any of the clotting tests known in the art including, but not limited to, whole blood partial thromboplastin time (PTT), the activated partial thromboplastin time (aPTT), the activated clotting time (ACT), the recalcified activated clotting time, or the Lee-White Clotting time.

[0605] Several diseases and a variety of drugs can cause platelet dysfunction. Thus, in a specific embodiment, the polynucleotides, polypeptides, antibodies, and/or agonists or antagonists of the present invention may be useful in diagnosing, prognosing, preventing, and/or treating acquired platelet dysfunction such as platelet dysfunction accompanying kidney failure, leukemia, multiple myeloma, cirrhosis of the liver, and systemic lupus erythematosus as well as platelet dysfunction associated with drug treatments, including treatment with aspirin, ticlopidine, nonsteroidal anti-inflammatory drugs (used for arthritis, pain, and sprains), and penicillin in high doses.

[0606] In another embodiment, the polynucleotides, polypeptides, antibodies, and/or agonists or antagonists of the present invention may be useful in diagnosing, prognosing, preventing, and/or treating diseases and disorders characterized by or associated with increased or decreased numbers of white blood cells. Leukopenia occurs when the number of white blood cells decreases below normal. Leukopenias include, but are not limited to, neutropenia and lymphocytopenia. An increase in the number of white blood cells compared to normal is known as leukocytosis. The body generates increased numbers of white blood cells during infection. Thus, leukocytosis may simply be a normal physiological parameter that reflects infection. Alternatively, leukocytosis may be an indicator of injury or other disease such as cancer. Leokocytoses, include but are not limited to, eosinophilia, and accumulations of macrophages. In specific embodiments, the polynucleotides, polypeptides, antibodies, and/or agonists or antagonists of the present invention may be useful in diagnosing, prognosing, preventing, and/or treating leukopenia. In other specific embodiments, the polynucleotides, polypeptides, antibodies, and/or agonists or antagonists of the present invention may be useful in diagnosing, prognosing, preventing, and/or treating leukocytosis

[0607] Leukopenia may be a generalized decreased in all types of white blood cells, or may be a specific depletion of particular types of white blood cells. Thus, in specific embodiments, the polynucleotides, polypeptides, antibodies, and/or agonists or antagonists of the present invention may be useful in diagnosing, prognosing, preventing, and/or treating decreases in neutrophil numbers, known as neutropenia. Neutropenias that may be diagnosed, prognosed, prevented, and/or treated by the polynucleotides, polypeptides, antibodies, and/or agonists or antagonists of the present invention include, but are not limited to, infantile genetic agranulocytosis, familial neutropenia, cyclic neutropenia, neutropenias resulting from or associated with dietary deficiencies (e.g., vitamin B 12 deficiency or folic acid deficiency), neutropenias resulting from or associated with drug treatments (e.g., antibiotic regimens such as penicillin treatment, sulfonamide treatment, anticoagulant treatment, anticonvulsant drugs, anti-thyroid drugs, and cancer chemotherapy), and neutropenias resulting from increased neutrophil destruction that may occur in association with some bacterial or viral infections, allergic disorders, autoimmune diseases, conditions in which an individual has an enlarged spleen (e.g., Felty syndrome, malaria and sarcoidosis), and some drug treatment regimens.

[0608] The polynucleotides, polypeptides, antibodies, and/or agonists or antagonists of the present invention may be useful in diagnosing, prognosing, preventing, and/or treating lymphocytopenias (decreased numbers of B and/or T lymphocytes), including, but not limited lymphocytopenias resulting from or associated with stress, drug treatments (e.g., drug treatment with corticosteroids, cancer chemotherapies, and/or radiation therapies), AIDS infection and/or other diseases such as, for example, cancer, rheumatoid arthritis, systemic lupus erythematosus, chronic infections, some viral infections and/or hereditary disorders (e.g., DiGeorge syndrome, Wiskott-Aldrich Syndome, severe combined immunodeficiency, ataxia telangiectsia).

[0609] The polynucleotides, polypeptides, antibodies, and/or agonists or antagonists of the present invention may be useful in diagnosing, prognosing, preventing, and/or treating diseases and disorders associated with macrophage numbers and/or macrophage function including, but not limited to, Gaucher's disease, Niemann-Pick disease, Letterer-Siwe disease and Hand-Schuller-Christian disease.

[0610] In another embodiment, the polynucleotides, polypeptides, antibodies, and/or agonists or antagonists of the present invention may be useful in diagnosing, prognosing, preventing, and/or treating diseases and disorders associated with eosinophil numbers and/or eosinophil function including, but not limited to, idiopathic hypereosinophilic syndrome, eosinophilia-myalgia syndrome, and Hand-Schuller-Christian disease.

[0611] In yet another embodiment, the polynucleotides, polypeptides, antibodies, and/or agonists or antagonists of the present invention may be useful in diagnosing, prognosing, preventing, and/or treating leukemias and lymphomas including, but not limited to, acute lymphocytic (lymphpblastic) leukemia (ALL), acute myeloid (myelocytic, myelogenous, myeloblastic, or myelomonocytic) leukemia, chronic lymphocytic leukemia (e.g., B cell leukemias, T cell leukemias, Sezary syndrome, and Hairy cell leukenia), chronic myelocytic (myeloid, myelogenous, or granulocytic) leukemia, Hodgkin's lymphoma, non-hodgkin's lymphoma, Burkitt's lymphoma, and mycosis fungoides.

[0612] In other embodiments, the polynucleotides, polypeptides, antibodies, and/or agonists or antagonists of the present invention may be useful in diagnosing, prognosing, preventing, and/or treating diseases and disorders of plasma cells including, but not limited to, plasma cell dyscrasias, monoclonal gammaopathies, monoclonal gammopathies of undetermined significance, multiple myeloma, macroglobulinemia, Waldenstrom's macroglobulinemia, cryoglobulinemia, and Raynaud's phenomenon.

[0613] In other embodiments, the polynucleotides, polypeptides, antibodies, and/or agonists or antagonists of the present invention may be useful in treating, preventing, and/or diagnosing myeloproliferative disorders, including but not limited to, polycythemia vera, relative polycythemia, secondary polycythemia, myelofibrosis, acute myelofibrosis, agnogenic myelod metaplasia, thrombocythemia, (including both primary and seconday thrombocythemia) and chronic myelocytic leukemia.

[0614] In other embodiments, the polynucleotides, polypeptides, antibodies, and/or agonists or antagonists of the present invention may be useful as a treatment prior to surgery, to increase blood cell production.

[0615] In other embodiments, the polynucleotides, polypeptides, antibodies, and/or agonists or antagonists of the present invention may be useful as an agent to enhance the migration, phagocytosis, superoxide production, antibody dependent cellular cytotoxicity of neutrophils, eosionophils and macrophages.

[0616] In other embodiments, the polynucleotides, polypeptides, antibodies, and/or agonists or antagonists of the present invention may be useful as an agent to increase the number of stem cells in circulation prior to stem cells pheresis. In another specific embodiment, the polynucleotides, polypeptides, antibodies, and/or agonists or antagonists of the present invention may be useful as an agent to increase the number of stem cells in circulation prior to platelet pheresis.

[0617] In other embodiments, the polynucleotides, polypeptides, antibodies, and/or agonists or antagonists of the present invention may be useful as an agent to increase cytokine production.

[0618] In other embodiments, the polynucleotides, polypeptides, antibodies, and/or agonists or antagonists of the present invention may be useful in preventing, diagnosing, and/or treating primary hematopoietic disorders.

[0619] Hyperproliferative Disorders

[0620] Musculoskeletal system associated polynucleotides or polypeptides, or agonists or antagonists thereof, can be used to treat, prevent, diagnose and/or prognose hyperproliferative diseases, disorders, and/or conditions, including neoplasms.

[0621] In a specific embodiment, musculoskeletal system associated polynucleotides or polypeptides, or agonists or antagonists thereof, can be used to treat, prevent, and/or diagnose hyperproliferative diseases, disorders, and/or conditions of the musculoskeletal system.

[0622] In a preferred embodiment, musculoskeletal system associated polynucleotides or polypeptides, or agonists or antagonists thereof, can be used to treat, prevent, and/or diagnose neoplasms of musculoskeletal system tissues.

[0623] Musculoskeletal system associated polynucleotides or polypeptides, or agonists or antagonists of the invention, may inhibit the proliferation of the disorder through direct or indirect interactions. Alternatively, musculoskeletal system associated polynucleotides or polypeptides, or agonists or antagonists thereof, may proliferate other cells, which can inhibit the hyperproliferative disorder.

[0624] For example, by increasing an immune response, particularly increasing antigenic qualities of the hyperproliferative disorder or by proliferating, differentiating, or mobilizing T-cells, hyperproliferative diseases, disorders, and/or conditions can be treated, prevented, and/or diagnosed. This immune response may be increased by either enhancing an existing immune response, or by initiating a new immune response. Alternatively, decreasing an immune response may also be a method of treating, preventing, and/or diagnosing hyperproliferative diseases, disorders, and/or conditions, such as a chemotherapeutic agent.

[0625] Examples of hyperproliferative diseases, disorders, and/or conditions that can be treated, prevented, and/or diagnosed by musculoskeletal system associated polynucleotides or polypeptides, or agonists or antagonists thereof, include, but are not limited to neoplasms located in the: prostate, colon, abdomen, bone, breast, digestive system, liver, pancreas, peritoneum, endocrine glands (adrenal, parathyroid, pituitary, testicles, ovary, thymus, thyroid), eye, head and neck, nervous (central and peripheral), lymphatic system, pelvic, skin, soft tissue, spleen, thoracic, and urogenital.

[0626] Similarly, other hyperproliferative disorders can also be treated or detected by polynucleotides or polypeptides, or agonists or antagonists of the present invention. Examples of such hyperproliferative disorders include, but are not limited to: Acute Childhood Lymphoblastic Leukemia, Acute Lymphoblastic Leukemia, Acute Lymphocytic Leukemia, Acute Myeloid Leukemia, Adrenocortical Carcinoma, Adult (Primary) Hepatocellular Cancer, Adult (Primary) Liver Cancer, Adult Acute Lymphocytic Leukemia, Adult Acute Myeloid Leukemia, Adult Hodgkin's Disease, Adult Hodgkin's Lymphoma, Adult Lymphocytic Leukemia, Adult Non-Hodgkin's Lymphoma, Adult Primary Liver Cancer, Adult Soft Tissue Sarcoma, AIDS-Related Lymphoma, AIDS-Related Malignancies, Anal Cancer, Astrocytoma, Bile Duct Cancer, Bladder Cancer, Bone Cancer, Brain Stem Glioma, Brain Tumors, Breast Cancer, Cancer of the Renal Pelvis and Ureter, Central Nervous System (Primary) Lymphoma, Central Nervous System Lymphoma, Cerebellar Astrocytoma, Cerebral Astrocytoma, Cervical Cancer, Childhood (Primary) Hepatocellular Cancer, Childhood (Primary) Liver Cancer, Childhood Acute Lymphoblastic Leukemia, Childhood Acute Myeloid Leukemia, Childhood Brain Stem Glioma, Childhood Cerebellar Astrocytoma, Childhood Cerebral Astrocytoma, Childhood Extracranial Germ Cell Tumors, Childhood Hodgkin's Disease, Childhood Hodgkin's Lymphoma, Childhood Hypothalamic and Visual Pathway Glioma, Childhood Lymphoblastic Leukemia, Childhood Medulloblastoma, Childhood Non-Hodgkin's Lymphoma, Childhood Pineal and Supratentorial Primitive Neuroectodermal Tumors, Childhood Primary Liver Cancer, Childhood Rhabdomyosarcoma, Childhood Soft Tissue Sarcoma, Childhood Visual Pathway and Hypothalamic Glioma, Chronic Lymphocytic Leukemia, Chronic Myelogenous Leukemia, Colon Cancer, Cutaneous T-Cell Lymphoma, Endocrine Pancreas Islet Cell Carcinoma, Endometrial Cancer, Ependymoma, Epithelial Cancer, Esophageal Cancer, Ewing's Sarcoma and Related Tumors, Exocrine Pancreatic Cancer, Extracranial Germ Cell Tumor, Extragonadal Germ Cell Tumor, Extrahepatic Bile Duct Cancer, Eye Cancer, Female Breast Cancer, Gaucher's Disease, Gallbladder Cancer, Gastric Cancer, Gastrointestinal Carcinoid Tumor, Gastrointestinal Tumors, Germ Cell Tumors, Gestational Trophoblastic Tumor, Hairy Cell Leukemia, Head and Neck Cancer, Hepatocellular Cancer, Hodgkin's Disease, Hodgkin's Lymphoma, Hypergammaglobulinemia, Hypopharyngeal Cancer, Intestinal Cancers, Intraocular Melanoma, Islet Cell Carcinoma, Islet Cell Pancreatic Cancer, Kaposi's Sarcoma, Kidney Cancer, Laryngeal Cancer, Lip and Oral Cavity Cancer, Liver Cancer, Lung Cancer, Lymphoproliferative Disorders, Macroglobulinemia, Male Breast Cancer, Malignant Mesothelioma, Malignant Thymoma, Medulloblastoma, Melanoma, Mesothelioma, Metastatic Occult Primary Squamous Neck Cancer, Metastatic Primary Squamous Neck Cancer, Metastatic Squamous Neck Cancer, Multiple Myeloma, Multiple Myeloma/Plasma Cell Neoplasm, Myelodysplastic Syndrome, Myelogenous Leukemia, Myeloid Leukemia, Myeloproliferative Disorders, Nasal Cavity and Paranasal Sinus Cancer, Nasopharyngeal Cancer, Neuroblastoma, Non-Hodgkin's Lymphoma During Pregnancy, Nonmelanoma Skin Cancer, Non-Small Cell Lung Cancer, Occult Primary Metastatic Squamous Neck Cancer, Oropharyngeal Cancer, Osteo-/Malignant Fibrous Sarcoma, Osteosarcoma/Malignant Fibrous Histiocytoma, Osteosarcoma/Malignant Fibrous Histiocytoma of Bone, Ovarian Epithelial Cancer, Ovarian Germ Cell Tumor, Ovarian Low Malignant Potential Tumor, Pancreatic Cancer, Paraproteinemias, Purpura, Parathyroid Cancer, Penile Cancer, Pheochromocytoma, Pituitary Tumor, Plasma Cell Neoplasm/Multiple Myeloma, Primary Central Nervous System Lymphoma, Primary Liver Cancer, Prostate Cancer, Rectal Cancer, Renal Cell Cancer, Renal Pelvis and Ureter Cancer, Retinoblastoma, Rhabdomyosarcoma, Salivary Gland Cancer, Sarcoidosis Sarcomas, Sezary Syndrome, Skin Cancer, Small Cell Lung Cancer, Small Intestine Cancer, Soft Tissue Sarcoma, Squamous Neck Cancer, Stomach Cancer, Supratentorial Primitive Neuroectodermal and Pineal Tumors, T-Cell Lymphoma, Testicular Cancer, Thymoma, Thyroid Cancer, Transitional Cell Cancer of the Renal Pelvis and Ureter, Transitional Renal Pelvis and Ureter Cancer, Trophoblastic Tumors, Ureter and Renal Pelvis Cell Cancer, Urethral Cancer, Uterine Cancer, Uterine Sarcoma, Vaginal Cancer, Visual Pathway and Hypothalamic Glioma, Vulvar Cancer, Waldenstrom's Macroglobulinemia, Wilms' Tumor, and any other hyperproliferative disease, besides neoplasia, located in an organ system listed above.

[0627] In another preferred embodiment, polynucleotides or polypeptides, or agonists or antagonists of the present invention are used to diagnose, prognose, prevent, and/or treat premalignant conditions and to prevent progression to a neoplastic or malignant state, including but not limited to those disorders described above. Such uses are indicated in conditions known or suspected of preceding progression to neoplasia or cancer, in particular, where non-neoplastic cell growth consisting of hyperplasia, metaplasia, or most particularly, dysplasia has occurred (for review of such abnormal growth conditions, see Robbins and Angell, 1976, Basic Pathology, 2d Ed., W. B. Saunders Co., Philadelphia, pp. 68-79.)

[0628] Hyperplasia is a form of controlled cell proliferation, involving an increase in cell number in a tissue or organ, without significant alteration in structure or function. Hyperplastic disorders which can be diagnosed, prognosed, prevented, and/or treated with compositions of the invention (including polynucleotides, polypeptides, agonists or antagonists) include, but are not limited to, angiofollicular mediastinal lymph node hyperplasia, angiolymphoid hyperplasia with eosinophilia, atypical melanocytic hyperplasia, basal cell hyperplasia, benign giant lymph node hyperplasia, cementum hyperplasia, congenital adrenal hyperplasia, congenital sebaceous hyperplasia, cystic hyperplasia, cystic hyperplasia of the breast, denture hyperplasia, ductal hyperplasia, endometrial hyperplasia, fibromuscular hyperplasia, focal epithelial hyperplasia, gingival hyperplasia, inflammatory fibrous hyperplasia, inflammatory papillary hyperplasia, intravascular papillary endothelial hyperplasia, nodular hyperplasia of prostate, nodular regenerative hyperplasia, pseudoepitheliomatous hyperplasia, senile sebaceous hyperplasia, and verrucous hyperplasia.

[0629] Metaplasia is a form of controlled cell growth in which one type of adult or fully differentiated cell substitutes for another type of adult cell. Metaplastic disorders which can be diagnosed, prognosed, prevented, and/or treated with compositions of the invention (including polynucleotides, polypeptides, agonists or antagonists) include, but are not limited to, agnogenic myeloid metaplasia, apocrine metaplasia, atypical metaplasia, autoparenchymatous metaplasia, connective tissue metaplasia, epithelial metaplasia, intestinal metaplasia, metaplastic anemia, metaplastic ossification, metaplastic polyps, myeloid metaplasia, primary myeloid metaplasia, secondary myeloid metaplasia, squamous metaplasia, squamous metaplasia of amnion, and symptomatic myeloid metaplasia.

[0630] Dysplasia is frequently a forerunner of cancer, and is found mainly in the epithelia; it is the most disorderly form of non-neoplastic cell growth, involving a loss in individual cell uniformity and in the architectural orientation of cells. Dysplastic cells often have abnormally large, deeply stained nuclei, and exhibit pleomorphism. Dysplasia characteristically occurs where there exists chronic irritation or inflammation. Dysplastic disorders which can be diagnosed, prognosed, prevented, and/or treated with compositions of the invention (including polynucleotides, polypeptides, agonists or antagonists) include, but are not limited to, anhidrotic ectodermal dysplasia, anterofacial dysplasia, asphyxiating thoracic dysplasia, atriodigital dysplasia, bronchopulmonary dysplasia, cerebral dysplasia, cervical dysplasia, chondroectodermal dysplasia, cleidocranial dysplasia, congenital ectodermal dysplasia, craniodiaphysial dysplasia, craniocarpotarsal dysplasia, craniometaphysial dysplasia, dentin dysplasia, diaphysial dysplasia, ectodermal dysplasia, enamel dysplasia, encephalo-ophthalmic dysplasia, dysplasia epiphysialis hemimelia, dysplasia epiphysialis multiplex, dysplasia epiphysialis punctata, epithelial dysplasia, faciodigitogenital dysplasia, familial fibrous dysplasia of jaws, familial white folded dysplasia, fibromuscular dysplasia, fibrous dysplasia of bone, florid osseous dysplasia, hereditary renal-retinal dysplasia, hidrotic ectodermal dysplasia, hypohidrotic ectodermal dysplasia, lymphopenic thymic dysplasia, mammary dysplasia, mandibulofacial dysplasia, metaphysial dysplasia, Mondini dysplasia, monostotic fibrous dysplasia, mucoepithelial dysplasia, multiple epiphysial dysplasia, oculoauriculovertebral dysplasia, oculodentodigital dysplasia, oculovertebral dysplasia, odontogenic dysplasia, ophthalmomandibulomelic dysplasia, periapical cemental dysplasia, polyostotic fibrous dysplasia, pseudoachondroplastic spondyloepiphysial dysplasia, retinal dysplasia, septo-optic dysplasia, spondyloepiphysial dysplasia, and ventriculoradial dysplasia.

[0631] Additional pre-neoplastic disorders which can be diagnosed, prognosed, prevented, and/or treated with compositions of the invention (including polynucleotides, polypeptides, agonists or antagonists) include, but are not limited to, benign dysproliferative disorders (e.g., benign tumors, fibrocystic conditions, tissue hypertrophy, intestinal polyps, colon polyps, and esophageal dysplasia), leukoplakia, keratoses, Bowen's disease, Farmer's Skin, solar cheilitis, and solar keratosis.

[0632] In another embodiment, a polypeptide of the invention, or polynucleotides, antibodies, agonists, or antagonists corresponding to that polypeptide, may be used to diagnose and/or prognose disorders associated with the tissue(s) in which the polypeptide of the invention is expressed, including one, two, three, four, five, or more tissues disclosed in Table 1A, 7 (Tissue Distribution Library Code).

[0633] In another embodiment, polynucleotides, polypeptides, antibodies, and/or agonists or antagonists of the present invention conjugated to a toxin or a radioactive isotope, as described herein, may be used to treat cancers and neoplasms, including, but not limited to those described herein. In a further preferred embodiment, polynucleotides, polypeptides, antibodies, and/or agonists or antagonists of the present invention conjugated to a toxin or a radioactive isotope, as described herein, may be used to treat acute myelogenous leukemia.

[0634] Additionally, polynucleotides, polypeptides, and/or agonists or antagonists of the invention may affect apoptosis, and therefore, would be useful in treating a number of diseases associated with increased cell survival or the inhibition of apoptosis. For example, diseases associated with increased cell survival or the inhibition of apoptosis that could be diagnosed, prognosed, prevented, and/or treated by polynucleotides, polypeptides, and/or agonists or antagonists of the invention, include cancers (such as follicular lymphomas, carcinomas with p53 mutations, and hormone-dependent tumors, including, but not limited to colon cancer, cardiac tumors, pancreatic cancer, melanoma, retinoblastoma, glioblastoma, lung cancer, intestinal cancer, testicular cancer, stomach cancer, neuroblastoma, myxoma, myoma, lymphoma, endothelioma, osteoblastoma, osteoclastoma, osteosarcoma, chondrosarcoma, adenoma, breast cancer, prostate cancer, Kaposi's sarcoma and ovarian cancer); autoimmune disorders such as, multiple sclerosis, Sjogren's syndrome, Hashimoto's thyroiditis, biliary cirrhosis, Behcet's disease, Crohn's disease, polymyositis, systemic lupus erythematosus and immune-related glomerulonephritis and rheumatoid arthritis) and viral infections (such as herpes viruses, pox viruses and adenoviruses), inflammation, graft v. host disease, acute graft rejection, and chronic graft rejection.

[0635] In preferred embodiments, polynucleotides, polypeptides, and/or agonists or antagonists of the invention are used to inhibit growth, progression, and/or metastasis of cancers, in particular those listed above.

[0636] Additional diseases or conditions associated with increased cell survival that could be diagnosed, prognosed, prevented, and/or treated by polynucleotides, polypeptides, and/or agonists or antagonists of the invention, include, but are not limited to, progression, and/or metastases of malignancies and related disorders such as leukemia (including acute leukemias (e.g., acute lymphocytic leukemia, acute myelocytic leukemia (including myeloblastic, promyelocytic, myelomonocytic, monocytic, and erythroleukemia)) and chronic leukemias (e.g., chronic myelocytic (granulocytic) leukemia and chronic lymphocytic leukemia)), polycythemia vera, lymphomas (e.g., Hodgkin's disease and non-Hodgkin's disease), multiple myeloma, Waldenstrom's macroglobulinemia, heavy chain disease, and solid tumors including, but not limited to, sarcomas and carcinomas such as fibrosarcoma, myxosarcoma, liposarcoma, chondrosarcoma, osteogenic sarcoma, chordoma, angiosarcoma, endotheliosarcoma, lymphangiosarcoma, lymphangioendotheliosarcoma, synovioma, mesothelioma, Ewing's tumor, leiomyosarcoma, rhabdomyosarcoma, colon carcinoma, pancreatic cancer, breast cancer, ovarian cancer, prostate cancer, squamous cell carcinoma, basal cell carcinoma, adenocarcinoma, sweat gland carcinoma, sebaceous gland carcinoma, papillary carcinoma, papillary adenocarcinomas, cystadenocarcinoma, medullary carcinoma, bronchogenic carcinoma, renal cell carcinoma, hepatoma, bile duct carcinoma, choriocarcinoma, seminoma, embryonal carcinoma, Wilm's tumor, cervical cancer, testicular tumor, lung carcinoma, small cell lung carcinoma, bladder carcinoma, epithelial carcinoma, glioma, astrocytoma, medulloblastoma, craniopharyngioma, ependymoma, pinealoma, emangioblastoma, acoustic neuroma, oligodendroglioma, menangioma, melanoma, neuroblastoma, and retinoblastoma.

[0637] Diseases associated with increased apoptosis that could be diagnosed, prognosed, prevented, and/or treated by polynucleotides, polypeptides, and/or agonists or antagonists of the invention, include AIDS; neurodegenerative disorders (such as Alzheimer's disease, Parkinson's disease, amyotrophic lateral sclerosis, retinitis pigmentosa, cerebellar degeneration and brain tumor or prior associated disease); autoimmune disorders (such as, multiple sclerosis, Sjogren's syndrome, Hashimoto's thyroiditis, biliary cirrhosis, Behcet's disease, Crohn's disease, polymyositis, systemic lupus erythematosus and immune-related glomerulonephritis and rheumatoid arthritis) myelodysplastic syndromes (such as aplastic anemia), graft v. host disease, ischemic injury (such as that caused by myocardial infarction, stroke and reperfusion injury), liver injury (e.g., hepatitis related liver injury, ischemia/reperfusion injury, cholestosis (bile duct injury) and liver cancer); toxin-induced liver disease (such as that caused by alcohol), septic shock, cachexia and anorexia.

[0638] Hyperproliferative diseases and/or disorders that could be diagnosed, prognosed, prevented, and/or treated by polynucleotides, polypeptides, and/or agonists or antagonists of the invention, include, but are not limited to, neoplasms located in the liver, abdomen, bone, breast, digestive system, pancreas, peritoneum, endocrine glands (adrenal, parathyroid, pituitary, testicles, ovary, thymus, thyroid), eye, head and neck, nervous system (central and peripheral), lymphatic system, pelvis, skin, soft tissue, spleen, thorax, and urogenital tract.

[0639] Similarly, other hyperproliferative disorders can also be diagnosed, prognosed, prevented, and/or treated by polynucleotides, polypeptides, and/or agonists or antagonists of the invention. Examples of such hyperproliferative disorders include, but are not limited to: hypergammaglobulinemia, lymphoproliferative disorders, paraproteinemias, purpura, sarcoidosis, Sezary Syndrome, Waldenstron's macroglobulinemia, Gaucher's Disease, histiocytosis, and any other hyperproliferative disease, besides neoplasia, located in an organ system listed above.

[0640] One preferred embodiment utilizes polynucleotides of the present invention to inhibit aberrant cellular division, by gene therapy using the present invention, and/or protein fusions or fragments thereof.

[0641] Thus, the present invention provides a method for treating cell proliferative diseases, disorders, and/or conditions by inserting into an abnormally proliferating cell a polynucleotide of the present invention, wherein said polynucleotide represses said cell proliferation, disease, disorder, and/or condition.

[0642] In a preferred embodiment, the present invention provides a method for treating cell proliferative diseases, disorders and/or conditions of the musculoskeletal system by inserting into a cell, a polynucleotide of the present invention, wherein said polynucleotide represses said cell proliferation, disease and/or disorder.

[0643] Another embodiment of the present invention provides a method of treating cell-proliferative diseases, disorders, and/or conditions in individuals comprising administration of one or more active gene copies of the present invention to an abnormally proliferating cell or cells. In a preferred embodiment, polynucleotides of the present invention is a DNA construct comprising a recombinant expression vector effective in expressing a DNA sequence encoding said polynucleotides. In another preferred embodiment of the present invention, the DNA construct encoding the polynucleotides of the present invention is inserted into cells to be treated utilizing a retrovirus, or more preferably an adenoviral vector (see, e.g., G J. Nabel, et. al., PNAS 96: 324-326 (1999), which is hereby incorporated by reference). In a most preferred embodiment, the viral vector is defective and will not transform non-proliferating cells, only proliferating cells. Moreover, in a preferred embodiment, the polynucleotides of the present invention inserted into proliferating cells either alone, or in combination with or fused to other polynucleotides, can then be modulated via an external stimulus (i.e., magnetic, specific small molecule, chemical, or drug administration, etc.), which acts upon the promoter upstream of said polynucleotides to induce expression of the encoded protein product. As such the beneficial therapeutic affect of the present invention may be expressly modulated (i.e., to increase, decrease, or inhibit expression of the present invention) based upon said external stimulus.

[0644] Polynucleotides of the present invention may be useful in repressing expression of oncogenic genes or antigens. By “repressing expression of the oncogenic genes “is intended the suppression of the transcription of the gene, the degradation of the gene transcript (pre-message RNA), the inhibition of splicing, the destruction of the messenger RNA, the prevention of the post-translational modifications of the protein, the destruction of the protein, or the inhibition of the normal function of the protein.

[0645] For local administration to abnormally proliferating cells, polynucleotides of the present invention may be administered by any method known to those of skill in the art including, but not limited to transfection, electroporation, microinjection of cells, or in vehicles such as liposomes, lipofectin, or as naked polynucleotides, or any other method described throughout the specification. The polynucleotide of the present invention may be delivered by known gene delivery systems such as, but not limited to, retroviral vectors (Gilboa, J. Virology 44:845 (1982); Hocke, Nature 320:275 (1986); Wilson, et al., Proc. Natl. Acad. Sci. U.S.A. 85:3014), vaccinia virus system (Chakrabarty et al., Mol. Cell Biol. 5:3403 (1985) or other efficient DNA delivery systems (Yates et al., Nature 313:812 (1985)) known to those skilled in the art. These references are exemplary only and are hereby incorporated by reference. In order to specifically deliver or transfect cells which are abnormally proliferating and spare non-dividing cells, it is preferable to utilize a retrovirus, or adenoviral (as described in the art and elsewhere herein) delivery system known to those of skill in the art. Since host DNA replication is required for retroviral DNA to integrate and the retrovirus will be unable to self replicate due to the lack of the retrovirus genes needed for its life cycle. Utilizing such a retroviral delivery system for polynucleotides of the present invention will target said gene and constructs to abnormally proliferating cells and will spare the non-dividing normal cells.

[0646] The polynucleotides of the present invention may be delivered directly to cell proliferative disorder/disease sites in internal organs, body cavities and the like by use of imaging devices used to guide an injecting needle directly to the disease site. The polynucleotides of the present invention may also be administered to disease sites at the time of surgical intervention.

[0647] By “cell proliferative disease” is meant any human or animal disease or disorder, affecting any one or any combination of organs, cavities, or body parts, which is characterized by single or multiple local abnormal proliferations of cells, groups of cells, or tissues, whether benign or malignant.

[0648] Any amount of the polynucleotides of the present invention may be administered as long as it has a biologically inhibiting effect on the proliferation of the treated cells. Moreover, it is possible to administer more than one of the polynucleotide of the present invention simultaneously to the same site. By “biologically inhibiting” is meant partial or total growth inhibition as well as decreases in the rate of proliferation or growth of the cells. The biologically inhibitory dose may be determined by assessing the effects of the polynucleotides of the present invention on target malignant or abnormally proliferating cell growth in tissue culture, tumor growth in animals and cell cultures, or any other method known to one of ordinary skill in the art.

[0649] The present invention is further directed to antibody-based therapies which involve administering of anti-polypeptides and anti-polynucleotide antibodies to a mammalian, preferably human, patient for treating one or more of the described diseases, disorders, and/or conditions. Methods for producing anti-polypeptides and anti-polynucleotide antibodies polyclonal and monoclonal antibodies are described in detail elsewhere herein. Such antibodies may be provided in pharmaceutically acceptable compositions as known in the art or as described herein.

[0650] A summary of the ways in which the antibodies of the present invention may be used therapeutically includes binding polynucleotides or polypeptides of the present invention locally or systemically in the body or by direct cytotoxicity of the antibody, e.g., as mediated by complement (CDC) or by effector cells (ADCC). Some of these approaches are described in more detail below. Armed with the teachings provided herein, one of ordinary skill in the art will know how to use the antibodies of the present invention for diagnostic, monitoring or therapeutic purposes without undue experimentation.

[0651] In particular, the antibodies, fragments and derivatives of the present invention are useful for treating a subject having or developing cell proliferative and/or differentiation diseases, disorders, and/or conditions as described herein. Such treatment comprises administering a single or multiple doses of the antibody, or a fragment, derivative, or a conjugate thereof.

[0652] The antibodies of this invention may be advantageously utilized in combination with other monoclonal or chimeric antibodies, or with lymphokines or hematopoietic growth factors, for example, which serve to increase the number or activity of effector cells which interact with the antibodies.

[0653] It is preferred to use high affinity and/or potent in vivo inhibiting and/or neutralizing antibodies against polypeptides or polynucleotides of the present invention, fragments or regions thereof, for both immunoassays directed to and therapy of diseases, disorders, and/or conditions related to polynucleotides or polypeptides, including fragments thereof, of the present invention. Such antibodies, fragments, or regions, will preferably have an affinity for polynucleotides or polypeptides, including fragments thereof Preferred binding affinities include those with a dissociation constant or Kd less than 5×10⁻⁶M, 10⁻⁶M, 5×10⁻⁷M, 10⁻⁷M, 5×10⁻⁸M, 10⁻⁸M, 5×10⁻⁹M, 10⁻⁹M, 5×10⁻¹⁰M, 10⁻¹⁰M, 5×10⁻¹¹M, 10⁻¹¹M, 5×10⁻¹²M, 10⁻¹²M, 5×10⁻¹³M, 10⁻¹³M, 5×10⁻¹⁴M, 10⁻¹⁴M, 5×10⁻¹⁵M, and 10⁻¹⁵M.

[0654] Moreover, musculoskeletal system antigen polypeptides of the present invention or fragments thereof, are useful in inhibiting the angiogenesis of proliferative cells or tissues, either alone, as a protein fusion, or in combination with other polypeptides directly or indirectly, as described elsewhere herein. In a most preferred embodiment, said anti-angiogenesis effect may be achieved indirectly, for example, through the inhibition of hematopoietic, tumor-specific cells, such as tumor-associated macrophages (see, e.g., Joseph I B, et al. J Natl Cancer Inst, 90(21):1648-53 (1998), which is hereby incorporated by reference). Antibodies directed to polypeptides or polynucleotides of the present invention may also result in inhibition of angiogenesis directly, or indirectly (see, e.g., Witte L, et al., Cancer Metastasis Rev. 17(2):155-61 (1998), which is hereby incorporated by reference)).

[0655] Polypeptides, including protein fusions, of the present invention, or fragments thereof may be useful in inhibiting proliferative cells or tissues through the induction of apoptosis. Said polypeptides may act either directly, or indirectly to induce apoptosis of proliferative cells and tissues, for example in the activation of a death-domain receptor, such as tumor necrosis factor (TNF) receptor-1, CD95 (Fas/APO-1), TNF-receptor-related apoptosis-mediated protein (TRAMP) and TNF-related apoptosis-inducing ligand (TRAIL) receptor-1 and -2 (see, e.g., Schulze-Osthoff K, et.al., Eur J Biochem 254(3):439-59 (1998), which is hereby incorporated by reference). Moreover, in another preferred embodiment of the present invention, said polypeptides may induce apoptosis through other mechanisms, such as in the activation of other proteins which will activate apoptosis, or through stimulating the expression of said proteins, either alone or in combination with small molecule drugs or adjuvants, such as apoptonin, galectins, thioredoxins, antiinflammatory proteins (See for example, Mutat. Res. 400(1-2):447-55 (1998), Med Hypotheses.50(5):423-33 (1998), Chem. Biol. Interact. Apr 24;111-112:23-34 (1998), J. Mo. Med. 76(6):402-12 (1998), Int. J. Tissue React. 20(1):3-15 (1998), which are all hereby incorporated by reference).

[0656] Polypeptides, including protein fusions to, or fragments thereof, of the present invention are useful in inhibiting the metastasis of proliferative cells or tissues. Inhibition may occur as a direct result of administering polypeptides, or antibodies directed to said polypeptides as described elsewhere herein, or indirectly, such as activating the expression of proteins known to inhibit metastasis, for example alpha 4 integrins, (See, e.g., Curr Top Microbiol Immunol 1998;231:125-41, which is hereby incorporated by reference). Such therapeutic affects of the present invention may be achieved either alone, or in combination with small molecule drugs or adjuvants.

[0657] In another embodiment, the invention provides a method of delivering compositions containing the polypeptides of the invention (e.g., compositions containing polypeptides or anti-musculoskeletal system antigen polypeptide antibodies associated with heterologous polypeptides, heterologous nucleic acids, toxins, or prodrugs) to targeted cells expressing the polypeptide of the present invention. Musculoskeletal system antigen polypeptides or anti-musculoskeletal system antigen polypeptide antibodies of the invention may be associated with heterologous polypeptides, heterologous nucleic acids, toxins, or prodrugs via hydrophobic, hydrophilic, ionic and/or covalent interactions.

[0658] Polypeptides, protein fusions to, or fragments thereof, of the present invention are useful in enhancing the immunogenicity and/or antigenicity of proliferating cells or tissues, either directly, such as would occur if the polypeptides of the present invention ‘vaccinated’ the immune response to respond to proliferative antigens and immunogens, or indirectly, such as in activating the expression of proteins known to enhance the immune response (e.g. chemokines), to said antigens and immunogens.

[0659] Urinary System Disorders

[0660] Polynucleotides, polypeptides, antibodies, and/or agonists or antagonists of the present invention, may be used to treat, prevent, diagnose, and/or prognose disorders of the urinary system, including but not limited to disorders of the renal system, bladder, ureters, and urethra. Renal disorders include, but are not limited to, kidney failure, nephritis, blood vessel disorders of kidney, metabolic and congenital kidney disorders, urinary disorders of the kidney, autoimmune disorders, sclerosis and necrosis, electrolyte imbalance, and kidney cancers.

[0661] Kidney failure diseases include, but are not limited to, acute kidney failure, chronic kidney failure, atheroembolic renal failure, and end-stage renal disease. Inflammatory diseases of the kidney include acute glomerulonephritis, postinfectious glomerulonephritis, rapidly progressive glomerulonephritis, nephrotic syndrome, membranous glomerulonephritis, familial nephrotic syndrome, membranoproliferative glomerulonephritis I and II, mesangial proliferative glomerulonephritis, chronic glomerulonephritis, acute tubulointerstitial nephritis, chronic tubulointerstitial nephritis, acute post-streptococcal glomerulonephritis (PSGN), pyelonephritis, lupus nephritis, chronic nephritis, interstitial nephritis, and post-streptococcal glomerulonephritis.

[0662] Blood vessel disorders of the kidneys include, but are not limited to, kidney infarction, atheroembolic kidney disease, cortical necrosis, malignant nephrosclerosis, renal vein thrombosis, renal underperfusion, renal ischemia-reperfusion, renal artery embolism, and renal artery stenosis. Kidney disorders resulting form urinary tract problems include, but are not limited to, pyelonephritis, hydronephrosis, urolithiasis (renal lithiasis, nephrolithiasis), reflux nephropathy, urinary tract infections, urinary retention, and acute or chronic unilateral obstructive uropathy.

[0663] Metabolic and congenital disorders of the kidneys include, but are not limited to, renal tubular acidosis, renal glycosuria, nephrogenic diabetes insipidus, cystinuria, Fanconi's syndrome, vitamin D-resistant rickets, Hartnup disease, Bartter's syndrome, Liddle's syndrome, polycystic kidney disease, medullary cystic disease, medullary sponge kidney, Alport's syndrome, nail-patella syndrome, congenital nephrotic syndrome, CRUSH syndrome, horseshoe kidney, diabetic nephropathy, nephrogenic diabetes insipidus, analgesic nephropathy, kidney stones, and membranous nephropathy, Kidney disorders resulting from an autoimmune response include, but are not limited to, systemic lupus erythematosus (SLE), Goodpasture syndrome, IgA nephropathy, and IgM mesangial proliferative glomerulonephritis.

[0664] Sclerotic or necrotic disorders of the kidney include, but are not limited to, glomerulosclerosis, diabetic nephropathy, focal segmental glomerulosclerosis (FSGS), necrotizing glomerulonephritis, and renal papillary necrosis. Kidneys may also develop carcinomas, including, but not limited to, hypemephroma, nephroblastoma, renal cell cancer, transitional cell cancer, squamous cell cancer, and Wilm's tumor.

[0665] Kidney disorders may also result in electrolyte imbalances, including, but not limited to, nephrocalcinosis, pyuria, edema, hydronephritis, proteinuria, hyponatremia, hypernatremia, hypokalemia, hyperkalemia, hypocalcemia, hypercalcemia, hypophosphatemia, and hyperphosphatemia.

[0666] Bladder disorders include, but are not limited to, benign prostatic hyperplasia (BPH), interstitial cystitis (IC), prostatitis, proteinuria, urinary tract infections, urinary incontinence, urinary retention. Disorders of the ureters and urethra include, but are not limited to, acute or chronic unilateral obstructive uropathy. The bladder, ureters, and urethra may also develop carcinomas, including, but not limited to, superficial bladder canccer, invasive bladder cancer, carcinoma of the ureter, and urethra cancers.

[0667] Polypeptides may be administered using any method known in the art, including, but not limited to, direct needle injection at the delivery site, intravenous injection, topical administration, catheter infusion, biolistic injectors, particle accelerators, gelfoam sponge depots, other commercially available depot materials, osmotic pumps, oral or suppositorial solid pharmaceutical formulations, decanting or topical applications during surgery, aerosol delivery. Such methods are known in the art. Polypeptides may be administered as part of a Therapeutic, described in more detail below. Methods of delivering polynucleotides are described in more detail herein.

[0668] Cardiovascular Disorders

[0669] Polynucleotides or polypeptides, or agonists or antagonists of the present invention, may be used to treat, prevent, diagnose, and/or prognose cardiovascular disorders, including, but not limited to, peripheral artery disease, such as limb ischemia.

[0670] Cardiovascular disorders include cardiovascular abnormalities, such as arterio-arterial fistula, arteriovenous fistula, cerebral arteriovenous malformations, congenital heart defects, pulmonary atresia, and Scimitar Syndrome. Congenital heart defects include aortic coarctation, cor triatriatum, coronary vessel anomalies, crisscross heart, dextrocardia, patent ductus arteriosus, Ebstein's anomaly, Eisenmenger complex, hypoplastic left heart syndrome, levocardia, tetralogy of fallot, transposition of great vessels, double outlet right ventricle, tricuspid atresia, persistent truncus arteriosus, total anomalous pulmonary venous connection, hypoplastic left heart syndrome, and heart septal defects, such as aortopulmonary septal defect, endocardial cushion defects, Lutembacher's Syndrome, atrioventricular canal defect, trilogy of Fallot, ventricular heart septal defects.

[0671] Cardiovascular disorders also include heart disease, such as arrhythmias, carcinoid heart disease, high cardiac output, low cardiac output, cardiac tamponade, endocarditis (including bacterial), heart aneurysm, cardiac arrest, sudden cardiac death, congestive heart failure, congestive cardiomyopathy, paroxysmal dyspnea, cardiac edema, heart hypertrophy, congestive cardiomyopathy, left ventricular hypertrophy, right ventricular hypertrophy, post-infarction heart rupture, ventricular septal rupture, heart valve diseases, myocardial diseases, myocardial ischemia, pericardial effusion, pericarditis (including constrictive and tuberculous), pneumopericardium, postpericardiotomy syndrome, pulmonary heart disease, rheumatic heart disease, ventricular dysfunction, hyperemia, cardiovascular pregnancy complications, Scimitar Syndrome, diastolic dysfunction, enlarged heart, heart block, J-curve phenomenon, rheumatic heart disease, Marfan syndrome, cardiovascular syphilis, and cardiovascular tuberculosis.

[0672] Arrhythmias include sinus arrhythmia, atrial fibrillation, atrial flutter, bradycardia, extrasystole, Adams-Stokes Syndrome, bundle-branch block, sinoatrial block, long QT syndrome, parasystole, Lown-Ganong-Levine Syndrome, Mahaim-type pre-excitation syndrome, Wolff-Parkinson-White syndrome, sick sinus syndrome, tachycardias, and ventricular fibrillation. Tachycardias include paroxysmal tachycardia, supraventricular tachycardia, accelerated idioventricular rhythm, atrioventricular nodal reentry tachycardia, ectopic atrial tachycardia, ectopic junctional tachycardia, sinoatrial nodal reentry tachycardia, sinus tachycardia, Torsades de Pointes, and ventricular tachycardia.

[0673] Heart valve disease include aortic valve insufficiency, aortic valve stenosis, heart murmurs, aortic valve prolapse, mitral valve prolapse, tricuspid valve prolapse, mitral valve insufficiency, mitral valve stenosis, pulmonary atresia, pulmonary valve insufficiency, pulmonary valve stenosis, tricuspid atresia, tricuspid valve insufficiency, tricuspid valve stenosis, and bicuspid aortic valve.

[0674] Myocardial diseases include alcoholic cardiomyopathy, congestive cardiomyopathy, hypertrophic cardiomyopathy, aortic subvalvular stenosis, pulmonary subvalvular stenosis, restrictive cardiomyopathy, Chagas cardiomyopathy, endocardial fibroelastosis, endomyocardial fibrosis, Kearns Syndrome, Barth syndrome, myocardial reperfusion injury, and myocarditis.

[0675] Myocardial ischemias include coronary disease, such as angina pectoris, Prinzmetal's angina, unstable angina, coronary aneurysm, coronary arteriosclerosis, coronary thrombosis, coronary vasospasm, myocardial infarction and myocardial stunning.

[0676] Cardiovascular diseases also include vascular diseases such as aneurysms, angiodysplasia, angiomatosis, bacillary angiomatosis, Hippel-Lindau Disease, Klippel-Trenaunay-Weber Syndrome, Sturge-Weber Syndrome, angioneurotic edema, aortic diseases, Takayasu's Arteritis, aortitis, Leriche's Syndrome, arterial occlusive diseases, arteritis, enarteritis, polyarteritis nodosa, cerebrovascular disorders, diabetic angiopathies, diabetic retinopathy, embolisms, thrombosis, erythromelalgia, hemorrhoids, hepatic veno-occlusive disease, hypertension, hypotension (shock), ischemia, peripheral vascular diseases, phlebitis, superficial phlebitis, pulmonary veno-occlusive disease, chronic obstructive pulmonary disease, Buerger's disease, Raynaud's disease, CREST syndrome, retinal vein occlusion, Scimitar syndrome, superior vena cava syndrome, telangiectasia, atacia telangiectasia, hereditary hemorrhagic telangiectasia, deep vein thrombosis, varicocele, varicose veins, varicose ulcer, vasculitis, and venous insufficiency.

[0677] Aneurysms include dissecting aneurysms, false aneurysms, infected aneurysms, ruptured aneurysms, aortic aneurysms, cerebral aneurysms, coronary aneurysms, heart aneurysms, and iliac aneurysms.

[0678] Arterial occlusive diseases include arteriosclerosis, arteriolosclerosis, atherosclerosis, intermittent claudication, carotid stenosis, fibromuscular dysplasias, mesenteric vascular occlusion, Moyamoya disease, renal artery obstruction, retinal artery occlusion, and thromboangiitis obliterans.

[0679] Cerebrovascular disorders include carotid artery diseases, cerebral amyloid angiopathy, cerebral aneurysm, cerebral anoxia, cerebral arteriosclerosis, cerebral arteriovenous malformation, cerebral artery diseases, cerebral embolism and thrombosis, carotid artery thrombosis, sinus thrombosis, Wallenberg's syndrome, cerebral hemorrhage, epidural hematoma, subdural hematoma, subaraxhnoid hemorrhage, cerebral infarction, cerebral ischemia (including transient), subclavian steal syndrome, periventricular leukomalacia, vascular headache, cluster headache, migraine, and vertebrobasilar insufficiency.

[0680] Embolisms include air embolisms, amniotic fluid embolisms, cholesterol embolisms, blue toe syndrome, fat embolisms, pulmonary embolisms, and thromoboembolisms. Thrombosis include coronary thrombosis, hepatic vein thrombosis, deep vein thrombosis, retinal vein occlusion, carotid artery thrombosis, sinus thrombosis, Wallenberg's syndrome, and thrombophlebitis.

[0681] Ischemia includes cerebral ischemia, ischemic colitis, silent ischemia, compartment syndromes, anterior compartment syndrome, myocardial ischemia, reperfusion injuries, and peripheral limb ischemia. Vasculitis includes aortitis, arteritis, Behcet's Syndrome, Churg-Strauss Syndrome, mucocutaneous lymph node syndrome, thromboangiitis obliterans, hypersensitivity vasculitis, Schoenlein-Henoch purpura, allergic cutaneous vasculitis, and Wegener's granulomatosis.

[0682] Cardiovascular diseases can also occur due to electrolyte imbalances that include, but are not limited to hyponatremia, hypematremia, hypokalemia, hyperkalemia, hypocalcemia, hypercalcemia, hypophosphatemia, and hyperphophatemia. Neoplasm and/or cancers of the cardiovascular system include, but are not limited to, myxomas, fibromas, and rhabdomyomas.

[0683] Polypeptides may be administered using any method known in the art, including, but not limited to, direct needle injection at the delivery site, intravenous injection, topical administration, catheter infusion, biolistic injectors, particle accelerators, gelfoam sponge depots, other commercially available depot materials, osmotic pumps, oral or suppositorial solid pharmaceutical formulations, decanting or topical applications during surgery, aerosol delivery. Such methods are known in the art. Polypeptides may be administered as part of a Therapeutic, described in more detail below. Methods of delivering polynucleotides are described in more detail herein.

[0684] Respiratory Disorders

[0685] Polynucleotides or polypeptides, or agonists or antagonists of the present invention may be used to treat, prevent, diagnose, and/or prognose diseases and/or disorders of the respiratory system.

[0686] Diseases and disorders of the respiratory system include, but are not limited to, nasal vestibulitis, nonallergic rhinitis (e.g., acute rhinitis, chronic rhinitis, atrophic rhinitis, vasomotor rhinitis), nasal polyps, and sinusitis, juvenile angiofibromas, cancer of the nose and juvenile papillomas, vocal cord polyps, nodules (singer's nodules), contact ulcers, vocal cord paralysis, laryngoceles, pharyngitis (e.g., viral and bacterial), tonsillitis, tonsillar cellulitis, parapharyngeal abscess, laryngitis, laryngoceles, and throat cancers (e.g., cancer of the nasopharynx, tonsil cancer, larynx cancer), lung cancer (e.g., squamous cell carcinoma, small cell (oat cell) carcinoma, large cell carcinoma, and adenocarcinoma), allergic disorders (eosinophilic pneumonia, hypersensitivity pneumonitis (e.g., extrinsic allergic alveolitis, allergic interstitial pneumonitis, organic dust pneumoconiosis, allergic bronchopulmonary aspergillosis, asthma, Wegener's granulomatosis (granulomatous vasculitis), Goodpasture's syndrome)), pneumonia (e.g., bacterial pneumonia (e.g., Streptococcus pneumoniae (pneumoncoccal pneumonia), Staphylococcus aureus (staphylococcal pneumonia), Gram-negative bacterial pneumonia (caused by, e.g., Klebsiella and Pseudomas spp.), Mycoplasma pneumoniae pneumonia, Hemophilus influenzae pneumonia, Legionella pneumophila (Legionnaires' disease), and Chlamydia psittaci (Psittacosis)), and viral pneumonia (e.g., influenza, chickenpox (varicella).

[0687] Additional diseases and disorders of the respiratory system include, but are not limited to bronchiolitis, polio (poliomyelitis), croup, respiratory syncytial viral infection, mumps, erythema infectiosum (fifth disease), roseola infantum, progressive rubella panencephalitis, german measles, and subacute sclerosing panencephalitis), fungal pneumonia (e.g., Histoplasmosis, Coccidioidomycosis, Blastomycosis, fungal infections in people with severely suppressed immune systems (e.g., cryptococcosis, caused by Cryptococcus neoformans; aspergillosis, caused by Aspergillus spp.; candidiasis, caused by Candida; and mucormycosis)), Pneumocystis carinii (pneumocystis pneumonia), atypical pneumonias (e.g., Mycoplasma and Chlamydia spp.), opportunistic infection pneumonia, nosocomial pneumonia, chemical pneumonitis, and aspiration pneumonia, pleural disorders (e.g., pleurisy, pleural effusion, and pneumothorax (e.g., simple spontaneous pneumothorax, complicated spontaneous pneumothorax, tension pneumothorax)), obstructive airway diseases (e.g., asthma, chronic obstructive pulmonary disease (COPD), emphysema, chronic or acute bronchitis), occupational lung diseases (e.g., silicosis, black lung (coal workers' pneumoconiosis), asbestosis, berylliosis, occupational asthsma, byssinosis, and benign pneumoconioses), Infiltrative Lung Disease (e.g., pulmonary fibrosis (e.g., fibrosing alveolitis, usual interstitial pneumonia), idiopathic pulmonary fibrosis, desquamative interstitial pneumonia, lymphoid interstitial pneumonia, histiocytosis X (e.g., Letterer-Siwe disease, Hand-Schüller-Christian disease, eosinophilic granuloma), idiopathic pulmonary hemosiderosis, sarcoidosis and pulmonary alveolar proteinosis), Acute respiratory distress syndrome (also called, e.g., adult respiratory distress syndrome), edema, pulmonary embolism, bronchitis (e.g., viral, bacterial), bronchiectasis, atelectasis, lung abscess (caused by, e.g., Staphylococcus aureus or Legionella pneumophila), and cystic fibrosis.

[0688] Anti-Angiogenesis Activity

[0689] The naturally occurring balance between endogenous stimulators and inhibitors of angiogenesis is one in which inhibitory influences predominate. Rastinejad et al., Cell 56:345-355 (1989). In those rare instances in which neovascularization occurs under normal physiological conditions, such as wound healing, organ regeneration, embryonic development, and female reproductive processes, angiogenesis is stringently regulated and spatially and temporally delimited. Under conditions of pathological angiogenesis such as that characterizing solid tumor growth, these regulatory controls fail. Unregulated angiogenesis becomes pathologic and sustains progression of many neoplastic and non-neoplastic diseases. A number of serious diseases are dominated by abnormal neovascularization including solid tumor growth and metastases, arthritis, some types of eye disorders, and psoriasis. See, e.g., reviews by Moses et al., Biotech. 9:630-634 (1991); Folkman et al., N. Engl. J. Med., 333:1757-1763 (1995); Auerbach et al., J. Microvasc. Res. 29:401-411 (1985); Folkman, Advances in Cancer Research, eds. Klein and Weinhouse, Academic Press, New York, pp. 175-203 (1985); Patz, Am. J. Opthalmol. 94:715-743 (1982); and Folkman et al., Science 221:719-725 (1983). In a number of pathological conditions, the process of angiogenesis contributes to the disease state. For example, significant data have accumulated which suggest that the growth of solid tumors is dependent on angiogenesis. Folkman and Klagsbrun, Science 235:442-447 (1987).

[0690] The present invention provides for treatment of diseases or disorders associated with neovascularization by administration of the polynucleotides and/or polypeptides of the invention, as well as agonists or antagonists of the present invention. Malignant and metastatic conditions which can be treated with the polynucleotides and polypeptides, or agonists or antagonists of the invention include, but are not limited to, malignancies, solid tumors, and cancers described herein and otherwise known in the art (for a review of such disorders, see Fishman et al., Medicine, 2d Ed., J. B. Lippincott Co., Philadelphia (1985)). Thus, the present invention provides a method of treating an angiogenesis-related disease and/or disorder, comprising administration to an individual in need thereof a therapeutically effective amount of a polynucleotide, polypeptide, antagonist and/or agonist of the invention. For example, polynucleotides, polypeptides, antagonists and/or agonists may be utilized in a variety of additional methods in order to therapeutically treat a cancer or tumor. Cancers which may be treated with polynucleotides, polypeptides, antagonists and/or agonists include, but are not limited to solid tumors, including prostate, lung, breast, ovarian, stomach, pancreas, larynx, esophagus, testes, liver, parotid, biliary tract, colon, rectum, cervix, uterus, endometrium, kidney, bladder, thyroid cancer; primary tumors and metastases; melanomas; glioblastoma; Kaposi's sarcoma; leiomyosarcoma; non-small cell lung cancer; colorectal cancer; advanced malignancies; and blood born tumors such as leukemias. For example, polynucleotides, polypeptides, antagonists and/or agonists may be delivered topically, in order to treat cancers such as skin cancer, head and neck tumors, breast tumors, and Kaposi's sarcoma.

[0691] Within yet other aspects, polynucleotides, polypeptides, antagonists and/or agonists may be utilized to treat superficial forms of bladder cancer by, for example, intravesical administration. Polynucleotides, polypeptides, antagonists and/or agonists may be delivered directly into the tumor, or near the tumor site, via injection or a catheter. Of course, as the artisan of ordinary skill will appreciate, the appropriate mode of administration will vary according to the cancer to be treated. Other modes of delivery are discussed herein.

[0692] Polynucleotides, polypeptides, antagonists and/or agonists may be useful in treating other disorders, besides cancers, which involve angiogenesis. These disorders include, but are not limited to: benign tumors, for example hemangiomas, acoustic neuromas, neurofibromas, trachomas, and pyogenic granulomas; artheroscleric plaques; ocular angiogenic diseases, for example, diabetic retinopathy, retinopathy of prematurity, macular degeneration, corneal graft rejection, neovascular glaucoma, retrolental fibroplasia, rubeosis, retinoblastoma, uvietis and Pterygia (abnormal blood vessel growth) of the eye; rheumatoid arthritis; psoriasis; delayed wound healing; endometriosis; vasculogenesis; granulations; hypertrophic scars (keloids); nonunion fractures; scleroderma; trachoma; vascular adhesions; myocardial angiogenesis; coronary collaterals; cerebral collaterals; arteriovenous malformations; ischemic limb angiogenesis; Osler-Webber Syndrome; plaque neovascularization; telangiectasia; hemophiliac joints; angiofibroma; fibromuscular dysplasia; wound granulation; Crohn's disease; and atherosclerosis.

[0693] For example, within one aspect of the present invention methods are provided for treating hypertrophic scars and keloids, comprising the step of administering a polynucleotide, polypeptide, antagonist and/or agonist of the invention to a hypertrophic scar or keloid.

[0694] Within one embodiment of the present invention polynucleotides, polypeptides, antagonists and/or agonists of the invention are directly injected into a hypertrophic scar or keloid, in order to prevent the progression of these lesions. This therapy is of particular value in the prophylactic treatment of conditions which are known to result in the development of hypertrophic scars and keloids (e.g., burns), and is preferably initiated after the proliferative phase has had time to progress (approximately 14 days after the initial injury), but before hypertrophic scar or keloid development. As noted above, the present invention also provides methods for treating neovascular diseases of the eye, including for example, corneal neovascularization, neovascular glaucoma, proliferative diabetic retinopathy, retrolental fibroplasia and macular degeneration.

[0695] Moreover, ocular disorders associated with neovascularization which can be treated with the polynucleotides and polypeptides of the present invention (including agonists and/or antagonists) include, but are not limited to: neovascular glaucoma, diabetic retinopathy, retinoblastoma, retrolental fibroplasia, uveitis, retinopathy of prematurity macular degeneration, corneal graft neovascularization, as well as other eye inflammatory diseases, ocular tumors and diseases associated with choroidal or iris neovascularization. See, e.g., reviews by Waltman et al., Am. J Ophthal. 85:704-710 (1978) and Gartner et al., Surv. Ophthal. 22:291-312 (1978).

[0696] Thus, within one aspect of the present invention methods are provided for treating neovascular diseases of the eye such as corneal neovascularization (including corneal graft neovascularization), comprising the step of administering to a patient a therapeutically effective amount of a compound (as described above) to the cornea, such that the formation of blood vessels is inhibited. Briefly, the cornea is a tissue, which normally lacks blood vessels. In certain pathological conditions however, capillaries may extend into the cornea from the pericorneal vascular plexus of the limbus. When the cornea becomes vascularized, it also becomes clouded, resulting in a decline in the patient's visual acuity. Visual loss may become complete if the cornea completely opacitates. A wide variety of disorders can result in corneal neovascularization, including for example, corneal infections (e.g., trachoma, herpes simplex keratitis, leishmaniasis and onchocerciasis), immunological processes (e.g., graft rejection and Stevens-Johnson's syndrome), alkali burns, trauma, inflammation (of any cause), toxic and nutritional deficiency states, and as a complication of wearing contact lenses.

[0697] Within particularly preferred embodiments of the invention, may be prepared for topical administration in saline (combined with any of the preservatives and antimicrobial agents commonly used in ocular preparations), and administered in eyedrop form. The solution or suspension may be prepared in its pure form and administered several times daily. Alternatively, anti-angiogenic compositions, prepared as described above, may also be administered directly to the cornea. Within preferred embodiments, the anti-angiogenic composition is prepared with a muco-adhesive polymer, which binds to cornea. Within further embodiments, the anti-angiogenic factors or anti-angiogenic compositions may be utilized as an adjunct to conventional steroid therapy. Topical therapy may also be useful prophylactically in corneal lesions which are known to have a high probability of inducing an angiogenic response (such as chemical burns). In these instances the treatment, likely in combination with steroids, may be instituted immediately to help prevent subsequent complications.

[0698] Within other embodiments, the compounds described above may be injected directly into the corneal stroma by an ophthalmologist under microscopic guidance. The preferred site of injection may vary with the morphology of the individual lesion, but the goal of the administration would be to place the composition at the advancing front of the vasculature (i.e., interspersed between the blood vessels and the normal cornea). In most cases this would involve perilimbic corneal injection to “protect” the cornea from the advancing blood vessels. This method may also be utilized shortly after a corneal insult in order to prophylactically prevent corneal neovascularization. In this situation, the material could be injected in the perilimbic cornea interspersed between the corneal lesion and its undesired potential limbic blood supply. Such methods may also be utilized in a similar fashion to prevent capillary invasion of transplanted corneas. In a sustained-release form, injections might only be required 2-3 times per year. A steroid could also be added to the injection solution to reduce inflammation resulting from the injection itself.

[0699] Within another aspect of the present invention, methods are provided for treating neovascular glaucoma, comprising the step of administering to a patient a therapeutically effective amount of a polynucleotide, polypeptide, antagonist and/or agonist to the eye, such that the formation of blood vessels is inhibited. In one embodiment, the compound may be administered topically to the eye in order to treat early forms of neovascular glaucoma. Within other embodiments, the compound may be implanted by injection into the region of the anterior chamber angle. Within other embodiments, the compound may also be placed in any location such that the compound is continuously released into the aqueous humor. Within another aspect of the present invention, methods are provided for treating proliferative diabetic retinopathy, comprising the step of administering to a patient a therapeutically effective amount of a polynucleotide, polypeptide, antagonist and/or agonist to the eyes, such that the formation of blood vessels is inhibited.

[0700] Within particularly preferred embodiments of the invention, proliferative diabetic retinopathy may be treated by injection into the aqueous humor or the vitreous, in order to increase the local concentration of the polynucleotide, polypeptide, antagonist and/or agonist in the retina. Preferably, this treatment should be initiated prior to the acquisition of severe disease requiring photocoagulation.

[0701] Within another aspect of the present invention, methods are provided for treating retrolental fibroplasia, comprising the step of administering to a patient a therapeutically effective amount of a polynucleotide, polypeptide, antagonist and/or agonist to the eye, such that the formation of blood vessels is inhibited. The compound may be administered topically, via intravitreous injection and/or via intraocular implants.

[0702] Additionally, disorders which can be treated with the polynucleotides, polypeptides, agonists and/or agonists include, but are not limited to, hemangioma, arthritis, psoriasis, angiofibroma, atherosclerotic plaques, delayed wound healing, granulations, hemophilic joints, hypertrophic scars, nonunion fractures, Osler-Weber syndrome, pyogenic granuloma, scleroderma, trachoma, and vascular adhesions.

[0703] Moreover, disorders and/or states, which can be treated, prevented, diagnosed and/or prognosed with the polynucleotides, polypeptides, agonists and/or agonists of the invention include, but are not limited to, solid tumors, blood born tumors such as leukemias, tumor metastasis, Kaposi's sarcoma, benign tumors, for example hemangiomas, acoustic neuromas, neurofibromas, trachomas, and pyogenic granulomas, rheumatoid arthritis, psoriasis, ocular angiogenic diseases, for example, diabetic retinopathy, retinopathy of prematurity, macular degeneration, corneal graft rejection, neovascular glaucoma, retrolental fibroplasia, rubeosis, retinoblastoma, and uvietis, delayed wound healing, endometriosis, vascluogenesis, granulations, hypertrophic scars (keloids), nonunion fractures, scleroderma, trachoma, vascular adhesions, myocardial angiogenesis, coronary collaterals, cerebral collaterals, arteriovenous malformations, ischemic limb angiogenesis, Osler-Webber Syndrome, plaque neovascularization, telangiectasia, hemophiliac joints, angiofibroma fibromuscular dysplasia, wound granulation, Crohn's disease, atherosclerosis, birth control agent by preventing vascularization required for embryo implantation controlling menstruation, diseases that have angiogenesis as a pathologic consequence such as cat scratch disease (Rochele minalia quintosa), ulcers (Helicobacter pylori), Bartonellosis and bacillary angiomatosis.

[0704] In one aspect of the birth control method, an amount of the compound sufficient to block embryo implantation is administered before or after intercourse and fertilization have occurred, thus providing an effective method of birth control, possibly a “morning after” method. Polynucleotides, polypeptides, agonists and/or agonists may also be used in controlling menstruation or administered as either a peritoneal lavage fluid or for peritoneal implantation in the treatment of endometriosis.

[0705] Polynucleotides, polypeptides, agonists and/or agonists of the present invention may be incorporated into surgical sutures in order to prevent stitch granulomas.

[0706] Polynucleotides, polypeptides, agonists and/or agonists may be utilized in a wide variety of surgical procedures. For example, within one aspect of the present invention a compositions (in the form of, for example, a spray or film) may be utilized to coat or spray an area prior to removal of a tumor, in order to isolate normal surrounding tissues from malignant tissue, and/or to prevent the spread of disease to surrounding tissues. Within other aspects of the present invention, compositions (e.g., in the form of a spray) may be delivered via endoscopic procedures in order to coat tumors, or inhibit angiogenesis in a desired locale. Within yet other aspects of the present invention, surgical meshes, which have been coated with anti-angiogenic compositions of the present invention may be utilized in any procedure wherein a surgical mesh might be utilized. For example, within one embodiment of the invention a surgical mesh laden with an anti-angiogenic composition may be utilized during abdominal cancer resection surgery (e.g., subsequent to colon resection) in order to provide support to the structure, and to release an amount of the anti-angiogenic factor.

[0707] Within further aspects of the present invention, methods are provided for treating tumor excision sites, comprising administering a polynucleotide, polypeptide, agonist and/or agonist to the resection margins of a tumor subsequent to excision, such that the local recurrence of cancer and the formation of new blood vessels at the site is inhibited. Within one embodiment of the invention, the anti-angiogenic compound is administered directly to the tumor excision site (e.g., applied by swabbing, brushing or otherwise coating the resection margins of the tumor with the anti-angiogenic compound). Alternatively, the anti-angiogenic compounds may be incorporated into known surgical pastes prior to administration. Within particularly preferred embodiments of the invention, the anti-angiogenic compounds are applied after hepatic resections for malignancy, and after neurosurgical operations.

[0708] Within one aspect of the present invention, polynucleotides, polypeptides, agonists and/or agonists may be administered to the resection margin of a wide variety of tumors, including for example, breast, colon, brain and hepatic tumors. For example, within one embodiment of the invention, anti-angiogenic compounds may be administered to the site of a neurological tumor subsequent to excision, such that the formation of new blood vessels at the site are inhibited.

[0709] The polynucleotides, polypeptides, agonists and/or agonists of the present invention may also be administered along with other anti-angiogenic factors. Representative examples of other anti-angiogenic factors include: Anti-Invasive Factor, retinoic acid and derivatives thereof, paclitaxel, Suramin, Tissue Inhibitor of Metalloproteinase-1, Tissue Inhibitor of Metalloproteinase-2, Plasminogen Activator Inhibitor-1, Plasminogen Activator Inhibitor-2, and various forms of the lighter “d group” transition metals.

[0710] Lighter “d group” transition metals include, for example, vanadium, molybdenum, tungsten, titanium, niobium, and tantalum species. Such transition metal species may form transition metal complexes. Suitable complexes of the abovementioned transition metal species include oxo transition metal complexes.

[0711] Representative examples of vanadium complexes include oxo vanadium complexes such as vanadate and vanadyl complexes. Suitable vanadate complexes include metavanadate and orthovanadate complexes such as, for example, ammonium metavanadate, sodium metavanadate, and sodium orthovanadate. Suitable vanadyl complexes include, for example, vanadyl acetylacetonate and vanadyl sulfate including vanadyl sulfate hydrates such as vanadyl sulfate mono- and trihydrates.

[0712] Representative examples of tungsten and molybdenum complexes also include oxo complexes. Suitable oxo tungsten complexes include tungstate and tungsten oxide complexes. Suitable tungstate complexes include ammonium tungstate, calcium tungstate, sodium tungstate dihydrate, and tungstic acid. Suitable tungsten oxides include tungsten (IV) oxide and tungsten (VI) oxide. Suitable oxo molybdenum complexes include molybdate, molybdenum oxide, and molybdenyl complexes. Suitable molybdate complexes include ammonium molybdate and its hydrates, sodium molybdate and its hydrates, and potassium molybdate and its hydrates. Suitable molybdenum oxides include molybdenum (VI) oxide, molybdenum (VI)oxide, and molybdic acid. Suitable molybdenyl complexes include, for example, molybdenyl acetylacetonate. Other suitable tungsten and molybdenum complexes include hydroxo derivatives derived from, for example, glycerol, tartaric acid, and sugars.

[0713] A wide variety of other anti-angiogenic factors may also be utilized within the context of the present invention. Representative examples include platelet factor 4; protamine sulphate; sulphated chitin derivatives (prepared from queen crab shells), (Murata et al., Cancer Res. 51:22-26 (1991)); Sulphated Polysaccharide Peptidoglycan Complex (SP-PG) (the function of this compound may be enhanced by the presence of steroids such as estrogen, and tamoxifen citrate); Staurosporine; modulators of matrix metabolism, including for example, proline analogs, cishydroxyproline, d,L-3,4-dehydroproline, Thiaproline, alpha,alpha-dipyridyl, aminopropionitrile fumarate; 4-propyl-5-(4-pyridinyl)-2(3H)-oxazolone; Methotrexate; Mitoxantrone; Heparin; Interferons; 2 Macroglobulin-serum; ChIMP-3 (Pavloff et al., J. Bio. Chem. 267:17321-17326 (1992)); Chymostatin (Tomkinson et al., Biochem J. 286:475-480 (1992)); Cyclodextrin Tetradecasulfate; Eponemycin; Camptothecin; Fumagillin (Ingber et al., Nature 348:555-557 (1990)); Gold Sodium Thiomalate (“GST”; Matsubara and Ziff, J. Clin. Invest. 79:1440-1446 (1987)); anticollagenase-serum; alpha2-antiplasmin (Holmes et al., J. Biol. Chem. 262(4):1659-1664 (1987)); Bisantrene (National Cancer Institute); Lobenzarit disodium (N-(2)-carboxyphenyl-4-chloroanthronilic acid disodium or “CCA”; Takeuchi et al., Agents Actions 36:312-316, 1992); Thalidomide; Angostatic steroid; AGM-1470; carboxynaminolmidazole; and metalloproteinase inhibitors such as BB94.

[0714] Neural Activity and Neurological Diseases

[0715] The polynucleotides, polypeptides and agonists or antagonists of the invention may be used for the diagnosis and/or treatment of diseases, disorders, damage or injury of the brain and/or nervous system. Nervous system disorders that can be treated with the compositions of the invention (e.g., polypeptides, polynucleotides, and/or agonists or antagonists), include, but are not limited to, nervous system injuries, and diseases or disorders which result in either a disconnection of axons, a diminution or degeneration of neurons, or demyelination. Nervous system lesions which may be treated in a patient (including human and non-human mammalian patients) according to the methods of the invention, include but are not limited to, the following lesions of either the central (including spinal cord, brain) or peripheral nervous systems: (1) ischemic lesions, in which a lack of oxygen in a portion of the nervous system results in neuronal injury or death, including cerebral infarction or ischemia, or spinal cord infarction or ischemia; (2) traumatic lesions, including lesions caused by physical injury or associated with surgery, for example, lesions which sever a portion of the nervous system, or compression injuries; (3) malignant lesions, in which a portion of the nervous system is destroyed or injured by malignant tissue which is either a nervous system associated malignancy or a malignancy derived from non-nervous system tissue; (4) infectious lesions, in which a portion of the nervous system is destroyed or injured as a result of infection, for example, by an abscess or associated with infection by human immunodeficiency virus, herpes zoster, or herpes simplex virus or with Lyme disease, tuberculosis, or syphilis; (5) degenerative lesions, in which a portion of the nervous system is destroyed or injured as a result of a degenerative process including but not limited to, degeneration associated with Parkinson's disease, Alzheimer's disease, Huntington's chorea, or amyotrophic lateral sclerosis (ALS); (6) lesions associated with nutritional diseases or disorders, in which a portion of the nervous system is destroyed or injured by a nutritional disorder or disorder of metabolism including, but not limited to, vitamin B12 deficiency, folic acid deficiency, Wemicke disease, tobacco-alcohol amblyopia, Marchiafava-Bignami disease (primary degeneration of the corpus callosum), and alcoholic cerebellar degeneration; (7) neurological lesions associated with systemic diseases including, but not limited to, diabetes (diabetic neuropathy, Bell's palsy), systemic lupus erythematosus, carcinoma, or sarcoidosis; (8) lesions caused by toxic substances including alcohol, lead, or particular neurotoxins; and (9) demyelinated lesions in which a portion of the nervous system is destroyed or injured by a demyelinating disease including, but not limited to, multiple sclerosis, human immunodeficiency virus-associated myelopathy, transverse myelopathy or various etiologies, progressive multifocal leukoencephalopathy, and central pontine myelinolysis.

[0716] In one embodiment, the polypeptides, polynucleotides, or agonists or antagonists of the invention are used to protect neural cells from the damaging effects of hypoxia. In a further preferred embodiment, the polypeptides, polynucleotides, or agonists or antagonists of the invention are used to protect neural cells from the damaging effects of cerebral hypoxia. According to this embodiment, the compositions of the invention are used to treat or prevent neural cell injury associated with cerebral hypoxia. In one non-exclusive aspect of this embodiment, the polypeptides, polynucleotides, or agonists or antagonists of the invention, are used to treat or prevent neural cell injury associated with cerebral ischemia. In another non-exclusive aspect of this embodiment, the polypeptides, polynucleotides, or agonists or antagonists of the invention are used to treat or prevent neural cell injury associated with cerebral infarction.

[0717] In another preferred embodiment, the polypeptides, polynucleotides, or agonists or antagonists of the invention are used to treat or prevent neural cell injury associated with a stroke. In a specific embodiment, the polypeptides, polynucleotides, or agonists or antagonists of the invention are used to treat or prevent cerebral neural cell injury associated with a stroke.

[0718] In another preferred embodiment, the polypeptides, polynucleotides, or agonists or antagonists of the invention are used to treat or prevent neural cell injury associated with a heart attack. In a specific embodiment, the polypeptides, polynucleotides, or agonists or antagonists of the invention are used to treat or prevent cerebral neural cell injury associated with a heart attack.

[0719] The compositions of the invention which are useful for treating or preventing a nervous system disorder may be selected by testing for biological activity in promoting the survival or differentiation of neurons. For example, and not by way of limitation, compositions of the invention which elicit any of the following effects may be useful according to the invention: (1) increased survival time of neurons in culture either in the presence or absence of hypoxia or hypoxic conditions; (2) increased sprouting of neurons in culture or in vivo; (3) increased production of a neuron-associated molecule in culture or in vivo, e.g., choline acetyltransferase or acetylcholinesterase with respect to motor neurons; or (4) decreased symptoms of neuron dysfunction in vivo. Such effects may be measured by any method known in the art. In preferred, non-limiting embodiments, increased survival of neurons may routinely be measured using a method set forth herein or otherwise known in the art, such as, for example, in Zhang et al., Proc Natl Acad Sci USA 97:3637-42 (2000) or in Arakawa et al., J Neurosci., 10:3507-15 (1990); increased sprouting of neurons may be detected by methods known in the art, such as, for example, the methods set forth in Pestronk et al., Exp. Neurol., 70:65-82 (1980), or Brown et al., Ann. Rev. Neurosci., 4:17-42 (1981); increased production of neuron-associated molecules may be measured by bioassay, enzymatic assay, antibody binding, Northern blot assay, etc., using techniques known in the art and depending on the molecule to be measured; and motor neuron dysfunction may be measured by assessing the physical manifestation of motor neuron disorder, e.g., weakness, motor neuron conduction velocity, or functional disability.

[0720] In specific embodiments, motor neuron disorders that may be treated according to the invention include, but are not limited to, disorders such as infarction, infection, exposure to toxin, trauma, surgical damage, degenerative disease or malignancy that may affect motor neurons as well as other components of the nervous system, as well as disorders that selectively affect neurons such as amyotrophic lateral sclerosis, and including, but not limited to, progressive spinal muscular atrophy, progressive bulbar palsy, primary lateral sclerosis, infantile and juvenile muscular atrophy, progressive bulbar paralysis of childhood (Fazio-Londe syndrome), poliomyelitis and the post polio syndrome, and Hereditary Motorsensory Neuropathy (Charcot-Marie-Tooth Disease).

[0721] Further, polypeptides or polynucleotides of the invention may play a role in neuronal survival; synapse formation; conductance; neural differentiation, etc. Thus, compositions of the invention (including polynucleotides, polypeptides, and agonists or antagonists) may be used to diagnose and/or treat or prevent diseases or disorders associated with these roles, including, but not limited to, learning and/or cognition disorders. The compositions of the invention may also be useful in the treatment or prevention of neurodegenerative disease states and/or behavioural disorders. Such neurodegenerative disease states and/or behavioral disorders include, but are not limited to, Alzheimer's Disease, Parkinson's Disease, Huntington's Disease, Tourette Syndrome, schizophrenia, mania, dementia, paranoia, obsessive compulsive disorder, panic disorder, learning disabilities, ALS, psychoses, autism, and altered behaviors, including disorders in feeding, sleep patterns, balance, and perception. In addition, compositions of the invention may also play a role in the treatment, prevention and/or detection of developmental disorders associated with the developing embryo, or sexually-linked disorders.

[0722] Additionally, polypeptides, polynucleotides and/or agonists or antagonists of the invention, may be useful in protecting neural cells from diseases, damage, disorders, or injury, associated with cerebrovascular disorders including, but not limited to, carotid artery diseases (e.g., carotid artery thrombosis, carotid stenosis, or Moyamoya Disease), cerebral amyloid angiopathy, cerebral aneurysm, cerebral anoxia, cerebral arteriosclerosis, cerebral arteriovenous malformations, cerebral artery diseases, cerebral embolism and thrombosis (e.g., carotid artery thrombosis, sinus thrombosis, or Wallenberg's Syndrome), cerebral hemorrhage (e.g., epidural or subdural hematoma, or subarachnoid hemorrhage), cerebral infarction, cerebral ischemia (e.g., transient cerebral ischemia, Subclavian Steal Syndrome, or vertebrobasilar insufficiency), vascular dementia (e.g., multi-infarct), leukomalacia, periventricular, and vascular headache (e.g., cluster headache or migraines).

[0723] In accordance with yet a further aspect of the present invention, there is provided a process for utilizing polynucleotides or polypeptides, as well as agonists or antagonists of the present invention, for therapeutic purposes, for example, to stimulate neurological cell proliferation and/or differentiation. Therefore, polynucleotides, polypeptides, agonists and/or antagonists of the invention may be used to treat and/or detect neurologic diseases. Moreover, polynucleotides or polypeptides, or agonists or antagonists of the invention, can be used as a marker or detector of a particular nervous system disease or disorder.

[0724] Examples of neurologic diseases which can be treated or detected with polynucleotides, polypeptides, agonists, and/or antagonists of the present invention include brain diseases, such as metabolic brain diseases which includes phenylketonuria such as maternal phenylketonuria, pyruvate carboxylase deficiency, pyruvate dehydrogenase complex deficiency, Wernicke's Encephalopathy, brain edema, brain neoplasms such as cerebellar neoplasms which include infratentorial neoplasms, cerebral ventricle neoplasms such as choroid plexus neoplasms, hypothalamic neoplasms, supratentorial neoplasms, canavan disease, cerebellar diseases such as cerebellar ataxia which include spinocerebellar degeneration such as ataxia telangiectasia, cerebellar dyssynergia, Friederich's Ataxia, Machado-Joseph Disease, olivopontocerebellar atrophy, cerebellar neoplasms such as infratentorial neoplasms, diffuse cerebral sclerosis such as encephalitis periaxialis, globoid cell leukodystrophy, metachromatic leukodystrophy and subacute sclerosing panencephalitis.

[0725] Additional neurologic diseases which can be treated or detected with polynucleotides, polypeptides, agonists, and/or antagonists of the present invention include cerebrovascular disorders (such as carotid artery diseases which include carotid artery thrombosis, carotid stenosis and Moyamoya Disease), cerebral amyloid angiopathy, cerebral aneurysm, cerebral anoxia, cerebral arteriosclerosis, cerebral arteriovenous malformations, cerebral artery diseases, cerebral embolism and thrombosis such as carotid artery thrombosis, sinus thrombosis and Wallenberg's Syndrome, cerebral hemorrhage such as epidural hematoma, subdural hematoma and subarachnoid hemorrhage, cerebral infarction, cerebral ischemia such as transient cerebral ischemia, Subclavian Steal Syndrome and vertebrobasilar insufficiency, vascular dementia such as multi-infarct dementia, periventricular leukomalacia, vascular headache such as cluster headache and migraine.

[0726] Additional neurologic diseases which can be treated or detected with polynucleotides, polypeptides, agonists, and/or antagonists of the present invention include dementia such as AIDS Dementia Complex, presenile dementia such as Alzheimer's Disease and Creutzfeldt-Jakob Syndrome, senile dementia such as Alzheimer's Disease and progressive supranuclear palsy, vascular dementia such as multi-infarct dementia, encephalitis which include encephalitis periaxialis, viral encephalitis such as epidemic encephalitis, Japanese Encephalitis, St. Louis Encephalitis, tick-borne encephalitis and West Nile Fever, acute disseminated encephalomyelitis, meningoencephalitis such as uveomeningoencephalitic syndrome, Postencephalitic Parkinson Disease and subacute sclerosing panencephalitis, encephalomalacia such as periventricular leukomalacia, epilepsy such as generalized epilepsy which includes infantile spasms, absence epilepsy, myoclonic epilepsy which includes MERRF Syndrome, tonic-clonic epilepsy, partial epilepsy such as complex partial epilepsy, frontal lobe epilepsy and temporal lobe epilepsy, post-traumatic epilepsy, status epilepticus such as Epilepsia Partialis Continua, and Hallervorden-Spatz Syndrome.

[0727] Additional neurologic diseases which can be treated or detected with polynucleotides, polypeptides, agonists, and/or antagonists of the present invention include hydrocephalus such as Dandy-Walker Syndrome and normal pressure hydrocephalus, hypothalamic diseases such as hypothalamic neoplasms, cerebral malaria, narcolepsy which includes cataplexy, bulbar poliomyelitis, cerebri pseudotumor, Rett Syndrome, Reye's Syndrome, thalamic diseases, cerebral toxoplasmosis, intracranial tuberculoma and Zellweger Syndrome, central nervous system infections such as AIDS Dementia Complex, Brain Abscess, subdural empyema, encephalomyelitis such as Equine Encephalomyelitis, Venezuelan Equine Encephalomyelitis, Necrotizing Hemorrhagic Encephalomyelitis, Visna, and cerebral malaria.

[0728] Additional neurologic diseases which can be treated or detected with polynucleotides, polypeptides, agonists, and/or antagonists of the present invention include meningitis such as arachnoiditis, aseptic meningtitis such as viral meningtitis which includes lymphocytic choriomeningitis, Bacterial meningtitis which includes Haemophilus Meningtitis, Listeria Meningtitis, Meningococcal Meningtitis such as Waterhouse-Friderichsen Syndrome, Pneumococcal Meningtitis and meningeal tuberculosis, fungal meningitis such as Cryptococcal Meningtitis, subdural effusion, meningoencephalitis such as uvemeningoencephalitic syndrome, myelitis such as transverse myelitis, neurosyphilis such as tabes dorsalis, poliomyelitis which includes bulbar poliomyelitis and postpoliomyelitis syndrome, prion diseases (such as Creutzfeldt-Jakob Syndrome, Bovine Spongiform Encephalopathy, Gerstmann-Straussler Syndrome, Kuru, Scrapie), and cerebral toxoplasmosis.

[0729] Additional neurologic diseases which can be treated or detected with polynucleotides, polypeptides, agonists, and/or antagonists of the present invention include central nervous system neoplasms such as brain neoplasms that include cerebellar neoplasms such as infratentorial neoplasms, cerebral ventricle neoplasms such as choroid plexus neoplasms, hypothalamic neoplasms and supratentorial neoplasms, meningeal neoplasms, spinal cord neoplasms which include epidural neoplasms, demyelinating diseases such as Canavan Diseases, diffuse cerebral sceloris which includes adrenoleukodystrophy, encephalitis periaxialis, globoid cell leukodystrophy, diffuse cerebral sclerosis such as metachromatic leukodystrophy, allergic encephalomyelitis, necrotizing hemorrhagic encephalomyelitis, progressive multifocal leukoencephalopathy, multiple sclerosis, central pontine myelinolysis, transverse myelitis, neuromyelitis optica, Scrapie, Swayback, Chronic Fatigue Syndrome, Visna, High Pressure Nervous Syndrome, Meningism, spinal cord diseases such as amyotonia congenita, amyotrophic lateral sclerosis, spinal muscular atrophy such as Werdnig-Hoffmann Disease, spinal cord compression, spinal cord neoplasms such as epidural neoplasms, syringomyelia, Tabes Dorsalis, Stiff-Man Syndrome, mental retardation such as Angelman Syndrome, Cri-du-Chat Syndrome, De Lange's Syndrome, Down Syndrome, Gangliosidoses such as gangliosidoses G(MI), Sandhoff Disease, Tay-Sachs Disease, Hartnup Disease, homocystinuria, Laurence-Moon-Biedl Syndrome, Lesch-Nyhan Syndrome, Maple Syrup Urine Disease, mucolipidosis such as fucosidosis, neuronal ceroid-lipofuscinosis, oculocerebrorenal syndrome, phenylketonuria such as maternal phenylketonuria, Prader-Willi Syndrome, Rett Syndrome, Rubinstein-Taybi Syndrome, Tuberous Sclerosis, WAGR Syndrome, nervous system abnormalities such as holoprosencephaly, neural tube defects such as anencephaly which includes hydrangencephaly, Arnold-Chairi Deformity, encephalocele, meningocele, meningomyelocele, spinal dysraphism such as spina bifida cystica and spina bifida occulta.

[0730] Additional neurologic diseases which can be treated or detected with polynucleotides, polypeptides, agonists, and/or antagonists of the present invention include hereditary motor and sensory neuropathies which include Charcot-Marie Disease, Hereditary optic atrophy, Refsum's Disease, hereditary spastic paraplegia, Werdnig-Hoffmann Disease, Hereditary Sensory and Autonomic Neuropathies such as Congenital Analgesia and Familial Dysautonomia, Neurologic manifestations (such as agnosia that include Gerstmann's Syndrome, Amnesia such as retrograde amnesia, apraxia, neurogenic bladder, cataplexy, communicative disorders such as hearing disorders that includes deafness, partial hearing loss, loudness recruitment and tinnitus, language disorders such as aphasia which include agraphia, anomia, broca aphasia, and Wernicke Aphasia, Dyslexia such as Acquired Dyslexia, language development disorders, speech disorders such as aphasia which includes anomia, broca aphasia and Wernicke Aphasia, articulation disorders, communicative disorders such as speech disorders which include dysarthria, echolalia, mutism and stuttering, voice disorders such as aphonia and hoarseness, decerebrate state, delirium, fasciculation, hallucinations, meningism, movement disorders such as angelman syndrome, ataxia, athetosis, chorea, dystonia, hypokinesia, muscle hypotonia, myoclonus, tic, torticollis and tremor, muscle hypertonia such as muscle rigidity such as stiff-man syndrome, muscle spasticity, paralysis such as facial paralysis which includes Herpes Zoster Oticus, Gastroparesis, Hemiplegia, ophthalmoplegia such as diplopia, Duane's Syndrome, Horner's Syndrome, Chronic progressive external ophthalmoplegia such as Kearns Syndrome, Bulbar Paralysis, Tropical Spastic Paraparesis, Paraplegia such as Brown-Sequard Syndrome, quadriplegia, respiratory paralysis and vocal cord paralysis, paresis, phantom limb, taste disorders such as ageusia and dysgeusia, vision disorders such as amblyopia, blindness, color vision defects, diplopia, hemianopsia, scotoma and subnormal vision, sleep disorders such as hypersomnia which includes Kleine-Levin Syndrome, insomnia, and somnambulism, spasm such as trismus, unconsciousness such as coma, persistent vegetative state and syncope and vertigo, neuromuscular diseases such as amyotonia congenita, amyotrophic lateral sclerosis, Lambert-Eaton Myasthenic Syndrome, motor neuron disease, muscular atrophy such as spinal muscular atrophy, Charcot-Marie Disease and Werdnig-Hoffinann Disease, Postpoliomyelitis Syndrome, Muscular Dystrophy, Myasthenia Gravis, Myotonia Atrophica, Myotonia Confenita, Nemaline Myopathy, Familial Periodic Paralysis, Multiplex Paramyloclonus, Tropical Spastic Paraparesis and Stiff-Man Syndrome, peripheral nervous system diseases such as acrodynia, amyloid neuropathies, autonomic nervous system diseases such as Adie's Syndrome, Barre-Lieou Syndrome, Familial Dysautonomia, Homer's Syndrome, Reflex Sympathetic Dystrophy and Shy-Drager Syndrome, Cranial Nerve Diseases such as Acoustic Nerve Diseases such as Acoustic Neuroma which includes Neurofibromatosis 2, Facial Nerve Diseases such as Facial Neuralgia,Melkersson-Rosenthal Syndrome, ocular motility disorders which includes amblyopia, nystagmus, oculomotor nerve paralysis, ophthalmoplegia such as Duane's Syndrome, Horner's Syndrome, Chronic Progressive External Ophthalmoplegia which includes Kearns Syndrome, Strabismus such as Esotropia and Exotropia, Oculomotor Nerve Paralysis, Optic Nerve Diseases such as Optic Atrophy which includes Hereditary Optic Atrophy, Optic Disk Drusen, Optic Neuritis such as Neuromyelitis Optica, Papilledema, Trigeminal Neuralgia, Vocal Cord Paralysis, Demyelinating Diseases such as Neuromyelitis Optica and Swayback, and Diabetic neuropathies such as diabetic foot.

[0731] Additional neurologic diseases which can be treated or detected with polynucleotides, polypeptides, agonists, and/or antagonists of the present invention include nerve compression syndromes such as carpal tunnel syndrome, tarsal tunnel syndrome, thoracic outlet syndrome such as cervical rib syndrome, ulnar nerve compression syndrome, neuralgia such as causalgia, cervico-brachial neuralgia, facial neuralgia and trigeminal neuralgia, neuritis such as experimental allergic neuritis, optic neuritis, polyneuritis, polyradiculoneuritis and radiculities such as polyradiculitis, hereditary motor and sensory neuropathies such as Charcot-Marie Disease, Hereditary Optic Atrophy, Refsum's Disease, Hereditary Spastic Paraplegia and Werdnig-Hoffmann Disease, Hereditary Sensory and Autonomic Neuropathies which include Congenital Analgesia and Familial Dysautonomia, POEMS Syndrome, Sciatica, Gustatory Sweating and Tetany).

[0732] Endocrine Disorders

[0733] Polynucleotides or polypeptides, or agonists or antagonists of the present invention, may be used to treat, prevent, diagnose, and/or prognose disorders and/or diseases related to hormone imbalance, and/or disorders or diseases of the endocrine system.

[0734] Hormones secreted by the glands of the endocrine system control physical growth, sexual function, metabolism, and other functions. Disorders may be classified in two ways: disturbances in the production of hormones, and the inability of tissues to respond to hormones. The etiology of these hormone imbalance or endocrine system diseases, disorders or conditions may be genetic, somatic, such as cancer and some autoimmune diseases, acquired (e.g., by chemotherapy, injury or toxins), or infectious. Moreover, polynucleotides, polypeptides, antibodies, and/or agonists or antagonists of the present invention can be used as a marker or detector of a particular disease or disorder related to the endocrine system and/or hormone imbalance.

[0735] Endocrine system and/or hormone imbalance and/or diseases encompass disorders of uterine motility including, but not limited to: complications with pregnancy and labor (e.g., pre-term labor, post-term pregnancy, spontaneous abortion, and slow or stopped labor); and disorders and/or diseases of the menstrual cycle (e.g., dysmenorrhea and endometriosis).

[0736] Endocrine system and/or hormone imbalance disorders and/or diseases include disorders and/or diseases of the pancreas, such as, for example, diabetes mellitus, diabetes insipidus, congenital pancreatic agenesis, pheochromocytoma—islet cell tumor syndrome; disorders and/or diseases of the adrenal glands such as, for example, Addison's Disease, corticosteroid deficiency, virilizing disease, hirsutism, Cushing's Syndrome, hyperaldosteronism, pheochromocytoma; disorders and/or diseases of the pituitary gland, such as, for example, hyperpituitarism, hypopituitarism, pituitary dwarfism, pituitary adenoma, panhypopituitarism, acromegaly, gigantism; disorders and/or diseases of the thyroid, including but not limited to, hyperthyroidism, hypothyroidism, Plummer's disease, Graves' disease (toxic diffuse goiter), toxic nodular goiter, thyroiditis (Hashimoto's thyroiditis, subacute granulomatous thyroiditis, and silent lymphocytic thyroiditis), Pendred's syndrome, myxedema, cretinism, thyrotoxicosis, thyroid hormone coupling defect, thymic aplasia, Hurthle cell tumours of the thyroid, thyroid cancer, thyroid carcinoma, Medullary thyroid carcinoma; disorders and/or diseases of the parathyroid, such as, for example, hyperparathyroidism, hypoparathyroidism; disorders and/or diseases of the hypothalamus.

[0737] In addition, endocrine system and/or hormone imbalance disorders and/or diseases may also include disorders and/or diseases of the testes or ovaries, including cancer. Other disorders and/or diseases of the testes or ovaries further include, for example, ovarian cancer, polycystic ovary syndrome, Klinefelter's syndrome, vanishing testes syndrome (bilateral anorchia), congenital absence of Leydig's cells, cryptorchidism, Noonan's syndrome, myotonic dystrophy, capillary haemangioma of the testis (benign), neoplasias of the testis and neo-testis.

[0738] Moreover, endocrine system and/or hormone imbalance disorders and/or diseases may also include disorders and/or diseases such as, for example, polyglandular deficiency syndromes, pheochromocytoma, neuroblastoma, multiple Endocrine neoplasia, and disorders and/or cancers of endocrine tissues.

[0739] In another embodiment, a polypeptide of the invention, or polynucleotides, antibodies, agonists, or antagonists corresponding to that polypeptide, may be used to diagnose, prognoses prevent, and/or treat endocrine diseases and/or disorders associated with the tissue(s) in which the polypeptide of the invention is expressed, including one, two, three, four, five, or more tissues disclosed in Table 1A, column 7 (Tissue Distribution Library Code).

[0740] Gastrointestinal Disorders

[0741] Polynucleotides or polypeptides, or agonists or antagonists of the present invention, may be used to treat, prevent, diagnose, and/or prognose gastrointestinal disorders, including inflammatory diseases and/or conditions, infections, cancers (e.g., intestinal neoplasms (carcinoid tumor of the small intestine, non-Hodgkin's lymphoma of the small intestine, small bowl lymphoma)), and ulcers, such as peptic ulcers.

[0742] Gastrointestinal disorders include dysphagia, odynophagia, inflammation of the esophagus, peptic esophagitis, gastric reflux, submucosal fibrosis and stricturing, Mallory-Weiss lesions, leiomyomas, lipomas, epidermal cancers, adeoncarcinomas, gastric retention disorders, gastroenteritis, gastric atrophy, gastric/stomach cancers, polyps of the stomach, autoimmune disorders such as pernicious anemia, pyloric stenosis, gastritis (bacterial, viral, eosinophilic, stress-induced, chronic erosive, atrophic, plasma cell, and Menetrier's), and peritoneal diseases (e.g., chyloperioneum, hemoperitoneum, mesenteric cyst, mesenteric lymphadenitis, mesenteric vascular occlusion, panniculitis, neoplasms, peritonitis, pneumoperitoneum, bubphrenic abscess).

[0743] Gastrointestinal disorders also include disorders associated with the small intestine, such as malabsorption syndromes, distension, irritable bowel syndrome, sugar intolerance, celiac disease, duodenal ulcers, duodenitis, tropical sprue, Whipple's disease, intestinal lymphangiectasia, Crohn's disease, appendicitis, obstructions of the ileum, Meckel's diverticulum, multiple diverticula, failure of complete rotation of the small and large intestine, lymphoma, and bacterial and parasitic diseases (such as Traveler's diarrhea, typhoid and paratyphoid, cholera, infection by Roundworms (Ascariasis lumbricoides), Hookworms (Ancylostoma duodenale), Threadworms (Enterobius vermicularis), Tapeworms (Taenia saginata, Echinococcus granulosus, Diphyllobothrium spp., and T solium).

[0744] Liver diseases and/or disorders include intrahepatic cholestasis (alagille syndrome, biliary liver cirrhosis), fatty liver (alcoholic fatty liver, reye syndrome), hepatic vein thrombosis, hepatolentricular degeneration, hepatomegaly, hepatopulmonary syndrome, hepatorenal syndrome, portal hypertension (esophageal and gastric varices), liver abscess (amebic liver abscess), liver cirrhosis (alcoholic, biliary and experimental), alcoholic liver diseases (fatty liver, hepatitis, cirrhosis), parasitic (hepatic echinococcosis, fascioliasis, amebic liver abscess), jaundice (hemolytic, hepatocellular, and cholestatic), cholestasis, portal hypertension, liver enlargement, ascites, hepatitis (alcoholic hepatitis, animal hepatitis, chronic hepatitis (autoimmune, hepatitis B, hepatitis C, hepatitis D, drug induced), toxic hepatitis, viral human hepatitis (hepatitis A, hepatitis B, hepatitis C, hepatitis D, hepatitis E), Wilson's disease, granulomatous hepatitis, secondary biliary cirrhosis, hepatic encephalopathy, portal hypertension, varices, hepatic encephalopathy, primary biliary cirrhosis, primary sclerosing cholangitis, hepatocellular adenoma, hemangiomas, bile stones, liver failure (hepatic encephalopathy, acute liver failure), and liver neoplasms (angiomyolipoma, calcified liver metastases, cystic liver metastases, epithelial tumors, fibrolamellar hepatocarcinoma, focal nodular hyperplasia, hepatic adenoma, hepatobiliary cystadenoma, hepatoblastoma, hepatocellular carcinoma, hepatoma, liver cancer, liver hemangioendothelioma, mesenchymal hamartoma, mesenchymal tumors of liver, nodular regenerative hyperplasia, benign liver tumors (Hepatic cysts [Simple cysts, Polycystic liver disease, Hepatobiliary cystadenoma, Choledochal cyst], Mesenchymal tumors [Mesenchymal hamartoma, Infantile hemangioendothelioma, Hemangioma, Peliosis hepatis, Lipomas, Inflammatory pseudotumor, Miscellaneous], Epithelial tumors [Bile duct epithelium (Bile duct hamartoma, Bile duct adenoma), Hepatocyte (Adenoma, Focal nodular hyperplasia, Nodular regenerative hyperplasia)], malignant liver tumors [hepatocellular, hepatoblastoma, hepatocellular carcinoma, cholangiocellular, cholangiocarcinoma, cystadenocarcinoma, tumors of blood vessels, angiosarcoma, Karposi's sarcoma, hemangioendothelioma, other tumors, embryonal sarcoma, fibrosarcoma, leiomyosarcoma, rhabdomyosarcoma, carcinosarcoma, teratoma, carcinoid, squamous carcinoma, primary lymphoma]), peliosis hepatis, erythrohepatic porphyria, hepatic porphyria (acute intermittent porphyria, porphyria cutanea tarda), Zellweger syndrome).

[0745] Pancreatic diseases and/or disorders include acute pancreatitis, chronic pancreatitis (acute necrotizing pancreatitis, alcoholic pancreatitis), neoplasms (adenocarcinoma of the pancreas, cystadenocarcinoma, insulinoma, gastrinoma, and glucagonoma, cystic neoplasms, islet-cell tumors, pancreoblastoma), and other pancreatic diseases (e.g., cystic fibrosis, cyst (pancreatic pseudocyst, pancreatic fistula, insufficiency)).

[0746] Gallbladder diseases include gallstones (cholelithiasis and choledocholithiasis), postcholecystectomy syndrome, diverticulosis of the gallbladder, acute cholecystitis, chronic cholecystitis, bile duct tumors, and mucocele.

[0747] Diseases and/or disorders of the large intestine include antibiotic-associated colitis, diverticulitis, ulcerative colitis, acquired megacolon, abscesses, fungal and bacterial infections, anorectal disorders (e.g., fissures, hemorrhoids), colonic diseases (colitis, colonic neoplasms [colon cancer, adenomatous colon polyps (e.g., villous adenoma), colon carcinoma, colorectal cancer], colonic diverticulitis, colonic diverticulosis, megacolon [Hirschsprung disease, toxic megacolon]; sigmoid diseases [proctocolitis, sigmoin neoplasms]), constipation, Crohn's disease, diarrhea (infantile diarrhea, dysentery), duodenal diseases (duodenal neoplasms, duodenal obstruction, duodenal ulcer, duodenitis), enteritis (enterocolitis), HIV enteropathy, ileal diseases (ileal neoplasms, ileitis), immunoproliferative small intestinal disease, inflammatory bowel disease (ulcerative colitis, Crohn's disease), intestinal atresia, parasitic diseases (anisakiasis, balantidiasis, blastocystis infections, cryptosporidiosis, dientamoebiasis, amebic dysentery, giardiasis), intestinal fistula (rectal fistula), intestinal neoplasms (cecal neoplasms, colonic neoplasms, duodenal neoplasms, ileal neoplasms, intestinal polyps, jejunal neoplasms, rectal neoplasms), intestinal obstruction (afferent loop syndrome, duodenal obstruction, impacted feces, intestinal pseudo-obstruction [cecal volvulus], intussusception), intestinal perforation, intestinal polyps (colonic polyps, gardner syndrome, peutz-jeghers syndrome), jejunal diseases (jejunal neoplasms), malabsorption syndromes (blind loop syndrome, celiac disease, lactose intolerance, short bowl syndrome, tropical sprue, whipple's disease), mesenteric vascular occlusion, pneumatosis cystoides intestinalis, protein-losing enteropathies (intestinal lymphagiectasis), rectal diseases (anus diseases, fecal incontinence, hemorrhoids, proctitis, rectal fistula, rectal prolapse, rectocele), peptic ulcer (duodenal ulcer, peptic esophagitis, hemorrhage, perforation, stomach ulcer, Zollinger-Ellison syndrome), postgastrectomy syndromes (dumping syndrome), stomach diseases (e.g., achlorhydria, duodenogastric reflux (bile reflux), gastric antral vascular ectasia, gastric fistula, gastric outlet obstruction, gastritis (atrophic or hypertrophic), gastroparesis, stomach dilatation, stomach diverticulum, stomach neoplasms (gastric cancer, gastric polyps, gastric adenocarcinoma, hyperplastic gastric polyp), stomach rupture, stomach ulcer, stomach volvulus), tuberculosis, visceroptosis, vomiting (e.g., hematemesis, hyperemesis gravidarum, postoperative nausea and vomiting) and hemorrhagic colitis.

[0748] Further diseases and/or disorders of the gastrointestinal system include biliary tract diseases, such as, gastroschisis, fistula (e.g., biliary fistula, esophageal fistula, gastric fistula, intestinal fistula, pancreatic fistula), neoplasms (e.g., biliary tract neoplasms, esophageal neoplasms, such as adenocarcinoma of the esophagus, esophageal squamous cell carcinoma, gastrointestinal neoplasms, pancreatic neoplasms, such as adenocarcinoma of the pancreas, mucinous cystic neoplasm of the pancreas, pancreatic cystic neoplasms, pancreatoblastoma, and peritoneal neoplasms), esophageal disease (e.g., bullous diseases, candidiasis, glycogenic acanthosis, ulceration, barrett esophagus varices, atresia, cyst, diverticulum (e.g., Zenker's diverticulum), fistula (e.g., tracheoesophageal fistula), motility disorders (e.g., CREST syndrome, deglutition disorders, achalasia, spasm, gastroesophageal reflux), neoplasms, perforation (e.g., Boerhaave syndrome, Mallory-Weiss syndrome), stenosis, esophagitis, diaphragmatic hernia (e.g., hiatal hernia); gastrointestinal diseases, such as, gastroenteritis (e.g., cholera morbus, norwalk virus infection), hemorrhage (e.g., hematemesis, melena, peptic ulcer hemorrhage), stomach neoplasms (gastric cancer, gastric polyps, gastric adenocarcinoma, stomach cancer)), hernia (e.g., congenital diaphragmatic hernia, femoral hernia, inguinal hernia, obturator hernia, umbilical hernia, ventral hernia), and intestinal diseases (e.g., cecal diseases (appendicitis, cecal neoplasms)).

[0749] Reproductive System Disorders

[0750] The polynucleotides or polypeptides, or agonists or antagonists of the invention may be used for the diagnosis, treatment, or prevention of diseases and/or disorders of the reproductive system. Reproductive system disorders that can be treated by the compositions of the invention, include, but are not limited to, reproductive system injuries, infections, neoplastic disorders, congenital defects, and diseases or disorders which result in infertility, complications with pregnancy, labor, or parturition, and postpartum difficulties.

[0751] Reproductive system disorders and/or diseases include diseases and/or disorders of the testes, including, but not limited to, testicular atrophy, testicular feminization, cryptorchism (unilateral and bilateral), anorchia, ectopic testis, epididymitis and orchitis (typically resulting from infections such as, for example, gonorrhea, mumps, tuberculosis, and syphilis), testicular torsion, vasitis nodosa, germ cell tumors (e.g., seminomas, embryonal cell carcinomas, teratocarcinomas, choriocarcinomas, yolk sac tumors, and teratomas), stromal tumors (e.g., Leydig cell tumors), hydrocele, hematocele, varicocele, spermatocele, inguinal hernia, and disorders of sperm production (e.g., immotile cilia syndrome, aspermia, asthenozoospermia, azoospermia, oligospermia, and teratozoospermia).

[0752] Reproductive system disorders also include, but are not limited to, disorders of the prostate gland, such as acute non-bacterial prostatitis, chronic non-bacterial prostatitis, acute bacterial prostatitis, chronic bacterial prostatitis, prostatodystonia, prostatosis, granulomatous prostatitis, malacoplakia, benign prostatic hypertrophy or hyperplasia, and prostate neoplastic disorders, including adenocarcinomas, transitional cell carcinomas, ductal carcinomas, and squamous cell carcinomas.

[0753] Additionally, the compositions of the invention may be useful in the diagnosis, treatment, and/or prevention of disorders or diseases of the penis and urethra, including, but not limited to, inflammatory disorders, such as balanoposthitis, balanitis xerotica obliterans, phimosis, paraphimosis, syphilis, herpes simplex virus, gonorrhea, non-gonococcal urethritis, chlamydia, mycoplasma, trichomonas, HIV, AIDS, Reiter's syndrome, condyloma acuminatum, condyloma latum, and pearly penile papules; urethral abnormalities, such as hypospadias, epispadias, and phimosis; premalignant lesions, including Erythroplasia of Queyrat, Bowen's disease, Bowenoid paplosis, giant condyloma of Buscke-Lowenstein, and varrucous carcinoma; penile cancers, including squamous cell carcinomas, carcinoma in situ, verrucous carcinoma, and disseminated penile carcinoma; urethral neoplastic disorders, including penile urethral carcinoma, bulbomembranous urethral carcinoma, and prostatic urethral carcinoma; and erectile disorders, such as priapism, Peyronie's disease, erectile dysfunction, and impotence.

[0754] Moreover, diseases and/or disorders of the vas deferens include, but are not limited to, vasculititis and CBAVD (congenital bilateral absence of the vas deferens); additionally, the polynucleotides, polypeptides, and agonists or antagonists of the present invention may be used in the diagnosis, treatment, and/or prevention of diseases and/or disorders of the seminal vesicles, including but not limited to, hydatid disease, congenital chloride diarrhea, and polycystic kidney disease.

[0755] Other disorders and/or diseases of the male reproductive system that may be diagnosed, treated, and/or prevented with the compositions of the invention include, but are not limited to, Klinefelter's syndrome, Young's syndrome, premature ejaculation, diabetes mellitus, cystic fibrosis, Kartagener's syndrome, high fever, multiple sclerosis, and gynecomastia.

[0756] Further, the polynucleotides, polypeptides, and agonists or antagonists of the present invention may be used in the diagnosis, treatment, and/or prevention of diseases and/or disorders of the vagina and vulva, including, but not limited to, bacterial vaginosis, candida vaginitis, herpes simplex virus, chancroid, granuloma inguinale, lymphogranuloma venereum, scabies, human papillomavirus, vaginal trauma, vulvar trauma, adenosis, chlamydia vaginitis, gonorrhea, trichomonas vaginitis, condyloma acuminatum, syphilis, molluscum contagiosum, atrophic vaginitis, Paget's disease, lichen sclerosus, lichen planus, vulvodynia, toxic shock syndrome, vaginismus, vulvovaginitis, vulvar vestibulitis, and neoplastic disorders, such as squamous cell hyperplasia, clear cell carcinoma, basal cell carcinoma, melanomas, cancer of Bartholin's gland, and vulvar intraepithelial neoplasia.

[0757] Disorders and/or diseases of the uterus that may be diagnosed, treated, and/or prevented with the compositions of the invention include, but are not limited to, dysmenorrhea, retroverted uterus, endometriosis, fibroids, adenomyosis, anovulatory bleeding, amenorrhea, Cushing's syndrome, hydatidiform moles, Asherman's syndrome, premature menopause, precocious puberty, uterine polyps, dysfunctional uterine bleeding (e.g., due to aberrant hormonal signals), and neoplastic disorders, such as adenocarcinomas, keiomyosarcomas, and sarcomas. Additionally, the polypeptides, polynucleotides, or agonists or antagonists of the invention may be useful as a marker or detector of, as well as in the diagnosis, treatment, and/or prevention of congenital uterine abnormalities, such as bicornuate uterus, septate uterus, simple unicornuate uterus, unicornuate uterus with a noncavitary rudimentary horn, unicornuate uterus with a non-communicating cavitary rudimentary horn, unicornuate uterus with a communicating cavitary horn, arcuate uterus, uterine didelfus, and T-shaped uterus.

[0758] Ovarian diseases and/or disorders that may be diagnosed, treated, and/or prevented with the compositions of the invention include, but are not limited to, anovulation, polycystic ovary syndrome (Stein-Leventhal syndrome), ovarian cysts, ovarian hypofunction, ovarian insensitivity to gonadotropins, ovarian overproduction of androgens, right ovarian vein syndrome, amenorrhea, hirutism, and ovarian cancer (including, but not limited to, primary and secondary cancerous growth, Sertoli-Leydig tumors, endometriod carcinoma of the ovary, ovarian papillary serous adenocarcinoma, ovarian mucinous adenocarcinoma, and Ovarian Krukenberg tumors).

[0759] Cervical diseases and/or disorders that may be diagnosed, treated, and/or prevented with the compositions of the invention include, but are not limited to, cervicitis, chronic cervicitis, mucopurulent cervicitis, cervical dysplasia, cervical polyps, Nabothian cysts, cervical erosion, cervical incompetence, and cervical neoplasms (including, for example, cervical carcinoma, squamous metaplasia, squamous cell carcinoma, adenosquamous cell neoplasia, and columnar cell neoplasia).

[0760] Additionally, diseases and/or disorders of the reproductive system that may be diagnosed, treated, and/or prevented with the compositions of the invention include, but are not limited to, disorders and/or diseases of pregnancy, including miscarriage and stillbirth, such as early abortion, late abortion, spontaneous abortion, induced abortion, therapeutic abortion, threatened abortion, missed abortion, incomplete abortion, complete abortion, habitual abortion, missed abortion, and septic abortion; ectopic pregnancy, anemia, Rh incompatibility, vaginal bleeding during pregnancy, gestational diabetes, intrauterine growth retardation, polyhydramnios, HELLP syndrome, abruptio placentae, placenta previa, hyperemesis, preeclampsia, eclampsia, herpes gestationis, and urticaria of pregnancy. Additionally, the polynucleotides, polypeptides, and agonists or antagonists of the present invention may be used in the diagnosis, treatment, and/or prevention of diseases that can complicate pregnancy, including heart disease, heart failure, rheumatic heart disease, congenital heart disease, mitral valve prolapse, high blood pressure, anemia, kidney disease, infectious disease (e.g., rubella, cytomegalovirus, toxoplasmosis, infectious hepatitis, chlamydia, HIV, AIDS, and genital herpes), diabetes mellitus, Graves' disease, thyroiditis, hypothyroidism, Hashimoto's thyroiditis, chronic active hepatitis, cirrhosis of the liver, primary biliary cirrhosis, asthma, systemic lupus eryematosis, rheumatoid arthritis, myasthenia gravis, idiopathic thrombocytopenic purpura, appendicitis, ovarian cysts, gallbladder disorders,and obstruction of the intestine.

[0761] Complications associated with labor and parturition that may be diagnosed, treated, and/or prevented with the compositions of the invention include, but are not limited to, premature rupture of the membranes, pre-term labor, post-term pregnancy, postmaturity, labor that progresses too slowly, fetal distress (e.g., abnormal heart rate (fetal or maternal), breathing problems, and abnormal fetal position), shoulder dystocia, prolapsed umbilical cord, amniotic fluid embolism, and aberrant uterine bleeding.

[0762] Further, diseases and/or disorders of the postdelivery period, that may be diagnosed, treated, and/or prevented with the compositions of the invention, include, but are not limited to, endometritis, myometritis, parametritis, peritonitis, pelvic thrombophlebitis, pulmonary embolism, endotoxemia, pyelonephritis, saphenous thrombophlebitis, mastitis, cystitis, postpartum hemorrhage, and inverted uterus.

[0763] Other disorders and/or diseases of the female reproductive system that may be diagnosed, treated, and/or prevented by the polynucleotides, polypeptides, and agonists or antagonists of the present invention include, but are not limited to, Turner's syndrome, pseudohermaphroditism, premenstrual syndrome, pelvic inflammatory disease, pelvic congestion (vascular engorgement), frigidity, anorgasmia, dyspareunia, ruptured fallopian tube, and Mittelschmerz.

[0764] Developmental and Inherited Disorders

[0765] Polynuceotides or polypeptides, or agonists or antagonists of the present invention may be used to treat, prevent, diagnose, and/or prognose diseases associated with mixed fetal tissues, including, but not limited to, developmental and inherited disorders or defects of the nervous system, musculoskelelal system, execretory system, cardiovascular system, hematopoietic system, gastrointestinal system, reproductive system, and respiratory system. Compositions of the present invention may also be used to treat, prevent, diagnose, and/or prognose developmental and inherited disorders or defects associated with, but not limited to, skin, hair, visual, and auditory tissues, metabolism. Additionally, the compositions of the invention may be useful in the diagnosis, treatment, and/or prevention of disorders or diseases associated with, but not limited to, chromosomal or genetic abnormalities and hyperproliferation or neoplasia.

[0766] Disorders or defects of the nervous system associated with developmental or inherited abnormalities that may be diagnosed, treated, and/or prevented with the compostions of the invention include, but are not limited to, adrenoleukodystrophy, agenesis of corpus callosum, Alexander disease, anencephaly, Angelman syndrome, Arnold-Chiari deformity, Batten disease, Canavan disease, cephalic disorders, Charcot-Marie-Tooth disease, encephalocele, Friedreich's ataxia, Gaucher's disease, Gorlin syndrome, Hallervorden-Spatz disease, hereditary spastic paraplegia, Huntington disease, hydranencephaly, hydrocephalus, Joubert syndrome, Lesch-Nyhan syndrome, leukodystrophy, Menkes disease, microcephaly, Niemann-Pick Type C1, neurofibromatosis, porencephaly, progeria, proteus syndrome, Refsum disease, spina bifida, Sturge-Weber syndrome, Tay-Sachs disease, tuberous sclerosis, and von Hippel-Lindau disease.

[0767] Developmental and inherited disorders resulting in disorders or defects of the musculoskeletal system that may be diagnosed, treated, and/or prevented with the compositions of the invention include, but are not limited to, achondroplasia, atlanto-occipital fusion, arthrogryposis mulitplex congenita, autosomal recessive muscular dystrophy, Becker's muscular dystrophy, cerebral palsy, choanal atresia, cleft lip, cleft palate, clubfoot, congenital amputation, congenital dislocation of the hip, congenital torticollis, congenital scoliosis, dopa-repsonsive dystonia, Duchenne muscular dystrophy, early-onset generalized dystonia, femoral torsion, Gorlin syndrome, hypophosphatasia, Klippel-Feil syndrome, knee dislocation, myocionic dystonia, myotonic dystrophy, nail-patella syndrome, osteogenesis imperfecta, paroxysmal dystonia, progeria, prune-belly syndrome, rapid-onset dystonia parkinsonism, scolosis, syndactyly, Treacher Collins' syndrome, velocardiofacial syndrome, and X-linked dystonia-parkinsonism.

[0768] Developmental or hereditary disorders or defects of the excretory system that may be diagnosed, treated, and/or prevented with the compositions of the invention include, but are not limited to, Alport's syndrome, Bartter's syndrome, bladder diverticula, bladder exstrophy, cystinuria, epispadias, Fanconi's syndrome, Hartnup disease, horseshoe kidney, hypospadias, kidney agenesis, kidney ectopia, kidney malrotation, Liddle's syndrome, medullary cystic disease, medullary sponge, multicystic kidney, kidney polycystic kidney disease, nail-patella syndrome, Potter's syndrome, urinary tract flow obstruction, vitamin D-resistant rickets, and Wilm's tumor.

[0769] Cardiovascular disorders or defects of developmental or hereditary origin that may be diagnosed, treated, and/or prevented with the compositions of the inventtion include, but are not limited to, aortic valve stenosis, atrial septal defects, artioventricular (A-V) canal defect, bicuspid aortic valve, coarctation or the aorta, dextrocardia, Ebstein's anomaly, Eisenmenger's complex, hypoplastic left heart syndrome, Marfan syndrome, patent ductus arteriosus, progeria, pulmonary atresia, pulmonary valve stenosis, subaortic stenosis, tetralogy of fallot, total anomalous pulmonary venous (P-V) connection, transposition of the great arteries, tricuspid atresia, truncus arteriosus, ventricular septal defects. Developmental or inherited disorders resulting in disorders involving the hematopoietic system that may be diagnosed, treated, and/or prevented with the compositions of the invention include, but not limited to, Bernard-Soulier syndrome, Chediak-Higashi syndrome, hemophilia, Hermansky-Pudlak syndrome, sickle cell anemia, storage pool disease, thromboxane A2 dysfunction, thrombasthenia, and von Willebrand's disease.

[0770] The compositions of the invention may also be used to diagnose, treat, and/or prevent developmental and inherited disorders resulting in disorders or defects of the gastrointestinal system, including, but not limited to, anal atresia, biliary atresia, esophageal atresia, diaphragmatic hernia, Hirschsprung's disease, Meckel's diverticulum, oligohydramnios, omphalocele, polyhydramnios, porphyria, situs inversus viscera. Developmental or inherited disorders resulting in metabolic disorders that may be diagnosed, treated, and/or prevented with the compositions of the invention include, but are not limited to, alpha-1 antitrypsin deficiency, cystic fibrosis, hemochromatosis, lysosomal storage disease, phenylketonuria, Wilson's disease, and Zellweger syndrome.

[0771] Disorders of the reproductive system that are developmentally or hereditary related that may also be diagnosed, treated, and/or prevented with the compositions of the invention include, but are not limited to, androgen insensitivity syndrome, ambiguous genitalia, autosomal sex reversal, congenital adreneal hyperplasia, gonadoblastoma, ovarian germ cell cancer, pseudohermphroditism, true hermaphroditism, undescended testis, XX male syndrome, and XY female type gonadal dysgenesis. The compositions of the invention may also be used to diagnose, treat, and/or prevent developmental or inherited respiratory defects including, but not limited to, askin tumor, azygos lobe, congenital diaphragmatic hernia, congenital lobar emphysema, cystic adenomatoid malformation, lobar emphysema, hyaline membrane disease, and pectus excavatum.

[0772] Developmental or inherited disorders may also result from chromosomal or genetic aberration that may be diagnosed, treated, and/or prevented with the compositions of the invention including, but not limited to, 4p-syndrome, cri du chat syndrome, Digeorge syndrome, Down's syndrome, Edward's syndrome, fragile X syndrome, Klinefelter's syndrome, Patau's syndrome, Prader-Willi syndrome, progeria, Turner's syndrome, triple X syndrome, and XYY syndrome. Other developmental disorders that can be diagnosed, treated, and/or prevented with the compositions of the invention, include, but are not limited to, fetal alcohol syndrome, and can be caused by environmental factors surrounding the developing fetus.

[0773] The compositions of the invention may further be able to be used to diagnose, treat, and/or prevent errors in development or a genetic disposition that may result in hyperproliferative disorders or neoplasms, including, but not limited to, acute childhood lymphoblastic leukemia, askin tumor, Beckwith-Wiedemann syndrome, childhood acute myeloid leukemia, childhood brain stem glioma, childhood cerebellar astrocytoma, childhood extracranial germ cell tumors childhood (primary), gonadoblastoma, hepatocellular cancer, childhood Hodgkin's disease, childhood Hodgkin's lymphoma, childhood hypothalamic and visual pathway glioma, childhood (primary) liver cancer, childhood lymphoblastic leukemia, childhood medulloblastoma, childhood non-Hodgkin's lymphoma, childhood pineal and supratentorial primitive neuroectodermal tumors, childhood primary liver cancer, childhood rhabdomyosarcoma, childhood soft tissue sarcoma, Gorlin syndrome, familial multiple endrocrine neoplasia type I, neuroblastoma, ovarian germ cell cancer, pheochromocytoma, retinoblastoma, and Wilm's tumor.

[0774] Polypeptides may be administered using any method known in the art, including, but not limited to, direct needle injection at the delivery site, intravenous injection, topical administration, catheter infusion, biolistic injectors, particle accelerators, gelfoam sponge depots, other commercially available depot materials, osmotic pumps, oral or suppositorial solid pharmaceutical formulations, decanting or topical applications during surgery, aerosol delivery. Such methods are known in the art. Polypeptides may be administered as part of a Therapeutic, described in more detail below. Methods of delivering polynucleotides are described in more detail herein.

[0775] Diseases at the Cellular Level

[0776] Diseases associated with increased cell survival or the inhibition of apoptosis that could be treated, prevented, diagnosed and/or prognosed using polynucleotides or polypeptides, as well as antagonists or agonists of the present invention, include cancers (such as follicular lymphomas, carcinomas with p53 mutations, and hormone-dependent tumors, including, but not limited to colon cancer, cardiac tumors, pancreatic cancer, melanoma, retinoblastoma, glioblastoma, lung cancer, intestinal cancer, testicular cancer, stomach cancer, neuroblastoma, myxoma, myoma, lymphoma, endothelioma, osteoblastoma, osteoclastoma, osteosarcoma, chondrosarcoma, adenoma, breast cancer, prostate cancer, Kaposi's sarcoma and ovarian cancer); autoimmune disorders (such as, multiple sclerosis, Sjogren's syndrome, Hashimoto's thyroiditis, biliary cirrhosis, Behcet's disease, Crohn's disease, polymyositis, systemic lupus erythematosus and immune-related glomerulonephritis and rheumatoid arthritis) and viral infections (such as herpes viruses, pox viruses and adenoviruses), inflammation, graft v. host disease, acute graft rejection, and chronic graft rejection.

[0777] In preferred embodiments, polynucleotides, polypeptides, and/or antagonists of the invention are used to inhibit growth, progression, and/or metastasis of cancers, in particular those [listed above] involving tissues of the musculoskeletal system.

[0778] Additional diseases or conditions associated with increased cell survival that could be treated or detected by polynucleotides or polypeptides, or agonists or antagonists of the present invention include, but are not limited to, progression, and/or metastases of malignancies and related disorders such as leukemia (including acute leukemias (e.g., acute lymphocytic leukemia, acute myelocytic leukemia (including myeloblastic, promyelocytic, myelomonocytic, monocytic, and erythroleukemia)) and chronic leukemias (e.g., chronic myelocytic (granulocytic) leukemia and chronic lymphocytic leukemia)), polycythemia vera, lymphomas (e.g., Hodgkin's disease and non-Hodgkin's disease), multiple myeloma, Waldenstrom's macroglobulinemia, heavy chain disease, and solid tumors including, but not limited to, sarcomas and carcinomas such as fibrosarcoma, myxosarcoma, liposarcoma, chondrosarcoma, osteogenic sarcoma, chordoma, angiosarcoma, endotheliosarcoma, lymphangiosarcoma, lymphangioendotheliosarcoma, synovioma, mesothelioma, Ewing's tumor, leiomyosarcoma, rhabdomyosarcoma, colon carcinoma, pancreatic cancer, breast cancer, ovarian cancer, prostate cancer, squamous cell carcinoma, basal cell carcinoma, adenocarcinoma, sweat gland carcinoma, sebaceous gland carcinoma, papillary carcinoma, papillary adenocarcinomas, cystadenocarcinoma, medullary carcinoma, bronchogenic carcinoma, renal cell carcinoma, hepatoma, bile duct carcinoma, choriocarcinoma, seminoma, embryonal carcinoma, Wilm's tumor, cervical cancer, testicular tumor, lung carcinoma, small cell lung carcinoma, bladder carcinoma, epithelial carcinoma, glioma, astrocytoma, medulloblastoma, craniopharyngioma, ependymoma, pinealoma, hemangioblastoma, acoustic neuroma, oligodendroglioma, menangioma, melanoma, neuroblastoma, and retinoblastoma.

[0779] Diseases associated with increased apoptosis that could be treated, prevented, diagnosted, and/or prognosed using polynucleotides or polypeptides, as well as agonists or antagonists of the present invention, include, but are not limited to, AIDS; neurodegenerative disorders (such as Alzheimer's disease, Parkinson's disease, Amyotrophic lateral sclerosis, Retinitis pigmentosa, Cerebellar degeneration and brain tumor or prior associated disease); autoimmune disorders (such as, multiple sclerosis, Sjogren's syndrome, Hashimoto's thyroiditis, biliary cirrhosis, Behcet's disease, Crohn's disease, polymyositis, systemic lupus erythematosus and immune-related glomerulonephritis and rheumatoid arthritis) myelodysplastic syndromes (such as aplastic anemia), graft v. host disease, ischemic injury (such as that caused by myocardial infarction, stroke and reperfusion injury), liver injury (e.g., hepatitis related liver injury, ischemia/reperfusion injury, cholestosis (bile duct injury) and liver cancer); toxin-induced liver disease (such as that caused by alcohol), septic shock, cachexia and anorexia.

[0780] Wound Healing and Epithelial Cell Proliferation

[0781] In accordance with yet a further aspect of the present invention, there is provided a process for utilizing polynucleotides or polypeptides, as well as agonists or antagonists of the present invention, for therapeutic purposes, for example, to stimulate epithelial cell proliferation and basal keratinocytes for the purpose of wound healing, and to stimulate hair follicle production and healing of dermal wounds. Polynucleotides or polypeptides, as well as agonists or antagonists of the present invention, may be clinically useful in stimulating wound healing including surgical wounds, excisional wounds, deep wounds involving damage of the dermis and epidernis, eye tissue wounds, dental tissue wounds, oral cavity wounds, diabetic ulcers, dermal ulcers, cubitus ulcers, arterial ulcers, venous stasis ulcers, bums resulting from heat exposure or chemicals, and other abnormal wound healing conditions such as uremia, malnutrition, vitamin deficiencies and complications associated with systemic treatment with steroids, radiation therapy and antineoplastic drugs and antimetabolites. Polynucleotides or polypeptides, as well as agonists or antagonists of the present invention, could be used to promote dermal reestablishment subsequent to dermal loss.

[0782] Polynucleotides or polypeptides, as well as agonists or antagonists of the present invention, could be used to increase the adherence of skin grafts to a wound bed and to stimulate re-epithelialization from the wound bed. The following are types of grafts that polynucleotides or polypeptides, agonists or antagonists of the present invention, could be used to increase adherence to a wound bed: autografts, artificial skin, allografts, autodermic graft, autoepdermic grafts, avacular grafts, Blair-Brown grafts, bone graft, brephoplastic grafts, cutis graft, delayed graft, dermic graft, epidermic graft, fascia graft, full thickness graft, heterologous graft, xenograft, homologous graft, hyperplastic graft, lamellar graft, mesh graft, mucosal graft, Ollier-Thiersch graft, omenpal graft, patch graft, pedicle graft, penetrating graft, split skin graft, thick split graft. Polynucleotides or polypeptides, as well as agonists or antagonists of the present invention, can be used to promote skin strength and to improve the appearance of aged skin.

[0783] It is believed that polynucleotides or polypeptides, as well as agonists or antagonists of the present invention, will also produce changes in hepatocyte proliferation, and epithelial cell proliferation in the lung, breast, pancreas, stomach, small intestine, and large intestine. Polynucleotides or polypeptides, as well as agonists or antagonists of the present invention, could promote proliferation of epithelial cells such as sebocytes, hair follicles, hepatocytes, type II pneumocytes, mucin-producing goblet cells, and other epithelial cells and their progenitors contained within the skin, lung, liver, and gastrointestinal tract. Polynucleotides or polypeptides, agonists or antagonists of the present invention, may promote proliferation of endothelial cells, keratinocytes, and basal keratinocytes.

[0784] Polynucleotides or polypeptides, as well as agonists or antagonists of the present invention, could also be used to reduce the side effects of gut toxicity that result from radiation, chemotherapy treatments or viral infections. Polynucleotides or polypeptides, as well as agonists or antagonists of the present invention, may have a cytoprotective effect on the small intestine mucosa. Polynucleotides or polypeptides, as well as agonists or antagonists of the present invention, may also stimulate healing of mucositis (mouth ulcers) that result from chemotherapy and viral infections.

[0785] Polynucleotides or polypeptides, as well as agonists or antagonists of the present invention, could further be used in full regeneration of skin in full and partial thickness skin defects, including burns, (i.e., repopulation of hair follicles, sweat glands, and sebaceous glands), treatment of other skin defects such as psoriasis. Polynucleotides or polypeptides, as well as agonists or antagonists of the present invention, could be used to treat epidermolysis bullosa, a defect in adherence of the epidermis to the underlying dermis which results in frequent, open and painful blisters by accelerating reepithelialization of these lesions. Polynucleotides or polypeptides, as well as agonists or antagonists of the present invention, could also be used to treat gastric and doudenal ulcers and help heal by scar formation of the mucosal lining and regeneration of glandular mucosa and duodenal mucosal lining more rapidly. Inflammatory bowel diseases, such as Crohn's disease and ulcerative colitis, are diseases, which result in destruction of the mucosal surface of the small or large intestine, respectively. Thus, polynucleotides or polypeptides, as well as agonists or antagonists of the present invention, could be used to promote the resurfacing of the mucosal surface to aid more rapid healing and to prevent progression of inflammatory bowel disease. Treatment with polynucleotides or polypeptides, agonists or antagonists of the present invention, is expected to have a significant effect on the production of mucus throughout the gastrointestinal tract and could be used to protect the intestinal mucosa from injurious substances that are ingested or following surgery. Polynucleotides or polypeptides, as well as agonists or antagonists of the present invention, could be used to treat diseases associate with the under expression.

[0786] Moreover, polynucleotides or polypeptides, as well as agonists or antagonists of the present invention, could be used to prevent and heal damage to the lungs due to various pathological states. Polynucleotides or polypeptides, as well as agonists or antagonists of the present invention, could stimulate proliferation and differentiation and promote the repair of alveoli and brochiolar epithelium to prevent or treat acute or chronic lung damage. For example, emphysema, which results in the progressive loss of aveoli, and inhalation injuries, i.e., resulting from smoke inhalation and bums, that cause necrosis of the bronchiolar epithelium and alveoli could be effectively treated using polynucleotides or polypeptides, agonists or antagonists of the present invention. Also, polynucleotides or polypeptides, as well as agonists or antagonists of the present invention, could be used to stimulate the proliferation of and differentiation of type II pneumocytes, which may help treat or prevent disease such as hyaline membrane diseases, such as infant respiratory distress syndrome and bronchopulmonary displasia, in premature infants.

[0787] Polynucleotides or polypeptides, as well as agonists or antagonists of the present invention, could stimulate the proliferation and differentiation of hepatocytes and, thus, could be used to alleviate or treat liver diseases and pathologies such as fulminant liver failure caused by cirrhosis, liver damage caused by viral hepatitis and toxic substances (i.e., acetaminophen, carbon tetraholoride and other hepatotoxins known in the art). In addition, polynucleotides or polypeptides, as well as agonists or antagonists of the present invention, could be used treat or prevent the onset of diabetes mellitus. In patients with newly diagnosed Types I and II diabetes, where some islet cell function remains, polynucleotides or polypeptides, as well as agonists or antagonists of the present invention, could be used to maintain the islet function so as to alleviate, delay or prevent permanent manifestation of the disease. Also, polynucleotides or polypeptides, as well as agonists or antagonists of the present invention, could be used as an auxiliary in islet cell transplantation to improve or promote islet cell function.

[0788] Infectious Disease

[0789] Polynucleotides or polypeptides, as well as agonists or antagonists of the present invention can be used to treat or detect infectious agents. For example, by increasing the immune response, particularly increasing the proliferation and differentiation of B and/or T cells, infectious diseases may be treated. The immune response may be increased by either enhancing an existing immune response, or by initiating a new immune response. Alternatively, polynucleotides or polypeptides, as well as agonists or antagonists of the present invention may also directly inhibit the infectious agent, without necessarily eliciting an immune response.

[0790] Viruses are one example of an infectious agent that can cause disease or symptoms that can be treated or detected by a polynucleotide or polypeptide and/or agonist or antagonist of the present invention. Examples of viruses, include, but are not limited to Examples of viruses, include, but are not limited to the following DNA and RNA viruses and viral families: Arbovirus, Adenoviridae, Arenaviridae, Arterivirus, Birnaviridae, Bunyaviridae, Caliciviridae, Circoviridae, Coronaviridae, Dengue, EBV, HIV, Flaviviridae, Hepadnaviridae (Hepatitis), Herpesviridae (such as, Cytomegalovirus, Herpes Simplex, Herpes Zoster), Mononegavirus (e.g., Paramyxoviridae, Morbillivirus, Rhabdoviridae), Orthomyxoviridae (e.g., Influenza A, Influenza B, and parainfluenza), Papiloma virus, Papovaviridae, Parvoviridae, Picornaviridae, Poxviridae (such as Smallpox or Vaccinia), Reoviridae (e.g., Rotavirus), Retroviridae (HTLV-I, HTLV-II, Lentivirus), and Togaviridae (e.g., Rubivirus). Viruses falling within these families can cause a variety of diseases or symptoms, including, but not limited to: arthritis, bronchiollitis, respiratory syncytial virus, encephalitis, eye infections (e.g., conjunctivitis, keratitis), chronic fatigue syndrome, hepatitis (A, B, C, E, Chronic Active, Delta), Japanese B encephalitis, Junin, Chikungunya, Rift Valley fever, yellow fever, meningitis, opportunistic infections (e.g., AIDS), pneumonia, Burkitt's Lymphoma, chickenpox, hemorrhagic fever, Measles, Mumps, Parainfluenza, Rabies, the common cold, Polio, leukemia, Rubella, sexually transmitted diseases, skin diseases (e.g., Kaposi's, warts), and viremia. polynucleotides or polypeptides, or agonists or antagonists of the invention, can be used to treat or detect any of these symptoms or diseases. In specific embodiments, polynucleotides, polypeptides, or agonists or antagonists of the invention are used to treat: meningitis, Dengue, EBV, and/or hepatitis (e.g., hepatitis B). In an additional specific embodiment polynucleotides, polypeptides, or agonists or antagonists of the invention are used to treat patients nonresponsive to one or more other commercially available hepatitis vaccines. In a further specific embodiment polynucleotides, polypeptides, or agonists or antagonists of the invention are used to treat AIDS.

[0791] Similarly, bacterial or fungal agents that can cause disease or symptoms and that can be treated or detected by a polynucleotide or polypeptide and/or agonist or antagonist of the present invention include, but not limited to, include, but not limited to, the following Gram-Negative and Gram-positive bacteria and bacterial families and fungi: Actinomycetales (e.g., Corynebacterium, Mycobacterium, Norcardia), Cryptococcus neoformans, Aspergillosis, Bacillaceae (e.g., Anthrax, Clostridium), Bacteroidaceae, Blastomycosis, Bordetella, Borrelia (e.g., Borrelia burgdorferi, Brucellosis, Candidiasis, Campylobacter, Coccidioidomycosis, Cryptococcosis, Dermatocycoses, E. coli (e.g., Enterotoxigenic E. coli and Enterohemorrhagic E. coli), Enterobacteriaceae (Klebsiella, Salmonella (e.g., Salmonella typhi, and Salmonella paratyphi), Serratia, Yersinia), Erysipelothrix, Helicobacter, Legionellosis, Leptospirosis, Listeria, Mycoplasmatales, Mycobacterium leprae, Vibrio cholerae, Neisseriaceae (e.g., Acinetobacter, Gonorrhea, Menigococcal), Meisseria meningitidis, Pasteurellacea Infections (e.g., Actinobacillus, Heamophilus (e.g., Heamophilus influenza type B), Pasteurella), Pseudomonas, Rickettsiaceae, Chlamydiaceae, Treponema spp., Leptospira spp., Shigella spp., Staphylococcal, Meningiococcal, Pneumococcal and Streptococcal (e.g., Streptococcus pneumoniae and Group B Streptococcus). These bacterial or fungal families can cause the following diseases or symptoms, including, but not limited to: bacteremia, endocarditis, eye infections (conjunctivitis, tuberculosis, uveitis), gingivitis, opportunistic infections (e.g., AIDS related infections), paronychia, prosthesis-related infections, Reiter's Disease, respiratory tract infections, such as Whooping Cough or Empyema, sepsis, Lyme Disease, Cat-Scratch Disease, Dysentery, Paratyphoid Fever, food poisoning, Typhoid, pneumonia, Gonorrhea, meningitis (e.g., mengitis types A and B), Chlamydia, Syphilis, Diphtheria, Leprosy, Paratuberculosis, Tuberculosis, Lupus, Botulism, gangrene, tetanus, impetigo, Rheumatic Fever, Scarlet Fever, sexually transmitted diseases, skin diseases (e.g., cellulitis, dermatocycoses), toxemia, urinary tract infections, wound infections. Polynucleotides or polypeptides, agonists or antagonists of the invention, can be used to treat or detect any of these symptoms or diseases. In specific embodiments, Ppolynucleotides, polypeptides, agonists or antagonists of the invention are used to treat: tetanus, Diptheria, botulism, and/or meningitis type B.

[0792] Moreover, parasitic agents causing disease or symptoms that can be treated or detected by a polynucleotide or polypeptide and/or agonist or antagonist of the present invention include, but not limited to, the following families or class: Amebiasis, Babesiosis, Coccidiosis, Cryptosporidiosis, Dientamoebiasis, Dourine, Ectoparasitic, Giardiasis, Helminthiasis, Leishmaniasis, Theileriasis, Toxoplasmosis, Trypanosomiasis, and Trichomonas and Sporozoans (e.g., Plasmodium virax, Plasmodium falciparium, Plasmodium malariae and Plasmodium ovale). These parasites can cause a variety of diseases or symptoms, including, but not limited to: Scabies, Trombiculiasis, eye infections, intestinal disease (e.g., dysentery, giardiasis), liver disease, lung disease, opportunistic infections (e.g., AIDS related), malaria, pregnancy complications, and toxoplasmosis. polynucleotides or polypeptides, or agonists or antagonists of the invention, can be used to treat or detect any of these symptoms or diseases.

[0793] Polynucleotides or polypeptides, as well as agonists or antagonists of the present invention of the present invention could either be by administering an effective amount of a polypeptide to the patient, or by removing cells from the patient, supplying the cells with a polynucleotide of the present invention, and returning the engineered cells to the patient (ex vivo therapy). Moreover, the polypeptide or polynucleotide of the present invention can be used as an antigen in a vaccine to raise an immune response against infectious disease.

[0794] Regeneration

[0795] Polynucleotides or polypeptides, as well as agonists or antagonists of the present invention can be used to differentiate, proliferate, and attract cells, leading to the regeneration of tissues. (See, Science 276:59-87 (1997).) The regeneration of tissues could be used to repair, replace, or protect tissue damaged by congenital defects, trauma (wounds, burns, incisions, or ulcers), age, disease (e.g. osteoporosis, osteocarthritis, periodontal disease, liver failure), surgery, including cosmetic plastic surgery, fibrosis, reperfusion injury, or systemic cytokine damage.

[0796] Tissues that could be regenerated using the present invention include organs (e.g., pancreas, liver, intestine, kidney, skin, endothelium), muscle (smooth, skeletal or cardiac), vasculature (including vascular and lymphatics), nervous, hematopoietic, and skeletal (bone, cartilage, tendon, and ligament) tissue. Preferably, regeneration occurs without or decreased scarring. Regeneration also may include angiogenesis.

[0797] Moreover, polynucleotides or polypeptides, as well as agonists or antagonists of the present invention, may increase regeneration of tissues difficult to heal. For example, increased tendon/ligament regeneration would quicken recovery time after damage. Polynucleotides or polypeptides, as well as agonists or antagonists of the present invention could also be used prophylactically in an effort to avoid damage. Specific diseases that could be treated include of tendinitis, carpal tunnel syndrome, and other tendon or ligament defects. A further example of tissue regeneration of non-healing wounds includes pressure ulcers, ulcers associated with vascular insufficiency, surgical, and traumatic wounds.

[0798] Similarly, nerve and brain tissue could also be regenerated by using polynucleotides or polypeptides, as well as agonists or antagonists of the present invention, to proliferate and differentiate nerve cells. Diseases that could be treated using this method include central and peripheral nervous system diseases, neuropathies, or mechanical and traumatic disorders (e.g., spinal cord disorders, head trauma, cerebrovascular disease, and stoke). Specifically, diseases associated with peripheral nerve injuries, peripheral neuropathy (e.g., resulting from chemotherapy or other medical therapies), localized neuropathies, and central nervous system diseases (e.g., Alzheimer's disease, Parkinson's disease, Huntington's disease, amyotrophic lateral sclerosis, and Shy-Drager syndrome), could all be treated using the polynucleotides or polypeptides, as well as agonists or antagonists of the present invention.

[0799] Chemotaxis

[0800] Polynucleotides or polypeptides, as well as agonists or antagonists of the present invention may have chemotaxis activity. A chemotaxic molecule attracts or mobilizes cells (e.g., monocytes, fibroblasts, neutrophils, T-cells, mast cells, eosinophils, epithelial and/or endothelial cells) to a particular site in the body, such as inflammation, infection, or site of hyperproliferation. The mobilized cells can then fight off and/or heal the particular trauma or abnormality.

[0801] Polynucleotides or polypeptides, as well as agonists or antagonists of the present invention may increase chemotaxic activity of particular cells. These chemotactic molecules can then be used to treat inflammation, infection, hyperproliferative disorders, or any immune system disorder by increasing the number of cells targeted to a particular location in the body. For example, chemotaxic molecules can be used to treat wounds and other trauma to tissues by attracting immune cells to the injured location. Chemotactic molecules of the present invention can also attract fibroblasts, which can be used to treat wounds.

[0802] It is also contemplated that polynucleotides or polypeptides, as well as agonists or antagonists of the present invention may inhibit chemotactic activity. These molecules could also be used to treat disorders. Thus, polynucleotides or polypeptides, as well as agonists or antagonists of the present invention could be used as an inhibitor of chemotaxis.

[0803] Binding Activity

[0804] A polypeptide of the present invention may be used to screen for molecules that bind to the polypeptide or for molecules to which the polypeptide binds. The binding of the polypeptide and the molecule may activate (agonist), increase, inhibit (antagonist), or decrease activity of the polypeptide or the molecule bound. Examples of such molecules include antibodies, oligonucleotides, proteins (e.g., receptors),or small molecules.

[0805] Preferably, the molecule is closely related to the natural ligand of the polypeptide, e.g., a fragment of the ligand, or a natural substrate, a ligand, a structural or functional mimetic. (See, Coligan et al., Current Protocols in Immunology 1(2):Chapter 5 (1991).) Similarly, the molecule can be closely related to the natural receptor to which the polypeptide binds, or at least, a fragment of the receptor capable of being bound by the polypeptide (e.g., active site). In either case, the molecule can be rationally designed using known techniques.

[0806] Preferably, the screening for these molecules involves producing appropriate cells, which express the polypeptide. Preferred cells include cells from mammals, yeast, Drosophila, or E. coli. Cells expressing the polypeptide (or cell membrane containing the expressed polypeptide) are then preferably contacted with a test compound potentially containing the molecule to observe binding, stimulation, or inhibition of activity of either the polypeptide or the molecule.

[0807] The assay may simply test binding of a candidate compound to the polypeptide, wherein binding is detected by a label, or in an assay involving competition with a labeled competitor. Further, the assay may test whether the candidate compound results in a signal generated by binding to the polypeptide.

[0808] Alternatively, the assay can be carried out using cell-free preparations, polypeptide/molecule affixed to a solid support, chemical libraries, or natural product mixtures. The assay may also simply comprise the steps of mixing a candidate compound with a solution containing a polypeptide, measuring polypeptide/molecule activity or binding, and comparing the polypeptide/molecule activity or binding to a standard.

[0809] Preferably, an ELISA assay can measure polypeptide level or activity in a sample (e.g., biological sample) using a monoclonal or polyclonal antibody. The antibody can measure polypeptide level or activity by either binding, directly or indirectly, to the polypeptide or by competing with the polypeptide for a substrate.

[0810] Additionally, the receptor to which the polypeptide of the present invention binds can be identified by numerous methods known to those of skill in the art, for example, ligand panning and FACS sorting (Coligan, et al., Current Protocols in Immun., 1(2), Chapter 5, (1991)). For example, expression cloning is employed wherein polyadenylated RNA is prepared from a cell responsive to the polypeptides, for example, NIH3T3 cells which are known to contain multiple receptors for the FGF family proteins, and SC-3 cells, and a CDNA library created from this RNA is divided into pools and used to transfect COS cells or other cells that are not responsive to the polypeptides. Transfected cells which are grown on glass slides are exposed to the polypeptide of the present invention, after they have been labeled. The polypeptides can be labeled by a variety of means including iodination or inclusion of a recognition site for a site-specific protein kinase.

[0811] Following fixation and incubation, the slides are subjected to auto-radiographic analysis. Positive pools are identified and sub-pools are prepared and re-transfected using an iterative sub-pooling and re-screening process, eventually yielding single clones that encode the putative receptor.

[0812] As an alternative approach for receptor identification, the labeled polypeptides can be photoaffinity linked with cell membrane or extract preparations that express the receptor molecule. Cross-linked material is resolved by PAGE analysis and exposed to X-ray film. The labeled complex containing the receptors of the polypeptides can be excised, resolved into peptide fragments, and subjected to protein microsequencing. The amino acid sequence obtained from microsequencing would be used to design a set of degenerate oligonucleotide probes to screen a cDNA library to identify the genes encoding the putative receptors.

[0813] Moreover, the techniques of gene-shuffling, motif-shuffling, exon-shuffling, and/or codon-shuffling (collectively referred to as “DNA shuffling”) may be employed to modulate the activities of the polypeptide of the present invention thereby effectively generating agonists and antagonists of the polypeptide of the present invention. See generally, U.S. Pat. Nos. 5,605,793, 5,811,238, 5,830,721, 5,834,252, and 5,837,458, and Patten, P. A., et al., Curr. Opinion Biotechnol. 8:724-33 (1997); Harayama, S. Trends Biotechnol. 16(2):76-82 (1998); Hansson L. O., et al., J. Mol. Biol. 287:265-76 (1999); and Lorenzo, M. M. and Blasco, R. Biotechniques 24(2):308-13 (1998); each of these patents and publications are hereby incorporated by reference). In one embodiment, alteration of polynucleotides and corresponding polypeptides may be achieved by DNA shuffling. DNA shuffling involves the assembly of two or more DNA segments into a desired molecule by homologous, or site-specific, recombination. In another embodiment, polynucleotides and corresponding polypeptides may be altered by being subjected to random mutagenesis by error-prone PCR, random nucleotide insertion or other methods prior to recombination. In another embodiment, one or more components, motifs, sections, parts, domains, fragments, etc., of the polypeptide of the present invention may be recombined with one or more components, motifs, sections, parts, domains, fragments, etc. of one or more heterologous molecules. In preferred embodiments, the heterologous molecules are family members. In further preferred embodiments, the heterologous molecule is a growth factor such as, for example, platelet-derived growth factor (PDGF), insulin-like growth factor (IGF-I), transforming growth factor (TGF)-alpha, epidermal growth factor (EGF), fibroblast growth factor (FGF), TGF-beta, bone morphogenetic protein (BMP)-2, BMP-4, BMP-5, BMP-6, BMP-7, activins A and B, decapentaplegic(dpp), 60A, OP-2, dorsalin, growth differentiation factors (GDFs), nodal, MIS, inhibin-alpha, TGF-betal, TGF-beta2, TGF-beta3, TGF-beta5, and glial-derived neurotrophic factor (GDNF).

[0814] Other preferred fragments are biologically active fragments of the polypeptide of the present invention. Biologically active fragments are those exhibiting activity similar, but not necessarily identical, to an activity of the polypeptide of the present invention. The biological activity of the fragments may include an improved desired activity, or a decreased undesirable activity.

[0815] Additionally, this invention provides a method of screening compounds to identify those which modulate the action of the polypeptide of the present invention. An example of such an assay comprises combining a mammalian fibroblast cell, the polypeptide of the present invention, the compound to be screened and ³[H] thymidine under cell culture conditions where the fibroblast cell would normally proliferate. A control assay may be performed in the absence of the compound to be screened and compared to the amount of fibroblast proliferation in the presence of the compound to determine if the compound stimulates proliferation by determining the uptake of ³ [H] thymidine in each case. The amount of fibroblast cell proliferation is measured by liquid scintillation chromatography, which measures the incorporation of ³[H] thymidine. Both agonist and antagonist compounds may be identified by this procedure.

[0816] In another method, a mammalian cell or membrane preparation expressing a receptor for a polypeptide of the present invention is incubated with a labeled polypeptide of the present invention in the presence of the compound. The ability of the compound to enhance or block this interaction could then be measured. Alternatively, the response of a known second messenger system following interaction of a compound to be screened and the receptor is measured and the ability of the compound to bind to the receptor and elicit a second messenger response is measured to determine if the compound is a potential agonist or antagonist. Such second messenger systems include but are not limited to, cAMP guanylate cyclase, ion channels or phosphoinositide hydrolysis.

[0817] All of these above assays can be used as diagnostic or prognostic markers. The molecules discovered using these assays can be used to treat disease or to bring about a particular result in a patient (e.g., blood vessel growth) by activating or inhibiting the polypeptide/molecule. Moreover, the assays can discover agents which may inhibit or enhance the production of the polypeptides of the invention from suitably manipulated cells or tissues.

[0818] Therefore, the invention includes a method of identifying compounds which bind to a polypeptide of the invention comprising the steps of: (a) incubating a candidate binding compound with a polypeptide of the present invention; and (b) determining if binding has occurred. Moreover, the invention includes a method of identifying agonists/antagonists comprising the steps of: (a) incubating a candidate compound with a polypeptide of the present invention, (b) assaying a biological activity, and (b) determining if a biological activity of the polypeptide has been altered.

[0819] Targeted Delivery

[0820] In another embodiment, the invention provides a method of delivering compositions to targeted cells expressing a receptor for a polypeptide of the invention, or cells expressing a cell bound form of a polypeptide of the invention.

[0821] As discussed herein, polypeptides or antibodies of the invention may be associated with heterologous polypeptides, heterologous nucleic acids, toxins, or prodrugs via hydrophobic, hydrophilic, ionic and/or covalent interactions. In one embodiment, the invention provides a method for the specific delivery of compositions of the invention to cells by administering polypeptides of the invention (including antibodies) that are associated with heterologous polypeptides or nucleic acids. In one example, the invention provides a method for delivering a therapeutic protein into the targeted cell. In another example, the invention provides a method for delivering a single stranded nucleic acid (e.g., antisense or ribozymes) or double stranded nucleic acid (e.g., DNA that can integrate into the cell's genome or replicate episomally and that can be transcribed) into the targeted cell.

[0822] In another embodiment, the invention provides a method for the specific destruction of cells (e.g., the destruction of tumor cells) by administering polypeptides of the invention (e.g., polypeptides of the invention or antibodies of the invention) in association with toxins or cytotoxic prodrugs.

[0823] By “toxin” is meant compounds that bind and activate endogenous cytotoxic effector systems, radioisotopes, holotoxins, modified toxins, catalytic subunits of toxins, or any molecules or enzymes not normally present in or on the surface of a cell that under defined conditions cause the cell's death. Toxins that may be used according to the methods of the invention include, but are not limited to, radioisotopes known in the art, compounds such as, for example, antibodies (or complement fixing containing portions thereof) that bind an inherent or induced endogenous cytotoxic effector system, thymidine kinase, endonuclease, RNAse, alpha toxin, ricin, abrin, Pseudomonas exotoxin A, diphtheria toxin, saporin, momordin, gelonin, pokeweed antiviral protein, alpha-sarcin and cholera toxin. By “cytotoxic prodrug” is meant a non-toxic compound that is converted by an enzyme, normally present in the cell, into a cytotoxic compound. Cytotoxic prodrugs that may be used according to the methods of the invention include, but are not limited to, glutamyl derivatives of benzoic acid mustard alkylating agent, phosphate derivatives of etoposide or mitomycin C, cytosine arabinoside, daunorubisin, and phenoxyacetamide derivatives of doxorubicin.

[0824] Drug Screening

[0825] Further contemplated is the use of the polypeptides of the present invention, or the polynucleotides encoding these polypeptides, to screen for molecules, which modify the activities of the polypeptides of the present invention. Such a method would include contacting the polypeptide of the present invention with a selected compound(s) suspected of having antagonist or agonist activity, and assaying the activity of these polypeptides following binding.

[0826] This invention is particularly useful for screening therapeutic compounds by using the polypeptides of the present invention, or binding fragments thereof, in any of a variety of drug screening techniques. The polypeptide or fragment employed in such a test may be affixed to a solid support, expressed on a cell surface, free in solution, or located intracellularly. One method of drug screening utilizes eukaryotic or prokaryotic host cells which are stably transformed with recombinant nucleic acids expressing the polypeptide or fragment. Drugs are screened against such transformed cells in competitive binding assays. One may measure, for example, the formulation of complexes between the agent being tested and a polypeptide of the present invention.

[0827] Thus, the present invention provides methods of screening for drugs or any other agents, which affect activities mediated by the polypeptides of the present invention. These methods comprise contacting such an agent with a polypeptide of the present invention or a fragment thereof and assaying for the presence of a complex between the agent and the polypeptide or a fragment thereof, by methods well known in the art. In such a competitive binding assay, the agents to screen are typically labeled. Following incubation, free agent is separated from that present in bound form, and the amount of free or uncomplexed label is a measure of the ability of a particular agent to bind to the polypeptides of the present invention.

[0828] Another technique for drug screening provides high throughput screening for compounds having suitable binding affinity to the polypeptides of the present invention, and is described in great detail in European Patent Application 84/03564, published on Sep. 13, 1984, which is incorporated herein by reference herein. Briefly stated, large numbers of different small peptide test compounds are synthesized on a solid substrate, such as plastic pins or some other surface. The peptide test compounds are reacted with polypeptides of the present invention and washed. Bound polypeptides are then detected by methods well known in the art. Purified polypeptides are coated directly onto plates for use in the aforementioned drug screening techniques. In addition, non-neutralizing antibodies may be used to capture the peptide and immobilize it on the solid support.

[0829] This invention also contemplates the use of competitive drug screening assays in which neutralizing antibodies capable of binding polypeptides of the present invention specifically compete with a test compound for binding to the polypeptides or fragments thereof. In this manner, the antibodies are used to detect the presence of any peptide which shares one or more antigenic epitopes with a polypeptide of the invention.

[0830] Antisense And Ribozyme (Antagonists)

[0831] In specific embodiments, antagonists according to the present invention are nucleic acids corresponding to the sequences contained in SEQ ID NO:X, or the complementary strand thereof, and/or to cDNA sequences contained in cDNA Clone ID NO:Z identified for example, in Table 1A. In one embodiment, antisense sequence is generated internally, by the organism, in another embodiment, the antisense sequence is separately administered (see, for example, O° C.onnor, J., Neurochem. 56:560 (1991). Oligodeoxynucleotides as Antisense Inhibitors of Gene Expression, CRC Press, Boca Raton, Fla. (1988). Antisense technology can be used to control gene expression through antisense DNA or RNA, or through triple-helix formation. Antisense techniques are discussed for example, in Okano, J., Neurochem. 56:560 (1991); Oligodeoxynucleotides as Antisense Inhibitors of Gene Expression, CRC Press, Boca Raton, Fla. (1988). Triple helix formation is discussed in, for instance, Lee et al., Nucleic Acids Research 6:3073 (1979); Cooney et al., Science 241:456 (1988); and Dervan et al., Science 251:1300 (1991). The methods are based on binding of a polynucleotide to a complementary DNA or RNA.

[0832] For example, the use of c-myc and c-myb antisense RNA constructs to inhibit the growth of the non-lymphocytic leukemia cell line HL-60 and other cell lines was previously described. (Wickstrom et al. (1988); Anfossi et al. (1989)). These experiments were performed in vitro by incubating cells with the oligoribonucleotide. A similar procedure for in vivo use is described in WO 91/15580. Briefly, a pair of oligonucleotides for a given antisense RNA is produced as follows: A sequence complimentary to the first 15 bases of the open reading frame is flanked by an EcoRl site on the 5′ end and a HindIII site on the 3′ end. Next, the pair of oligonucleotides is heated at 90° C. for one minute and then annealed in 2× ligation buffer (20 mM TRIS HCl pH 7.5, 10 mM MgCl2, 10 MM dithiothreitol (DTT) and 0.2 mM ATP) and then ligated to the EcoR1/Hind III site of the retroviral vector PMV7 (WO 91/15580).

[0833] For example, the 5′ coding portion of a polynucleotide that encodes the polypeptide of the present invention may be used to design an antisense RNA oligonucleotide of from about 10 to 40 base pairs in length. A DNA oligonucleotide is designed to be complementary to a region of the gene involved in transcription thereby preventing transcription and the production of the receptor. The antisense RNA oligonucleotide hybridizes to the mRNA in vivo and blocks translation of the mRNA molecule into receptor polypeptide.

[0834] In one embodiment, the antisense nucleic acid of the invention is produced intracellularly by transcription from an exogenous sequence. For example, a vector or a portion thereof, is transcribed, producing an antisense nucleic acid (RNA) of the invention. Such a vector would contain a sequence encoding the antisense nucleic acid. Such a vector can remain episomal or become chromosomally integrated, as long as it can be transcribed to produce the desired antisense RNA. Such vectors can be constructed by recombinant DNA technology methods standard in the art. Vectors can be plasmid, viral, or others known in the art, used for replication and expression in vertebrate cells. Expression of the sequence encoding the polypeptide of the present invention or fragments thereof, can be by any promoter known in the art to act in vertebrate, preferably human cells. Such promoters can be inducible or constitutive. Such promoters include, but are not limited to, the SV40 early promoter region (Bemoist and Chambon, Nature 29:304-310 (1981), the promoter contained in the 3′ long terminal repeat of Rous sarcoma virus (Yamamoto et al., Cell 22:787-797 (1980), the herpes thymidine promoter (Wagner et al., Proc. Natl. Acad. Sci. U.S.A. 78:1441-1445 (1981), the regulatory sequences of the metallothionein gene (Brinster, et al., Nature 296:39-42 (1982)), etc.

[0835] The antisense nucleic acids of the invention comprise a sequence complementary to at least a portion of an RNA transcript of a gene of the present invention. However, absolute complementarity, although preferred, is not required. A sequence “complementary to at least a portion of an RNA,” referred to herein, means a sequence having sufficient complementarity to be able to hybridize with the RNA, forming a stable duplex; in the case of double stranded antisense nucleic acids, a single strand of the duplex DNA may thus be tested, or triplex formation may be assayed. The ability to hybridize will depend on both the degree of complementarity and the length of the antisense nucleic acid. Generally, the larger the hybridizing nucleic acid, the more base mismatches with a RNA it may contain and still form a stable duplex (or triplex as the case may be). One skilled in the art can ascertain a tolerable degree of mismatch by use of standard procedures to determine the melting point of the hybridized complex.

[0836] Oligonucleotides that are complementary to the 5′ end of the message, e.g., the 5′ untranslated sequence up to and including the AUG initiation codon, should work most efficiently at inhibiting translation. However, sequences complementary to the 3′ untranslated sequences of mRNAs have been shown to be effective at inhibiting translation of mRNAs as well. See generally, Wagner, R., 1994, Nature 372:333-335. Thus, oligonucleotides complementary to either the 5′- or 3′- non- translated, non-coding regions of polynucleotide sequences described herein could be used in an antisense approach to inhibit translation of endogenous mRNA. Oligonucleotides complementary to the 5′ untranslated region of the mRNA should include the complement of the AUG start codon. Antisense oligonucleotides complementary to mRNA coding regions are less efficient inhibitors of translation but could be used in accordance with the invention. Whether designed to hybridize to the 5′-, 3′- or coding region of mRNA of the present invention, antisense nucleic acids should be at least six nucleotides in length, and are preferably oligonucleotides ranging from 6 to about 50 nucleotides in length. In specific aspects the oligonucleotide is at least 10 nucleotides, at least 17 nucleotides, at least 25 nucleotides or at least 50 nucleotides.

[0837] The polynucleotides of the invention can be DNA or RNA or chimeric mixtures or derivatives or modified versions thereof, single-stranded or double-stranded. The oligonucleotide can be modified at the base moiety, sugar moiety, or phosphate backbone, for example, to improve stability of the molecule, hybridization, etc. The oligonucleotide may include other appended groups such as peptides (e.g., for targeting host cell receptors in vivo), or agents facilitating transport across the cell membrane (see, e.g., Letsinger et al., 1989, Proc. Natl. Acad. Sci. U.S.A. 86:6553-6556; Lemaitre et al., 1987, Proc. Natl. Acad. Sci. 84:648-652; PCT Publication No. WO88/09810, published Dec. 15, 1988) or the blood-brain barrier (see, e.g., PCT Publication No. WO89/10134, published Apr. 25, 1988), hybridization-triggered cleavage agents. (See, e.g., Krol et al., 1988, BioTechniques 6:958-976) or intercalating agents. (See, e.g., Zon, 1988, Pharm. Res. 5:539-549). To this end, the oligonucleotide may be conjugated to another molecule, e.g., a peptide, hybridization triggered cross-linking agent, transport agent, hybridization-triggered cleavage agent, etc.

[0838] The antisense oligonucleotide may comprise at least one modified base moiety which is selected from the group including, but not limited to, 5-fluorouracil, 5-bromouracil, 5-chlorouracil, 5-iodouracil, hypoxanthine, xantine, 4-acetylcytosine, 5-(carboxyhydroxylmethyl) uracil, 5-carboxymethylaminomethyl-2-thiouridine, 5-carboxymethylaminomethyluracil, dihydrouracil, beta-D-galactosylqueosine, inosine, N6-isopentenyladenine, 1-methylguanine, 1-methylinosine, 2,2-dimethylguanine, 2-methyladenine, 2-methylguanine, 3-methylcytosine, 5-methylcytosine, N6-adenine, 7-methylguanine, 5-methylaminomethyluracil, -5-methoxyaminomethyl-2-thiouracil, beta-D-mannosylqueosine, 5′-methoxycarboxymethyluracil, 5-methoxyuracil, 2-methylthio-N6-isopentenyladenine, uracil-5-oxyacetic acid (v), wybutoxosine, pseudouracil, queosine, 2-thiocytosine, 5-methyl-2-thiouracil, 2-thiouracil, 4-thiouracil, 5-methyluracil, uracil-5-oxyacetic acid methylester, uracil-5-oxyacetic acid (v), 5-methyl-2-thiouracil, 3-(3-amino-3-N-2-carboxypropyl) uracil, (acp3)w, and 2,6-diaminopurine.

[0839] The antisense oligonucleotide may also comprise at least one modified sugar moiety selected from the group including, but not limited to, arabinose, 2-fluoroarabinose, xylulose, and hexose.

[0840] In yet another embodiment, the antisense oligonucleotide comprises at least one modified phosphate backbone selected from the group including, but not limited to, a phosphorothioate, a phosphorodithioate, a phosphoramidothioate, a phosphoramidate, a phosphordiamidate, a methylphosphonate, an alkyl phosphotriester, and a formacetal or analog thereof.

[0841] In yet another embodiment, the antisense oligonucleotide is an a-anomeric oligonucleotide. An a-anomeric oligonucleotide forms specific double-stranded hybrids with complementary RNA in which, contrary to the usual b-units, the strands run parallel to each other (Gautier et al., 1987, Nucl. Acids Res. 15:6625-6641). The oligonucleotide is a 2′-0-methylribonucleotide (Inoue et al., 1987, Nucl. Acids Res. 15:6131-6148), or a chimeric RNA-DNA analogue (Inoue et al., 1987, FEBS Lett. 215:327-330).

[0842] Polynucleotides of the invention may be synthesized by standard methods known in the art, e.g. by use of an automated DNA synthesizer (such as are commercially available from Biosearch, Applied Biosystems, etc.). As examples, phosphorothioate oligonucleotides may be synthesized by the method of Stein et al. (1988, Nucl. Acids Res. 16:3209), methylphosphonate oligonucleotides can be prepared by use of controlled pore glass polymer supports (Sarin et al., 1988, Proc. Natl. Acad. Sci. U.S.A. 85:7448-7451), etc.

[0843] While antisense nucleotides complementary to the coding region sequence could be used, those complementary to the transcribed untranslated region are most preferred.

[0844] Potential antagonists according to the invention also include catalytic RNA, or a ribozyme (See, e.g., PCT International Publication WO 90/11364, published October 4, 1990; Sarver et al, Science 247:1222-1225 (1990). While ribozymes that cleave mRNA at site specific recognition sequences can be used to destroy mRNAs, the use of hammerhead ribozymes is preferred. Hammerhead ribozymes cleave mRNAs at locations dictated by flanking regions that form complementary base pairs with the target mRNA. The sole requirement is that the target mRNA have the following sequence of two bases: 5′-UG-3′. The construction and production of hammerhead ribozymes is well known in the art and is described more fully in Haseloff and Gerlach, Nature 334:585-591 (1988). There are numerous potential hammerhead ribozyme cleavage sites within the nucleotide sequence of SEQ ID NO:X. Preferably, the ribozyme is engineered so that the cleavage recognition site is located near the 5′ end of the mRNA; i.e., to increase efficiency and minimize the intracellular accumulation of non-functional mRNA transcripts.

[0845] As in the antisense approach, the ribozymes of the invention can be composed of modified oligonucleotides (e.g. for improved stability, targeting, etc.) and should be delivered to cells, which express in vivo. DNA constructs encoding the ribozyme may be introduced into the cell in the same manner as described above for the introduction of antisense encoding DNA. A preferred method of delivery involves using a DNA construct “encoding” the ribozyme under the control of a strong constitutive promoter, such as, for example, pol III or pol II promoter, so that transfected cells will produce sufficient quantities of the ribozyme to destroy endogenous messages and inhibit translation. Since ribozymes unlike antisense molecules, are catalytic, a lower intracellular concentration is required for efficiency.

[0846] Antagonist/agonist compounds may be employed to inhibit the cell growth and proliferation effects of the polypeptides of the present invention on neoplastic cells and tissues, i.e. stimulation of angiogenesis of tumors, and, therefore, retard or prevent abnormal cellular growth and proliferation, for example, in tumor formation or growth.

[0847] The antagonist/agonist may also be employed to prevent hyper-vascular diseases, and prevent the proliferation of epithelial lens cells after extracapsular cataract surgery. Prevention of the mitogenic activity of the polypeptides of the present invention may also be desirous in cases such as restenosis after balloon angioplasty.

[0848] The antagonist/agonist may also be employed to prevent the growth of scar tissue during wound healing.

[0849] The antagonist/agonist may also be employed to treat the diseases described herein.

[0850] Thus, the invention provides a method of treating disorders or diseases, including but not limited to the disorders or diseases listed throughout this application, associated with overexpression of a polynucleotide of the present invention by administering to a patient (a) an antisense molecule directed to the polynucleotide of the present invention, and/or (b) a ribozyme directed to the polynucleotide of the present invention.

[0851] Binding Peptides and Other Molecules

[0852] The invention also encompasses screening methods for identifying polypeptides and nonpolypeptides that bind musculoskeletal system antigen polypeptides, and the musculoskeletal system antigen binding molecules identified thereby. These binding molecules are useful, for example, as agonists and antagonists of the musculoskeletal system antigen polypeptides. Such agonists and antagonists can be used, in accordance with the invention, in the therapeutic embodiments described in detail, below.

[0853] This method comprises the steps of:

[0854] contacting musculoskeletal system antigen polypeptides or musculoskeletal system antigen-like polypeptides with a plurality of molecules; and

[0855] identifying a molecule that binds the musculoskeletal system antigen polypeptides or musculoskeletal system antigen-like polypeptides.

[0856] The step of contacting the musculoskeletal system antigen polypeptides or musculoskeletal system antigen-like polypeptides with the plurality of molecules may be effected in a number of ways. For example, one may contemplate immobilizing the musculoskeletal system antigen polypeptides or musculoskeletal system antigen-like polypeptides on a solid support and bringing a solution of the plurality of molecules in contact with the immobilized musculoskeletal system antigen polypeptides or musculoskeletal system antigen-like polypeptides. Such a procedure would be akin to an affinity chromatographic process, with the affinity matrix being comprised of the immobilized musculoskeletal system antigen polypeptides or musculoskeletal system antigen-like polypeptides. The molecules having a selective affinity for the musculoskeletal system antigen polypeptides or musculoskeletal system antigen-like polypeptides can then be purified by affinity selection. The nature of the solid support, process for attachment of the musculoskeletal system antigen polypeptides or musculoskeletal system antigen-like polypeptides to the solid support, solvent, and conditions of the affinity isolation or selection are largely conventional and well known to those of ordinary skill in the art.

[0857] Alternatively, one may also separate a plurality of polypeptides into substantially separate fractions comprising a subset of or individual polypeptides. For instance, one can separate the plurality of polypeptides by gel electrophoresis, column chromatography, or like method known to those of ordinary skill for the separation of polypeptides. The individual polypeptides can also be produced by a transformed host cell in such a way as to be expressed on or about its outer surface (e.g., a recombinant phage). Individual isolates can then be “probed” by the musculoskeletal system antigen polypeptides or musculoskeletal system antigen-like polypeptides, optionally in the presence of an inducer should one be required for expression, to determine if any selective affinity interaction takes place between the musculoskeletal system antigen polypeptides or musculoskeletal system antigen-like polypeptides and the individual clone. Prior to contacting the musculoskeletal system antigen polypeptides or musculoskeletal system antigen-like polypeptides with each fraction comprising individual polypeptides, the polypeptides could first be transferred to a solid support for additional convenience. Such a solid support may simply be a piece of filter membrane, such as one made of nitrocellulose or nylon. In this manner, positive clones could be identified from a collection of transformed host cells of an expression library, which harbor a DNA construct encoding a polypeptide having a selective affinity for musculoskeletal system antigen polypeptides or musculoskeletal system antigen-like polypeptides. Furthermore, the amino acid sequence of the polypeptide having a selective affinity for the musculoskeletal system antigen polypeptides or musculoskeletal system antigen-like polypeptides can be determined directly by conventional means or the coding sequence of the DNA encoding the polypeptide can frequently be determined more conveniently. The primary sequence can then be deduced from the corresponding DNA sequence. If the amino acid sequence is to be determined from the polypeptide itself, one may use microsequencing techniques. The sequencing technique may include mass spectroscopy.

[0858] In certain situations, it may be desirable to wash away any unbound musculoskeletal system antigen polypeptides or musculoskeletal system antigen-like polypeptides, or alternatively, unbound polypeptides, from a mixture of the musculoskeletal system antigen polypeptides or musculoskeletal system antigen-like polypeptides and the plurality of polypeptides prior to attempting to determine or to detect the presence of a selective affinity interaction. Such a wash step may be particularly desirable when the musculoskeletal system antigen polypeptides or musculoskeletal system antigen-like polypeptides or the plurality of polypeptides is bound to a solid support.

[0859] The plurality of molecules provided according to this method may be provided by way of diversity libraries, such as random or combinatorial peptide or nonpeptide libraries, which can be screened for molecules that specifically bind musculoskeletal system antigen polypeptides. Many libraries are known in the art that can be used, e.g., chemically synthesized libraries, recombinant (e.g., phage display libraries), and in vitro translation-based libraries. Examples of chemically synthesized libraries are described in Fodor et al., 1991, Science 251:767-773; Houghten et al., 1991, Nature 354:84-86; Lam et al., 1991, Nature 354:82-84; Medynski, 1994, Bio/Technology 12:709-710;Gallop et al., 1994, J. Medicinal Chemistry 37(9):1233-1251; Ohlmeyer et al., 1993, Proc. Natl. Acad. Sci. USA 90:10922-10926; Erb et al., 1994, Proc. Natl. Acad. Sci. USA 91:11422-11426; Houghten et al., 1992, Biotechniques 13:412; Jayawickreme et al., 1994, Proc. Natl. Acad. Sci. USA 91:1614-1618; Salmon et al., 1993, Proc. Natl. Acad. Sci. USA 90:11708-11712; PCT Publication No. WO 93/20242; and Brenner and Lemer, 1992, Proc. Natl. Acad. Sci. USA 89:5381-5383.

[0860] Examples of phage display libraries are described in Scott and Smith, 1990, Science 249:386-390; Devlin et al., 1990, Science, 249:404-406; Christian, R. B., et al., 1992, J. Mol. Biol. 227:711-718); Lenstra, 1992, J. Immunol. Meth. 152:149-157; Kay et al., 1993, Gene 128:59-65; and PCT Publication No. WO 94/18318 dated Aug. 18, 1994.

[0861] In vitro translation-based libraries include but are not limited to those described in PCT Publication No. WO 91/05058 dated Apr. 18, 1991; and Mattheakis et al., 1994, Proc. Natl. Acad. Sci. USA 91:9022-9026.

[0862] By way of examples of nonpeptide libraries, a benzodiazepine library (see e.g., Bunin et al., 1994, Proc. Natl. Acad. Sci. USA 91:4708-4712) can be adapted for use. Peptoid libraries (Simon et al., 1992, Proc. Natl. Acad. Sci. USA 89:9367-9371) can also be used. Another example of a library that can be used, in which the amide functionalities in peptides have been perrnethylated to generate a chemically transformed combinatorial library, is described by Ostresh et al. (1994, Proc. Natl. Acad. Sci. USA 91:11138-11142).

[0863] The variety of non-peptide libraries that are useful in the present invention is great. For example, Ecker and Crooke, 1995, Bio/Technology 13:351-360 list benzodiazepines, hydantoins, piperazinediones, biphenyls, sugar analogs, beta-mercaptoketones, arylacetic acids, acylpiperidines, benzopyrans, cubanes, xanthines, aminimides, and oxazolones as among the chemical species that form the basis of various libraries.

[0864] Non-peptide libraries can be classified broadly into two types: decorated monomers and oligomers. Decorated monomer libraries employ a relatively simple scaffold structure upon which a variety functional groups is added. Often the scaffold will be a molecule with a known useful pharmacological activity. For example, the scaffold might be the benzodiazepine structure.

[0865] Non-peptide oligomer libraries utilize a large number of monomers that are assembled together in ways that create new shapes that depend on the order of the monomers. Among the monomer units that have been used are carbamates, pyrrolinones, and morpholinos. Peptoids, peptide-like oligomers in which the side chain is attached to the alpha amino group rather than the alpha carbon, form the basis of another version of non-peptide oligomer libraries. The first non-peptide oligomer libraries utilized a single type of monomer and thus contained a repeating backbone. Recent libraries have utilized more than one monomer, giving the libraries added flexibility.

[0866] Screening the libraries can be accomplished by any of a variety of commonly known methods. See, e.g., the following references, which disclose screening of peptide libraries: Parmley and Smith, 1989, Adv. Exp. Med. Biol. 251:215-218; Scott and Smith, 1990, Science 249:386-390; Fowlkes et al., 1992; BioTechniques 13:422-427; Oldenburg et al., 1992, Proc. Natl. Acad. Sci. USA 89:5393-5397; Yu et al., 1994, Cell 76:933-945; Staudt et al., 1988, Science 241:577-580; Bock et al., 1992, Nature 355:564-566; Tuerk et al., 1992, Proc. Natl. Acad. Sci. USA 89:6988-6992; Ellington et al., 1992, Nature 355:850-852; U.S. Pat. No. 5,096,815, U.S. Pat. No. 5,223,409, and U.S. Pat. No. 5,198,346, all to Ladner et al.; Rebar and Pabo, 1993, Science 263:671-673; and CT Publication No. WO 94/18318.

[0867] In a specific embodiment, screening to identify a molecule that binds musculoskeletal system antigen polypeptides can be carried out by contacting the library members with a musculoskeletal system antigen polypeptides or musculoskeletal system antigen-like polypeptides immobilized on a solid phase and harvesting those library members that bind to the musculoskeletal system antigen polypeptides or musculoskeletal system antigen-like polypeptides. Examples of such screening methods, termed “panning” techniques are described by way of example in Parmley and Smith, 1988, Gene 73:305-318; Fowlkes et al., 1992, BioTechniques 13:422-427; International Publication No. WO 94/18318; and in references cited herein.

[0868] In another embodiment, the two-hybrid system for selecting interacting proteins in yeast (Fields and Song, 1989, Nature 340:245-246; Chien et al., 1991, Proc. Natl. Acad. Sci. USA 88:9578-9582) can be used to identify molecules that specifically bind to musculoskeletal system antigen polypeptides or musculoskeletal system antigen-like polypeptides.

[0869] Where the musculoskeletal system antigen binding molecule is a polypeptide, the polypeptide can be conveniently selected from any peptide library, including random peptide libraries, combinatorial peptide libraries, or biased peptide libraries. The term “biased” is used herein to mean that the method of generating the library is manipulated so as to restrict one or more parameters that govern the diversity of the resulting collection of molecules, in this case peptides.

[0870] Thus, a truly random peptide library would generate a collection of peptides in which the probability of finding a particular amino acid at a given position of the peptide is the same for all 20 amino acids. A bias can be introduced into the library, however, by specifying, for example, that a lysine occurs every fifth amino acid or that positions 4, 8, and 9 of a decapeptide library be fixed to include only arginine. Clearly, many types of biases can be contemplated, and the present invention is not restricted to any particular bias. Furthermore, the present invention contemplates specific types of peptide libraries, such as phage displayed peptide libraries and those that utilize a DNA construct comprising a lambda phage vector with a DNA insert.

[0871] As mentioned above, in the case of a musculoskeletal system antigen binding molecule that is a polypeptide, the polypeptide may have about 6 to less than about 60 amino acid residues, preferably about 6 to about 10 amino acid residues, and most preferably, about 6 to about 22 amino acids. In another embodiment, a musculoskeletal system antigen binding polypeptide has in the range of 15-100 amino acids, or 20-50 amino acids.

[0872] The selected musculoskeletal system antigen binding polypeptide can be obtained by chemical synthesis or recombinant expression.

[0873] Other Activities

[0874] A polypeptide, polynucleotide, agonist, or antagonist of the present invention, as a result of the ability to stimulate vascular endothelial cell growth, may be employed in treatment for stimulating re-vascularization of ischemic tissues due to various disease conditions such as thrombosis, arteriosclerosis, and other cardiovascular conditions. The polypeptide, polynucleotide, agonist, or antagonist of the present invention may also be employed to stimulate angiogenesis and limb regeneration, as discussed above.

[0875] A polypeptide, polynucleotide, agonist, or antagonist of the present invention may also be employed for treating wounds due to injuries, burns, post-operative tissue repair, and ulcers since they are mitogenic to various cells of different origins, such as fibroblast cells and skeletal muscle cells, and therefore, facilitate the repair or replacement of damaged or diseased tissue.

[0876] A polypeptide, polynucleotide, agonist, or antagonist of the present invention may also be employed to stimulate neuronal growth and to treat and prevent neuronal damage which occurs in certain neuronal disorders or neuro-degenerative conditions such as Alzheimer's disease, Parkinson's disease, and AIDS-related complex. A polypeptide, polynucleotide, agonist, or antagonist of the present invention may have the ability to stimulate chondrocyte growth; therefore, they may be employed to enhance bone and periodontal regeneration and aid in tissue transplants or bone grafts.

[0877] A polypeptide, polynucleotide, agonist, or antagonist of the present invention may be also be employed to prevent skin aging due to sunburn by stimulating keratinocyte growth.

[0878] A polypeptide, polynucleotide, agonist, or antagonist of the present invention may also be employed for preventing hair loss, since FGF family members activate hair-forming cells and promotes melanocyte growth. Along the same lines, a polypeptide, polynucleotide, agonist, or antagonist of the present invention may be employed to stimulate growth and differentiation of hematopoietic cells and bone marrow cells when used in combination with other cytokines.

[0879] A polypeptide, polynucleotide, agonist, or antagonist of the present invention may also be employed to maintain organs before transplantation or for supporting cell culture of primary tissues. A polypeptide, polynucleotide, agonist, or antagonist of the present invention may also be employed for inducing tissue of mesodermal origin to differentiate in early embryos.

[0880] A polypeptide, polynucleotide, agonist, or antagonist of the present invention may also increase or decrease the differentiation or proliferation of embryonic stem cells, besides, as discussed above, hematopoietic lineage.

[0881] A polypeptide, polynucleotide, agonist, or antagonist of the present invention may also be used to modulate mammalian characteristics, such as body height, weight, hair color, eye color, skin, percentage of adipose tissue, pigmentation, size, and shape (e.g., cosmetic surgery). Similarly, a polypeptide, polynucleotide, agonist, or antagonist of the present invention may be used to modulate mammalian metabolism affecting catabolism, anabolism, processing, utilization, and storage of energy.

[0882] A polypeptide, polynucleotide, agonist, or antagonist of the present invention may be used to change a mammal's mental state or physical state by influencing biorhythms, caricadic rhythms, depression (including depressive disorders), tendency for violence, tolerance for pain, reproductive capabilities (preferably by Activin or Inhibin-like activity), hormonal or endocrine levels, appetite, libido, memory, stress, or other cognitive qualities.

[0883] A polypeptide, polynucleotide, agonist, or antagonist of the present invention may also be used as a food additive or preservative, such as to increase or decrease storage capabilities, fat content, lipid, protein, carbohydrate, vitamins, minerals, cofactors or other nutritional components.

[0884] The above-recited applications have uses in a wide variety of hosts. Such hosts include, but are not limited to, human, murine, rabbit, goat, guinea pig, camel, horse, mouse, rat, hamster, pig, micro-pig, chicken, goat, cow, sheep, dog, cat, non-human primate, and human. In specific embodiments, the host is a mouse, rabbit, goat, guinea pig, chicken, rat, hamster, pig, sheep, dog or cat. In preferred embodiments, the host is a mammal. In most preferred embodiments, the host is a human.

[0885] Other Preferred Embodiments

[0886] Other preferred embodiments of the claimed invention include an isolated nucleic acid molecule comprising a nucleotide sequence which is at least 95% identical to a sequence of at least about 50 contiguous nucleotides in the nucleotide sequence of SEQ ID NO:X or the complementary strand thereto, the nucleotide sequence as defined in column 4 of Table 1A or columns 8 and 9 of Table 2 or the complementary strand thereto, and/or cDNA contained in Clone ID NO:Z.

[0887] Also preferred is a nucleic acid molecule wherein said sequence of contiguous nucleotides is included in the nucleotide sequence of the portion of SEQ ID NO:X as defined in column 4, ” ORF (From-To)”, in Table IA.

[0888] Also preferred is a nucleic acid molecule wherein said sequence of contiguous nucleotides is included in the nucleotide sequence of the portion of SEQ ID NO:X as defined in columns 8 and 9, “NT From” and “NT To” respectively, in Table 2.

[0889] Also preferred is an isolated nucleic acid molecule comprising a nucleotide sequence which is at least 95% identical to a sequence of at least about 150 contiguous nucleotides in the nucleotide sequence of SEQ ID NO:X or the complementary strand thereto, the nucleotide sequence as defined in column 4 of Table 1A or columns 8 and 9 of Table 2 or the complementary strand thereto, and/or cDNA contained in Clone ID NO:Z.

[0890] Further preferred is an isolated nucleic acid molecule comprising a nucleotide sequence which is at least 95% identical to a sequence of at least about 500 contiguous nucleotides in the nucleotide sequence of SEQ ID NO:X or the complementary strand thereto, the nucleotide sequence as defined in column 4 of Table 1A or columns 8 and 9 of Table 2 or the complementary strand thereto, and/or cDNA contained in Clone ID NO:Z.

[0891] A further preferred embodiment is a nucleic acid molecule comprising a nucleotide sequence which is at least 95% identical to the nucleotide sequence of the portion of SEQ ID NO:X defined in column 4, “ORF (From-To)”, in Table 1A.

[0892] A further preferred embodiment is a nucleic acid molecule comprising a nucleotide sequence which is at least 95% identical to the nucleotide sequence of the portion of SEQ ID NO:X defined in columns 8 and 9, “NT From” and “NT To”, respectively, in Table 2.

[0893] A further preferred embodiment is an isolated nucleic acid molecule comprising a nucleotide sequence which is at least 95% identical to the complete nucleotide sequence of SEQ ID NO:X or the complementary strand thereto, the nucleotide sequence as defined in column 4 of Table 1A or columns 8 and 9 of Table 2 or the complementary strand thereto, and/or cDNA contained in Clone ID NO:Z.

[0894] Also preferred is an isolated nucleic acid molecule which hybridizes under stringent hybridization conditions to a nucleic acid molecule comprising a nucleotide sequence of SEQ ID NO:X or the complementary strand thereto, the nucleotide sequence as defined in column 4 of Table 1A or columns 8 and 9 of Table 2 or the complementary strand thereto, and/or cDNA contained in Clone ID NO:Z, wherein said nucleic acid molecule which hybridizes does not hybridize under stringent hybridization conditions to a nucleic acid molecule having a nucleotide sequence consisting of only A residues or of only T residues.

[0895] Also preferred is a composition of matter comprising a DNA molecule which comprises the cDNA contained in Clone ID NO:Z.

[0896] Also preferred is an isolated nucleic acid molecule comprising a nucleotide sequence which is at least 95% identical to a sequence of at least 50 contiguous nucleotides of the cDNA sequence contained in Clone ID NO:Z.

[0897] Also preferred is an isolated nucleic acid molecule, wherein said sequence of at least 50 contiguous nucleotides is included in the nucleotide sequence of an open reading frame sequence encoded by cDNA contained in Clone ID NO:Z.

[0898] Also preferred is an isolated nucleic acid molecule comprising a nucleotide sequence which is at least 95% identical to sequence of at least 150 contiguous nucleotides in the nucleotide sequence encoded by cDNA contained in Clone ID NO:Z.

[0899] A further preferred embodiment is an isolated nucleic acid molecule comprising a nucleotide sequence which is at least 95% identical to sequence of at least 500 contiguous nucleotides in the nucleotide sequence encoded by cDNA contained in Clone ID NO:Z.

[0900] A further preferred embodiment is an isolated nucleic acid molecule comprising a nucleotide sequence which is at least 95% identical to the complete nucleotide sequence encoded by cDNA contained in Clone ID NO:Z.

[0901] A further preferred embodiment is a method for detecting in a biological sample a nucleic acid molecule comprising a nucleotide sequence which is at least 95% identical to a sequence of at least 50 contiguous nucleotides in a sequence selected from the group consisting of: a nucleotide sequence of SEQ ID NO:X or the complementary strand thereto; the nucleotide sequence as defined in column 4 of Table 1A or columns 8 and 9 of Table 2 or the complementary strand thereto; and a nucleotide sequence encoded by cDNA contained in Clone ID NO:Z; which method comprises a step of comparing a nucleotide sequence of at least one nucleic acid molecule in said sample with a sequence selected from said group and determining whether the sequence of said nucleic acid molecule in said sample is at least 95% identical to said selected sequence.

[0902] Also preferred is the above method wherein said step of comparing sequences comprises determining the extent of nucleic acid hybridization between nucleic acid molecules in said sample and a nucleic acid molecule comprising said sequence selected from said group. Similarly, also preferred is the above method wherein said step of comparing sequences is performed by comparing the nucleotide sequence determined from a nucleic acid molecule in said sample with said sequence selected from said group. The nucleic acid molecules can comprise DNA molecules or RNA molecules.

[0903] A further preferred embodiment is a method for identifying the species, tissue or cell type of a biological sample which method comprises a step of detecting nucleic acid molecules in said sample, if any, comprising a nucleotide sequence that is at least 95% identical to a sequence of at least 50 contiguous nucleotides in a sequence selected from the group consisting of: a nucleotide sequence of SEQ ID NO:X or the complementary strand thereto; the nucleotide sequence as defined in column 4 of Table 1A or columns 8 and 9 of Table 2 or the complementary strand thereto; and a nucleotide sequence of the cDNA contained in Clone ID NO:Z.

[0904] The method for identifying the species, tissue or cell type of a biological sample can comprise a step of detecting nucleic acid molecules comprising a nucleotide sequence in a panel of at least two nucleotide sequences, wherein at least one sequence in said panel is at least 95% identical to a sequence of at least 50 contiguous nucleotides in a sequence selected from said group.

[0905] Also preferred is a method for diagnosing in a subject a pathological condition associated with abnormal structure or expression of a nucleotide sequence of SEQ ID NO:X or the complementary strand thereto; the nucleotide sequence as defined in column 4 of Table 1A or columns 8 and 9 of Table 2 or the complementary strand thereto; or the cDNA contained in Clone ID NO:Z which encodes a protein, wherein the method comprises a step of detecting in a biological sample obtained from said subject nucleic acid molecules, if any, comprising a nucleotide sequence that is at least 95% identical to a sequence of at least 50 contiguous nucleotides in a sequence selected from the group consisting of: a nucleotide sequence of SEQ ID NO:X or the complementary strand thereto; the nucleotide sequence as defined in column 4 of Table 1A or columns 8 and 9 of Table 2 or the complementary strand thereto; and a nucleotide sequence of cDNA contained in Clone ID NO:Z.

[0906] The method for diagnosing a pathological condition can comprise a step of detecting nucleic acid molecules comprising a nucleotide sequence in a panel of at least two nucleotide sequences, wherein at least one sequence in said panel is at least 95% identical to a sequence of at least 50 contiguous nucleotides in a sequence selected from said group.

[0907] Also preferred is a composition of matter comprising isolated nucleic acid molecules wherein the nucleotide sequences of said nucleic acid molecules comprise a panel of at least two nucleotide sequences, wherein at least one sequence in said panel is at least 95% identical to a sequence of at least 50 contiguous nucleotides in a sequence selected from the group consisting of: a nucleotide sequence of SEQ ID NO:X or the complementary strand thereto; the nucleotide sequence as defined in column 4 of Table 1A or columns 8 and 9 of Table 2 or the complementary strand thereto; and a nucleotide sequence encoded by cDNA contained in Clone ID NO:Z. The nucleic acid molecules can comprise DNA molecules or RNA molecules.

[0908] Also preferred is a composition of matter comprising isolated nucleic acid molecules wherein the nucleotide sequences of said nucleic acid molecules comprise a DNA microarray or “chip” of at least 1, 2, 3, 4, 5, 6, 7, 8, 9, 10, 15, 20, 25, 30, 40, 50, 100, 150, 200, 250, 300, 500, 1000, 2000, 3000, or 4000 nucleotide sequences, wherein at least one sequence in said DNA microarray or “chip” is at least 95% identical to a sequence of at least 50 contiguous nucleotides in a sequence selected from the group consisting of: a nucleotide sequence of SEQ ID NO:X wherein X is any integer as defined in Table 1A; and a nucleotide sequence encoded by a human cDNA clone identified by a cDNA “Clone ID” in Table 1A.

[0909] Also preferred is an isolated polypeptide comprising an amino acid sequence at least 90% identical to a sequence of at least about 10 contiguous amino acids in the polypeptide sequence of SEQ ID NO:Y; a polypeptide encoded by SEQ ID NO:X or the complementary strand thereto; the polypeptide encoded by the nucleotide sequence as defined in columns 8 and 9 of Table 2; and/or a polypeptide encoded by cDNA contained in Clone ID NO:Z.

[0910] Also preferred is an isolated polypeptide comprising an amino acid sequence at least 95% identical to a sequence of at least about 30 contiguous amino acids in the amino acid sequence of SEQ ID NO:Y; a polypeptide encoded by SEQ ID NO:X or the complementary strand thereto; the polypeptide encoded by the nucleotide sequence as defined in columns 8 and 9 of Table 2; and/or a polypeptide encoded by cDNA contained in Clone ID NO:Z.

[0911] Further preferred is an isolated polypeptide comprising an amino acid sequence at least 95% identical to a sequence of at least about 100 contiguous amino acids in the amino acid sequence of SEQ ID NO:Y; a polypeptide encoded by SEQ ID NO:X or the complementary strand thereto; the polypeptide encoded by the nucleotide sequence as defined in columns 8 and 9 of Table 2; and/or a polypeptide encoded by cDNA contained in Clone ID NO:Z.

[0912] Further preferred is an isolated polypeptide comprising an amino acid sequence at least 95% identical to the complete amino acid sequence of SEQ ID NO:Y; a polypeptide encoded by SEQ ID NO:X or the complementary strand thereto; the polypeptide encoded by the nucleotide sequence as defined in columns 8 and 9 of Table 2; and/or a polypeptide encoded by cDNA contained in Clone ID NO:Z.

[0913] Further preferred is an isolated polypeptide comprising an amino acid sequence at least 90% identical to a sequence of at least about 10 contiguous amino acids in the complete amino acid sequence of a polypeptide encoded by contained in Clone ID NO:Z

[0914] Also preferred is a polypeptide wherein said sequence of contiguous amino acids is included in the amino acid sequence of a portion of said polypeptide encoded by cDNA contained in Clone ID NO:Z; a polypeptide encoded by SEQ ID NO:X or the complementary strand thereto; the polypeptide encoded by the nucleotide sequence as defined in columns 8 and 9 of Table 2; and/or the polypeptide sequence of SEQ ID NO:Y.

[0915] Also preferred is an isolated polypeptide comprising an amino acid sequence at least 95% identical to a sequence of at least about 30 contiguous amino acids in the amino acid sequence of a polypeptide encoded by the cDNA contained in Clone ID NO:Z.

[0916] Also preferred is an isolated polypeptide comprising an amino acid sequence at least 95% identical to a sequence of at least about 100 contiguous amino acids in the amino acid sequence of a polypeptide encoded by cDNA contained in Clone ID NO:Z.

[0917] Also preferred is an isolated polypeptide comprising an amino acid sequence at least 95% identical to the amino acid sequence of a polypeptide encoded by the cDNA contained in Clone ID NO:Z.

[0918] Further preferred is an isolated antibody which binds specifically to a polypeptide comprising an amino acid sequence that is at least 90% identical to a sequence of at least 10 contiguous amino acids in a sequence selected from the group consisting of: a polypeptide sequence of SEQ ID NO:Y; a polypeptide encoded by SEQ ID NO:X or the complementary strand thereto; the polypeptide encoded by the nucleotide sequence as defined in columns 8 and 9 of Table 2; and a polypeptide encoded by the cDNA contained in Clone ID NO:Z.

[0919] Further preferred is a method for detecting in a biological sample a polypeptide comprising an amino acid sequence which is at least 90% identical to a sequence of at least 10 contiguous amino acids in a sequence selected from the group consisting of: a polypeptide sequence of SEQ ID NO:Y; a polypeptide encoded by SEQ ID NO:X or the complementary strand thereto; the polypeptide encoded by the nucleotide sequence as defined in columns 8 and 9 of Table 2; and a polypeptide encoded by the cDNA contained in Clone ID NO:Z; which method comprises a step of comparing an amino acid sequence of at least one polypeptide molecule in said sample with a sequence selected from said group and determining whether the sequence of said polypeptide molecule in said sample is at least 90% identical to said sequence of at least 10 contiguous amino acids.

[0920] Also preferred is the above method wherein said step of comparing an amino acid sequence of at least one polypeptide molecule in said sample with a sequence selected from said group comprises determining the extent of specific binding of polypeptides in said sample to an antibody which binds specifically to a polypeptide comprising an amino acid sequence that is at least 90% identical to a sequence of at least 10 contiguous amino acids in a sequence selected from the group consisting of: a polypeptide sequence of SEQ ID NO:Y; a polypeptide encoded by SEQ ID NO:X or the complementary strand thereto; the polypeptide encoded by the nucleotide sequence as defined in columns 8 and 9 of Table 2; and a polypeptide encoded by the cDNA contained in Clone ID NO:Z.

[0921] Also preferred is the above method wherein said step of comparing sequences is performed by comparing the amino acid sequence determined from a polypeptide molecule in said sample with said sequence selected from said group.

[0922] Also preferred is a method for identifying the species, tissue or cell type of a biological sample which method comprises a step of detecting polypeptide molecules in said sample, if any, comprising an amino acid sequence that is at least 90% identical to a sequence of at least 10 contiguous amino acids in a sequence selected from the group consisting of: polypeptide sequence of SEQ ID NO:Y; a polypeptide encoded by SEQ ID NO:X or the complementary strand thereto; the polypeptide encoded by the nucleotide sequence as defined in columns 8 and 9 of Table 2; and a polypeptide encoded by the cDNA contained in Clone ID NO:Z.

[0923] Also preferred is the above method for identifying the species, tissue or cell type of a biological sample, which method comprises a step of detecting polypeptide molecules comprising an amino acid sequence in a panel of at least two amino acid sequences, wherein at least one sequence in said panel is at least 90% identical to a sequence of at least 10 contiguous amino acids in a sequence selected from the above group.

[0924] Also preferred is a method for diagnosing in a subject a pathological condition associated with abnormal structure or expression of a nucleic acid sequence identified in Table 1A or Table 2 encoding a polypeptide, which method comprises a step of detecting in a biological sample obtained from said subject polypeptide molecules comprising an amino acid sequence in a panel of at least two amino acid sequences, wherein at least one sequence in said panel is at least 90% identical to a sequence of at least 10 contiguous amino acids in a sequence selected from the group consisting of: polypeptide sequence of SEQ ID NO:Y; a polypeptide encoded by SEQ ID NO:X or the complementary strand thereto; the polypeptide encoded by the nucleotide sequence as defined in columns 8 and 9 of Table 2; and a polypeptide encoded by the cDNA contained in Clone ID NO:Z.

[0925] In any of these methods, the step of detecting said polypeptide molecules includes using an antibody.

[0926] Also preferred is an isolated nucleic acid molecule comprising a nucleotide sequence which is at least 95% identical to a nucleotide sequence encoding a polypeptide wherein said polypeptide comprises an amino acid sequence that is at least 90% identical to a sequence of at least 10 contiguous amino acids in a sequence selected from the group consisting of: polypeptide sequence of SEQ ID NO:Y; a polypeptide encoded by SEQ ID NO:X or the complementary strand thereto; the polypeptide encoded by the nucleotide sequence as defined in columns 8 and 9 of Table 2; and a polypeptide encoded by the cDNA contained in Clone ID NO:Z.

[0927] Also preferred is an isolated nucleic acid molecule, wherein said nucleotide sequence encoding a polypeptide has been optimized for expression of said polypeptide in a prokaryotic host.

[0928] Also preferred is a polypeptide molecule, wherein said polypeptide comprises an amino acid sequence selected from the group consisting of: polypeptide sequence of SEQ ID NO:Y; a polypeptide encoded by SEQ ID NO:X or the complementary strand thereto; the polypeptide encoded by the nucleotide sequence as defined in columns 8 and 9 of Table 2; and a polypeptide encoded by the cDNA contained in Clone ID NO:Z.

[0929] Further preferred is a method of making a recombinant vector comprising inserting any of the above isolated nucleic acid molecule into a vector. Also preferred is the recombinant vector produced by this method. Also preferred is a method of making a recombinant host cell comprising introducing the vector into a host cell, as well as the recombinant host cell produced by this method.

[0930] Also preferred is a method of making an isolated polypeptide comprising culturing this recombinant host cell under conditions such that said polypeptide is expressed and recovering said polypeptide. Also preferred is this method of making an isolated polypeptide, wherein said recombinant host cell is a eukaryotic cell and said polypeptide is a human protein comprising an amino acid sequence selected from the group consisting of: polypeptide sequence of SEQ ID NO:Y; a polypeptide encoded by SEQ ID NO:X or the complementary strand thereto; the polypeptide encoded by the nucleotide sequence as defined in columns 8 and 9 of Table 2; and a polypeptide encoded by the cDNA contained in Clone ID NO:Z. The isolated polypeptide produced by this method is also preferred.

[0931] Also preferred is a method of treatment of an individual in need of an increased level of a protein activity, which method comprises administering to such an individual a Therapeutic comprising an amount of an isolated polypeptide, polynucleotide, immunogenic fragment or analogue thereof, binding agent, antibody, or antigen binding fragment of the claimed invention effective to increase the level of said protein activity in said individual.

[0932] Also preferred is a method of treatment of an individual in need of a decreased level of a protein activity, which method comprised administering to such an individual a Therapeutic comprising an amount of an isolated polypeptide, polynucleotide, immunogenic fragment or analogue thereof, binding agent, antibody, or antigen binding fragment of the claimed invention effective to decrease the level of said protein activity in said individual.

[0933] Also preferred is a method of treatment of an individual in need of a specific delivery of toxic compositions to diseased cells (e.g., tumors, leukemias or lymphomas), which method comprises administering to such an individual a Therapeutic comprising an amount of an isolated polypeptide of the invention, including, but not limited to a binding agent, or antibody of the claimed invention that are associated with toxin or cytotoxic prodrugs.

[0934] Having generally described the invention, the same will be more readily understood by reference to the following examples, which are provided by way of illustration and are not intended as limiting.

TABLE 6

| ATCC Deposits | Deposit Date | ATCC Designation Number |
|---|---|---|
| LP01, LP02, LP03, | May-20-97 | 209059, 209060, 209061, 209062, |
| LP04, LP05, LP06, | | 209063, 209064, 209065, 209066, |
| LP07, LP08, LP09, | | 209067, 209068, 209069 |
| LP10, LP11, | | |
| LP12 | Jan-12-98 | 209579 |
| LP13 | Jan-12-98 | 209578 |
| LP14 | Jul-16-98 | 203067 |
| LP15 | Jul-16-98 | 203068 |
| LP16 | Feb-1-99 | 203609 |
| LP17 | Feb-1-99 | 203610 |
| LP20 | Nov-17-98 | 203485 |
| LP21 | Jun-18-99 | PTA-252 |
| LP22 | Jun-18-99 | PTA-253 |
| LP23 | Dec-22-99 | PTA-1081 |

### EXAMPLES

### Example 1

### Isolation of a Selected cDNA Clone From the Deposited Sample

[0935] Each Clone ID NO:Z is contained in a plasmid. Table 7 identifies the vectors used to construct the cDNA library from which each clone was isolated. In many cases, the vector used to construct the library is a phage vector from which a plasmid has been excised. The following correlates the related plasmid for each phage vector used in constructing the cDNA library. For example, where a particular clone is identified in Table 7 as being isolated in the vector “Lambda Zap,” the corresponding deposited clone is in “pBluescript.”

| Vector Used to Construct Library | Corresponding Deposited Plasmid |
|---|---|
| Lambda Zap | pBluescript (pBS) |
| Uni-Zap XR | pBluescript (pBS) |
| Zap Express | pBK |
| lafmid BA | plafmid BA |
| pSport1 | pSport1 |
| pCMVSport 2.0 | pCMVSport 2.0 |
| pCMVSport 3.0 | pCMVSport 3.0 |
| pCR ® 2.1 | pCR ® 2.1 |

[0936] Vectors Lambda Zap (U.S. Pat. Nos. 5,128,256 and 5,286,636), Uni-Zap XR (U.S. Pat. Nos. 5,128, 256 and 5,286,636), Zap Express (U.S. Pat. Nos. 5,128,256 and 5,286,636), pBluescript (pBS) (Short, J. M. et al., Nucleic Acids Res. 16:7583-7600 (1988); Alting-Mees, M. A. and Short, J. M., Nucleic Acids Res. 17:9494 (1989)) and pBK (Alting-Mees, M. A. et al., Strategies 5:58-61 (1992)) are commercially available from Stratagene Cloning Systems, Inc., 11011 N. Torrey Pines Road, La Jolla, Calif., 92037. pBS contains an ampicillin resistance gene and pBK contains a neomycin resistance gene. Both can be transformed into E. coli strain XL-1 Blue, also available from Stratagene. pBS comes in 4 forms SK+, SK−, KS+ and KS. The S and K refers to the orientation of the polylinker to the T7 and T3 primer sequences which flank the polylinker region (“S” is for SacI and “K” is for KpnI which are the first sites on each respective end of the linker). “+” or “−” refer to the orientation of the fl origin of replication (“ori”), such that in one orientation, single stranded rescue initiated from the f1 ori generates sense strand DNA and in the other, antisense.

[0937] Vectors pSportl, pCMVSport 2.0 and pCMVSport 3.0, were obtained from Life Technologies, Inc., P. O. Box 6009, Gaithersburg, Md. 20897. All Sport vectors contain an ampicillin resistance gene and may be transformed into E. coli strain DH10B, also available from Life Technologies. (See, for instance, Gruber, C. E., et al., Focus 15:59 (1993).) Vector lafinid BA (Bento Soares, Columbia University, NY) contains an ampicillin resistance gene and can be transformed into E. coli strain XL-1 Blue. Vector pCR®2.1, which is available from Invitrogen, 1600 Faraday Avenue, Carlsbad, Calif. 92008, contains an ampicillin resistance gene and may be transformed into E. coli strain DH10B, available from Life Technologies. (See, for instance, Clark, J. M., Nuc. Acids Res. 16:9677-9686 (1988) and Mead, D. et al., Bio/Technology 9: (1991).) Preferably, a polynucleotide of the present invention does not comprise the vector sequences identified for the particular clone in Table 7, as well as the corresponding plasmid vector sequences designated above.

[0938] The deposited material in the sample assigned the ATCC Deposit Number cited by reference to Tables 1A, 2, 6 and 7 for any given cDNA clone also may contain one or more additional plasmids, each comprising a cDNA clone different from that given clone. Thus, deposits sharing the same ATCC Deposit Number contain at least a plasmid for each Clone ID NO:Z.

TABLE 7

| Libraries owned by Catalog | Catalog Description | Vector | ATCC Deposit |
|---|---|---|---|
| HUKA HUKB HUKC HUKD HUKE | Human Uterine Cancer | Lambda ZAP II | LP01 |
| HUKF HUKG | | | |
| HCNA HCNB | Human Colon | Lambda Zap II | LP01 |
| HFFA | Human Fetal Brain, random primed | Lambda Zap II | LP01 |
| HTWA | Resting T-Cell | Lambda ZAP II | LP01 |
| HBQA | Early Stage Human Brain, random | Lambda ZAP II | LP01 |
| | primed | | |
| HLMB HLMF HLMG HLMH HLMI | breast lymph node CDNA library | Lambda ZAP II | LP01 |
| HLMJ HLMM HLMN | | | |
| HCQA HCQB | human colon cancer | Lamda ZAP II | LP01 |
| HMEA HMEC HMED HMEE HMEF | Human Microvascular Endothelial | Lambda ZAP II | LP01 |
| HMEG HMEI HMEJ HMEK HMEL | Cells, fract. A | | |
| HUSA HUSC | Human Umbilical Vein Endothelial | Lambda ZAP II | LP01 |
| | Cells, fract. A | | |
| HLQA HLQB | Hepatocellular Tumor | Lambda ZAP II | LP01 |
| HHGA HHGB HHGC HHGD | Hemangiopericytoma | Lambda ZAP II | LP01 |
| HSDM | Human Striatum Depression, re-rescue | Lambda ZAP II | LP01 |
| HUSH | H Umbilical Vein Endothelial Cells, | Lambda ZAP II | LP01 |
| | frac A, re-excision | | |
| HSGS | Salivary gland, subtracted | Lambda ZAP II | LP01 |
| HFXA HFXB HFXC HFXD HFXE | Brain frontal cortex | Lambda ZAP II | LP01 |
| HFXF HFXG HFXH | | | |
| HPQA HPQB HPQC | PERM TF274 | Lambda ZAP II | LP01 |
| HFXJ HFXK | Brain Frontal Cortex, re-excision | Lambda ZAP II | LP01 |
| HCWA HCWB HCWC HCWD HCWE | CD34 positive cells (Cord Blood) | ZAP Express | LP02 |
| HCWF HCWG HCWH HCWI HCWJ | | | |
| HCWK | | | |
| HCUA HCUB HCUC | CD34 depleted Buffy Coat (Cord | ZAP Express | LP02 |
| | Blood) | | |
| HRSM | A-14 cell line | ZAP Express | LP02 |
| HRSA | A1-CELL LINE | ZAP Express | LP02 |
| HCUD HCUE HCUF HCUG HCUH | CD34 depleted Buffy Coat (Cord | ZAP Express | LP02 |
| HCUI | Blood), re-excision | | |
| HBXE HBXF HBXG | H. Whole Brain #2, re-excision | ZAP Express | LP02 |
| HRLM | L8 cell line | ZAP Express | LP02 |
| HBXA HBXB HBXC HBXD | Human Whole Brain #2-Oligo dT > | ZAP Express | LP02 |
| | 1.5 Kb | | |
| HUDA HUDB HUDC | Testes | ZAP Express | LP02 |
| HHTM HHTN HHTO | H. hypothalamus, frac A; re-excision | ZAP Express | LP02 |
| HHTL | H. hypothalamus, frac A | ZAP Express | LP02 |
| HASA HASD | Human Adult Spleen | Uni-ZAP XR | LP03 |
| HFKC HFKD HFKE HFKF HFKG | Human Fetal Kidney | Uni-ZAP XR | LP03 |
| HE8A HE8B HE8C HE8D HE8E HE8F | Human 8 Week Whole Embryo | Uni-ZAP XR | LP03 |
| HE8M HE8N | | | |
| HGBA HGBD HGBE HGBF HGBG | Human Gall Bladder | Uni-ZAP XR | LP03 |
| HGBH HGBI | | | |
| HLHA HLHB HLHC HLHD HLHE | Human Fetal Lung III | Uni-ZAP XR | LP03 |
| HLHF HLHG HLHH HLHQ | | | |
| HPMA HPMB HPMC HPMD HPME | Human Placenta | Uni-ZAP XR | LP03 |
| HPMF HPMG HPMH | | | |
| HPRA HPRB HPRC HPRD | Human Prostate | Uni-ZAP XR | LP03 |
| HSIA HSIC HSID HSIE | Human Adult Small Intestine | Uni-ZAP XR | LP03 |
| HTEA HTEB HTEC HTED HTEE | Human Testes | Uni-ZAP XR | LP03 |
| HTEF HTEG HTEH HTEI HTEJ HTEK | | | |
| HTPA HTPB HTPC HTPD HTPE | Human Pancreas Tumor | Uni-ZAP XR | LP03 |
| HTTA HTTB HTTC HTTD HTTE | Human Testes Tumor | Uni-ZAP XR | LP03 |
| HTTF | | | |
| HAPA HAPB HAPC HAPM | Human Adult Pulmonary | Uni-ZAP XR | LP03 |
| HETA HETB HETC HETD HETE | Human Endometrial Tumor | Uni-ZAP XR | LP03 |
| HETF HETG HETH HETI | | | |
| HHFB HHFC HHFD HHFE HHFF | Human Fetal Heart | Uni-ZAP XR | LP03 |
| HHFG HHFH HHFI | | | |
| HHPB HHPC HHPD HHPE HHPF | Human Hippocampus | Uni-ZAP XR | LP03 |
| HHPG HHPH | | | |
| HCE1 HCE2 HCE3 HCE4 HCE5 HCEB | Human Cerebellum | Uni-ZAP XR | LP03 |
| HCEC HCED HCEE HCEF HCEG | | | |
| HUVB HUVC HUVD HUVE | Human Umbilical Vein, Endo. remake | Uni-ZAP XR | LP03 |
| HSTA HSTB HSTC HSTD | Human Skin Tumor | Uni-ZAP XR | LP03 |
| HTAA HTAB HTAC HTAD HTAE | Human Activated T-Cells | Uni-ZAP XR | LP03 |
| HFEA HFEB HFEC | Human Fetal Epithelium (Skin) | Uni-ZAP XR | LP03 |
| HJPA HJPB HJPC HJPD | HUMAN JURKAT MEMBRANE | Uni-ZAP XR | LP03 |
| | BOUND POLYSOMES | | |
| HESA | Human epithelioid sarcoma | Uni-Zap XR | LP03 |
| HLTA HLTB HLTC HLTD HLTE | Human T-Cell Lymphoma | Uni-ZAP XR | LP03 |
| HLTF | | | |
| HFTA HFTB HFTC HFTD | Human Fetal Dura Mater | Uni-ZAP XR | LP03 |
| HRDA HRDB HRDC HRDD HRDE | Human Rhabdomyosarcoma | Uni-ZAP XR | LP03 |
| HRDF | | | |
| HCAA HCAB HCAC | Cem cells cyclohexamide treated | Uni-ZAP XR | LP03 |
| HRGA HRGB HRGC HRGD | Raji Cells, cyclohexamide treated | Uni-ZAP XR | LP03 |
| HSUA HSUB HSUC HSUM | Supt Cells, cyclohexamide treated | Uni-ZAP XR | LP03 |
| HT4A HT4C HT4D | Activated T-Cells, 12 hrs. | Uni-ZAP XR | LP03 |
| HE9A HE9B HE9C HE9D HE9E HE9F | Nine Week Old Early Stage Human | Uni-ZAP XR | LP03 |
| HE9G HE9H HE9M HE9N | | | |
| HATA HATB HATC HATD HATE | Human Adrenal Gland Tumor | Uni-ZAP XR | LP03 |
| HT5A | Activated T-Cells, 24 hrs. | Uni-ZAP XR | LP03 |
| HFGA HFGM | Human Fetal Brain | Uni-ZAP XR | LP03 |
| HNEA HNEB HNEC HNED HNEE | Human Neutrophil | Uni-ZAP XR | LP03 |
| HBGB HBGD | Human Primary Breast Cancer | Uni-ZAP XR | LP03 |
| HBNA HBNB | Human Normal Breast | Uni-ZAP XR | LP03 |
| HCAS | Cem Cells, cyclohexamide treated, | Uni-ZAP XR | LP03 |
| | subtra | | |
| HHPS | Human Hippocampus, subtracted | pBS | LP03 |
| HKCS HKCU | Human Colon Cancer, subtracted | pBS | LP03 |
| HRGS | Raji cells, cyclohexamide treated, | pBS | LP03 |
| | subtracted | | |
| HSUT | Supt cells, cyclohexamide treated, | pBS | LP03 |
| | differentially expressed | | |
| HT4S | Activated T-Cells, 12 hrs, subtracted | Uni-ZAP XR | LP03 |
| HCDA HCDB HCDC HCDD HCDE | Human Chondrosarcoma | Uni-ZAP XR | LP03 |
| HOAA HOAB HOAC | Human Osteosarcoma | Uni-ZAP XR | LP03 |
| HTLA HTLB HTLC HTLD HTLE | Human adult testis, large inserts | Uni-ZAP XR | LP03 |
| HTLF | | | |
| HLMA HLMC HLMD | Breast Lymph node cDNA library | Uni-ZAP XR | LP03 |
| H6EA H6EB H6EC | HL-60, PMA 4H | Uni-ZAP XR | LP03 |
| HTXA HTXB HTXC HTXD HTXE | Activated T-Cell (12 hs)/Thiouridine | Uni-ZAP XR | LP03 |
| HTXF HTXG HTXH | labelled Eco | | |
| HNFA HNFB HNFC HNFD HNFE | Human Neutrophil, Activated | Uni-ZAP XR | LP03 |
| HNFF HNFG HNFH HNFJ | | | |
| HTOB HTOC | HUMAN TONSILS, FRACTION 2 | Uni-ZAP XR | LP03 |
| HMGB | Human OB MG63 control fraction I | Uni-ZAP XR | LP03 |
| HOPB | Human OB HOS control fraction I | Uni-ZAP XR | LP03 |
| HORB | Human OB HOS treated (10 nM E2) | Uni-ZAP XR | LP03 |
| | fraction I | | |
| HSVA HSVB HSVC | Human Chronic Synovitis | Uni-ZAP XR | LP03 |
| HROA | HUMAN STOMACH | Uni-ZAP XR | LP03 |
| HBJA HBJB HBJC HBJD HBJE HBJF | HUMAN B CELL LYMPHOMA | Uni-ZAP XR | LP03 |
| HBJG HBJH HBJI HBJJ HBJK | | | |
| HCRA HCRB HCRC | human corpus colosum | Uni-ZAP XR | LP03 |
| HODA HODB HODC HODD | human ovarian cancer | Uni-ZAP XR | LP03 |
| HDSA | Dermatofibrosarcoma Protuberance | Uni-ZAP XR | LP03 |
| HMWA HMWB HMWC HMWD | Bone Marrow Cell Line (RS4; 11) | Uni-ZAP XR | LP03 |
| HMWE HMWF HMWG HMWH | | | |
| HMWI HMWJ | | | |
| HSOA | stomach cancer (human) | Uni-ZAP XR | LP03 |
| HERA | SKIN | Uni-ZAP XR | LP03 |
| HMDA | Brain-medulloblastoma | Uni-ZAP XR | LP03 |
| HGLA HGLB HGLD | Glioblastoma | Uni-ZAP XR | LP03 |
| HEAA | H. Atrophic Endometrium | Uni-ZAP XR | LP03 |
| HBCA HBCB | H. Lymph node breast Cancer | Uni-ZAP XR | LP03 |
| HPWT | Human Prostate BPH, re-excision | Uni-ZAP XR | LP03 |
| HFVG HFVH HFVI | Fetal Liver, subtraction II | pBS | LP03 |
| HNFI | Human Neutrophils, Activated, | pBS | LP03 |
| | re-excision | | |
| HBMB HBMC HBMD | Human Bone Marrow, re-excision | pBS | LP03 |
| HKML HKMM HKMN | H. Kidney Medulla, re-excision | pBS | LP03 |
| HKIX HKIY | H. Kidney Cortex, subtracted | pBS | LP03 |
| HADT | H. Amygdala Depression, subtracted | pBS | LP03 |
| H6AS | Hl-60, untreated, subtracted | Uni-ZAP XR | LP03 |
| H6ES | HL-60, PMA 4H, subtracted | Uni-ZAP XR | LP03 |
| H6BS | HL-60, RA 4h, Subtracted | Uni-ZAP XR | LP03 |
| H6CS | HL-60, PMA 1d, subtracted | Uni-ZAP XR | LP03 |
| HTXJ HTXK | Activated T-cell(12 h)/Thiouridine- | Uni-ZAP XR | LP03 |
| | re-excision | | |
| HMSA HMSB HMSC HMSD HMSE | Monocyte activated | Uni-ZAP XR | LP03 |
| HMSF HMSG HMSH HMSI HMSJ | | | |
| HMSK | | | |
| HAGA HAGB HAGC HAGD HAGE | Human Amygdala | Uni-ZAP XR | LP03 |
| HAGF | | | |
| HSRA HSRB HSRE | STROMAL-OSTEOCLASTOMA | Uni-ZAP XR | LP03 |
| HSRD HSRF HSRG HSRH | Human Osteoclastoma Stromal Cells- | Uni-ZAP XR | LP03 |
| | unamplified | | |
| HSQA HSQB HSQC HSQD HSQE | Stromal cell TF274 | Uni-ZAP XR | LP03 |
| HSQF HSQG | | | |
| HSKA HSKB HSKC HSKD HSKE | Smooth muscle, serum treated | Uni-ZAP XR | LP03 |
| HSKF HSKZ | | | |
| HSLA HSLB HSLC HSLD HSLE | Smooth muscle, control | Uni-ZAP XR | LP03 |
| HSLF HSLG | | | |
| HSDA HSDD HSDE HSDF HSDG | Spinal cord | Uni-ZAP XR | LP03 |
| HSDH | | | |
| HPWS | Prostate-BPH subtracted II | pBS | LP03 |
| HSKW HSKX HSKY | Smooth Muscle-HASTE normalized | pBS | LP03 |
| HFPB HFPC HFPD | H. Frontal cortex, epileptic; re-excision | Uni-ZAP XR | LP03 |
| HSDI HSDJ HSDK | Spinal Cord, re-excision | Uni-ZAP XR | LP03 |
| HSKN HSKO | Smooth Muscle Serum Treated, Norm | pBS | LP03 |
| HSKG HSKH HSKI | Smooth muscle, serum induced, re-exc | pBS | LP03 |
| HFCA HFCB HFCC HFCD HFCE | Human Fetal Brain | Uni-ZAP XR | LP04 |
| HFCF | | | |
| HPTA HPTB HPTD | Human Pituitaiy | Uni-ZAP XR | LP04 |
| HTHB HTHC HTHD | Human Thymus | Uni-ZAP XR | LP04 |
| HE6B HE6C HE6D HE6E HE6F HE6G | Human Whole Six Week Old Embryo | Uni-ZAP XR | LP04 |
| HE6S | | | |
| HSSA HSSB HSSC HSSD HSSE HSSF | Human Synovial Sarcoma | Uni-ZAP XR | LP04 |
| HSSG HSSH HSSI HSSJ HSSK | | | |
| HE7T | 7 Week Old Early Stage Human, | Uni-ZAP XR | LP04 |
| | subtracted | | |
| HEPA HEPB HEPC | Human Epididymus | Uni-ZAP XR | LP04 |
| HSNA HSNB HSNC HSNM HSNN | Human Synovium | Uni-ZAP XR | LP04 |
| HPFB HPFC HPFD HPFE | Human Prostate Cancer, Stage C | Uni-ZAP XR | LP04 |
| | fraction | | |
| HE2A HE2D HE2E HE2H HE2I HE2M | 12 Week Old Early Stage Human | Uni-ZAP XR | LP04 |
| HE2N HE2O | | | |
| HE2B HE2C HE2F HE2G HE2P HE2Q | 12 Week Old Early Stage Human, II | Uni-ZAP XR | LP04 |
| HPTS HPTT HPTU | Human Pituitary, subtracted | Uni-ZAP XR | LP04 |
| HAUA HAUB HAUC | Amniotic Cells-TNF induced | Uni-ZAP XR | LP04 |
| HAQA HAQB HAQC HAQD | Amniotic Cells-Primary Culture | Uni-ZAP XR | LP04 |
| HWTA HWTB HWTC | wilm's tumor | Uni-ZAP XR | LP04 |
| HBSD | Bone Cancer, re-excision | Uni-ZAP XR | LP04 |
| HSGB | Salivary gland, re-excision | Uni-ZAP XR | LP04 |
| HSJA HSJB HSJC | Smooth muscle-ILb induced | Uni-ZAP XR | LP04 |
| HSXA HSXB HSXC HSXD | Human Substantia Nigra | Uni-ZAP XR | LP04 |
| HSHA HSHB HSHC | Smooth muscle, IL1b induced | Uni-ZAP XR | LP04 |
| HOUA HOUB HOUC HOUD HOUE | Adipocytes | Uni-ZAP XR | LP04 |
| HPWA HPWB HPWC HPWD HPWE | Prostate BPH | Uni-ZAP XR | LP04 |
| HELA HELB HELC HELD HELE | Endothelial cells-control | Uni-ZAP XR | LP04 |
| HELF HELG HELH | | | |
| HEMA HEMB HEMC HEMD HEME | Endothelial-induced | Uni-ZAP XR | LP04 |
| HEMF HEMG HEMH | | | |
| HBIA HBIB HBIC | Human Brain, Striatum | Uni-ZAP XR | LP04 |
| HHSA HHSB HHSC HHSD HHSE | Human Hypothalmus, Schizophrenia | Uni-ZAP XR | LP04 |
| HNGA HNGB HNGC HNGD HNGE | neutrophils control | Uni-ZAP XR | LP04 |
| HNGF HNGG HNGH HNGI HNGJ | | | |
| HNHA HNHB HNHC HNHD HNHE | Neutrophils IL-1 and LPS induced | Uni-ZAP XR | LP04 |
| HNHF HNHG HNHH HNHI HNHJ | | | |
| HSDB HSDC | STRIATUM DEPRESSION | Uni-ZAP XR | LP04 |
| HHPT | Hypothalamus | Uni-ZAP XR | LP04 |
| HSAT HSAU HSAV HSAW HSAX | Anergic T-cell | Uni-ZAP XR | LP04 |
| HSAY HSAZ | | | |
| HBMS HBMT HBMU HBMV HBMW | Bone marrow | Uni-ZAP XR | LP04 |
| HBMX | | | |
| HOEA HOEB HOEC HOED HOEE | Osteoblasts | Uni-ZAP XR | LP04 |
| HOEF HOEJ | | | |
| HAIA HAIB HAIC HAID HAIE HAIF | Epithelial-TNFa and INF induced | Uni-ZAP XR | LP04 |
| HTGA HTGB HTGC HTGD | Apoptotic T-cell | Uni-ZAP XR | LP04 |
| HMCA HMCB HMCC HMCD HMCE | Macrophage-oxLDL | Uni-ZAP XR | LP04 |
| HMAA HMAB HMAC HMAD HMAE | Macrophage (GM-CSF treated) | Uni-ZAP XR | LP04 |
| HMAF HMAG | | | |
| HPHA | Normal Prostate | Uni-ZAP XR | LP04 |
| HPIA HPIB HPIC | LNCAP prostate cell line | Uni-ZAP XR | LP04 |
| HPJA HPJB HPJC | PC3 Prostate cell line | Uni-ZAP XR | LP04 |
| HOSE HOSF HOSG | Human Osteoclastoma, re-excision | Uni-ZAP XR | LP04 |
| HTGE HTGF | Apoptotic T-cell, re-excision | Uni-ZAP XR | LP04 |
| HMAJ HMAK | H Macrophage (GM-CSF treated), | Uni-ZAP XR | LP04 |
| | re-excision | | |
| HACB HACC HACD | Human Adipose Tissue, re-excision | Uni-ZAP XR | LP04 |
| HFPA | H. Frontal Cortex, Epileptic | Uni-ZAP XR | LP04 |
| HFAA HFAB HFAC HFAD HFAE | Alzheimer's, spongy change | Uni-ZAP XR | LP04 |
| HFAM | Frontal Lobe, Dementia | Uni-ZAP XR | LP04 |
| HMIA HMIB HMIC | Human Manic Depression Tissue | Uni-ZAP XR | LP04 |
| HTSA HTSE HTSF HTSG HTSH | Human Thymus | pBS | LP05 |
| HPBA HPBB HPBC HPBD HPBE | Human Pineal Gland | pBS | LP05 |
| HSAA HSAB HSAC | HSA 172 Cells | pBS | LP05 |
| HSBA HSBB HSBC HSBM | HSC 172 cells | pBS | LP05 |
| HJAA HJAB HJAC HJAD | Jurkat T-cell G1 phase | pBS | LP05 |
| HJBA HJBB HJBC HJBD | Jurkat T-Cell, S phase | pBS | LP05 |
| HAFA HAFB | Aorta endothelial cells + TNF-a | pBS | LP05 |
| HAWA HAWB HAWC | Human White Adipose | pBS | LP05 |
| HTNA HTNB | Human Thyroid | pBS | LP05 |
| HONA | Normal Ovary, Premenopausal | pBS | LP05 |
| HARA HARB | Human Adult Retina | pBS | LP05 |
| HLJA HLJB | Human Lung | pCMVSport 1 | LP06 |
| HOFM HOFN HOFO | H. Ovarian Tumor, II, OV5232 | pCMVSport 2.0 | LP07 |
| HOGA HOGB HOGC | OV 10-3-95 | pCMVSport 2.0 | LP07 |
| HCGL | CD34+ cells, II | pCMVSport 2.0 | LP07 |
| HDLA | Hodgkin's Lymphoma I | pCMVSport 2.0 | LP07 |
| HDTA HDTB HDTC HDTD HDTE | Hodgkin's Lymphoma II | pCMVSport 2.0 | LP07 |
| HKAA HKAB HKAC HKAD HKAE | Keratinocyte | pCMVSport 2.0 | LP07 |
| HKAF HKAG HKAH | | | |
| HCIM | CAPFINDER, Crohn's Disease, lib 2 | pCMVSport 2.0 | LP07 |
| HKAL | Keratinocyte, lib 2 | pCMVSport 2.0 | LP07 |
| HKAT | Keratinocyte, lib 3 | pCMVSport 2.0 | LP07 |
| HNDA | Nasal polyps | pCMVSport 2.0 | LP07 |
| HDRA | H. Primary Dendritic Cells, lib 3 | pCMVSport 2.0 | LP07 |
| HOHA HOHB HOHC | Human Osteoblasts II | pCMVSport 2.0 | LP07 |
| HLDA HLDB HLDC | Liver, Hepatoma | pCMVSport 3.0 | LP08 |
| HLDN HLDO HLDP | Human Liver, normal | pCMVSport 3.0 | LP08 |
| HMTA | pBMC stimulated w/poly I/C | pCMVSport 3.0 | LP08 |
| HNTA | NTERA2, control | pCMVSport 3.0 | LP08 |
| HDPA HDPB HDPC HDPD HDPF | Primary Dendritic Cells, lib 1 | pCMVSport 3.0 | LP08 |
| HDPG HDPH HDPI HDPJ HDPK | | | |
| HDPM HDPN HDPO HDPP | Primary Dendritic cells, frac 2 | pCMVSport 3.0 | LP08 |
| HMUA HMUB HMUC | Myoloid Progenitor Cell Line | pCMVSport 3.0 | LP08 |
| HHEA HHEB HHEC HHED | T Cell helper I | pCMVSport 3.0 | LP08 |
| HHEM HHEN HHEO HHEP | T cell helper II | pCMVSport 3.0 | LP08 |
| HEQA HEQB HEQC | Human endometrial stromal cells | pCMVSport 3.0 | LP08 |
| HJMA HJMB | Human endometrial stromal cells- | pCMVSport 3.0 | LP08 |
| | treated with progesterone | | |
| HSWA HSWB HSWC | Human endometrial stromal cells- | pCMVSport 3.0 | LP08 |
| | treated with estradiol | | |
| HSYA HSYB HSYC | Human Thymus Stromal Cells | pCMVSport 3.0 | LP08 |
| HLWA HLWB HLWC | Human Placenta | pCMVSport 3.0 | LP08 |
| HRAA HRAB HRAC | Rejected Kidney, lib 4 | pCMVSport 3.0 | LP08 |
| HMTM | PCR, pBMC I/C treated | PCRII | LP09 |
| HMJA | H. Meniingima, M6 | pSport 1 | LP10 |
| HMKA HMKB HMKC HMKD HMKE | H Meningima, M1 | pSport 1 | LP10 |
| HUSG HUSI | Human umbilical vein endothelial cells, | pSport 1 | LP10 |
| | IL-4 induced | | |
| HUSX HUSY | Human Umbilical Vein Endothelial | pSport 1 | LP10 |
| | Cells, uninduced | | |
| HOFA | Ovarian Tumor I, OV5232 | pSport 1 | LP10 |
| HCFA HCFB HCFC HCFD | T-Cell PHA 16 hrs | pSport 1 | LP10 |
| HCFL HCFM HCFN HCFO | T-Cell PHA 24 hrs | pSport 1 | LP10 |
| HADA HADC HADD HADE HADF | Human Adipose | pSport 1 | LP10 |
| HADG | | | |
| HOVA HOVB HOVC | Human Ovary | pSport 1 | LP10 |
| HTWB HTWC HTWD HTWE HTWF | Resting T-Cell Library, II | pSport 1 | LP10 |
| HMMA | Spleen metastic melanoma | pSport 1 | LP10 |
| HLYA HLYB HLYC HLYD HLYE | Spleen, Chronic lymphocytic leukemia | pSport 1 | LP10 |
| HCGA | CD34 + cell, I | pSport 1 | LP10 |
| HEOM HEON | Human Eosinophils | pSport 1 | LP10 |
| HTDA | Human Tonsil, Lib 3 | pSport 1 | LP10 |
| HSPA | Salivary Gland, Lib 2 | pSport 1 | LP10 |
| HCHA HCHB HCHC | Breast Cancer cell line, MDA 36 | pSport 1 | LP10 |
| HCHM HCHN | Breast Cancer Cell line, angiogenic | pSport 1 | LP10 |
| HCIA | Crohn's Disease | pSport 1 | LP10 |
| HDAA HDAB HDAC | HEL cell line | pSport 1 | LP10 |
| HABA | Human Astrocyte | pSport 1 | LP10 |
| HUFA HUFB HUFC | Ulcerative Colitis | pSport 1 | LP10 |
| HNTM | NTERA2 + retinoic acid, 14 days | pSport 1 | LP10 |
| HDQA | Primary Dendritic cells, CapFinder2, | pSport 1 | LP10 |
| | frac 1 | | |
| HDQM | Primary Dendritic Cells, CapFinder, | pSport 1 | LP10 |
| | frac 2 | | |
| HLDX | Human Liver, normal, CapFinder | pSport 1 | LP10 |
| HULA HULB HULC | Human Dermal Endothelial | pSport 1 | LP10 |
| | Cells, untreated | | |
| HUMA | Human Dermal Endothelial cells, treated | pSport 1 | LP10 |
| HCJA | Human Stromal Endometrial | pSport 1 | LP10 |
| | fibroblasts, untreated | | |
| HCJM | Human Stromal endometrial fibroblasts, | pSport 1 | LP10 |
| | treated w/ estradiol | | |
| HEDA | Human Stromal endometrial fibroblasts, | pSport 1 | LP10 |
| | treated with progesterone | | |
| HFNA | Human ovary tumor cell OV350721 | pSport 1 | LP10 |
| HKGA HKGB HKGC HKGD | Merkel Cells | pSport 1 | LP10 |
| HISA HISB HISC | Pancreas Islet Cell Tumor | pSport 1 | LP10 |
| HLSA | Skin, bumed | pSport 1 | LP10 |
| HBZA | Prostate, BPH, Lib 2 | pSport 1 | LP10 |
| HBZS | Prostate BPH, Lib 2, subtracted | pSport 1 | LP10 |
| HFIA HFIB HFIC | Synovial Fibroblasts (control) | pSport 1 | LP10 |
| HFIH HEII HFIJ | Synovial hypoxia | pSport 1 | LP10 |
| HFIT HFIU HFIV | Synovial IL-1/TNF stimulated | pSport 1 | LP10 |
| HGCA | Messangial cell, frac 1 | pSport 1 | LP10 |
| HMVA HMVB HMVC | Bone Marrow Stromal Cell, untreated | pSport 1 | LP10 |
| HFIX HFIY HFIZ | Synovial Fibroblasts (Ill/TNF), subt | pSport 1 | LP10 |
| HFOX HFOY HFOZ | Synovial hypoxia-RSF subtracted | pSport 1 | LP10 |
| HMQA HMQB HMQC HMQD | Human Activated Monocytes | Uni-ZAP XR | LP11 |
| HLIA HLIB HLIC | Human Liver | pCMVSport 1 | LP012 |
| HHBA HHBB HHBC HHBD HHBE | Human Heart | pCMVSport 1 | LP012 |
| HBBA HBBB | Human Brain | pCMVSport 1 | LP012 |
| HLJA HLJB HLJC HLJD HLJE | Human Lung | pCMVSport 1 | LP012 |
| HOGA HOGB HOGC | Ovarian Tumor | pCMVSport 2.0 | LP012 |
| HTJM | Human Tonsils, Lib 2 | pCMVSport 2.0 | LP012 |
| HAMF HAMG | KMH2 | pCMVSport 3.0 | LP012 |
| HAJA HAJB HAJC | L428 | pCMVSport 3.0 | LP012 |
| HWBA HWBB HWBC HWBD HWBE | Dendritic cells, pooled | pCMVSport 3.0 | LP012 |
| HWAA HWAB HWAC HWAD HWAE | Human Bone Marrow, treated | pCMVSport 3.0 | LP012 |
| HYAA HYAB HYAC | B Cell lymphoma | pCMVSport 3.0 | LP012 |
| HWHG HWHH HWHI | Healing groin wound, 6.5 hours post | pCMVSport 3.0 | LP012 |
| | incision | | |
| HWHP HWHQ HWHR | Healing groin wound; 7.5 hours post | pCMVSport 3.0 | LP012 |
| | incision | | |
| HARM | Healing groin wound-zero hr post- | pCMVSport 3.0 | LP012 |
| | incision (control) | | |
| HBIM | Olfactory epithelium; nasal cavity | pCMVSport 3.0 | LP012 |
| HWDA | Healing Abdomen wound; 70 & 90 min | pCMVSport 3.0 | LP012 |
| | post incision | | |
| HWEA | Healing Abdomen Wound; 15 days post | pCMVSport 3.0 | LP012 |
| | incision | | |
| HWJA | Healing Abdomen Wound; 21 & 29 days | pCMVSport 3.0 | LP012 |
| HNAL | Human Tongue, frac 2 | pSport 1 | LP012 |
| HMJA | H. Meniingima, M6 | pSport 1 | LP012 |
| HMKA HMKB HMKC HMKD HMKE | H. Meningima, M1 | pSport 1 | LP012 |
| HOFA | Ovarian Tumor I, OV5232 | pSport 1 | LP012 |
| HCFA HCFB HCFC HCFD | T-Cell PHA 16 hrs | pSport 1 | LP012 |
| HCFL HCFM HCFN HCFO | T-Cell PHA 24 hrs | pSport 1 | LP012 |
| HMMA HMMB HMMC | Spleen metastic melanoma | pSport 1 | LP012 |
| HTDA | Human Tonsil, Lib 3 | pSport 1 | LP012 |
| HDBA | Human Fetal Thymus | pSport 1 | LP012 |
| HDUA | Pericardium | pSport 1 | LP012 |
| HBZA | Prostate, BPH, Lib 2 | pSport 1 | LP012 |
| HWCA | Larynx tumor | pSport 1 | LP012 |
| HWKA | Normal lung | pSport 1 | LP012 |
| HSMB | Bone marrow stroma, treated | pSport 1 | LP012 |
| HBHM | Normal trachea | pSport 1 | LP012 |
| HLFC | Human Larynx | pSport 1 | LP012 |
| HLRB | Siebben Polyposis | pSport 1 | LP012 |
| HNIA | Mammary Gland | pSport 1 | LP012 |
| HNJB | Palate carcinoma | pSport 1 | LP012 |
| HNKA | Palate normal | pSport 1 | LP012 |
| HMZA | Pharynx carcinoma | pSport 1 | LP012 |
| HABG | Cheek Carcinoma | pSport 1 | LP012 |
| HMZM | Pharynx Carcinoma | pSport 1 | LP012 |
| HDRM | Larynx Carcinoma | pSport 1 | LP012 |
| HVAA | Pancreas normal PCA4 No | pSport 1 | LP012 |
| HICA | Tongue carcinoma | pSport 1 | LP012 |
| HUKA HUKB HUKC HUKD HUKE | Human Uterine Cancer | Lambda ZAP II | LP013 |
| HFFA | Human Fetal Brain, random primed | Lambda ZAP II | LP013 |
| HTUA | Activated T-cell labeled with 4-thioluri | Lambda ZAP II | LP013 |
| HBQA | Early Stage Human Brain, random | Lambda ZAP II | LP013 |
| | primed | | |
| HMEB | Human microvascular Endothelial cells, | Lambda ZAP II | LP013 |
| | fract. B | | |
| HUSH | Human Umbilical Vein Endothelial | Lambda ZAP II | LP013 |
| | cells, fract. A, re-excision | | |
| HLQC HLQD | Hepatocellular tumor, re-excision | Lambda ZAP II | LP013 |
| HTWJ HTWK HTWL | Resting T-cell, re-excision | Lambda ZAP II | LP013 |
| HF6S | Human Whole 6 week Old Embryo (II), | pBluescript | LP013 |
| | subt | | |
| HHPS | Human Hippocampus, subtracted | pBluescript | LP013 |
| HL1S | LNCAP, differential expression | pBluescript | LP013 |
| HLHS HLHT | Early Stage Human Lung, Subtracted | pBluescript | LP013 |
| HSUS | Supt cells, cyclohexamide treated, | pBluescnpt | LP013 |
| | subtracted | | |
| HSUT | Supt cells, cyclohexamide treated, | pBluescript | LP013 |
| | differentially expressed | | |
| HSDS | H. Striatum Depression, subtracted | pBluescript | LP013 |
| HPTZ | Human Pituitary, Subtracted VII | pBluescript | LP013 |
| HSDX | H. Striatum Depression, subt II | pBluescript | LP013 |
| HSDZ | H. Striatum Depression, subt | pBluescript | LP013 |
| HPBA HPBB HPBC HPBD HPBE | Human Pineal Gland | pBluescript SK- | LP013 |
| HRTA | Colorectal Tumor | pBluescript SK- | LP013 |
| HSBA HSBB HSBC HSBM | HSC172 cells | pBluescript SK- | LP013 |
| HJAA HJAB HJAC HJAD | Jurkat T-cell G1 phase | pBluescript SK- | LP013 |
| HJBA HJBB HJBC HJBD | Jurkat T-cell, S1 phase | pBluescript SK- | LP013 |
| HTNA HTNB | Human Thyroid | pBluescript SK- | LP013 |
| HAHA HAHB | Human Adult Heart | Uni-ZAP XR | LP013 |
| HE6A | Whole 6 week Old Embryo | Uni-ZAP XR | LP013 |
| HFCA HFCB HFCC HFCD HECE | Human Fetal Brain | Uni-ZAP XR | LP013 |
| HFKC HFKD HEKE HFKF HFKG | Human Fetal Kidney | Uni-ZAP XR | LP013 |
| HGBA HGBD HGBE HGBF HGBG | Human Gall Bladder | Uni-ZAP XR | LP013 |
| HPRA HPRB HPRC HPRD | Human Prostate | Uni-ZAP XR | LP013 |
| HTEA HTEB HTEC HTED HTEE | Human Testes | Uni-ZAP XR | LP013 |
| HTTA HTTB HTTC HTTD HTTE | Human Testes Tumor | Uni-ZAP XR | LP013 |
| HYBA HYBB | Human Fetal Bone | Uni-ZAP XR | LP013 |
| HFLA | Human Fetal Liver | Uni-ZAP XR | LP013 |
| HHFB HHFC HHFD HHFE HHFF | Human Fetal Heart | Uni-ZAP XR | LP013 |
| HUVB HUVC HUVD HUVE | Human Umbilical Vein, End. remake | Uni-ZAP XR | LP013 |
| HTHB HTHC HTHD | Human Thymus | Uni-ZAP XR | LP013 |
| HSTA HSTB HSTC HSTD | Human Skin Tumor | Uni-ZAP XR | LP013 |
| HTAA HTAB HTAC HTAD HTAE | Human Activated T-cells | Uni-ZAP XR | LP013 |
| HFEA HFEB HFEC | Human Fetal Epithelium (skin) | Uni-ZAP XR | LP013 |
| HJPA HJPB HJPC HJPD | Human Jurkat Membrane Bound | Uni-ZAP XR | LP013 |
| | Polysomes | | |
| HESA | Human Epithelioid Sarcoma | Uni-ZAP XR | LP013 |
| HALS | Human Adult Liver, Subtracted | Uni-ZAP XR | LP013 |
| HFTA HFTB HFTC HFTD | Human Fetal Dura Mater | Uni-ZAP XR | LP013 |
| HCAA HCAB HCAC | Cem cells, cyclohexamide treated | Uni-ZAP XR | LP013 |
| HRGA HRGB HRGC HRGD | Raji Cells, cyclohexamide treated | Uni-ZAP XR | LP013 |
| HE9A HE9B HE9C HE9D HE9E | Nine Week Old Early Stage Human | Uni-ZAP XR | LP013 |
| HSFA | Human Fibrosarcoma | Uni-ZAP XR | LP013 |
| HATA HATB HATC HATD HATE | Human Adrenal Gland Tumor | Uni-ZAP XR | LP013 |
| HTRA | Human Trachea Tumor | Uni-ZAP XR | LP013 |
| HE2A HE2D HE2E HE2H HE2I | 12 Week Old Early Stage Human | Uni-ZAP XR | LP013 |
| HE2B HE2C HE2F HE2G HE2P | 12 Week Old Early Stage Human, II | Uni-ZAP XR | LP013 |
| HNEA HNEB HNEC HNED HNEE | Human Neutrophil | Uni-ZAP XR | LP013 |
| HBGA | Human Primary Breast Cancer | Uni-ZAP XR | LP013 |
| HPTS HPTT HPTU | Human Pituitary, subtracted | Uni-ZAP XR | LP013 |
| HMQA HMQB HMQC HMQD | Human Activated Monocytes | Uni-ZAP XR | LP013 |
| HOAA HOAB HOAC | Human Osteosarcoma | Uni-ZAP XR | LP013 |
| HTOA HTOD HTOE HTOF HTOG | human tonsils | Uni-ZAP XR | LP013 |
| HMGB | Human OB MG63 control fraction I | Uni-ZAP XR | LP013 |
| HOPB | Human OB HOS control fraction I | Uni-ZAP XR | LP013 |
| HOQB | Human OB HOS treated (1 nM E2) | Uni-ZAP XR | LP013 |
| | fraction I | | |
| HAUA HAUB HAUC | Amniotic Cells-TNF induced | Uni-ZAP XR | LP013 |
| HAQA HAQB HAQC HAQD | Amniotic Cells-Primary Culture | Uni-ZAP XR | LP013 |
| HROA HROC | HUMAN STOMACH | Uni-ZAP XR | LP013 |
| HBJA HBJB HBJC HBJD HBJE | HUMAN B CELL LYMPHOMA | Uni-ZAP XR | LP013 |
| HODA HODB HODC HODD | human ovarian cancer | Uni-ZAP XR | LP013 |
| HCPA | Corpus Callosum | Uni-ZAP XR | LP013 |
| HSOA | stomach cancer (human) | Uni-ZAP XR | LP013 |
| HERA | SKIN | Uni-ZAP XR | LP013 |
| HMDA | Brain-medulloblastoma | Uni-ZAP XR | LP013 |
| HGLA HGLB HGLD | Glioblastoma | Uni-ZAP XR | LP013 |
| HWTA HWTB HWTC | wilm's tumor | Uni-ZAP XR | LP013 |
| HEAA | H. Atrophic Endometrium | Uni-ZAP XR | LP013 |
| HAPN HAPO HAPP HAPQ HAPR | Human Adult Pulmonary; re-excision | Uni-ZAP XR | LP013 |
| HLTG HLTH | Human T-cell lymphoma; re-excision | Uni-ZAP XR | LP013 |
| HAHC HAHD HAHE | Human Adult Heart; re-excision | Uni-ZAP XR | LP013 |
| HAGA HAGB HAGC HAGD HAGE | Human Amygdala | Uni-ZAP XR | LP013 |
| HSJA HSJB HSJC | Smooth muscle-ILb tnduced | Uni-ZAP XR | LP013 |
| HSHA HSHB HSHC | Smooth muscle, IL1b induced | Uni-ZAP XR | LP013 |
| HPWA HPWB HPWC HPWD HPWE | Prostate BPH | Uni-ZAP XR | LP013 |
| HPIA HPIB HPIC | LNCAP prostate cell line | Uni-ZAP XR | LP013 |
| HPJA HPJB HPJC | PC3 Prostate cell line | Uni-ZAP XR | LP013 |
| HBTA | Bone Marrow Stroma, TNF & LPS ind | Uni-ZAP XR | LP013 |
| HMCF HMCG HMCH HMCI HMCJ | Macrophage-oxLDL; re-excision | Uni-ZAP XR | LP013 |
| HAGG HAGH HAGI | Human Amygdala; re-excision | Uni-ZAP XR | LP013 |
| HACA | H. Adipose Tissue | Uni-ZAP XR | LP013 |
| HKFB | K562 + PMA (36 hrs), re-excision | ZAP Express | LP013 |
| HCWT HCWU HCWV | CD34 positive cells (cord blood), re-ex | ZAP Express | LP013 |
| HBWA | Whole brain | ZAP Express | LP013 |
| HBXA HBXB HBXC HBXD | Human Whole Brain #2-Oligo dT > | ZAP Express | LP013 |
| | 1.5 Kb | | |
| HAVM | Temporal cortex-Alzheizmer | pT-Adv | LP014 |
| HAVT | Hippocampus, Alzheimer Subtracted | pT-Adv | LP014 |
| HHAS | CHME Cell Line | Uni-ZAP XR | LP014 |
| HAJR | Larynx normal | pSport 1 | LP014 |
| HWLE HWLF HWLG HWLH | Colon Normal | pSport 1 | LP014 |
| HCRM HCRN HCRO | Colon Carcinoma | pSport 1 | LP014 |
| HWLI HWLJ HWLK | Colon Normal | pSport 1 | LP014 |
| HWLQ HWLR HWLS HWLT | Colon Tumor | pSport 1 | LP014 |
| HBFM | Gastrocnemius Muscle | pSport 1 | LP014 |
| HBOD HBOE | Quadriceps Muscle | pSport 1 | LP014 |
| HBKD HBKE | Soleus Muscle | pSport 1 | LP014 |
| HCCM | Pancreatic Langerhans | pSport 1 | LP014 |
| HWGA | Larynx carcinoma | pSport 1 | LP014 |
| HWGM HWGN | Larynx carcinoma | pSport 1 | LP014 |
| HWLA HWLB HWLC | Normal colon | pSport 1 | LP014 |
| HWLM HWLN | Colon Tumor | pSport 1 | LP014 |
| HVAM HVAN HVAO | Pancreas Tumor | pSport 1 | LP014 |
| HWGQ | Larynx carcinoma | pSport 1 | LP014 |
| HAQM HAQN | Salivary Gland | pSport 1 | LP014 |
| HASM | Stomach; normal | pSport 1 | LP014 |
| HBCM | Uterus; normal | pSport 1 | LP014 |
| HCDM | Testis; normal | pSport 1 | LP014 |
| HDJM | Brain; normal | pSport 1 | LP014 |
| HEFM | Adrenal Gland, normal | pSport 1 | LP014 |
| HBAA | Rectum normal | pSport 1 | LP014 |
| HFDM | Rectum tumour | pSport 1 | LP014 |
| HGAM | Colon, normal | pSport 1 | LP014 |
| HHMM | Colon, tumour | pSport 1 | LP014 |
| HCLB HCLC | Human Lung Cancer | Lambda Zap II | LP015 |
| HRLA | L1 Cell line | ZAP Express | LP015 |
| HHAM | Hypothalamus, Alzheimer's | pCMVSport 3.0 | LP015 |
| HKBA | Ku 812F Basophils Line | pSport 1 | LP015 |
| HS2S | Saos2, Dexamethosome Treated | pSport 1 | LP016 |
| HA5A | Lung Carcinoma A549 TNF alpha | pSport 1 | LP016 |
| | activated | | |
| HTFM | TF-1 Cell Line GM-CSF Treated | pSport 1 | LP016 |
| HYAS | Thyroid Tumour | pSport 1 | LP016 |
| HUTS | Larynx Normal | pSport 1 | LP016 |
| HXOA | Larynx Tumor | pSport 1 | LP016 |
| HEAH | Ea.hy.926 cell line | pSport 1 | LP016 |
| HINA | Adenocarcinoma Human | pSport 1 | LP0166 |
| HRMA | Lung Mesothelium | pSport 1 | LP0166 |
| HLCL | Human Pre-Differentiated Adipocytes | Uni-Zap XR | LP017 |
| HS2A | Saos2 Cells | pSport 1 | LP020 |
| HS2I | Saos2 Cells; Vitamin D3 Treated | pSport 1 | LP020 |
| HUCM | CHME Cell Line, untreated | pSport 1 | LP020 |
| HEPN | Aryepiglottis Normal | pSport 1 | LP020 |
| HPSN | Sinus Piniformis Tumour | pSport 1 | LP020 |
| HNSA | Stomach Normal | pSport 1 | LP020 |
| HNSM | Stomach Tumour | pSport 1 | LP020 |
| HNLA | Liver Normal Met 5 No | pSport 1 | LP020 |
| HUTA | Liver Tumour Met 5 Tu | pSport 1 | LP020 |
| HOCN | Colon Normal | pSport 1 | LP020 |
| HOCT | Colon Tumor | pSport 1 | LP020 |
| HTNT | Tongue Tumour | pSport 1 | LP020 |
| HLXN | Larynx Normal | pSport 1 | LP020 |
| HLXT | Larynx Tumour | pSport 1 | LP020 |
| HTYN | Thymus | pSport 1 | LP020 |
| HPLN | Placenta | pSport 1 | LP020 |
| HTNG | Tongue Normal | pSport 1 | LP020 |
| HZAA | Thyroid Normal (SDCA2 No) | pSport 1 | LP020 |
| HWES | Thyroid Thyroiditis | pSport 1 | LP020 |
| HFHD | Ficolled Human Stromal Cells, 5 Fu | pTrip1Ex2 | LP021 |
| | treated | | |
| HFHM, HFHN | Ficolled Human Stromal Cells, | pTrip1Ex2 | LP021 |
| | Untreated | | |
| HPCI | Hep G2 Cells, lambda library | lambda Zap-CMV XR | LP021 |
| HBCA, HBCB, HBCC | H. Lymph node breast Cancer | Uni-ZAP XR | LP021 |
| HCOK | Chondrocytes | pSPORT 1 | LP022 |
| HDCA, HDCB, HDCC | Dendritic Cells From CD34 Cells | pSPORT 1 | LP022 |
| HDMA, HDMB | CD40 activated monocyte dendritic | pSPORT 1 | LP022 |
| | cells | | |
| HDDM, HDDN, HDDO | LPS activated derived dendritic cells | pSPORT 1 | LP022 |
| HPCR | Hep G2 Cells, PCR library | lambda Zap-CMV XR | LP022 |
| HAAA, HAAB, HAAC | Lung, Cancer (4005313A3): Invasive | pSPORT 1 | LP022 |
| | Poorly Differentiated Lung | | |
| | Adenocarcinoma | | |
| HIPA, HIPB, HIPC | Lung, Cancer (4005163 B7): Invasive, | pSPORT 1 | LP022 |
| | Poorly Duff. Adenocarcinoma, | | |
| | Metastatic | | |
| HOOH, HOOI | Ovary, Cancer: (4004562 B6) Papillary | pSPORT 1 | LP022 |
| | Serous Cystic Neoplasm, Low | | |
| | Malignant Pot | | |
| HIDA | Lung, Normal: (4005313 B1) | pSPORT 1 | LP022 |
| HUJA, HUJB, HUJC, HUJD, HUJE | B-Cells | pCMVSport 3.0 | LP022 |
| HNOA, HNOB, HNOC, HNOD | Ovary, Normal: (9805C040R) | pSPORT 1 | LP022 |
| HNLM | Lung, Normal: (4005313 B1) | pSPORT 1 | LP022 |
| HSCL | Stromal Cells | pSPORT 1 | LP022 |
| HAAX | Lung, Cancer: (4005313 A3) Invasive | pSPORT 1 | LP022 |
| | Poorly-differentiated Metastatic lung | | |
| | adenocarcinoma | | |
| HUUA, HUUB, HUUC, HUUD | B-cells (unstimulated) | pTrip1Ex2 | LP022 |
| HWWA, HWWB, HWWC, HWWD, | B-cells (stimulated) | pSPORT 1 | LP022 |
| HWWE, HWWF, HWWG | | | |
| HCCC | Colon, Cancer: (9808C064R) | pCMVSport 3.0 | LP023 |
| HPDO HPDP HPDQ HPDR HPD | Ovary, Cancer (9809C332): Poorly | pSport 1 | LP023 |
| | differentiated adenocarcinoma | | |
| HPCO HPCP HPCQ HPCT | Ovary, Cancer (15395A1F): Grade II | pSport 1 | LP023 |
| | Papillary Carcinoma | | |
| HOCM HOCO HOCP HOCQ | Ovary, Cancer: (15799A1F) Poorly | pSport 1 | LP023 |
| | differentiated carcinoma | | |
| HCBM HCBN HCBO | Breast, Cancer: (4004943 A5) | pSport 1 | LP023 |
| HNBT HNBU HNBV | Breast, Normal: (4005522B2) | pSport 1 | LP023 |
| HBCP HBCQ | Breast, Cancer: (4005522 A2) | pSport 1 | LP023 |
| HBCJ | Breast, Cancer: (9806C012R) | pSport 1 | LP023 |
| HSAM HSAN | Stromal cells 3.88 | pSport 1 | LP023 |
| HVCA HVCB HVCC HVCD | Ovary, Cancer: (4004332 A2) | pSport 1 | LP023 |
| HSCK HSEN HSEO | Stromal cells (HBM3.18) | pSport 1 | LP023 |
| HSCP HSCQ | stromal cell clone 2.5 | pSport 1 | LP023 |
| HUXA | Breast Cancer: (4005385 A2) | pSport 1 | LP023 |
| HCOM HCON HCOO HCOP HCOQ | Ovary, Cancer (4004650 A3): Well- | pSport 1 | LP023 |
| | Differentiated Micropapillary Serous | | |
| | Carcinoma | | |
| HBNM | Breast, Cancer: (9802C020E) | pSport 1 | LP023 |
| HVVA HVVB HVVC HVVD HVVE | Human Bone Marrow, treated | pSport 1 | LP023 |

[0939] Two nonlimiting examples are provided below for isolating a particular clone from the deposited sample of plasmid cDNAs cited for that clone in Table 7. First, a plasmid is directly isolated by screening the clones using a polynucleotide probe corresponding to the nucleotide sequence of SEQ ID NO:X.

[0940] Particularly, a specific polynucleotide with 30-40 nucleotides is synthesized using an Applied Biosystems DNA synthesizer according to the sequence reported. The oligonucleotide is labeled, for instance, with ³²P-γ-ATP using T4 polynucleotide kinase and purified according to routine methods. (E.g., Maniatis et al., Molecular Cloning: A Laboratory Manual, Cold Spring Harbor Press, Cold Spring, N.Y. (1982).) The plasmid mixture is transformed into a suitable host, as indicated above (such as XL-1 Blue (Stratagene)) using techniques known to those of skill in the art, such as those provided by the vector supplier or in related publications or patents cited above. The transformants are plated on 1.5% agar plates (containing the appropriate selection agent, e.g., ampicillin) to a density of about 150 transformants (colonies) per plate. These plates are screened using Nylon membranes according to routine methods for bacterial colony screening (e.g., Sambrook et al., Molecular Cloning: A Laboratory Manual, 2nd Edit., (1989), Cold Spring Harbor Laboratory Press, pages 1.93 to 1.104), or other techniques known to those of skill in the art.

[0941] Alternatively, two primers of 17-20 nucleotides derived from both ends of the nucleotide sequence of SEQ ID NO:X are synthesized and used to amplify the desired cDNA using the deposited cDNA plasmid as a template. The polymerase chain reaction is carried out under routine conditions, for instance, in 25 ill of reaction mixture with 0.5 ug of the above cDNA template. A convenient reaction mixture is 1.5-5 mM MgCI₂, 0.01% (w/v) gelatin, 20 μM each of dATP, dCTP, dGTP, dTTP, 25 pmol of each primer and 0.25 Unit of Taq polymerase. Thirty five cycles of PCR (denaturation at 94° C. for 1 min; annealing at 55° C. for 1 min; elongation at 72° C. for 1 min) are performed with a Perkin-Elmer Cetus automated thermal cycler. The amplified product is analyzed by agarose gel electrophoresis and the DNA band with expected molecular weight is excised and purified. The PCR product is verified to be the selected sequence by subcloning and sequencing the DNA product.

[0942] Several methods are available for the identification of the 5′ or 3′ non-coding portions of a gene which may not be present in the deposited clone. These methods include but are not limited to, filter probing, clone enrichment using specific probes, and protocols similar or identical to 5′ and 3′ “RACE” protocols which are well known in the art. For instance, a method similar to 5′ RACE is available for generating the missing 5′ end of a desired full-length transcript. (Fromont-Racine et al., Nucleic Acids Res. 21(7):1683-1684 (1993).)

[0943] Briefly, a specific RNA oligonucleotide is ligated to the 5′ ends of a population of RNA presumably containing full-length gene RNA transcripts. A primer set containing a primer specific to the ligated RNA oligonucleotide and a primer specific to a known sequence of the gene of interest is used to PCR amplify the 5′ portion of the desired full-length gene. This amplified product may then be sequenced and used to generate the full length gene.

[0944] This above method starts with total RNA isolated from the desired source, although poly-A+ RNA can be used. The RNA preparation can then be treated with phosphatase if necessary to eliminate 5′ phosphate groups on degraded or damaged RNA which may interfere with the later RNA ligase step. The phosphatase should then be inactivated and the RNA treated with tobacco acid pyrophosphatase in order to remove the cap structure present at the 5′ ends of messenger RNAs. This reaction leaves a 5′ phosphate group at the 5′ end of the cap cleaved RNA which can then be ligated to an RNA oligonucleotide using T4 RNA ligase.

[0945] This modified RNA preparation is used as a template for first strand cDNA synthesis using a gene specific oligonucleotide. The first strand synthesis reaction is used as a template for PCR amplification of the desired 5′ end using a primer specific to the ligated RNA oligonucleotide and a primer specific to the known sequence of the gene of interest. The resultant product is then sequenced and analyzed to confirm that the 5′ end sequence belongs to the desired gene.

### Example 2

### Isolation of Genomic Clones Corresponding to a Polynucleotide

[0946] A human genomic PI library (Genomic Systems, Inc.) is screened by PCR using primers selected for the sequence corresponding to SEQ ID NO:X according to the method described in Example 1. (See also, Sambrook et al., Molecular Cloning: A Laboratory Manual, 2nd Edn., (1989), Cold Spring Harbor Laboratory Press).

### Example 3

### Tissue Specific Expression Analysis

[0947] The Human Genome Sciences, Inc. (HGS) database is derived from sequencing tissue and/or disease specific cDNA libraries. Libraries generated from a particular tissue are selected and the specific tissue expression pattern of EST groups or assembled contigs within these libraries is determined by comparison of the expression patterns of those groups or contigs within the entire database. ESTs and assembled contigs which show tissue specific expression are selected.

[0948] The original clone from which the specific EST sequence was generated, or in the case of an assembled contig, the clone from which the 5′ most EST sequence was generated, is obtained from the catalogued library of clones and the insert amplified by PCR using methods known in the art. The PCR product is denatured and then transferred in 96 or 384 well format to a nylon membrane (Schleicher and Scheull) generating an array filter of tissue specific clones. Housekeeping genes, maize genes, and known tissue specific genes are included on the filters. These targets can be used in signal normalization and to validate assay sensitivity. Additional targets are included to monitor probe length and specificity of hybridization.

[0949] Radioactively labeled hybridization probes are generated by first strand cDNA synthesis per the manufacturer's instructions (Life Technologies) from mRNA/RNA samples prepared from the specific tissue being analyzed (e.g., bone, bone cancer, muscle, muscular cancer, joints, cancers of joints, tendons, cancers of tendons, prostate, prostate cancer, ovarian, ovarian cancer, etc.). The hybridization probes are purified by gel exclusion chromatography, quantitated, and hybridized with the array filters in hybridization bottles at 65° C. overnight. The filters are washed under stringent conditions and signals are captured using a Fuji phosphorimager.

[0950] Data is extracted using AIS software and following background subtraction, signal normalization is performed. This includes a normalization of filter-wide expression levels between different experimental runs. Genes that are differentially expressed in the tissue of interest are identified.

### Example 4

### Chromosomal Mapping of the Polynucleotides

[0951] An oligonucleotide primer set is designed according to the sequence at the 5′ end of SEQ ID NO:X. This primer preferably spans about 100 nucleotides. This primer set is then used in a polymerase chain reaction under the following set of conditions: 30 seconds, 95° C.; 1 minute, 56° C.; 1 minute, 70° C. This cycle is repeated 32 times followed by one 5 minute cycle at 70° C. Human, mouse, and hamster DNA is used as template in addition to a somatic cell hybrid panel containing individual chromosomes or chromosome fragments (Bios, Inc). The reactions are analyzed on either 8% polyacrylamide gels or 3.5% agarose gels. Chromosome mapping is determined by the presence of an approximately 100 bp PCR fragment in the particular somatic cell hybrid.

### Example 5

### Bacterial Expression of a Polypeptide

[0952] A polynucleotide encoding a polypeptide of the present invention is amplified using PCR oligonucleotide primers corresponding to the 5′ and 3′ ends of the DNA sequence, as outlined in Example 1, to synthesize insertion fragments. The primers used to amplify the cDNA insert should preferably contain restriction sites, such as BamHI and XbaI, at the 5′ end of the primers in order to clone the amplified product into the expression vector. For example, BamHI and XbaI correspond to the restriction enzyme sites on the bacterial expression vector pQE-9. (Qiagen, Inc., Chatsworth, Calif.). This plasmid vector encodes antibiotic resistance (Ampr), a bacterial origin of replication (ori), an IPTG-regulatable promoter/operator (P/O), a ribosome binding site (RBS), a 6-histidine tag (6-His), and restriction enzyme cloning sites.

[0953] The pQE-9 vector is digested with BamHI and XbaI and the amplified fragment is ligated into the pQE-9 vector maintaining the reading frame initiated at the bacterial RBS. The ligation mixture is then used to transform the E. coli strain M15/rep4 (Qiagen, Inc.) which contains multiple copies of the plasmid pREP4, which expresses the lacI repressor and also confers kanamycin resistance (Kanr). Transformants are identified by their ability to grow on LB plates and ampicillin/kanamycin resistant colonies are selected. Plasmid DNA is isolated and confirmed by restriction analysis.

[0954] Clones containing the desired constructs are grown overnight (O/N) in liquid culture in LB media supplemented with both Amp (100 ug/ml) and Kan (25 ug/ml). The ON culture is used to inoculate a large culture at a ratio of 1:100 to 1:250. The cells are grown to an optical density 600 (O.D.⁶⁰⁰) of between 0.4 and 0.6. IPTG (Isopropyl-B-D-thiogalacto pyranoside) is then added to a final concentration of 1 mM. IPTG induces by inactivating the lacd repressor, clearing the P/O leading to increased gene expression.

[0955] Cells are grown for an extra 3 to 4 hours. Cells are then harvested by centrifugation (20 mins at 6000× g). The cell pellet is solubilized in the chaotropic agent 6 Molar Guanidine HCl by stirring for 3-4 hours at 4° C. The cell debris is removed by centrifugation, and the supernatant containing the polypeptide is loaded onto a nickel-nitrilo-tri-acetic acid (“Ni-NTA”) affinity resin column (available from QIAGEN, Inc., supra). Proteins with a 6 x His tag bind to the Ni-NTA resin with high affinity and can be purified in a simple one-step procedure (for details see: The QlAexpressionist (1995) QIAGEN, Inc., supra).

[0956] Briefly, the supernatant is loaded onto the column in 6 M guanidine-HCI, pH 8. The column is first washed with 10 volumes of 6 M guanidine-HCl, pH 8, then washed with 10 volumes of 6 M guanidine-HCl pH 6, and finally the polypeptide is eluted with 6 M guanidine-HCl, pH 5.

[0957] The purified protein is then renatured by dialyzing it against phosphate-buffered saline (PBS) or 50 mM Na-acetate, pH 6 buffer plus 200 mM NaCl. Alternatively, the protein can be successfully refolded while immobilized on the Ni-NTA column. The recommended conditions are as follows: renature using a linear 6M-1M urea gradient in 500 mM NaCl, 20% glycerol, 20 mM Tris/HCI pH 7.4, containing protease inhibitors. The renaturation should be performed over a period of 1.5 hours or more. After renaturation the proteins are eluted by the addition of 250 mM immidazole. Immidazole is removed by a final dialyzing step against PBS or 50 mM sodium acetate pH 6 buffer plus 200 mM NaCI. The purified protein is stored at 4° C. or frozen at −80° C.

[0958] In addition to the above expression vector, the present invention further includes an expression vector, called pHE4a (ATCC Accession Number 209645, deposited on Feb. 25, 1998) which contains phage operator and promoter elements operatively linked to a polynucleotide of the present invention. This vector contains: 1) a neomycinphosphotransferase gene as a selection marker, 2) an E. coli origin of replication, 3) a T5 phage promoter sequence, 4) two lac operator sequences, 5) a Shine-Delgarno sequence, and 6) the lactose operon repressor gene (lacIq). The origin of replication (oriC) is derived from pUC19 (LTI, Gaithersburg, Md.). The promoter and operator sequences are made synthetically.

[0959] DNA can be inserted into the pHE4a by restricting the vector with NdeI and XbaI, BamHI, XhoI, or Asp718, running the restricted product on a gel, and isolating the larger fragment (the stuffer fragment should be about 310 base pairs). The DNA insert is generated according to the PCR protocol described in Example 1, using PCR primers having restriction sites for NdeI (5′ primer) and XbaI, BamHI, XhoI, or Asp718 (3′ primer). The PCR insert is gel purified and restricted with compatible enzymes. The insert and vector are ligated according to standard protocols.

[0960] The engineered vector could easily be substituted in the above protocol to express protein in a bacterial system.

### Example 6

### Purification of a Polypeptide from an Inclusion Body

[0961] The following alternative method can be used to purify a polypeptide expressed in E coli when it is present in the form of inclusion bodies. Unless otherwise specified, all of the following steps are conducted at 4-10° C.

[0962] Upon completion of the production phase of the E. coli fermentation, the cell culture is cooled to 4-10° C. and the cells harvested by continuous centrifugation at 15,000 rpm (Heraeus Sepatech). On the basis of the expected yield of protein per unit weight of cell paste and the amount of purified protein required, an appropriate amount of cell paste, by weight, is suspended in a buffer solution containing 100 mM Tris, 50 mM EDTA, pH 7.4. The cells are dispersed to a homogeneous suspension using a high shear mixer.

[0963] The cells are then lysed by passing the solution through a microfluidizer (Microfuidics, Corp. or APV Gaulin, Inc.) twice at 4000-6000 psi. The homogenate is then mixed with NaCl solution to a final concentration of 0.5 M NaCl, followed by centrifugation at 7000× g for 15 min. The resultant pellet is washed again using 0.5M NaCl, 100 mM Tris, 50 mM EDTA, pH 7.4.

[0964] The resulting washed inclusion bodies are solubilized with 1.5 M guanidine hydrochloride (GuHCl) for 2-4 hours. After 7000× g centrifugation for 15 min., the pellet is discarded and the polypeptide containing supernatant is incubated at 4° C. overnight to allow further GuHCl extraction.

[0965] Following high speed centrifugation (30,000× g) to remove insoluble particles, the GuHCI solubilized protein is refolded by quickly mixing the GuHCl extract with 20 volumes of buffer containing 50 mM sodium, pH 4.5, 150 mM NaCl, 2 mM EDTA by vigorous stirring. The refolded diluted protein solution is kept at 4° C. without mixing for 12 hours prior to further purification steps.

[0966] To clarify the refolded polypeptide solution, a previously prepared tangential filtration unit equipped with 0.16 μm membrane filter with appropriate surface area (e.g., Filtron), equilibrated with 40 mM sodium acetate, pH 6.0 is employed. The filtered sample is loaded onto a cation exchange resin (e.g., Poros HS-50, Perseptive Biosystems). The column is washed with 40 mM sodium acetate, pH 6.0 and eluted with 250 mM, 500 mM, 1000 mM, and 1500 mM NaCl in the same buffer, in a stepwise manner. The absorbance at 280 nm of the effluent is continuously monitored. Fractions are collected and further analyzed by SDS-PAGE.

[0967] Fractions containing the polypeptide are then pooled and mixed with 4 volumes of water. The diluted sample is then loaded onto a previously prepared set of tandem columns of strong anion (Poros HQ-50, Perseptive Biosystems) and weak anion (Poros CM-20, Perseptive Biosystems) exchange resins. The columns are equilibrated with 40 mM sodium acetate, pH 6.0. Both columns are washed with 40 mM sodium acetate, pH 6.0, 200 mM NaCl. The CM-20 column is then eluted using a 10 column volume linear gradient ranging from 0.2 M NaCl, 50 mM sodium acetate, pH 6.0 to 1.0 M NaCl, 50 mM sodium acetate, pH 6.5. Fractions are collected under constant A₂₈₀ monitoring of the effluent. Fractions containing the polypeptide (determined, for instance, by 16% SDS-PAGE) are then pooled.

[0968] The resultant polypeptide should exhibit greater than 95% purity after the above refolding and purification steps. No major contaminant bands should be observed from Commassie blue stained 16% SDS-PAGE gel when 5 μg of purified protein is loaded. The purified protein can also be tested for endotoxin/LPS contamination, and typically the LPS content is less than 0.1 ng/ml according to LAL assays.

### Example 7

### Cloning and Expression of a Polypeptide in a Baculovirus Expression System

[0969] In this example, the plasmid shuttle vector pA2 is used to insert a polynucleotide into a baculovirus to express a polypeptide. This expression vector contains the strong polyhedrin promoter of the Autographa californica nuclear polyhedrosis virus (AcMNPV) followed by convenient restriction sites such as BamHI, Xba I and Asp718. The polyadenylation site of the simian virus 40 (“SV40”) is used for efficient polyadenylation. For easy selection of recombinant virus, the plasmid contains the beta-galactosidase gene from E. coli under control of a weak Drosophila promoter in the same orientation, followed by the polyadenylation signal of the polyhedrin gene. The inserted genes are flanked on both sides by viral sequences for cell-mediated homologous recombination with wild-type viral DNA to generate a viable virus that express the cloned polynucleotide.

[0970] Many other baculovirus vectors can be used in place of the vector above, such as pAc373, pVL941, and pAcIM1, as one skilled in the art would readily appreciate, as long as the construct provides appropriately located signals for transcription, translation, secretion and the like, including a signal peptide and an in-frame AUG as required. Such vectors are described, for instance, in Luckow et al., Virology 170:31-39 (1989).

[0971] Specifically, the cDNA sequence contained in the deposited clone, including the AUG initiation codon, is amplified using the PCR protocol described in Example 1. If a naturally occurring signal sequence is used to produce the polypeptide of the present invention, the pA2 vector does not need a second signal peptide. Alternatively, the vector can be modified (pA2 GP) to include a baculovirus leader sequence, using the standard methods described in Summers et al., “A Manual of Methods for Baculovirus Vectors and Insect Cell Culture Procedures,” Texas Agricultural Experimental Station Bulletin No. 1555 (1987).

[0972] The amplified fragment is isolated from a 1% agarose gel using a commercially available kit (“Geneclean,” BIO 101 Inc., La Jolla, Calif.). The fragment then is digested with appropriate restriction enzymes and again purified on a 1% agarose gel.

[0973] The plasmid is digested with the corresponding restriction enzymes and optionally, can be dephosphorylated using calf intestinal phosphatase, using routine procedures known in the art. The DNA is then isolated from a 1% agarose gel using a commercially available kit (“Geneclean” BIO 101 Inc., La Jolla, Calif.).

[0974] The fragment and the dephosphorylated plasmid are ligated together with T4 DNA ligase. E. coli HB 101 or other suitable E. coli hosts such as XL-1 Blue (Stratagene Cloning Systems, La Jolla, Calif.) cells are transformed with the ligation mixture and spread on culture plates. Bacteria containing the plasmid are identified by digesting DNA from individual colonies and analyzing the digestion

[0975] roduct by gel electrophoresis. The sequence of the cloned fragment is confirmed by DNA sequencing.

[0976] Five μg of a plasmid containing the polynucleotide is co-transfected with 1.0 μg of a commercially available linearized baculovirus DNA (“BaculoGold™ baculovirus DNA”, Pharmingen, San Diego, Calif.), using the lipofection method described by Feigner et al., Proc. Natl. Acad. Sci. USA 84:7413-7417 (1987). One μg of BaculoGoldTM virus DNA and 5 μg of the plasmid are mixed in a sterile well of a microtiter plate containing 50 μl of serum-free Grace's medium (Life Technologies Inc., Gaithersburg, Md.). Afterwards, 10 μl Lipofectin plus 90 μl Grace's medium are added, mixed and incubated for 15 minutes at room temperature. Then the transfection mixture is added drop-wise to Sf9 insect cells (ATCC CRL 1711) seeded in a 35 mm tissue culture plate with 1 ml Grace's medium without serum. The plate is then incubated for 5 hours at 27° C. The transfection solution is then removed from the plate and 1 ml of Grace's insect medium supplemented with 10% fetal calf serum is added. Cultivation is then continued at 27° C. for four days.

[0977] After four days the supernatant is collected and a plaque assay is performed, as described by Summers and Smith, supra. An agarose gel with “Blue Gal” (Life Technologies Inc., Gaithersburg) is used to allow easy identification and isolation of gal-expressing clones, which produce blue-stained plaques. (A detailed description of a “plaque assay” of this type can also be found in the user's guide for insect cell culture and baculovirology distributed by Life Technologies Inc., Gaithersburg, page 9-10.) After appropriate incubation, blue stained plaques are picked with the tip of a micropipettor (e.g., Eppendorf). The agar containing the recombinant viruses is then resuspended in a microcentrifuge tube containing 200 μl of Grace's medium and the suspension containing the recombinant baculovirus is used to infect Sf9 cells seeded in 35 mm dishes. Four days later the supernatants of these culture dishes are harvested and then they are stored at 4° C.

[0978] To verify the expression of the polypeptide, Sf9 cells are grown in Grace's medium supplemented with 10% heat-inactivated FBS. The cells are infected with the recombinant baculovirus containing the polynucleotide at a multiplicity of infection (“MOI”) of about 2. If radiolabeled proteins are desired, 6 hours later the medium is removed and is replaced with SF900 II medium minus methionine and cysteine (available from Life Technologies Inc., Rockville, Md.). After 42 hours, 5 μCi of ³⁵S-methionine and 5 μCi ³⁵S-cysteine (available from Amersham) are added. The cells are further incubated for 16 hours and then are harvested by centrifugation. The proteins in the supernatant as well as the intracellular proteins are analyzed by SDS-PAGE followed by autoradiography (if radiolabeled).

[0979] Microsequencing of the amino acid sequence of the amino terminus of purified protein may be used to determine the amino terminal sequence of the produced protein.

### Example 8

### Expression of a Polypeptide in Mammalian Cells

[0980] The polypeptide of the present invention can be expressed in a mammalian cell. A typical mammalian expression vector contains a promoter element, which mediates the initiation of transcription of mRNA, a protein coding sequence, and signals required for the termination of transcription and polyadenylation of the transcript. Additional elements include enhancers, Kozak sequences and intervening sequences flanked by donor and acceptor sites for RNA splicing. Highly efficient transcription is achieved with the early and late promoters from SV40, the long terminal repeats (LTRs) from Retroviruses, e.g., RSV, HTLVI, HIVI and the early promoter of the cytomegalovirus (CMV). However, cellular elements can also be used (e.g., the human actin promoter).

[0981] Suitable expression vectors for use in practicing the present invention include, for example, vectors such as pSVL and pMSG (Pharmacia, Uppsala, Sweden), pRSVcat (ATCC 37152), pSV2dhfr (ATCC 37146), pBC12MI (ATCC 67109), pCMVSport 2.0, and pCMVSport 3.0. Mammalian host cells that could be used include, human Hela, 293, H9 and Jurkat cells, mouse NIH3T3 and C127 cells, Cos 1, Cos 7 and CV1, quail QC1-3 cells, mouse L cells and Chinese hamster ovary (CHO) cells.

[0982] Alternatively, the polypeptide can be expressed in stable cell lines containing the polynucleotide integrated into a chromosome. The co-transfection with a selectable marker such as DHFR, gpt, neomycin, or hygromycin allows the identification and isolation of the transfected cells.

[0983] The transfected gene can also be amplified to express large amounts of the encoded protein. The DHFR (dihydrofolate reductase) marker is useful in developing cell lines that carry several hundred or even several thousand copies of the gene of interest. (See, e.g., Alt, F. W., et al., J. Biol. Chem. 253:1357-1370 (1978); Hamlin, J. L. and Ma, C., Biochem. et Biophys. Acta, 1097:107-143 (1990); Page, M. J. and Sydenham, M. A., Biotechnology 9:64-68 (1991).) Another useful selection marker is the enzyme glutamine synthase (GS) (Murphy et al., Biochem J. 227:277-279 (1991); Bebbington et al., Bio/Technology 10:169-175 (1992). Using these markers, the mammalian cells are grown in selective medium and the cells with the highest resistance are selected. These cell lines contain the amplified gene(s) integrated into a chromosome. Chinese hamster ovary (CHO) and NSO cells are often used for the production of proteins.

[0984] Derivatives of the plasmid pSV2-dhfr (ATCC Accession No. 37146), the expression vectors pC4 (ATCC Accession No. 209646) and pC6 (ATCC Accession No.209647) contain the strong promoter (LTR) of the Rous Sarcoma Virus (Cullen et al., Molecular and Cellular Biology, 438-447 (March, 1985)) plus a fragment of the CMV-enhancer (Boshart et al., Cell 41:521-530 (1985).) Multiple cloning sites, e.g., with the restriction enzyme cleavage sites BamHI, XbaI and Asp7l8, facilitate the cloning of the gene of interest. The vectors also contain the 3′ intron, the polyadenylation and termination signal of the rat preproinsulin gene, and the mouse DHFR gene under control of the SV40 early promoter.

[0985] Specifically, the plasmid pC6, for example, is digested with appropriate restriction enzymes and then dephosphorylated using calf intestinal phosphates by procedures known in the art. The vector is then isolated from a 1% agarose gel.

[0986] A polynucleotide of the present invention is amplified according to the protocol outlined in Example 1. If a naturally occurring signal sequence is used to produce the polypeptide of the present invention, the vector does not need a second signal peptide. Alternatively, if a naturally occurring signal sequence is not used, the vector can be modified to include a heterologous signal sequence. (See, e.g., International Publication No. WO 96/34891.)

[0987] The amplified fragment is isolated from a 1% agarose gel using a commercially available kit (“Geneclean,” BIO 101 Inc., La Jolla, Calif.). The fragment then is digested with appropriate restriction enzymes and again purified on a 1% agarose gel.

[0988] The amplified fragment is then digested with the same restriction enzyme and purified on a 1% agarose gel. The isolated fragment and the dephosphorylated vector are then ligated with T4 DNA ligase. E. coli HB11 or XL-1 Blue cells are then transformed and bacteria are identified that contain the fragment inserted into plasmid pC6 using, for instance, restriction enzyme analysis.

[0989] Chinese hamster ovary cells lacking an active DHFR gene is used for transfection. Five μg of the expression plasmid pC6 or pC4 is cotransfected with 0.5 μg of the plasmid pSVneo using lipofectin (Felgner et al., supra). The plasmid pSV2-neo contains a dominant selectable marker, the neo gene from Tn5 encoding an enzyme that confers resistance to a group of antibiotics including G418. The cells are seeded in alpha minus MEM supplemented with 1 mg/ml G418. After 2 days, the cells are trypsinized and seeded in hybridoma cloning plates (Greiner, Germany) in alpha minus MEM supplemented with 10, 25, or 50 ng/ml of methotrexate plus 1 mg/ml G418. After about 10-14 days single clones are trypsinized and then seeded in 6-well petri dishes or 10 ml flasks using different concentrations of methotrexate (50 nM, 100 nM, 200 nM, 400 nM, 800 nM). Clones growing at the highest concentrations of methotrexate are then transferred to new 6-well plates containing even higher concentrations of methotrexate (1 μM, 2 μM, 5 μM, 10 mM, 20 mM). The same procedure is repeated until clones are obtained which grow at a concentration of 100-200 μM. Expression of the desired gene product is analyzed, for instance, by SDS-PAGE and Western blot or by reversed phase HPLC analysis.

### Example 9

### Protein Fusions

[0990] The polypeptides of the present invention are preferably fused to other proteins. These fusion proteins can be used for a variety of applications. For example, fusion of the present polypeptides to His-tag, HA-tag, protein A, IgG domains, and maltose binding protein facilitates purification. (See Example 5; see also EP A 394,827; Traunecker, et al., Nature 331:84-86 (1988).) Similarly, fusion to IgG-1, IgG-3, and albumin increases the halflife time in vivo. Nuclear localization signals fused to the polypeptides of the present invention can target the protein to a specific subcellular localization, while covalent heterodimer or homodimers can increase or decrease the activity of a fusion protein. Fusion proteins can also create chimeric molecules having more than one function. Finally, fusion proteins can increase solubility and/or stability of the fused protein compared to the non-fused protein. All of the types of fusion proteins described above can be made by modifying the following protocol, which outlines the fusion of a polypeptide to an IgG molecule, or the protocol described in Example 5.

[0991] Briefly, the human Fc portion of the IgG molecule can be PCR amplified, using primers that span the 5′ and 3′ ends of the sequence described below. These primers also should have convenient restriction enzyme sites that will facilitate cloning into an expression vector, preferably a mammalian expression vector.

[0992] For example, if pC4 (ATCC Accession No. 209646) is used, the human Fc portion can be ligated into the BamHI cloning site. Note that the 3′ BamHI site should be destroyed. Next, the vector containing the human Fc portion is re-restricted with BamHI, linearizing the vector, and a polynucleotide of the present invention, isolated by the PCR protocol described in Example 1, is ligated into this BamHl site. Note that the polynucleotide is cloned without a stop codon, otherwise a fusion protein will not be produced.

[0993] If the naturally occurring signal sequence is used to produce the polypeptide of the present invention, pC4 does not need a second signal peptide. Alternatively, if the naturally occurring signal sequence is not used, the vector can be modified to include a heterologous signal sequence. (See, e.g., International Publication No. WO 96/34891.)

[0994] Human IgG Fc region:

| | |
|---|---|
| GGGATCCGGAGCCCAAATCTTCTGACAAAACTCACACATGCCCACCGTGC | (SEQ ID NO:1) |
| CCAGCACCTGAATTCGAGGGTGCACCGTCAGTCTTCCTCTTCCCCCCAAAA | |
| CCCAAGGACACCCTCATGATCTCCCGGACTCCTGAGGTCACATGCGTGGTG | |
| GTGGACGTAAGCCACGAAGACCCTGAGGTCAAGTTCAACTGGTACGTGGA | |
| CGGCGTGGAGGTGCATAATGCCAAGACAAAGCCGCGGGAGGAGCAGTAC | |
| AACAGCACGTACCGTGTGGTCAGCGTCCTCACCGTCCTGCACCAGGACTGG | |
| CTGAATGGCAAGGAGTACAAGTGCAAGGTCTCCAACAAAGCCCTCCCAAC | |
| CCCCATCGAGAAAACCATCTCCAAAGCCAAAGGGCAGCCCCGAGAACCAC | |
| AGGTGTACACCCTGCCCCCATCCCGGGATGAGCTGACCAAGAACCAGGTC | |
| AGCCTGACCTGCCTGGTCAAAGGCTTCTATCCAAGCGACATCGCCGTGGAG | |
| TGGGAGAGCAATGGGCAGCCGGAGAACAACTACAAGACCACGCCTCCCGT | |
| GCTGGACTCCGACGGCTCCTTCTTCCTCTACAGCAAGCTCACCGTGGACAA | |
| GAGCAGGTGGCAGCAGGGGAACGTCTTCTCATGCTCCGTGATGCATGAGG | |
| CTCTGCACAACCACTACACGCAGAAGAGCCTCTCCCTGTCTCCGGGTAAAT | |
| GAGTGCGACGGCCGCGACTCTAGAGGAT | |

### Example 10

### Production of an Antibody from a Polypeptide

[0995] Hybridoma Technology

[0996] The antibodies of the present invention can be prepared by a variety of methods. (See, Current Protocols, Chapter 2.) As one example of such methods, cells expressing polypeptide of the present invention are administered to an animal to induce the production of sera containing polyclonal antibodies. In a preferred method, a preparation of polypeptide of the present invention is prepared and purified to render it substantially free of natural contaminants. Such a preparation is then introduced into an animal in order to produce polyclonal antisera of greater specific activity.

[0997] Monoclonal antibodies specific for polypeptide of the present invention are prepared using hybridoma technology (Kohler et al., Nature 256:495 (1975); Kohler et al., Eur. J. Immunol. 6:511 (1976); Kohler et al., Eur. J. Immunol. 6:292 (1976); Hammerling et al., in: Monoclonal Antibodies and T-Cell Hybridomas, Elsevier, N.Y., pp. 563-681 (1981)). In general, an animal (preferably a mouse) is immunized with polypeptide of the present invention or, more preferably, with a secreted polypeptide of the present invention-expressing cell. Such polypeptide-expressing cells are cultured in any suitable tissue culture medium, preferably in Earle's modified Eagle's medium supplemented with 10% fetal bovine serum (inactivated at about 56° C.), and supplemented with about 10 g/l of nonessential amino acids, about 1,000 U/ml of penicillin, and about 100 μg/ml of streptomycin.

[0998] The splenocytes of such mice are extracted and fused with a suitable myeloma cell line. Any suitable myeloma cell line may be employed in accordance with the present invention; however, it is preferable to employ the parent myeloma cell line (SP20), available from the ATCC. After fusion, the resulting hybridoma cells are selectively maintained in HAT medium, and then cloned by limiting dilution as described by Wands et al. (Gastroenterology 80:225-232 (1981)). The hybridoma cells obtained through such a selection are then assayed to identify clones which secrete antibodies capable of binding the polypeptide of the present invention.

[0999] Alternatively, additional antibodies capable of binding to polypeptide of the present invention can be produced in a two-step procedure using anti-idiotypic antibodies. Such a method makes use of the fact that antibodies are themselves antigens, and therefore, it is possible to obtain an antibody which binds to a second antibody. In accordance with this method, protein specific antibodies are used to immunize an animal, preferably a mouse. The splenocytes of such an animal are then used to produce hybridoma cells, and the hybridoma cells are screened to identify clones which produce an antibody whose ability to bind to the polypeptide of the present invention-specific antibody can be blocked by polypeptide of the present invention. Such antibodies comprise anti-idiotypic antibodies to the polypeptide of the present invention-specific antibody and are used to immunize an animal to induce formation of further polypeptide of the present invention-specific antibodies.

[1000] For in vivo use of antibodies in humans, an antibody is “humanized”. Such antibodies can be produced using genetic constructs derived from hybridoma cells producing the monoclonal antibodies described above. Methods for producing chimeric and humanized antibodies are known in the art and are discussed herein. (See, for review, Morrison, Science 229:1202 (1985); Oi et al., BioTechniques 4:214 (1986); Cabilly et al., U.S. Pat. No. 4,816,567; Taniguchi et al., EP 171496; Morrison et al., EP 173494; Neuberger et al., WO 8601533; Robinson et al., International Publication No. WO 8702671; Boulianne et al., Nature 312:643 (1984); Neuberger et al., Nature 314:268 (1985).)

[1001] Isolation of Antibody Fragments Directed Against Polypeptide of the Present Invention From a Library of scFvs

[1002] Naturally occurring V-genes isolated from human PBLs are constructed into a library of antibody fragments which contain reactivities against polypeptide of the present invention to which the donor may or may not have been exposed (see e.g., U.S. Pat. No. 5,885,793 incorporated herein by reference in its entirety).

[1003] Rescue of the Library.

[1004] A library of scFvs is constructed from the RNA of human PBLs as described in International Publication No. WO 92/01047. To rescue phage displaying antibody fragments, approximately 10⁹ E. coli harboring the phagemid are used to inoculate 50 ml of 2× TY containing 1% glucose and 100 μg/ml of ampicillin (2× TY-AMP-GLU) and grown to an O.D. of 0.8 with shaking. Five ml of this culture is used to inoculate 50 ml of 2× TY-AMP-GLU, 2×108 TU of delta gene 3 helper (M13 delta gene III, see International Publication No. WO 92/01047) are added and the culture incubated at 37° C. for 45 minutes without shaking and then at 37° C. for 45 minutes with shaking. The culture is centrifuged at 4000 r.p.m. for 10 min. and the pellet resuspended in 2 liters of 2× TY containing 100 μg/ml ampicillin and 50 ug/ml kanamycin and grown overnight. Phage are prepared as described in International Application No. WO 92/01047.

[1005] M13 delta gene III is prepared as follows: M13 delta gene III helper phage does not encode gene III protein, hence the phage(mid) displaying antibody fragments have a greater avidity of binding to antigen. Infectious M13 delta gene III particles are made by growing the helper phage in cells harboring a pUC 19 derivative supplying the wild type gene III protein during phage morphogenesis. The culture is incubated for 1 hour at 37° C. without shaking and then for a further hour at 37° C. with shaking. Cells are spun down (IEC-Centra 8,400 r.p.m. for 10 min), resuspended in 300 ml 2×TY broth containing 100 μg ampicillin/ml and 25 μg kanamycin/ml (2× TY-AMP-KAN) and grown overnight, shaking at 37° C. Phage particles are purified and concentrated from the culture medium by two PEG-precipitations (Sambrook et al., 1990), resuspended in 2 ml PBS and passed through a 0.45 μm filter (Minisart NML; Sartorius) to give a final concentration of approximately 10¹³ transducing units/ml (ampicillin-resistant clones).

[1006] Panning of the Library.

[1007] Immunotubes (Nunc) are coated overnight in PBS with 4 ml of either 100 μg/ml or 10 μg/ml of a polypeptide of the present invention. Tubes are blocked with 2% Marvel-PBS for 2 hours at 37° C. and then washed 3 times in PBS. Approximately 1013 TU of phage is applied to the tube and incubated for 30 minutes at room temperature tumbling on an over and under turntable and then left to stand for another 1.5 hours. Tubes are washed 10 times with PBS 0.1% Tween-20 and 10 times with PBS. Phage are eluted by adding 1 ml of 100 mM triethylamine and rotating 15 minutes on an under and over turntable after which the solution is immediately neutralized with 0.5 ml of 1.0M Tris-HCl, pH 7.4. Phage are then used to infect 10 ml of mid-log E. coli TG1 by incubating eluted phage with bacteria for 30 minutes at 37° C. The E. coli are then plated on TYE plates containing 1% glucose and 100 μg/ml ampicillin. The resulting bacterial library is then rescued with delta gene 3 helper phage as described above to prepare phage for a subsequent round of selection. This process is then repeated for a total of 4 rounds of affinity purification with tube-washing increased to 20 times with PBS, 0.1% Tween-20 and 20 times with PBS for rounds 3 and 4.

[1008] Characterization of Binders.

[1009] Eluted phage from the 3rd and 4th rounds of selection are used to infect E. coli HB 2151 and soluble scFv is produced (Marks, et al., 1991) from single colonies for assay. ELISAs are performed with microtitre plates coated with 10 pg/ml of the polypeptide of the present invention in 50 mM bicarbonate pH 9.6. Clones positive in ELISA are further characterized by PCR fingerprinting (see, e.g., International Application No. WO 92/01047) and then by sequencing. These ELISA positive clones may also be fiirther characterized by techniques known in the art, such as, for example, epitope mapping, binding affinity, receptor signal transduction, ability to block or competitively inhibit antibody/antigen binding, and competitive agonistic or antagonistic activity.

### Example 11

### Method of Determining Alterations in a Gene Corresponding to a Polynucleotide

[1010] RNA isolated from entire families or individual patients presenting with a phenotype of interest (such as a disease) is isolated. cDNA is then generated from these RNA samples using protocols known in the art. (See, Sambrook.) The cDNA is then used as a template for PCR, employing primers surrounding regions of interest in SEQ ID NO:X; and/or the nucleotide sequence of the cDNA contained in Clone ID NO:Z. Suggested PCR conditions consist of 35 cycles at 95 degrees C. for 30 seconds; 60-120 seconds at 52-58 degrees C.; and 60-120 seconds at 70 degrees C., using buffer solutions described in Sidransky et al., Science 252:706 (1991).

[1011] PCR products are then sequenced using primers labeled at their 5′ end with T4 polynucleotide kinase, employing SequiTherm Polymerase (Epicentre Technologies). The intron-exon boundaries of selected exons is also determined and genomic PCR products analyzed to confirm the results. PCR products harboring suspected mutations are then cloned and sequenced to validate the results of the direct sequencing.

[1012] PCR products are cloned into T-tailed vectors as described in Holton et al., Nucleic Acids Research, 19:1156 (1991) and sequenced with T7 polymerase (United States Biochemical). Affected individuals are identified by mutations not present in unaffected individuals.

[1013] Genomic rearrangements are also observed as a method of determining alterations in a gene corresponding to a polynucleotide. Genomic clones isolated according to Example 2 are nick-translated with digoxigenindeoxy-uridine 5′-triphosphate (Boehringer Manheim), and FISH performed as described in Johnson et al., Methods Cell Biol. 35:73-99 (1991). Hybridization with the labeled probe is carried out using a vast excess of human cot-1 DNA for specific hybridization to the corresponding genomic locus.

[1014] Chromosomes are counterstained with 4,6-diamino-2-phenylidole and propidium iodide, producing a combination of C- and R-bands. Aligned images for precise mapping are obtained using a triple-band filter set (Chroma Technology, Brattleboro, Vt.) in combination with a cooled charge-coupled device camera (Photometrics, Tucson, Ariz.) and variable excitation wavelength filters. (Johnson et al., Genet. Anal. Tech. Appl., 8:75 (1991).) Image collection, analysis and chromosomal fractional length measurements are performed using the ISee Graphical Program System. (Inovision Corporation, Durham, N.C.) Chromosome alterations of the genomic region hybridized by the probe are identified as insertions, deletions, and translocations. These alterations are used as a diagnostic marker for an associated disease.

### Example 12

### Method of Detecting Abnormal Levels of a Polypeptide in a Biological Sample

[1015] A polypeptide of the present invention can be detected in a biological sample, and if an increased or decreased level of the polypeptide is detected, this polypeptide is a marker for a particular phenotype. Methods of detection are numerous, and thus, it is understood that one skilled in the art can modify the following assay to fit their particular needs.

[1016] For example, antibody-sandwich ELISAs are used to detect polypeptides in a sample, preferably a biological sample. Wells of a microtiter plate are coated with specific antibodies, at a final concentration of 0.2 to 10 ug/ml. The antibodies are either monoclonal or polyclonal and are produced by the method described in Example 10. The wells are blocked so that non-specific binding of the polypeptide to the well is reduced.

[1017] The coated wells are then incubated for >2 hours at RT with a sample containing the polypeptide. Preferably, serial dilutions of the sample should be used to validate results. The plates are then washed three times with deionized or distilled water to remove unbound polypeptide.

[1018] Next, 50 ul of specific antibody-alkaline phosphatase conjugate, at a concentration of 25-400 ng, is added and incubated for 2 hours at room temperature. The plates are again washed three times with deionized or distilled water to remove unbound conjugate.

[1019] Add 75 ul bf 4-methylumbelliferyl phosphate (MUP) or p-nitrophenyl phosphate (NPP) substrate solution to each well and incubate 1 hour at room temperature. Measure the reaction by a microtiter plate reader. Prepare a standard curve, using serial dilutions of a control sample, and plot polypeptide concentration on the X-axis (log scale) and fluorescence or absorbance of the Y-axis (linear scale). Interpolate the concentration of the polypeptide in the sample using the standard curve.

### Example 13

### Formulation

[1020] The invention also provides methods of treatment and/or prevention of diseases or disorders (such as, for example, any one or more of the diseases or disorders disclosed herein) by administration to a subject of an effective amount of a Therapeutic. By therapeutic is meant polynucleotides or polypeptides of the invention (including fragments and variants), agonists or antagonists thereof, and/or antibodies thereto, in combination with a pharmaceutically acceptable carrier type (e.g., a sterile carrier).

[1021] The Therapeutic will be formulated and dosed in a fashion consistent with good medical practice, taking into account the clinical condition of the individual patient (especially the side effects of treatment with the Therapeutic alone), the site of delivery, the method of administration, the scheduling of administration, and other factors known to practitioners. The “effective amount” for purposes herein is thus determined by such considerations.

[1022] As a general proposition, the total pharmaceutically effective amount of the Therapeutic administered parenterally per dose will be in the range of about lug/kg/day to 10 mg/kg/day of patient body weight, although, as noted above, this will be subject to therapeutic discretion. More preferably, this dose is at least 0.01 mg/kg/day, and most preferably for humans between about 0.01 and 1 mg/kg/day for the hormone. If given continuously, the Therapeutic is typically administered at a dose rate of about 1 ug/kg/hour to about 50 ug/kg/hour, either by 1-4 injections per day or by continuous subcutaneous infusions, for example, using a mini-pump. An intravenous bag solution may also be employed. The length of treatment needed to observe changes and the interval following treatment for responses to occur appears to vary depending on the desired effect.

[1023] Therapeutics can be are administered orally, rectally, parenterally, intracistemally, intravaginally, intraperitoneally, topically (as by powders, ointments, gels, drops or transdermal patch), bucally, or as an oral or nasal spray. “Pharmaceutically acceptable carrier” refers to a non-toxic solid, semisolid or liquid filler, diluent, encapsulating material or formulation auxiliary of any. The term “parenteral” as used herein refers to modes of administration which include intravenous, intramuscular, intraperitoneal, intrasternal, subcutaneous and intraarticular injection and infusion.

[1024] Therapeutics of the invention are also suitably administered by sustained-release systems. Suitable examples of sustained-release Therapeutics are administered orally, rectally, parenterally, intracistemally, intravaginally, intraperitoneally, topically (as by powders, ointments, gels, drops or transdermal patch), bucally, or as an oral or nasal spray. “Pharmaceutically acceptable carrier” refers to a non-toxic solid, semisolid or liquid filler, diluent, encapsulating material or formulation auxiliary of any type. The term “parenteral” as used herein refers to modes of administration which include intravenous, intramuscular, intraperitoneal, intrastemal, subcutaneous and intraarticular injection and infusion.

[1025] Therapeutics of the invention are also suitably administered by sustained-release systems. Suitable examples of sustained-release Therapeutics include suitable polymeric materials (such as, for example, semi-permeable polymer matrices in the form of shaped articles, e.g., films, or mirocapsules), suitable hydrophobic materials (for example as an emulsion in an acceptable oil) or ion exchange resins, and sparingly soluble derivatives (such as, for example, a sparingly soluble salt).

[1026] Sustained-release matrices include polylactides (U.S. Pat. No. 3,773,919, EP 58,481), copolymers of L-glutamic acid and gamma-ethyl-L-glutamate (Sidman et al., Biopolymers 22:547-556 (1983)), poly (2-hydroxyethyl methacrylate) (Langer et al., J. Biomed. Mater. Res. 15:167-277 (1981), and Langer, Chem. Tech. 12:98-105 (1982)), ethylene vinyl acetate (Langer et al., Id.) or poly-D- (-)-3-hydroxybutyric acid (EP 133,988).

[1027] Sustained-release Therapeutics also include liposomally entrapped Therapeutics of the invention (see generally, Langer, Science 249:1527-1533 (1990); Treat et al., in Liposomes in the Therapy of Infectious Disease and Cancer, Lopez-Berestein and Fidler (eds.), Liss, New York, pp. 317-327 and 353-365 (1989)). Liposomes containing the Therapeutic are prepared by methods known per se: DE 3,218,121; Epstein et al., Proc. Natl. Acad. Sci. (USA) 82:3688-3692 (1985); Hwang et al., Proc. Natl. Acad. Sci.(USA) 77:4030-4034 (1980); EP 52,322; EP 36,676; EP 88,046; EP 143,949; EP 142,641; Japanese Pat. Appl. 83-118008; U.S. Pat. Nos. 4,485,045 and 4,544,545; and EP 102,324. Ordinarily, the liposomes are of the small (about 200-800 Angstroms) unilamellar type in which the lipid content is greater than about 30 mol. percent cholesterol, the selected proportion being adjusted for the optimal Therapeutic.

[1028] In yet an additional embodiment, the Therapeutics of the invention are delivered by way of a pump (see Langer, supra; Sefton, CRC Crit. Ref. Biomed. Eng. 14:201 (1987); Buchwald et al., Surgery 88:507 (1980); Saudek et al., N. Engl. J. Med. 321:574 (1989)).

[1029] Other controlled release systems are discussed in the review by Langer (Science 249:1527-1533 (1990)).

[1030] For parenteral administration, in one embodiment, the Therapeutic is formulated generally by mixing it at the desired degree of purity, in a unit dosage injectable form (solution, suspension, or emulsion), with a pharmaceutically acceptable carrier, i.e., one that is non-toxic to recipients at the dosages and concentrations employed and is compatible with other ingredients of the formulation. For example, the formulation preferably does not include oxidizing agents and other compounds that are known to be deleterious to the Therapeutic.

[1031] Generally, the formulations are prepared by contacting the Therapeutic uniformly and intimately with liquid carriers or finely divided solid carriers or both. Then, if necessary, the product is shaped into the desired formulation. Preferably the carrier is a parenteral carrier, more preferably a solution that is isotonic with the blood of the recipient. Examples of such carrier vehicles include water, saline, Ringer's solution, and dextrose solution. Non-aqueous vehicles such as fixed oils and ethyl oleate are also useful herein, as well as liposomes.

[1032] The carrier suitably contains minor amounts of additives such as substances that enhance isotonicity and chemical stability. Such materials are non-toxic to recipients at the dosages and concentrations employed, and include buffers such as phosphate, citrate, succinate, acetic acid, and other organic acids or their salts; antioxidants such as ascorbic acid; low molecular weight (less than about ten residues) polypeptides, e.g., polyarginine or tripeptides; proteins, such as serum albumin, gelatin, or immunoglobulins; hydrophilic polymers such as polyvinylpyrrolidone; amino acids, such as glycine, glutamic acid, aspartic acid, or arginine; monosaccharides, disaccharides, and other carbohydrates including cellulose or its derivatives, glucose, manose, or dextrins; chelating agents such as EDTA; sugar alcohols such as mannitol or sorbitol; counterions such as sodium; and/or nonionic surfactants such as polysorbates, poloxamers, or PEG.

[1033] The Therapeutic is typically formulated in such vehicles at a concentration of about 0.1 mg/ml to 100 mg/ml, preferably 1-10 mg/ml, at a pH of about 3 to 8. It will be understood that the use of certain of the foregoing excipients, carriers, or stabilizers will result in the formation of polypeptide salts.

[1034] Any pharmaceutical used for therapeutic administration can be sterile. Sterility is readily accomplished by filtration through sterile filtration membranes (e.g., 0.2 micron membranes). Therapeutics generally are placed into a container having a sterile access port, for example, an intravenous solution bag or vial having a stopper pierceable by a hypodermic injection needle.

[1035] Therapeutics ordinarily will be stored in unit or multi-dose containers, for example, sealed ampoules or vials, as an aqueous solution or as a lyophilized formulation for reconstitution. As an example of a lyophilized formulation, 10-ml vials are filled with 5 ml of sterile-filtered 1% (w/v) aqueous Therapeutic solution, and the resulting mixture is lyophilized. The infusion solution is prepared by reconstituting the lyophilized Therapeutic using bacteriostatic Water-for-Injection.

[1036] The invention also provides a pharmaceutical pack or kit comprising one or more containers filled with one or more of the ingredients of the Therapeutics of the invention. Associated with such container(s) can be a notice in the form prescribed by a governmental agency regulating the manufacture, use or sale of pharmaceuticals or biological products, which notice reflects approval by the agency of manufacture, use or sale for human administration. In addition, the Therapeutics may be employed in conjunction with other therapeutic compounds.

[1037] The Therapeutics of the invention may be administered alone or in combination with adjuvants. Adjuvants that may be administered with the Therapeutics of the invention include, but are not limited to, alum, alum plus deoxycholate (ImmunoAg), MTP-PE (Biocine Corp.), QS21 (Genentech, Inc.), BCG (e.g., THERACYS®), MPL and nonviable prepartions of Corynebacterium parvum. In a specific embodiment, Therapeutics of the invention are administered in combination with alum. In another specific embodiment, Therapeutics of the invention are administered in combination with QS-21. Further adjuvants that may be administered with the Therapeutics of the invention include, but are not limited to, Monophosphoryl lipid immunomodulator, AdjuVax 100a, QS-21, QS-18, CRL 1005, Aluminum salts, MF-59, and Virosomal adjuvant technology. Vaccines that may be administered with the Therapeutics of the invention include, but are not limited to, vaccines directed toward protection against MMR (measles, mumps, rubella), polio, varicella, tetanus/diptheria, hepatitis A, hepatitis B, haemophilus influenzae B, whooping cough, pneumonia, influenza, Lyme's Disease, rotavirus, cholera, yellow fever, Japanese encephalitis, poliomyelitis, rabies, typhoid fever, and pertussis. Combinations may be administered either concomitantly, e.g., as an admixture, separately but simultaneously or concurrently; or sequentially. This includes presentations in which the combined agents are administered together as a therapeutic mixture, and also procedures in which the combined agents are administered separately but simultaneously, e.g., as through separate intravenous lines into the same individual. Administration “in combination” further includes the separate administration of one of the compounds or agents given first, followed by the second.

[1038] The Therapeutics of the invention may be administered alone or in combination with other therapeutic agents. Therapeutic agents that may be administered in combination with the Therapeutics of the invention, include but not limited to, chemotherapeutic agents, antibiotics, steroidal and non-steroidal anti-inflammatories, conventional immunotherapeutic agents, and/or therapeutic treatments described below. Combinations may be administered either concomitantly, e.g., as an admixture, separately but simultaneously or concurrently; or sequentially. This includes presentations in which the combined agents are administered together as a therapeutic mixture, and also procedures in which the combined agents are administered separately but simultaneously, e.g., as through separate intravenous lines into the same individual. Administration “in combination” further includes the separate administration of one of the compounds or agents given first, followed by the second.

[1039] In certain embodiments, Therapeutics of the invention are administered in combination with antiretroviral agents, nucleoside/nucleotide reverse transcriptase inhibitors (NRTIs), non-nucleoside reverse transcriptase inhibitors (NNRTIs), and/or protease inhibitors (PIs). NRTIs that may be administered in combination with the Therapeutics of the invention, include, but are not limited to, RETROVIR™ (zidovudine/AZT), VIDEX™ (didanosine/ddl), HIVID™ (zalcitabine/ddC), ZERIT™ (stavudine/d4T), EPIVIR™ (lamivudine/3TC), and COMBIVIR™ (zidovudine/lamivudine). NNRTIs that may be administered in combination with the Therapeutics of the invention, include, but are not limited to, VIRAMUNE™ (nevirapine), RESCRIPTOR™ (delavirdine), and SUSTIVA™ (efavirenz). Protease inhibitors that may be administered in combination with the Therapeutics of the invention, include, but are not limited to, CRIXIVAN™ (indinavir), NORVIR™ (ritonavir), INVIRASE™ (saquinavir), and VIRACEPT™ (nelfinavir). In a specific embodiment, antiretroviral agents, nucleoside reverse transcriptase inhibitors, non-nucleoside reverse transcriptase inhibitors, and/or protease inhibitors may be used in any combination with Therapeutics of the invention to treat AIDS and/or to prevent or treat HIV infection.

[1040] Additional NRTIs include LODENOSINE™ (F-ddA; an acid-stable adenosine NRTI; Triangle/Abbott; COVIRACIL™ (emtricitabine/FTC; structurally related to lamivudine (3TC) but with 3- to 10-fold greater activity in vitro; Triangle/Abbott); dOTC (BCH-10652, also structurally related to lamivudine but retains activity against a substantial proportion of lamivudine-resistant isolates; Biochem Pharma); Adefovir (refused approval for anti-HIV therapy by FDA; Gilead Sciences); PREVEON® (Adefovir Dipivoxil, the active prodrug of adefovir; its active form is PMEA-pp); TENOFOVIR™ (bis-POC PMPA, a PMPA prodrug; Gilead); DAPD/DXG (active metabolite of DAPD; Triangle/Abbott); D-D4FC (related to 3TC, with activity against AZT/3TC-resistant virus); GW420867X (Glaxo Wellcome); ZIAGEN™ (abacavir/159U89; Glaxo Wellcome Inc.); CS-87 (3′azido-2′,3′-dideoxyuridine; WO 99/66936); and S-acyl-2-thioethyl (SATE)-bearing prodrug forms of β-L-FD4C and β-L-FddC (WO 98/17281).

[1041] Additional NNRTIs include COACTINON™ (Emivirine/MKC-442, potent NNRTI of the HEPT class; Triangle/Abbott); CAPRAVIRINE™ (AG-1549/S-1153, a next generation NNRTI with activity against viruses containing the K103N mutation; Agouron); PNU-142721 (has 20- to 50-fold greater activity than its predecessor delavirdine and is active against K103N mutants; Pharmacia & Upjohn); DPC-961 and DPC-963 (second-generation derivatives of efavirenz, designed to be active against viruses with the K103N mutation; DuPont); GW-420867X (has 25-fold greater activity than HBY097 and is active against K103N mutants; Glaxo Wellcome); CALANOLIDE A (naturally occurring agent from the latex tree; active against viruses containing either or both the Y181C and K103N mutations); and Propolis (WO 99/49830).

[1042] Additional protease inhibitors include LOPINAVIR™ (ABT378/r; Abbott Laboratories); BMS-232632 (an azapeptide; Bristol-Myres Squibb); TIPRANAVIR™ (PNU-140690, a non-peptic dihydropyrone; Pharmacia & Upjohn); PD-178390 (a nonpeptidic dihydropyrone; Parke-Davis); BMS 232632 (an azapeptide; Bristol-Myers Squibb); L-756,423 (an indinavir analog; Merck); DMP-450 (a cyclic urea compound; Avid & DuPont); AG-1776 (a peptidomimetic with in vitro activity against protease inhibitor-resistant viruses; Agouron); VX-175/GW-433908 (phosphate prodrug of amprenavir; Vertex & Glaxo Welcome); CGP61755 (Ciba); and AGENERASE™ (amprenavir; Glaxo Wellcome Inc.).

[1043] Additional antiretroviral agents include fusion inhibitors/gp41 binders. Fusion inhibitors/gp41 binders include T-20 (a peptide from residues 643-678 of the HIV gp41 transmembrane protein ectodomain which binds to gp41 in its resting state and prevents transformation to the fusogenic state; Trimeris) and T-1249 (a second-generation fusion inhibitor; Trimeris).

[1044] Additional antiretroviral agents include fusion inhibitors/chemokine receptor antagonists. Fusion inhibitors/chemokine receptor antagonists include CXCR4 antagonists such as AMD 3100 (a bicyclam), SDF-1 and its analogs, and ALX40-4C (a cationic peptide), T22 (an 18 amino acid peptide; Trimeris) and the T22 analogs T134 and T140; CCR5 antagonists such as RANTES (9-68), AOP-RANTES, NNY-RANTES, and TAK-779; and CCR5/CXCR4 antagonists such as NSC 651016 (a distamycin analog). Also included are CCR2B, CCR3, and CCR6 antagonists. Chemokine recpetor agonists such as RANTES, SDF-1, MIP-1α, MIP-1β, etc., may also inhibit fusion.

[1045] Additional antiretroviral agents include integrase inhibitors. Integrase inhibitors include dicaffeoylquinic (DFQA) acids; L-chicoric acid (a dicaffeoyltartaric (DCTA) acid); quinalizarin (QLC) and related anthraquinones; ZINTEVIR™ (AR 177, an oligonucleotide that probably acts at cell surface rather than being a true integrase inhibitor; Arondex); and naphthols such as those disclosed in WO 98/50347.

[1046] Additional antiretroviral agents include hydroxyurea-like compunds such as BCX-34 (a purine nucleoside phosphorylase inhibitor; Biocryst); ribonucleotide reductase inhibitors such as DIDOX™ (Molecules for Health); inosine monophosphate dehydrogenase (IMPDH) inhibitors sucha as VX-497 (Vertex); and myvopholic acids such as CellCept (mycophenolate mofetil; Roche).

[1047] Additional antiretroviral agents include inhibitors of viral integrase, inhibitors of viral genome nuclear translocation such as arylene bis(methylketone) compounds; inhibitors of HIV entry such as AOP-RANTES, NNY-RANTES, RANTES-IgG fusion protein, soluble complexes of RANTES and glycosaminoglycans (GAG), and AMD-3100; nucleocapsid zinc finger inhibitors such as dithiane compounds; targets of HIV Tat and Rev; and pharmacoenhancers such as ABT-378.

[1048] Other antiretroviral therapies and adjunct therapies include cytokines and lymphokines such as MIP-1α, MIP-1β, SDF-1α, IL-2, PROLEUKIN™ (aldesleukin/L2-7001; Chiron), IL-4, IL-10, IL-12, and IL-13; interferons such as IFN-α2a; antagonists of TNFs, NFκB, GM-CSF, M-CSF, and IL-10; agents that modulate immune activation such as cyclosporin and prednisone; vaccines such as Remune™ (HIV Immunogen), APL 400-003 (Apollon), recombinant gp120 and fragments, bivalent (B/E) recombinant envelope glycoprotein, rgp120CM235, MN rgp120, SF-2 rgp120, gp120/soluble CD4 complex, Delta JR-FL protein, branched synthetic peptide derived from discontinuous gp120 C3/C4 domain, fusion-competent immunogens, and Gag, Pol, Nef, and Tat vaccines; gene-based therapies such as genetic suppressor elements (GSEs; WO 98/54366), and intrakines (genetically modified CC chemokines targetted to the ER to block surface expression of newly synthesized CCR5 (Yang et al., PNAS 94:11567-72 (1997); Chen et al., Nat. Med. 3:1110-16 (1997)); antibodies such as the anti-CXCR4 antibody 12G5, the anti-CCR5 antibodies 2D7, 5C7, PA8, PA9, PA10, PA11, PA12, and PA14, the anti-CD4 antibodies Q4120 and RPA-T4, the anti-CCR3 antibody 7B 1, the anti-gp120 antibodies 17b, 48d, 447-52D, 257-D, 268-D and 50.1, anti-Tat antibodies, anti-TNF-α antibodies, and monoclonal antibody 33A; aryl hydrocarbon (AH) receptor agonists and antagonists such as TCDD, 3,3′,4,4′,5-pentachlorobiphenyl, 3,3′,4,4′-tetrachlorobiphenyl, and a-naphthoflavone (WO 98/30213); and antioxidants such as γ-L-glutamyl-L-cysteine ethyl ester (γ-GCE; WO 99/56764).

[1049] In a further embodiment, the Therapeutics of the invention are administered in combination with an antiviral agent. Antiviral agents that may be administered with the Therapeutics of the invention include, but are not limited to, acyclovir, ribavirin, amantadine, and remantidine.

[1050] In other embodiments, Therapeutics of the invention may be administered in combination with anti-opportunistic infection agents. Anti-opportunistic agents that may be administered in combination with the Therapeutics of the invention, include, but are not limited to, TRIMETHOPRIM-SULFAMETHOXAZOLE™, DAPSONE™, PENTAMIDINE™, ATOVAQUONE™, ISONIAZID™, RIFAMPIN™, PYRAZINAMIDE™, ETHAMBUTOL™, RIFABUTIN™, CLARITHROMYCIN™, AZITHROMYCIN™, GANCICLOVIR™, FOSCARNET™, CIDOFOVIR™, FLUCONAZOLE™, ITRACONAZOLE™, KETOCONAZOLE™, ACYCLOVIR™, FAMCICOLVIR™, PYRIMETHAMINE™, LEUCOVORIN™, NEUPOGEN™(filgrastim/G-CSF), and LEUKINE™ (sargramostim/GM-CSF). In a specific embodiment, Therapeutics of the invention are used in any combination with TRIMETHOPRIM-SULFAMETHOXAZOLE™, DAPSONE™, PENTAMIDINE™, and/or ATOVAQUONE™ to prophylactically treat or prevent an opportunistic Pneumocystis carinii pneumonia infection. In another specific embodiment, Therapeutics of the invention are used in any combination with ISONIAZID™, RIFAMPIN™, PYRAZINAMIDE™, and/or ETHAMBUTOL™ to prophylactically treat or prevent an opportunistic Mycobacterium avium complex infection. In another specific embodiment, Therapeutics of the invention are used in any combination with RIFABUTIN™, CLARITHROMYCIN™, and/or AZITHROMYCIN™ to prophylactically treat or prevent an opportunistic Mycobacterium tuberculosis infection. In another specific embodiment, Therapeutics of the invention are used in any combination with GANCICLOVIR™, FOSCARNET™, and/or CIDOFOVIR™ to prophylactically treat or prevent an opportunistic cytomegalovirus infection. In another specific embodiment, Therapeutics of the invention are used in any combination with FLUCONAZOLE™, ITRACONAZOLE™, and/or KETOCONAZOLE™ to prophylactically treat or prevent an opportunistic fungal infection. In another specific embodiment, Therapeutics of the invention are used in any combination with ACYCLOVIR™ and/or FAMCICOLVIR™ to prophylactically treat or prevent an opportunistic herpes simplex virus type I and/or type II infection. In another specific embodiment, Therapeutics of the invention are used in any combination with PYRIMETHAMINE™ and/or LEUCOVORIN™ to prophylactically treat or prevent an opportunistic Toxoplasma gondii infection. In another specific embodiment, Therapeutics of the invention are used in any combination with LEUCOVORIN™ and/or NEUPOGEN™ to prophylactically treat or prevent an opportunistic bacterial infection.

[1051] In a further embodiment, the Therapeutics of the invention are administered in combination with an antibiotic agent. Antibiotic agents that may be administered with the Therapeutics of the invention include, but are not limited to, amoxicillin, beta-lactamases, aminoglycosides, beta-lactam (glycopeptide), beta-lactamases, Clindamycin, chloramphenicol, cephalosporins, ciprofloxacin, ciprofloxacin, erythromycin, fluoroquinolones, macrolides, metronidazole, penicillins, quinolones, rapamycin, rifampin, streptomycin, sulfonamide, tetracyclines, trimethoprim, trimethoprim-sulfamthoxazole, and vancomycin.

[1052] In other embodiments, Therapeutics of the invention are administered in combination with immunosuppressive agents. Immunosuppressive agents that may be administered in combination with the Therapeutics of the invention include, but are not limited to, steroids, cyclosporine, cyclosporine analogs, cyclophosphamide methylprednisone, prednisone, azathioprine, FK-506, 15-deoxyspergualin, and other immunosuppressive agents that act by suppressing the function of responding T cells. Other immunosuppressive agents that may be administered in combination with the Therapeutics of the invention include, but are not limited to, prednisolone, methotrexate, thalidomide, methoxsalen, rapamycin, leflunomide, mizoribine (BREDININ™), brequinar, deoxyspergualin, and azaspirane (SKF 105685), ORTHOCLONE OKT® 3 (muromonab-CD3), SANDIMMUNE™, NEORAL™, SANGDYA™ (cyclosporine), PROGRAF® (FK506, tacrolimus), CELLCEPT® (mycophenolate motefil, of which the active metabolite is mycophenolic acid), IMURAN™ (azathioprine), glucocorticosteroids, adrenocortical steroids such as DELTASONE™ (prednisone) and HYDELTRASOL™ (prednisolone), FOLEX™ and MEXATE™ (methotrxate), OXSORALEN-ULTRA™ (methoxsalen) and RAPAMUNE™ (sirolimus). In a specific embodiment, immunosuppressants may be used to prevent rejection of organ or bone marrow transplantation.

[1053] In an additional embodiment, Therapeutics of the invention are administered alone or in combination with one or more intravenous immune globulin preparations. Intravenous immune globulin preparations that may be administered with the Therapeutics of the invention include, but not limited to, GAMMAR™, IVEEGAM™, SANDOGLOBULIN™, GAMMAGARD S/D™, ATGAM™ (antithymocyte glubulin), and GAMIMUNE™. In a specific embodiment, Therapeutics of the invention are administered in combination with intravenous immune globulin preparations in transplantation therapy (e.g., bone marrow transplant).

[1054] In certain embodiments, the Therapeutics of the invention are administered alone or in combination with an anti-inflammatory agent. Anti-inflammatory agents that may be administered with the Therapeutics of the invention include, but are not limited to, corticosteroids (e.g. betamethasone, budesonide, cortisone, dexamethasone, hydrocortisone, methylprednisolone, prednisolone, prednisone, and triamcinolone), nonsteroidal anti-inflammatory drugs (e.g., diclofenac, diflunisal, etodolac, fenoprofen, floctafenine, flurbiprofen, ibuprofen, indomethacin, ketoprofen, meclofenamate, mefenamic acid, meloxicam, nabumetone, naproxen, oxaprozin, phenylbutazone, piroxicam, sulindac, tenoxicam, tiaprofenic acid, and tolmetin.), as well as antihistamines, aminoarylcarboxylic acid derivatives, arylacetic acid derivatives, arylbutyric acid derivatives, arylcarboxylic acids, arylpropionic acid derivatives, pyrazoles, pyrazolones, salicylic acid derivatives, thiazinecarboxamides, e-acetamidocaproic acid, S-adenosylmethionine, 3-amino-4-hydroxybutyric acid, amixetrine, bendazac, benzydamine, bucolome, difenpiramide, ditazol, emorfazone, guaiazulene, nabumetone, nimesulide, orgotein, oxaceprol, paranyline, perisoxal, pifoxime, proquazone, proxazole, and tenidap.

[1055] In an additional embodiment, the compositions of the invention are administered alone or in combination with an anti-angiogenic agent. Anti-angiogenic agents that may be administered with the compositions of the invention include, but are not limited to, Angiostatin (Entremed, Rockville, Md.), Troponin-1 (Boston Life Sciences, Boston, Mass.), anti-Invasive Factor, retinoic acid and derivatives thereof, paclitaxel (Taxol), Suramin, Tissue Inhibitor of Metalloproteinase-1, Tissue Inhibitor of Metalloproteinase-2, VEGI, Plasminogen Activator Inhibitor-1, Plasminogen Activator Inhibitor-2, and various forms of the lighter “d group” transition metals.

[1056] Lighter “d group” transition metals include, for example, vanadium, molybdenum, tungsten, titanium, niobium, and tantalum species. Such transition metal species may form transition metal complexes. Suitable complexes of the above-mentioned transition metal species include oxo transition metal complexes.

[1057] Representative examples of vanadium complexes include oxo vanadium complexes such as vanadate and vanadyl complexes. Suitable vanadate complexes include metavanadate and orthovanadate complexes such as, for example, ammonium metavanadate, sodium metavanadate, and sodium orthovanadate. Suitable vanadyl complexes include, for example, vanadyl acetylacetonate and vanadyl sulfate including vanadyl sulfate hydrates such as vanadyl sulfate mono- and trihydrates.

[1058] Representative examples of tungsten and molybdenum complexes also include oxo complexes. Suitable oxo tungsten complexes include tungstate and tungsten oxide complexes. Suitable tungstate complexes include ammonium tungstate, calcium tungstate, sodium tungstate dihydrate, and tungstic acid. Suitable tungsten oxides include tungsten (IV) oxide and tungsten (VI) oxide. Suitable oxo molybdenum complexes include molybdate, molybdenum oxide, and molybdenyl complexes. Suitable molybdate complexes include ammonium molybdate and its hydrates, sodium molybdate and its hydrates, and potassium molybdate and its hydrates. Suitable molybdenum oxides include molybdenum (VI) oxide, molybdenum (VI) oxide, and molybdic acid. Suitable molybdenyl complexes include, for example, molybdenyl acetylacetonate. Other suitable tungsten and molybdenum complexes include hydroxo derivatives derived from, for example, glycerol, tartaric acid, and sugars.

[1059] A wide variety of other anti-angiogenic factors may also be utilized within the context of the present invention. Representative examples include, but are not limited to, platelet factor 4; protamine sulphate; sulphated chitin derivatives (prepared from queen crab shells), (Murata et al., Cancer Res. 51:22-26, (1991)); Sulphated Polysaccharide Peptidoglycan Complex (SP-PG) (the function of this compound may be enhanced by the presence of steroids such as estrogen, and tamoxifen citrate); Staurosporine; modulators of matrix metabolism, including for example, proline analogs, cishydroxyproline, d,L-3,4-dehydroproline, Thiaproline, alpha,alpha-dipyridyl, aminopropionitrile fumarate; 4-propyl-5-(4-pyridinyl)-2(3H)-oxazolone; Methotrexate; Mitoxantrone; Heparin; Interferons; 2 Macroglobulin-serum; ChIMP-3 (Pavloff et al., J. Bio. Chem. 267:17321-17326, (1992)); Chymostatin (Tomkinson et al., Biochem J. 286:475-480, (1992)); Cyclodextrin Tetradecasulfate; Eponemycin; Camptothecin; Fumagillin (Ingber et al., Nature 348:555-557, (1990)); Gold Sodium Thiomalate (“GST”; Matsubara and Ziff, J. Clin. Invest. 79:1440-1446, (1987)); anticollagenase-serum; alpha2-antiplasmin (Holmes et al., J. Biol. Chem. 262(4):1659-1664, (1987)); Bisantrene (National Cancer Institute); Lobenzarit disodium (N-(2)-carboxyphenyl -4-chloroanthronilic acid disodium or “CCA”; (Takeuchi et al., Agents Actions 36:312-316, (1992)); and metalloproteinase inhibitors such as BB94.

[1060] Additional anti-angiogenic factors that may also be utilized within the context of the present invention include Thalidomide, (Celgene, Warren, N.J.); Angiostatic steroid; AGM-1470 (H. Brem and J. Folkman J Pediatr. Surg. 28:445-51 (1993)); an integrin alpha v beta 3 antagonist (C. Storgard et al., J Clin. Invest. 103:47-54 (1999)); carboxynaminolmidazole; Carboxyamidotriazole (CAI) (National Cancer Institute, Bethesda, Md.); Conbretastatin A-4 (CA4P) (OXiGENE, Boston, Mass.); Squalamine (Magainin Pharmaceuticals, Plymouth Meeting, Pa.); TNP-470, (Tap Pharmaceuticals, Deerfield, Ill.); ZD-0101 AstraZeneca (London, UK); APRA (CT2584); Benefin, Byrostatin-1 (SC339555); CGP-41251 (PKC 412); CM101; Dexrazoxane (ICRF187); DMXAA; Endostatin; Flavopridiol; Genestein; GTE; ImmTher; Iressa (ZD1839); Octreotide (Somatostatin); Panretin; Penacillamine; Photopoint; PI-88; Prinomastat (AG-3340) Purlytin; Suradista (FCE26644); Tamoxifen (Nolvadex); Tazarotene; Tetrathiomolybdate; Xeloda (Capecitabine); and 5-Fluorouracil.

[1061] Anti-angiogenic agents that may be administed in combination with the compounds of the invention may work through a variety of mechanisms including, but not limited to, inhibiting proteolysis of the extracellular matrix, blocking the function of endothelial cell-extracellular matrix adhesion molecules, by antagonizing the function of angiogenesis inducers such as growth factors, and inhibiting integrin receptors expressed on proliferating endothelial cells. Examples of anti-angiogenic inhibitors that interfere with extracellular matrix proteolysis and which may be administered in combination with the compositons of the invention include, but are not Imited to, AG-3340 (Agouron, La Jolla, Calif.), BAY-12-9566 (Bayer, West Haven, Conn.), BMS-275291 (Bristol Myers Squibb, Princeton, N.J.), CGS-27032A (Novartis, East Hanover, N.J.), Marimastat (British Biotech, Oxford, UK), and Metastat (Aetema, St-Foy, Quebec). Examples of anti-angiogenic inhibitors that act by blocking the function of endothelial cell-extracellular matrix adhesion molecules and which may be administered in combination with the compositons of the invention include, but are not Imited to, EMD-121974 (Merck KcgaA Darmstadt, Germany) and Vitaxin (Ixsys, La Jolla, Calif./Medimmune, Gaithersburg, Md.). Examples of anti-angiogenic agents that act by directly antagonizing or inhibiting angiogenesis inducers and which may be administered in combination with the compositons of the invention include, but are not lmited to, Angiozyme (Ribozyme, Boulder, Colo.), Anti-VEGF antibody (Genentech, S. San Francisco, Calif.), PTK-787/ZK-225846 (Novartis, Basel, Switzerland), SU-101 (Sugen, S. San Francisco, Calif.), SU-5416 (Sugen/Pharmacia Upjohn, Bridgewater, N.J.), and SU-6668 (Sugen). Other anti-angiogenic agents act to indirectly inhibit angiogenesis. Examples of indirect inhibitors of angiogenesis which may be administered in combination with the compositons of the invention include, but are not limited to, IM-862 (Cytran, Kirkland, Wash.), Interferon-alpha, IL-12 (Roche, Nutley, N.J.), and Pentosan polysulfate (Georgetown University, Washington, D.C.).

[1062] In particular embodiments, the use of compositions of the invention in combination with anti-angiogenic agents is contemplated for the treatment, prevention, and/or amelioration of an autoimmune disease, such as for example, an autoimmune disease described herein.

[1063] In a particular embodiment, the use of compositions of the invention in combination with anti-angiogenic agents is contemplated for the treatment, prevention, and/or amelioration of arthritis. In a more particular embodiment, the use of compositions of the invention in combination with anti-angiogenic agents is contemplated for the treatment, prevention, and/or amelioration of rheumatoid arthritis.

[1064] In another embodiment, the polynucleotides encoding a polypeptide of the present invention are administered in combination with an angiogenic protein, or polynucleotides encoding an angiogenic protein. Examples of angiogenic proteins that may be administered with the compositions of the invention include, but are not limited to, acidic and basic fibroblast growth factors, VEGF-1, VEGF-2, VEGF-3, epidermal growth factor alpha and beta, platelet-derived endothelial cell growth factor, platelet-derived growth factor, tumor necrosis factor alpha, hepatocyte growth factor, insulin-like growth factor, colony stimulating factor, macrophage colony stimulating factor, granulocyte/macrophage colony stimulating factor, and nitric oxide synthase.

[1065] In additional embodiments, compostions of the invention are administered in combination with a chemotherapeutic agent. Chemotherapeutic agents that may be administered with the Therapeutics of the invention include, but are not limited to alkylating agents such as nitrogen mustards (for example, Mechlorethamine, cyclophosphamide, Cyclophosphamide Ifosfamide, Melphalan (L-sarcolysin), and Chlorambucil), ethylenimines and methylmelamines (for example, Hexamethylmelamine and Thiotepa), alkyl sulfonates (for example, Busulfan), nitrosoureas (for example, Carmustine (BCNU), Lomustine (CCNU), Semustine (methyl-CCNU), and Streptozocin (streptozotocin)), triazenes (for example, Dacarbazine (DTIC; dimethyltriazenoimidazolecarboxamide)), folic acid analogs (for example, Methotrexate (amethopterin)), pyrimidine analogs (for example, Fluorouacil (5-fluorouracil; 5-FU), Floxuridine (fluorodeoxyuridine; FudR), and Cytarabine (cytosine arabinoside)), purine analogs and related inhibitors (for example, Mercaptopurine (6-mercaptopurine; 6-MP), Thioguanine (6-thioguanine; TG), and Pentostatin (2′-deoxycoformycin)), vinca alkaloids (for example, Vinblastine (VLB, vinblastine sulfate) and Vincristine (vincristine sulfate)), epipodophyllotoxins (for example, Etoposide and Teniposide), antibiotics (for example, Dactinomycin (actinomycin D), Daunorubicin (daunomycin; rubidomycin), Doxorubicin, Bleomycin, Plicamycin (mithramycin), and Mitomycin (mitomycin C), enzymes (for example, L-Asparaginase), biological response modifiers (for example, Interferon-alpha and interferon-alpha-2b), platinum coordination compounds (for example, Cisplatin (cis-DDP) and Carboplatin), anthracenedione (Mitoxantrone), substituted ureas (for example, Hydroxyurea), methylhydrazine derivatives (for example, Procarbazine (N-methylhydrazine; MIH), adrenocorticosteroids (for example, Prednisone), progestins (for example, Hydroxyprogesterone caproate, Medroxyprogesterone, Medroxyprogesterone acetate, and Megestrol acetate), estrogens (for example, Diethylstilbestrol (DES), Diethylstilbestrol diphosphate, Estradiol, and Ethinyl estradiol), antiestrogens (for example, Tamoxifen), androgens (Testosterone proprionate, and Fluoxymesterone), antiandrogens (for example, Flutamide), gonadotropin-releasing horomone analogs (for example, Leuprolide), other hormones and hormone analogs (for example, methyltestosterone, estramustine, estramustine phosphate sodium, chlorotrianisene, and testolactone), and others (for example, dicarbazine, glutamic acid, and mitotane).

[1066] In one embodiment, the compositions of the invention are administered in combination with one or more of the following drugs: infliximab (also known as Remicade™ Centocor, Inc.), Trocade (Roche, RO-32-3555), Leflunomide (also known as Arava™ from Hoechst Marion Roussel), Kineret™ (an IL-1 Receptor antagonist also known as Anakinra from Amgen, Inc.).

[1067] In a specific embodiment, compositions of the invention are administered in combination with CHOP (cyclophosphamide, doxorubicin, vincristine, and prednisone) or combination of one or more of the components of CHOP. In one embodiment, the compositions of the invention are administered in combination with anti-CD20 antibodies, human monoclonal anti-CD20 antibodies. In another embodiment, the compositions of the invention are administered in combination with anti-CD20 antibodies and CHOP, or anti-CD20 antibodies and any combination of one or more of the components of CHOP, particularly cyclophosphamide and/or prednisone. In a specific embodiment, compositions of the invention are administered in combination with Rituximab. In a further embodiment, compositions of the invention are administered with Rituximab and CHOP, or Rituximab and any combination of one or more of the components of CHOP, particularly cyclophosphamide and/or prednisone. In a specific embodiment, compositions of the invention are administered in combination with tositumomab. In a further embodiment, compositions of the invention are administered with tositumomab and CHOP, or tositumomab and any combination of one or more of the components of CHOP, particularly cyclophosphamide and/or prednisone. The anti-CD20 antibodies may optionally be associated with radioisotopes, toxins or cytotoxic prodrugs.

[1068] In another specific embodiment, the compositions of the invention are administered in combination Zevalin™. In a further embodiment, compositions of the invention are administered with Zevalin™ and CHOP, or Zevalin™ and any combination of one or more of the components of CHOP, particularly cyclophosphamide and/or prednisone. Zevalin™ may be associated with one or more radisotopes. Particularly preferred isotopes are ⁹⁰Y and ¹¹¹In.

[1069] In an additional embodiment, the Therapeutics of the invention are administered in combination with cytokines. Cytokines that may be administered with the Therapeutics of the invention include, but are not limited to, IL2, IL3, IL4, IL5, IL6, IL7, IL10, IL 12, IL13, IL15, anti-CD40, CD40L, IFN-gamma and TNF-alpha. In another embodiment, Therapeutics of the invention may be administered with any interleukin, including, but not limited to, IL-lalpha, IL-lbeta, IL-2, IL-3, IL-4, IL-5, IL-6, IL-7, IL-8, IL-9, IL-10, IL-11, IL-12, IL-13, IL-14, IL-15, IL-16, IL-17, IL-18, IL-19, IL-20, and IL-21.

[1070] In one embodiment, the Therapeutics of the invention are administered in combination with members of the TNF family. TNF, TNF-related or TNF-like molecules that may be administered with the Therapeutics of the invention include, but are not limited to, soluble forms of TNF-alpha, lymphotoxin-alpha (LT-alpha, also known as TNF-beta), LT-beta (found in complex heterotrimer LT-alpha2-beta), OPGL, FasL, CD27L, CD30L, CD40L, 4-1BBL, DcR3, OX40L, TNF-gamma (International Publication No. WO 96/14328), AIM-I (International Publication No. WO 97/33899), endokine-alpha (International Publication No. WO 98/07880), OPG, and neutrokine-alpha (International Publication No. WO 98/18921, OX40, and nerve growth factor (NGF), and soluble forms of Fas, CD30, CD27, CD40 and 4-IBB, TR2 (International Publication No. WO 96/34095), DR3 (International Publication No. WO 97/33904), DR4 (International Publication No. WO 98/32856), TR5 (International Publication No. WO 98/30693), TRANK, TR9 (International Publication No. WO 98/56892),TR10 (International Publication No. WO 98/54202), 312C2 (International Publication No. WO 98/06842), and TR12, and soluble forms CD154, CD70, and CD153.

[1071] In an additional embodiment, the Therapeutics of the invention are administered in combination with angiogenic proteins. Angiogenic proteins that may be administered with the Therapeutics of the invention include, but are not limited to, Glioma Derived Growth Factor (GDGF), as disclosed in European Patent Number EP-399816; Platelet Derived Growth Factor-A (PDGF-A), as disclosed in European Patent Number EP-682110; Platelet Derived Growth Factor-B (PDGF-B), as disclosed in European Patent Number EP-282317; Placental Growth Factor (PlGF), as disclosed in International Publication Number WO 92/06194; Placental Growth Factor-2 (PIGF-2), as disclosed in Hauser et al., Growth Factors, 4:259-268 (1993); Vascular Endothelial Growth Factor (VEGF), as disclosed in International Publication Number WO 90/13649; Vascular Endothelial Growth Factor-A (VEGF-A), as disclosed in European Patent Number EP-506477; Vascular Endothelial Growth Factor-2 (VEGF-2), as disclosed in International Publication Number WO 96/39515; Vascular Endothelial Growth Factor B (VEGF-3); Vascular Endothelial Growth Factor B-186 (VEGF-B186), as disclosed in International Publication Number WO 96/26736; Vascular Endothelial Growth Factor-D (VEGF-D), as disclosed in International Publication Number WO 98/02543; Vascular Endothelial Growth Factor-D (VEGF-D), as disclosed in International Publication Number WO 98/07832; and Vascular Endothelial Growth Factor-E (VEGF-E), as disclosed in German Patent Number DE19639601. The above mentioned references are herein incorporated by reference in their entireties.

[1072] In an additional embodiment, the Therapeutics of the invention are administered in combination with Fibroblast Growth Factors. Fibroblast Growth Factors that may be administered with the Therapeutics of the invention include, but are not limited to, FGF-1, FGF-2, FGF-3, FGF-4, FGF-5, FGF-6, FGF-7, FGF-8, FGF-9, FGF-10, FGF-11, FGF-12, FGF-13, FGF-14, and FGF-15.

[1073] In an additional embodiment, the Therapeutics of the invention are administered in combination with hematopoietic growth factors. Hematopoietic growth factors that may be administered with the Therapeutics of the invention include, but are not limited to, granulocyte macrophage colony stimulating factor (GM-CSF) (sargramostim, LEUKINE™, PROKINE™), granulocyte colony stimulating factor (G-CSF) (filgrastim, NEUPOGEN™), macropliage colony stimulating factor (M-CSF, CSF-1) erythropoietin (epoetin alfa, EPOGEN™, PROCRIT™), stem cell factor (SCF, c-kit ligand, steel factor), megakaryocyte colony stimulating factor, PIXY321 (a GMCSF/IL-3 fusion protein), interleukins, especially any one or more of IL-1 through IL-12, interferon-gamma, or thrombopoietin.

[1074] In certain embodiments, Therapeutics of the present invention are administered in combination with adrenergic blockers, such as, for example, acebutolol, atenolol, betaxolol, bisoprolol, carteolol, labetalol, metoprolol, nadolol, oxprenolol, penbutolol, pindolol, propranolol, sotalol, and timolol.

[1075] In another embodiment, the Therapeutics of the invention are administered in combination with an antiarrhythmic drug (e.g., adenosine, amidoarone, bretylium, digitalis, digoxin, digitoxin, diliazem, disopyramide, esmolol, flecainide, lidocaine, mexiletine, moricizine, phenytoin, procainamide, N-acetyl procainamide, propafenone, propranolol, quinidine, sotalol, tocainide, and verapamil).

[1076] In another embodiment, the Therapeutics of the invention are administered in combination with diuretic agents, such as carbonic anhydrase-inhibiting agents (e.g., acetazolamide, dichlorphenamide, and methazolamide), osmotic diuretics (e.g., glycerin, isosorbide, mannitol, and urea), diuretics that inhibit Na⁺-K⁺-2Cl⁻ symport (e.g., furosemide, bumetanide, azosemide, piretanide, tripamide, ethacrynic acid, muzolimine, and torsemide), thiazide and thiazide-like diuretics (e.g., bendroflumethiazide, benzthiazide, chlorothiazide, hydrochlorothiazide, hydroflumethiazide, methyclothiazide, polythiazide, trichormethiazide, chlorthalidone, indapamide, metolazone, and quinethazone), potassium sparing diuretics (e.g., amiloride and triamterene), and mineralcorticoid receptor antagonists (e.g., spironolactone, canrenone, and potassium canrenoate).

[1077] In one embodiment, the Therapeutics of the invention are administered in combination with treatments for endocrine and/or hormone imbalance disorders. Treatments for endocrine and/or hormone imbalance disorders include, but are not limited to, ¹²⁷I, radioactive isotopes of iodine such as ¹³¹I and ¹²³I; recombinant growth hormone, such as HUMATROPE™ (recombinant somatropin); growth hormone analogs such as PROTROPIN™ (somatrem); dopamine agonists such as PARLODEL™ (bromocriptine); somatostatin analogs such as SANDOSTATIN™ (octreotide); gonadotropin preparations such as PREGNYL™, A.P.L.™ and PROFASI™ (chorionic gonadotropin (CG)), PERGONAL™ (menotropins), and METRODIN™ (urofollitropin (uFSH)); synthetic human gonadotropin releasing hormone preparations such as FACTREL™ and LUTREPULSE™ (gonadorelin hydrochloride); synthetic gonadotropin agonists such as LUPRON™ (leuprolide acetate), SUPPRELIN™ (histrelin acetate), SYNAREL™ (nafarelin acetate), and ZOLADEX™ (goserelin acetate); synthetic preparations of thyrotropin-releasing hormone such as RELEFACT TRH™ and THYPINONE™ (protirelin); recombinant human TSH such as THYROGEN™; synthetic preparations of the sodium salts of the natural isomers of thyroid hormones such as L-T₄™, SYNTHROID™ and LEVOTHROID™ (levothyroxine sodium), L-T₃™, CYTOMEL™ and TRIOSTAT™ (liothyroine sodium), and THYROLAR™ (liotrix); antithyroid compounds such as 6-n-propylthiouracil (propylthiouracil), 1-methyl-2-mercaptoimidazole and TAPAZOLE™ (methimazole), NEO-MERCAZOLE™ (carbimazole); beta-adrenergic receptor antagonists such as propranolol and esmolol; Ca²⁺ channel blockers; dexamethasone and iodinated radiological contrast agents such as TELEPAQUE™ (iopanoic acid) and ORAGRAFIN™ (sodium ipodate); estrogens or congugated estrogens such as ESTRACE™ (estradiol), ESTINYL™ (ethinyl estradiol), PREMARIN™, ESTRATAB™, ORTHO-EST™, OGEN™ and estropipate (estrone), ESTROVIS™ (quinestrol), ESTRADERM™ (estradiol), DELESTROGEN™ and VALERGEN™ (estradiol valerate), DEPO-ESTRADIOL CYPIONATE™ and ESTROJECT LA™ (estradiol cypionate); antiestrogens such as NOLVADEX™ (tamoxifen), SEROPHENE™ and CLOMID™ (clomiphene); progestins such as DURALUTIN™ (hydroxyprogesterone caproate), MPA™ and DEPO-PROVERA™ (medroxyprogesterone acetate), PROVERA™ and CYCRIN™ (MPA), MEGACE™ (megestrol acetate), NORLUTIN™ (norethindrone), and NORLUTATE™ and AYGESTIN™ (norethindrone acetate); progesterone implants such as NORPLANT SYSTEM™ (subdermal implants of norgestrel); antiprogestins such as RU 486™ (mifepristone); hormonal contraceptives such as ENOVID™ (norethynodrel plus mestranol), PROGESTASERT™ (intrauterine device that releases progesterone), LOESTRIN™, BREVICON™, MODICON™, GENORA™, NELONA™, NORINYL™, OVACON-35™ and OVACON-50™ (ethinyl estradiol/norethindrone), LEVLEN™, NORDETTE™, TRI-LEVLEN™ and TRIPHASIL-21™ (ethinyl estradiol/levonorgestrel) LO/OVRAL™ and OVRAL™ (ethinyl estradiol/norgestrel), DEMULEN™ (ethinyl estradiol/ethynodiol diacetate), NORINYL™, ORTHO-NOVUM™, NORETHIN™, GENORA™, and NELOVA™ (norethindrone/mestranol), DESOGEN™ and ORTHO-CEPT™ (ethinyl estradiol/desogestrel), ORTHO-CYCLEN™ and ORTHO-TRICYCLEN™ (ethinyl estradiol/norgestimate), MICRONOR™ and NOR-QD™ (norethindrone), and OVRETTE™ (norgestrel); testosterone esters such as methenolone acetate and testosterone undecanoate; parenteral and oral androgens such as TESTOJECT-50™ (testosterone), TESTEX™ (testosterone propionate), DELATESTRYL™ (testosterone enanthate), DEPO-TESTOSTERONE™ (testosterone cypionate), DANOCRINE™ (danazol), HALOTESTIN™ (fluoxymesterone), ORETON METHYL™, TESTRED™ and VIRILON™ (methyltestosterone), and OXANDRIN™ (oxandrolone); testosterone transdermal systems such as TESTODERM™; androgen receptor antagonist and 5-alpha-reductase inhibitors such as ANDROCUR™ (cyproterone acetate), EULEXIN™ (flutamide), and PROSCAR™ (finasteride); adrenocorticotropic hormone preparations such as CORTROSYN™ (cosyntropin); adrenocortical steroids and their synthetic analogs such as ACLOVATE™ (alclometasone dipropionate), CYCLOCORT™ (amcinonide), BECLOVENT™ and VANCERIL™ (beclomethasone dipropionate), CELESTONE™ (betamethasone), BENISONE™ and UTICORT™ (betamethasone benzoate), DIPROSONE™ (betamethasone dipropionate), CELESTONE PHOSPHATE™ (betamethasone sodium phosphate), CELESTONE SOLUSPAN™ (betamethasone sodium phosphate and acetate), BETA-VAL™ and VALISONE™ (betamethasone valerate), TEMOVATE™ (clobetasol propionate), CLODERM™ (clocortolone pivalate), CORTEF™ and HYDROCORTONE™ (cortisol (hydrocortisone)), HYDROCORTONE ACETATE™ (cortisol (hydrocortisone) acetate), LOCOID™ (cortisol (hydrocortisone) butyrate), HYDROCORTONE PHOSPHATE™ (cortisol (hydrocortisone) sodium phosphate), A-HYDROCORT™ and SOLU CORTEF™ (cortisol (hydrocortisone) sodium succinate), WESTCORT™ (cortisol (hydrocortisone) valerate), CORTISONE ACETATE™ (cortisone acetate), DESOWEN™ and TRIDESILON™ (desonide), TOPICORT™ (desoximetasone), DECADRON™ (dexamethasone), DECADRON LA™ (dexamethasone acetate), DECADRON PHOSPHATE™ and HEXADROL PHOSPHATE™ (dexamethasone sodium phosphate), FLORONE™ and MAXIFLOR™ (diflorasone diacetate), FLORINEF ACETATE™ (fludrocortisone acetate), AEROBID™ and NASALIDE™ (flunisolide), FLUONID™ and SYNALAR™ (fluocinolone acetonide), LIDEX™ (fluocinonide), FLUOR-OP™ and FML™ (fluorometholone), CORDRAN™ (flurandrenolide), HALOG™ (halcinonide), HMS LIZUIFILM™ (medrysone), MEDROL™ (methylprednisolone), DEPO-MEDROL™ and MEDROL ACETATE™ (methylprednisone acetate), A-METHAPRED™ and SOLUMEDROL™ (methylprednisolone sodium succinate), ELOCON™ (mometasone furoate), HALDRONE™ (paramethasone acetate), DELTA-CORTEF™ (prednisolone), ECONOPRED™ (prednisolone acetate), HYDELTRASOL™ (prednisolone sodium phosphate), HYDELTRA-T.B.A™ (prednisolone tebutate), DELTASONE™ (prednisone), ARISTOCORT™ and KENACORT™ (triamcinolone), KENALOG™ (triamcinolone acetonide), ARISTOCORT™ and KENACORT DIACETATE™ (triamcinolone diacetate), and ARISTOSPAN™ (triamcinolone hexacetonide); inhibitors of biosynthesis and action of adrenocortical steroids such as CYTADREN™ (aminoglutethimide), NIZORAL™ (ketoconazole), MODRASTANE™ (trilostane), and METOPIRONE™ (metyrapone); bovine, porcine or human insulin or mixtures thereof; insulin analogs; recombinant human insulin such as HUMULIN™ and NOVOLIN™; oral hypoglycemic agents such as ORAMIDE™ and ORINASE™ (tolbutamide), DIABINESE™ (chlorpropamide), TOLAMIDE™ and TOLINASE™ (tolazamide), DYMELOR™ (acetohexamide), glibenclamide, MICRONASE™, DIBETA™ and GLYNASE™ (glyburide), GLUCOTROL™ (glipizide), and DIAMICRON™ (gliclazide), GLUCOPHAGE™ (metformin), ciglitazone, pioglitazone, and alpha-glucosidase inhibitors; bovine or porcine glucagon; somatostatins such as SANDOSTATIN™ (octreotide); and diazoxides such as PROGLYCEM™ (diazoxide).

[1078] In one embodiment, the Therapeutics of the invention are administered in combination with treatments for uterine motility disorders. Treatments for uterine motility disorders include, but are not limited to, estrogen drugs such as conjugated estrogens (e.g., PREMARIN® and ESTRATAB®), estradiols (e.g., CLIMARA® and ALORA®), estropipate, and chlorotrianisene; progestin drugs (e.g., AMEN® (medroxyprogesterone), MICRONOR® (norethidrone acetate), PROMETRIUM® progesterone, and megestrol acetate); and estrogen/progesterone combination therapies such as, for example, conjugated estrogens/medroxyprogesterone (e.g., PREMPRO® and PREMPHASE®) and norethindrone acetate/ethinyl estsradiol (e.g., FEMHRT™).

[1079] In an additional embodiment, the Therapeutics of the invention are administered in combination with drugs effective in treating iron deficiency and hypochromic anemias, including but not limited to, ferrous sulfate (iron sulfate, FEOSOL™), ferrous fumarate (e.g., FEOSTAT™), ferrous gluconate (e.g., FERGON™), polysaccharide-iron complex (e.g., NIFEREX™), iron dextran injection (e.g., INFED™), cupric sulfate, pyroxidine, riboflavin, Vitamin B12, cyancobalamin injection (e.g., REDISOL™, RUBRAMIN PC™), hydroxocobalamin, folic acid (e.g., FOLVITE™), leucovorin (folinic acid, 5-CHOH4PteGlu, citrovorum factor) or WELLCOVORIN (Calcium salt of leucovorin), transferrin or ferritin.

[1080] In certain embodiments, the Therapeutics of the invention are administered in combination with agents used to treat psychiatric disorders. Psychiatric drugs that may be administered with the Therapeutics of the invention include, but are not limited to, antipsychotic agents (e.g., chlorpromazine, chlorprothixene, clozapine, fluphenazine, haloperidol, loxapine, mesoridazine, molindone, olanzapine, perphenazine, pimozide, quetiapine, risperidone, thioridazine, thiothixene, trifluoperazine, and triflupromazine), antimanic agents (e.g., carbamazepine, divalproex sodium, lithium carbonate, and lithium citrate), antidepressants (e.g., amitriptyline, amoxapine, bupropion, citalopram, clomipramine, desipramine, doxepin, fluvoxamine, fluoxetine, imipramine, isocarboxazid, maprotiline, mirtazapine, nefazodone, nortriptyline, paroxetine, phenelzine, protriptyline, sertraline, tranylcypromine, trazodone, trimipramine, and venlafaxine), antianxiety agents (e.g., alprazolam, buspirone, chlordiazepoxide, clorazepate, diazepam, halazepam, lorazepam, oxazepam, and prazepam), and stimulants (e.g., d-amphetamine, methylphenidate, and pemoline).

[1081] In other embodiments, the Therapeutics of the invention are administered in combination with agents used to treat neurological disorders. Neurological agents that may be administered with the Therapeutics of the invention include, but are not limited to, antiepileptic agents (e.g., carbamazepine, clonazepam, ethosuximide, phenobarbital, phenytoin, primidone, valproic acid, divalproex sodium, felbamate, gabapentin, lamotrigine, levetiracetam, oxcarbazepine, tiagabine, topiramate, zonisamide, diazepam, lorazepam, and clonazepam), antiparkinsonian agents (e.g., levodopa/carbidopa, selegiline, amantidine, bromocriptine, pergolide, ropinirole, pramipexole, benztropine; biperiden; ethopropazine; procyclidine; trihexyphenidyl, tolcapone), and ALS therapeutics (e.g. riluzole).

[1082] In another embodiment, Therapeutics of the invention are administered in combination with vasodilating agents and/or calcium channel blocking agents. Vasodilating agents that may be administered with the Therapeutics of the invention include, but are not limited to, Angiotensin Converting Enzyme (ACE) inhibitors (e.g., papaverine, isoxsuprine, benazepril, captopril, cilazapril, enalapril, enalaprilat, fosinopril, lisinopril, moexipril, perindopril, quinapril, ramipril, spirapril, trandolapril, and nylidrin), and nitrates (e.g., isosorbide dinitrate, isosorbide mononitrate, and nitroglycerin). Examples of calcium channel blocking agents that may be administered in combination with the Therapeutics of the invention include, but are not limited to amlodipine, bepridil, diltiazem, felodipine, flunarizine, isradipine, nicardipine, nifedipine, nimodipine, and verapamil.

[1083] In additional embodiments, the Therapeutics of the invention are administered in combination with other therapeutic or prophylactic regimens, such as, for example, radiation therapy.

### Example 14

### Method of Treating Decreased Levels of the Polypeptide

[1084] The present invention relates to a method for treating an individual in need of an increased level of a polypeptide of the invention in the body comprising administering to such an individual a composition comprising a therapeutically effective amount of an agonist of the invention (including polypeptides of the invention). Moreover, it will be appreciated that conditions caused by a decrease in the standard or normal expression level of a polypeptide of the present invention in an individual can be treated by administering the agonist or antagonist of the present invention. Thus, the invention also provides a method of treatment of an individual in need of an increased level of the polypeptide comprising administering to such an individual a Therapeutic comprising an amount of the agonist or antagonist to increase the activity level of the polypeptide in such an individual.

[1085] For example, a patient with decreased levels of a polypeptide receives a daily dose 0.1-100 ug/kg of the agonist or antagonist for six consecutive days. The exact details of the dosing scheme, based on administration and formulation, are provided in Example 13.

### Example 15

### Method of Treating Increased Levels of the Polypeptide

[1086] The present invention also relates to a method of treating an individual in need of a decreased level of a polypeptide of the invention in the body comprising administering to such an individual a composition comprising a therapeutically effective amount of an antagonist of the invention (including polypeptides and antibodies of the invention).

[1087] In one example, antisense technology is used to inhibit production of a polypeptide of the present invention. This technology is one example of a method of decreasing levels of a polypeptide, due to a variety of etiologies, such as cancer.

[1088] For example, a patient diagnosed with abnormally increased levels of a polypeptide is administered intravenously antisense polynucleotides at 0.5, 1.0, 1.5, 2.0 and 3.0 mg/kg day for 21 days. This treatment is repeated after a 7-day rest period if the treatment was well tolerated. The formulation of the antisense polynucleotide is provided in Example 13.

### Example 16

### Method of Treatment Using Gene Therapy-Ex Vivo

[1089] One method of gene therapy transplants fibroblasts, which are capable of expressing a polypeptide, onto a patient. Generally, fibroblasts are obtained from a subject by skin biopsy. The resulting tissue is placed in tissue-culture medium and separated into small pieces. Small chunks of the tissue are placed on a wet surface of a tissue culture flask, approximately ten pieces are placed in each flask. The flask is turned upside down, closed tight and left at room temperature over night. After 24 hours at room temperature, the flask is inverted and the chunks of tissue remain fixed to the bottom of the flask and fresh media (e.g., Ham's F12 media, with 10% FBS, penicillin and streptomycin) is added. The flasks are then incubated at 37 degree C. for approximately one week.

[1090] At this time, fresh media is added and subsequently changed every several days. After an additional two weeks in culture, a monolayer of fibroblasts emerge. The monolayer is trypsinized and scaled into larger flasks.

[1091] pMV-7 (Kirschmeier, P. T. et al., DNA, 7:219-25 (1988)), flanked by the long terminal repeats of the Moloney murine sarcoma virus, is digested with EcoRI and HindIII and subsequently treated with calf intestinal phosphatase. The linear vector is fractionated on agarose gel and purified, using glass beads.

[1092] The cDNA encoding a polypeptide of the present invention can be amplified using PCR primers which correspond to the 5′ and 3′ end sequences respectively as set forth in Example 1 using primers and having appropriate restriction sites and initiation/stop codons, if necessary. Preferably, the 5′ primer contains an EcoRi site and the 3′ primer includes a HindlIl site. Equal quantities of the Moloney murine sarcoma virus linear backbone and the amplified EcoRI and HindlIl fragment are added together, in the presence of T4 DNA ligase. The resulting mixture is maintained under conditions appropriate for ligation of the two fragments. The ligation mixture is then used to transform bacteria HB101, which are then plated onto agar containing kanamycin for the purpose of confirming that the vector has the gene of interest properly inserted.

[1093] The amphotropic pA317 or GP+am12 packaging cells are grown in tissue culture to confluent density in Dulbecco's Modified Eagles Medium (DMEM) with 10% calf serum (CS), penicillin and streptomycin. The MSV vector containing the gene is then added to the media and the packaging cells transduced with the vector. The packaging cells now produce infectious viral particles containing the gene (the packaging cells are now referred to as producer cells).

[1094] Fresh media is added to the transduced producer cells, and subsequently, the media is harvested from a 10 cm plate of confluent producer cells. The spent media, containing the infectious viral particles, is filtered through a millipore filter to remove detached producer cells and this media is then used to infect fibroblast cells. Media is removed from a sub-confluent plate of fibroblasts and quickly replaced with the media from the producer cells. This media is removed and replaced with fresh media. If the titer of virus is high, then virtually all fibroblasts will be infected and no selection is required. If the titer is very low, then it is necessary to use a retroviral vector that has a selectable marker, such as neo or his. Once the fibroblasts have been efficiently infected, the fibroblasts are analyzed to determine whether protein is produced.

[1095] The engineered fibroblasts are then transplanted onto the host, either alone or after having been grown to confluence on cytodex 3 microcarrier beads.

### Example 17

### Gene Therapy Using Endogenous Genes Corresponding to Polynucleotides of the Invention

[1096] Another method of gene therapy according to the present invention involves operably associating the endogenous polynucleotide sequence of the invention with a promoter via homologous recombination as described, for example, in U.S. Pat. No. 5,641,670, issued Jun. 24, 1997; International Publication NO: WO 96/29411, published Sep. 26, 1996; International Publication NO: WO 94/12650, published Aug. 4, 1994; Koller et al., Proc. Natl. Acad. Sci. USA, 86:8932-8935 (1989); and Zijlstra et al., Nature, 342:435-438 (1989). This method involves the activation of a gene which is present in the target cells, but which is not expressed in the cells, or is expressed at a lower level than desired.

[1097] Polynucleotide constructs are made which contain a promoter and targeting sequences, which are homologous to the 5′ non-coding sequence of endogenous polynucleotide sequence, flanking the promoter. The targeting sequence will be sufficiently near the 5′ end of the polynucleotide sequence so the promoter will be operably linked to the endogenous sequence upon homologous recombination. The promoter and the targeting sequences can be amplified using PCR. Preferably, the amplified promoter contains distinct restriction enzyme sites on the 5′ and 3′ ends. Preferably, the 3′ end of the first targeting sequence contains the same restriction enzyme site as the 5′ end of the amplified promoter and the 5′ end of the second targeting sequence contains the same restriction site as the 3′ end of the amplified promoter.

[1098] The amplified promoter and the amplified targeting sequences are digested with the appropriate restriction enzymes and subsequently treated with calf intestinal phosphatase. The digested promoter and digested targeting sequences are added together in the presence of T4 DNA ligase. The resulting mixture is maintained under conditions appropriate for ligation of the two fragments. The construct is size fractionated on an agarose gel, then purified by phenol extraction and ethanol precipitation.

[1099] In this Example, the polynucleotide constructs are administered as naked polynucleotides via electroporation. However, the polynucleotide constructs may also be administered with transfection-facilitating agents, such as liposomes, viral sequences, viral particles, precipitating agents, etc. Such methods of delivery are known in the art.

[1100] Once the cells are transfected, homologous recombination will take place which results in the promoter being operably linked to the endogenous polynucleotide sequence. This results in the expression of polynucleotide corresponding to the polynucleotide in the cell. Expression may be detected by immunological staining, or any other method known in the art.

[1101] Fibroblasts are obtained from a subject by skin biopsy. The resulting tissue is placed in DMEM +10% fetal calf serum. Exponentially growing or early stationary phase fibroblasts are trypsinized and rinsed from the plastic surface with nutrient medium. An aliquot of the cell suspension is removed for counting, and the remaining cells are subjected to centrifugation. The supernatant is aspirated and the pellet is resuspended in 5 ml of electroporation buffer (20 mM HEPES pH 7.3, 137 mM NaCl, 5 mM KCl, 0.7 mM Na₂ HPO₄, 6 mM dextrose). The cells are recentrifuged, the supernatant aspirated, and the cells resuspended in electroporation buffer containing 1 mg/ml acetylated bovine serum albumin. The final cell suspension contains approximately 3×10⁶ cells/ml. Electroporation should be performed immediately following resuspension.

[1102] Plasmid DNA is prepared according to standard techniques. For example, to construct a plasmid for targeting to the locus corresponding to the polynucleotide of the invention, plasmid pUC18 (MBI Fermentas, Amherst, N.Y.) is digested with HindIll. The CMV promoter is amplified by PCR with an XbaI site on the 5′ end and a BamHI site on the 3′ end. Two non-coding sequences are amplified via PCR: one non-coding sequence (fragment 1) is amplified with a HindIII site at the 5′ end and an Xba site at the 3^{t}end; the other non-coding sequence (fragment 2) is amplified with a BamHI site at the 5′end and a HindlIl site at the 3′end. The CMV promoter and the fragments (1 and 2) are digested with the appropriate enzymes (CMV promoter—XbaI and BamHI; fragment 1-XbaI; fragment 2-BamHI) and ligated together. The resulting ligation product is digested with HindIII, and ligated with the HindIII-digested pUC 18 plasmid.

[1103] Plasmid DNA is added to a sterile cuvette with a 0.4 cm electrode gap (Bio-Rad). The final DNA concentration is generally at least 120 μg/ml. 0.5 ml of the cell suspension (containing approximately 1.5.×10⁶ cells) is then added to the cuvette, and the cell suspension and DNA solutions are gently mixed. Electroporation is performed with a Gene-Pulser apparatus (Bio-Rad). Capacitance and voltage are set at 960 μF and 250-300 V, respectively. As voltage increases, cell survival decreases, but the percentage of surviving cells that stably incorporate the introduced DNA into their genome increases dramatically. Given these parameters, a pulse time of approximately 14-20 mSec should be observed.

[1104] Electroporated cells are maintained at room temperature for approximately 5 min, and the contents of the cuvette are then gently removed with a sterile transfer pipette. The cells are added directly to 10 ml of prewarmed nutrient media (DMEM with 15% calf serum) in a 10 cm dish and incubated at 37 degree C. The following day, the media is aspirated and replaced with 10 ml of fresh media and incubated for a further 16-24 hours.

[1105] The engineered fibroblasts are then injected into the host, either alone or after having been grown to confluence on cytodex 3 microcarrier beads. The fibroblasts now produce the protein product. The fibroblasts can then be introduced into a patient as described above.

### Example 18

### Method of Treatment Using Gene Therapy-In Vivo

[1106] Another aspect of the present invention is using in vivo gene therapy methods to treat disorders, diseases and conditions. The gene therapy method relates to the introduction of naked nucleic acid (DNA, RNA, and antisense DNA or RNA) sequences into an animal to increase or decrease the expression of the polypeptide. The polynucleotide of the present invention may be operatively linked to (i.e., associated with) a promoter or any other genetic elements necessary for the expression of the polypeptide by the target tissue. Such gene therapy and delivery techniques and methods are known in the art, see, for example, WO90/11092, WO98/11779; U.S. Pat. Nos. 5693622, 5705151, 5580859; Tabata et al., Cardiovasc. Res. 35(3):470-479 (1997); Chao et al., Pharmacol. Res. 35(6):517-522 (1997); Wolff, Neuromuscul. Disord. 7(5):314-318 (1997); Schwartz et al., Gene Ther. 3(5):405-411 (1996); Tsurumi et al., Circulation 94(12):3281-3290 (1996) (incorporated herein by reference).

[1107] The polynucleotide constructs may be delivered by any method that delivers injectable materials to the cells of an animal, such as, injection into the interstitial space of tissues (heart, muscle, skin, lung, liver, intestine and the like). The polynucleotide constructs can be delivered in a pharmaceutically acceptable liquid or aqueous carrier.

[1108] The term “naked” polynucleotide, DNA or RNA, refers to sequences that are free from any delivery vehicle that acts to assist, promote, or facilitate entry into the cell, including viral sequences, viral particles, liposome formulations, lipofectin or precipitating agents and the like. However, the polynucleotides of the present invention may also be delivered in liposome formulations (such as those taught in Felgner P.L. et al. (1995) Ann. NY Acad. Sci. 772:126-139 and Abdallah B. et al. (1995) Biol. Cell 85(1):1-7) which can be prepared by methods well known to those skilled in the art.

[1109] The polynucleotide vector constructs used in the gene therapy method are preferably constructs that will not integrate into the host genome nor will they contain sequences that allow for replication. Any strong promoter known to those skilled in the art can be used for driving the expression of DNA. Unlike other gene therapy techniques, one major advantage of introducing naked nucleic acid sequences into target cells is the transitory nature of the polynucleotide synthesis in the cells. Studies have shown that non-replicating DNA sequences can be introduced into cells to provide production of the desired polypeptide for periods of up to six months.

[1110] The polynucleotide construct can be delivered to the interstitial space of tissues within an animal, including muscle, skin, brain, lung, liver, spleen, bone marrow, thymus, heart, lymph, blood, bone, cartilage, pancreas, kidney, gall bladder, stomach, intestine, testis, ovary, uterus, rectum, nervous system, eye, gland, and connective tissue. Interstitial space of the tissues comprises the intercellular fluid, mucopolysaccharide matrix among the reticular fibers of organ tissues, elastic fibers in the walls of vessels or chambers, collagen fibers of fibrous tissues, or that same matrix within connective tissue ensheathing muscle cells or in the lacunae of bone. It is similarly the space occupied by the plasma of the circulation and the lymph fluid of the lymphatic channels. Delivery to the interstitial space of muscle tissue is preferred for the reasons discussed below. They may be conveniently delivered by injection into the tissues comprising these cells. They are preferably delivered to and expressed in persistent, non-dividing cells which are differentiated, although delivery and expression may be achieved in non-differentiated or less completely differentiated cells, such as, for example, stem cells of blood or skin fibroblasts. In vivo muscle cells are particularly competent in their ability to take up and express polynucleotides.

[1111] For the naked polynucleotide injection, an effective dosage amount of DNA or RNA will be in the range of from about 0.05 g/kg body weight to about 50 mg/kg body weight. Preferably the dosage will be from about 0.005 mg/kg to about 20 mg/kg and more preferably from about 0.05 mg/kg to about 5 mg/kg. Of course, as the artisan of ordinary skill will appreciate, this dosage will vary according to the tissue site of injection. The appropriate and effective dosage of nucleic acid sequence can readily be determined by those of ordinary skill in the art and may depend on the condition being treated and the route of administration. The preferred route of administration is by the parenteral route of injection into the interstitial space of tissues. However, other parenteral routes may also be used, such as, inhalation of an aerosol formulation particularly for delivery to lungs or bronchial tissues, throat or mucous membranes of the nose. In addition, naked polynucleotide constructs can be delivered to arteries during angioplasty by the catheter used in the procedure.

[1112] The dose response effects of injected polynucleotide in muscle in vivo is determined as follows. Suitable template DNA for production of mRNA coding for polypeptide of the present invention is prepared in accordance with a standard recombinant DNA methodology. The template DNA, which may be either circular or linear, is either used as naked DNA or complexed with liposomes. The quadriceps muscles of mice are then injected with various amounts of the template DNA.

[1113] Five to six week old female and male Balb/C mice are anesthetized by intraperitoneal injection with 0.3 ml of 2.5% Avertin. A 1.5 cm incision is made on the anterior thigh, and the quadriceps muscle is directly visualized. The template DNA is injected in 0.1 ml of carrier in a 1 cc syringe through a 27 gauge needle over one minute, approximately 0.5 cm from the distal insertion site of the muscle into the knee and about 0.2 cm deep. A suture is placed over the injection site for future localization, and the skin is closed with stainless steel clips.

[1114] After an appropriate incubation time (e.g., 7 days) muscle extracts are prepared by excising the entire quadriceps. Every fifth 15 um cross-section of the individual quadriceps muscles is histochemically stained for protein expression. A time course for protein expression may be done in a similar fashion except that quadriceps from different mice are harvested at different times. Persistence of DNA in muscle following injection may be determined by Southern blot analysis after preparing total cellular DNA and HIRT supernatants from injected and control mice. The results of the above experimentation in mice can be used to extrapolate proper dosages and other treatment parameters in humans and other animals using naked DNA.

### Example 19

### Transgenic Animals

[1115] The polypeptides of the invention can also be expressed in transgenic animals. Animals of any species, including, but not limited to, mice, rats, rabbits, hamsters, guinea pigs, pigs, micro-pigs, goats, sheep, cows and non-human primates, e.g., baboons, monkeys, and chimpanzees may be used to generate transgenic animals. In a specific embodiment, techniques described herein or otherwise known in the art, are used to express polypeptides of the invention in humans, as part of a gene therapy protocol.

[1116] Any technique known in the art may be. used to introduce the transgene (i.e., polynucleotides of the invention) into animals to produce the founder lines of transgenic animals. Such techniques include, but are not limited to, pronuclear microinjection (Paterson et al., Appl. Microbiol. Biotechnol. 40:691-698 (1994); Carver et al., Biotechnology (NY) 11:1263-1270 (1993); Wright et al., Biotechnology (NY) 9:830-834 (1991); and Hoppe et al., U.S. Pat. No. 4,873,191 (1989)); retrovirus mediated gene transfer into germ lines (Van der Putten et al., Proc. Natl. Acad. Sci., USA 82:6148-6152 (1985)), blastocysts or embryos; gene targeting in embryonic stem cells (Thompson et al., Cell 56:313-321 (1989)); electroporation of cells or embryos (Lo, 1983, Mol Cell. Biol. 3:1803-1814 (1983)); introduction of the polynucleotides of the invention using a gene gun (see, e.g., Ulmer et al., Science 259:1745 (1993); introducing nucleic acid constructs into embryonic pleuripotent stem cells and transferring the stem cells back into the blastocyst; and sperm-mediated gene transfer (Lavitrano et al., Cell 57:717-723 (1989); etc. For a review of such techniques, see Gordon, “Transgenic Animals,” Intl. Rev. Cytol. 115:171-229 (1989), which is incorporated by reference herein in its entirety.

[1117] Any technique known in the art may be used to produce transgenic clones containing polynucleotides of the invention, for example, nuclear transfer into enucleated oocytes of nuclei from cultured embryonic, fetal, or adult cells induced to quiescence (Campell et al., Nature 380:64-66 (1996); Wilmut et al., Nature 385:810-813 (1997)).

[1118] The present invention provides for transgenic animals that carry the transgene in all their cells, as well as animals which carry the transgene in some, but not all their cells, i.e., mosaic animals or chimeric. The transgene may be integrated as a single transgene or as multiple copies such as in concatamers, e.g., head-to-head tandems or head-to-tail tandems. The transgene may also be selectively introduced into and activated in a particular cell type by following, for example, the teaching of Lasko et al. (Lasko et al., Proc. Natl. Acad. Sci. USA 89:6232-6236 (1992)). The regulatory sequences required for such a cell-type specific activation will depend upon the particular cell type of interest, and will be apparent to those of skill in the art. When it is desired that the polynucleotide transgene be integrated into the chromosomal site of the endogenous gene, gene targeting is preferred. Briefly, when such a technique is to be utilized, vectors containing some nucleotide sequences homologous to the endogenous gene are designed for the purpose of integrating, via homologous recombination with chromosomal sequences, into and disrupting the function of the nucleotide sequence of the endogenous gene. The transgene may also be selectively introduced into a particular cell type, thus inactivating the endogenous gene in only that cell type, by following, for example, the teaching of Gu et al. (Gu et al., Science 265:103-106 (1994)). The regulatory sequences required for such a cell-type specific inactivation will depend upon the particular cell type of interest, and will be apparent to those of skill in the art.

[1119] Once transgenic animals have been generated, the expression of the recombinant gene may be assayed utilizing standard techniques. Initial screening may be accomplished by Southern blot analysis or PCR techniques to analyze animal tissues to verify that integration of the transgene has taken place. The level of mRNA expression of the transgene in the tissues of the transgenic animals may also be assessed using techniques which include, but are not limited to, Northern blot analysis of tissue samples obtained from the animal, in situ hybridization analysis, and reverse transcriptase-PCR (rt-PCR). Samples of transgenic gene-expressing tissue may also be evaluated immunocytochemically or immunohistochemically using antibodies specific for the transgene product.

[1120] Once the founder animals are produced, they may be bred, inbred, outbred, or crossbred to produce colonies of the particular animal. Examples of such breeding strategies include, but are not limited to: outbreeding of founder animals with more than one integration site in order to establish separate lines; inbreeding of separate lines in order to produce compound transgenics that express the transgene at higher levels because of the effects of additive expression of each transgene; crossing of heterozygous transgenic animals to produce animals homozygous for a given integration site in order to both augment expression and eliminate the need for screening of animals by DNA analysis; crossing of separate homozygous lines to produce compound heterozygous or homozygous lines; and breeding to place the transgene on a distinct background that is appropriate for an experimental model of interest.

[1121] Transgenic animals of the invention have uses which include, but are not limited to, animal model systems useful in elaborating the biological function of polypeptides of the present invention, studying conditions and/or disorders associated with aberrant expression, and in screening for compounds effective in ameliorating such conditions and/or disorders.

### Example 20

### Knock-Out Animals

[1122] Endogenous gene expression can also be reduced by inactivating or “knocking out” the gene and/or its promoter using targeted homologous recombination. (See e.g., Smithies et al., Nature 317:230-234 (1985); Thomas & Capecchi, Cell 51:503-512 (1987); Thompson et al., Cell 5:313-321 (1989); each of which is incorporated by reference herein in its entirety.) For example, a mutant, non-functional polynucleotide of the invention (or a completely unrelated DNA sequence) flanked by DNA homologous to the endogenous polynucleotide sequence (either the coding regions or regulatory regions of the gene) can be used, with or without a selectable marker and/or a negative selectable marker, to transfect cells that express polypeptides of the invention in vivo. In another embodiment, techniques known in the art are used to generate knockouts in cells that contain, but do not express the gene of interest. Insertion of the DNA construct, via targeted homologous recombination, results in inactivation of the targeted gene. Such approaches are particularly suited in research and agricultural fields where modifications to embryonic stem cells can be used to generate animal offspring with an inactive targeted gene (e.g., see Thomas & Capecchi 1987 and Thompson 1989, supra). However this approach can be routinely adapted for use in humans provided the recombinant DNA constructs are directly administered or targeted to the required site in vivo using appropriate viral vectors that will be apparent to those of skill in the art.

[1123] In further embodiments of the invention, cells that are genetically engineered to express the polypeptides of the invention, or alternatively, that are genetically engineered not to express the polypeptides of the invention (e.g., knockouts) are administered to a patient in vivo. Such cells may be obtained from the patient (i.e., animal, including human) or an MHC compatible donor and can include, but are not limited to fibroblasts, bone marrow cells, blood cells (e.g., lymphocytes), adipocytes, muscle cells, endothelial cells etc. The cells are genetically engineered in vitro using recombinant DNA techniques to introduce the coding sequence of polypeptides of the invention into the cells, or alternatively, to disrupt the coding sequence and/or endogenous regulatory sequence associated with the polypeptides of the invention, e.g., by transduction (using viral vectors, and preferably vectors that integrate the transgene into the cell genome) or transfection procedures, including, but not limited to, the use of plasmids, cosmids, YACs, naked DNA, electroporation, liposomes, etc. The coding sequence of the polypeptides of the invention can be placed under the control of a strong constitutive or inducible promoter or promoter/enhancer to achieve expression, and preferably secretion, of the polypeptides of the invention. The engineered cells which express and preferably secrete the polypeptides of the invention can be introduced into the patient systemically, e.g., in the circulation, or intraperitoneally.

[1124] Alternatively, the cells can be incorporated into a matrix and implanted in the body, e.g., genetically engineered fibroblasts can be implanted as part of a skin graft; genetically engineered endothelial cells can be implanted as part of a lymphatic or vascular graft. (See, for example, Anderson et al. U.S. Pat. No. 5,399,349; and Mulligan & Wilson, U.S. Pat. No. 5,460,959 each of which is incorporated by reference herein in its entirety).

[1125] When the cells to be administered are non-autologous or non-MHC compatible cells, they can be administered using well known techniques which prevent the development of a host immune response against the introduced cells. For example, the cells may be introduced in an encapsulated form which, while allowing for an exchange of components with the immediate extracellular environment, does not allow the introduced cells to be recognized by the host immune system.

[1126] Transgenic and “knock-out” animals of the invention have uses which include, but are not limited to, animal model systems useful in elaborating the biological function of polypeptides of the present invention, studying conditions and/or disorders associated with aberrant expression, and in screening for compounds effective in ameliorating such conditions and/or disorders.

### Example 21

### Assays Detecting Stimulation or Inhibition of B cell Proliferation and Differentiation

[1127] Generation of functional humoral immune responses requires both soluble and cognate signaling between B-lineage cells and their microenvironment. Signals may impart a positive stimulus that allows a B-lineage cell to continue its programmed development, or a negative stimulus that instructs the cell to arrest its current developmental pathway. To date, numerous stimulatory and inhibitory signals have been found to influence B cell responsiveness including IL-2, IL-4, IL-5, IL-6, IL-7, IL 10, IL-13, IL-14 and IL-15. Interestingly, these signals are by themselves weak effectors but can, in combination with various co-stimulatory proteins, induce activation, proliferation, differentiation, homing, tolerance and death among B cell populations.

[1128] One of the best studied classes of B-cell co-stimulatory proteins is the TNF-superfamily. Within this family CD40, CD27, and CD30 along with their respective ligands CD154, CD70, and CD153 have been found to regulate a variety of immune responses. Assays which allow for the detection and/or observation of the proliferation and differentiation of these B-cell populations and their precursors are valuable tools in determining the effects various proteins may have on these B-cell populations in terms of proliferation and differentiation. Listed below are two assays designed to allow for the detection of the differentiation, proliferation, or inhibition of B-cell populations and their precursors.

[1129] In vitro Assay-Agonists or antagonists of the invention can be assessed for its ability to induce activation, proliferation, differentiation or inhibition and/or death in B-cell populations and their precursors. The activity of the agonists or antagonists of the invention on purified human tonsillar B cells, measured qualitatively over the dose range from 0.1 to 10,000 ng/mL, is assessed in a standard B-lymphocyte co-stimulation assay in which purified tonsillar B cells are cultured in the presence of either formalin-fixed Staphylococcus aureus Cowan I (SAC) or immobilized anti-human IgM antibody as the priming agent. Second signals such as IL-2 and IL-15 synergize with SAC and IgM crosslinking to elicit B cell proliferation as measured by tritiated-thymidine incorporation. Novel synergizing agents can be readily identified using this assay. The assay involves isolating human tonsillar B cells by magnetic bead (MACS) depletion of CD3-positive cells. The resulting cell population is greater than 95% B cells as assessed by expression of CD45R(B220).

[1130] Various dilutions of each sample are placed into individual wells of a 96-well plate to which are added 10⁵ B-cells suspended in culture medium (RPMI 1640 containing 10% FBS, 5×10⁻⁵ M 2ME, 100 U/ml penicillin, 10 ug/ml streptomycin, and 10⁻⁵ dilution of SAC) in a total volume of 150ul. Proliferation or inhibition is quantitated by a 20 h pulse (luCi/well) with 3 H-thymidine (6.7 Ci/mM) beginning 72 h post factor addition. The positive and negative controls are IL2 and medium respectively.

[1131] In Vivo Assay-BALB/c mice are injected (i.p.) twice per day with buffer only, or 2 mg/Kg of agonists or antagonists of the invention, or truncated forms thereof. Mice receive this treatment for 4 consecutive days, at which time they are sacrificed and various tissues and serum collected for analyses. Comparison of H&E sections from normal spleens and spleens treated with agonists or antagonists of the invention identify the results of the activity of the agonists or antagonists on spleen cells, such as the diffusion of peri-arterial lymphatic sheaths, and/or significant increases in the nucleated cellularity of the red pulp regions, which may indicate the activation of the differentiation and proliferation of B-cell populations. Immunohistochemical studies using a B cell marker, anti-CD45R(B220), are used to determine whether any physiological changes to splenic cells, such as splenic disorganization, are due to increased B-cell representation within loosely defined B-cell zones that infiltrate established T-cell regions.

[1132] Flow cytometric analyses of the spleens from mice treated with agonist or antagonist is used to indicate whether the agonists or antagonists specifically increases the proportion of ThB+, CD45R(B220)dull B cells over that which is observed in control mice.

[1133] Likewise, a predicted consequence of increased mature B-cell representation in vivo is a relative increase in serum Ig titers. Accordingly, serum IgM and IgA levels are compared between buffer and agonists or antagonists-treated mice.

[1134] The studies described in this example tested activity of agonists or antagonists of the invention. However, one skilled in the art could easily modify the exemplified studies to test the activity of polynucleotides or polypeptides of the invention (e.g., gene therapy).

### Example 22

### T Cell Proliferation Assay

[1135] A CD3-induced proliferation assay is performed on PBMCs and is measured by the uptake of ³H-thymidine. The assay is performed as follows. Ninety-six well plates are coated with 100 μl/well of mAb to CD3 (HIT3a, Pharmingen) or isotype-matched control mAb (B33.1) overnight at 4 degrees C (1 μg/ml in 0.05M bicarbonate buffer, pH 9.5), then washed three times with PBS. PBMC are isolated by F/H gradient centrifugation from human peripheral blood and added to quadruplicate wells (5×10⁴/well) of mAb coated plates in RPMI containing 10% FCS and P/S in the presence of varying concentrations of agonists or antagonists of the invention (total volume 200 ul). Relevant protein buffer and medium alone are controls. After 48 hr. culture at 37 degrees C., plates are spun for 2 min. at 1000 rpm and 100 μl of supernatant is removed and stored −20 degrees C. for measurement of IL-2 (or other cytokines) if effect on proliferation is observed. Wells are supplemented with 100 ul of medium containing 0.5 uCi of ³H-thymidine and cultured at 37 degrees C. for 18-24 hr. Wells are harvested and incorporation of ³H-thymidine used as a measure of proliferation. Anti-CD3 alone is the positive control for proliferation. IL-2 (100 U/ml) is also used as a control which enhances proliferation. Control antibody which does not induce proliferation of T cells is used as the negative control for the effects of agonists or antagonists of the invention.

[1136] The studies described in this example tested activity of agonists or antagonists of the invention. However, one skilled in the art could easily modify the exemplified studies to test the activity of polynucleotides or polypeptides of the invention (e.g., gene therapy).

### Example 23

### Effect of Agonists or Antagonists of the Invention on the Expression of MHC Class II, Costimulatory and Adhesion Molecules and Cell Differentiation of Monocytes and Monocyte-Derived Human Dendritic Cells

[1137] Dendritic cells are generated by the expansion of proliferating precursors found in the peripheral blood: adherent PBMC or elutriated monocytic fractions are cultured for 7-10 days with GM-CSF (50 ng/ml) and IL-4 (20 ng/ml). These dendritic cells have the characteristic phenotype of immature cells (expression of CD1, CD80, CD86, CD40 and MHC class II antigens). Treatment with activating factors, such as TNF-α, causes a rapid change in surface phenotype (increased expression of MHC class I and II, costimulatory and adhesion molecules, downregulation of FCγRII, upregulation of CD83). These changes correlate with increased antigen-presenting capacity and with functional maturation of the dendritic cells.

[1138] FACS analysis of surface antigens is performed as follows. Cells are treated 1-3 days with increasing concentrations of agonist or antagonist of the invention or LPS (positive control), washed with PBS containing 1% BSA and 0.02 mM sodium azide, and then incubated with 1:20 dilution of appropriate FITC- or PE-labeled monoclonal antibodies for 30 minutes at 4 degrees C. After an additional wash, the labeled cells are analyzed by flow cytometry on a FACScan (Becton Dickinson).

[1139] Effect on the Production of Cytokines.

[1140] Cytokines generated by dendritic cells, in particular IL-12, are important in the initiation of T-cell dependent immune responses. IL-12 strongly influences the development of Thl helper T-cell immune response, and induces cytotoxic T and NK cell function. An ELISA is used to measure the IL-12 release as follows. Dendritic cells (10⁶/ml) are treated with increasing concentrations of agonists or antagonists of the invention for 24 hours. LPS (100 ng/ml) is added to the cell culture as positive control. Supernatants from the cell cultures are then collected and analyzed for IL-12 content using commercial ELISA kit (e.g., R & D Systems (Minneapolis, Minn.)). The standard protocols provided with the kits are used.

[1141] Effect on the Expression of MHC Class II, Costimulatory and Adhesion Molecules.

[1142] Three major families of cell surface antigens can be identified on monocytes: adhesion molecules, molecules involved in antigen presentation, and Fc receptor. Modulation of the expression of MHC class II antigens and other costimulatory molecules, such as B7 and ICAM-1, may result in changes in the antigen presenting capacity of monocytes and ability to induce T cell activation. Increased expression of Fc receptors may correlate with improved monocyte cytotoxic activity, cytokine release and phagocytosis.

[1143] FACS analysis is used to examine the surface antigens as follows. Monocytes are treated 1-5 days with increasing concentrations of agonists or antagonists of the invention or LPS (positive control), washed with PBS containing 1% BSA and 0.02 mM sodium azide, and then incubated with 1:20 dilution of appropriate FITC- or PE-labeled monoclonal antibodies for 30 minutes at 4 degrees C. After an additional wash, the labeled cells are analyzed by flow cytometry on a FACScan (Becton Dickinson).

[1144] Monocyte Activation and/or Increased Survival.

[1145] Assays for molecules that activate (or alternatively, inactivate) monocytes and/or increase monocyte survival (or alternatively, decrease monocyte survival) are known in the art and may routinely be applied to determine whether a molecule of the invention functions as an inhibitor or activator of monocytes. Agonists or antagonists of the invention can be screened using the three assays described below. For each of these assays, Peripheral blood mononuclear cells (PBMC) are purified from single donor leukopacks (American Red Cross, Baltimore, Md.) by centrifugation through a Histopaque gradient (Sigma). Monocytes are isolated from PBMC by counterflow centrifugal elutriation.

[1146] Monocyte Survival Assay.

[1147] Human peripheral blood monocytes progressively lose viability when cultured in absence of serum or other stimuli. Their death results from internally regulated processes (apoptosis). Addition to the culture of activating factors, such as TNF-alpha dramatically improves cell survival and prevents DNA fragmentation. Propidium iodide (PI) staining is used to measure apoptosis as follows. Monocytes are cultured for 48 hours in polypropylene tubes in serum-free medium (positive control), in the presence of 100 ng/ml TNF-alpha (negative control), and in the presence of varying concentrations of the compound to be tested. Cells are suspended at a concentration of 2×10⁶/ml in PBS containing PI at a final concentration of 5 μg/ml, and then incubated at room temperature for 5 minutes before FACScan analysis. PI uptake has been demonstrated to correlate with DNA fragmentation in this experimental paradigm.

[1148] Effect on Cytokine Release.

[1149] An important function of monocytes/macrophages is their regulatory activity on other cellular populations of the immune system through the release of cytokines after stimulation. An ELISA to measure cytokine release is performed as follows. Human monocytes are incubated at a density of 5×10⁵ cells/ml with increasing concentrations of agonists or antagonists of the invention and under the same conditions, but in the absence of agonists or antagonists. For IL-12 production, the cells are primed overnight with IFN (100 U/ml) in the presence of agonist or antagonist of the invention. LPS (10 ng/ml) is then added. Conditioned media are collected after 24 h and kept frozen until use. Measurement of TNF-alpha, IL-10, MCP-1 and IL-8 is then performed using a commercially available ELISA kit (e.g., R & D Systems (Minneapolis, Minn.)) and applying the standard protocols provided with the kit.

[1150] Oxidative Burst.

[1151] Purified monocytes are plated in 96-w plate at 2-1×10⁵ cell/well. Increasing concentrations of agonists or antagonists of the invention are added to the wells in a total volume of 0.2 ml culture medium (RPMI 1640+10% FCS, glutamine and antibiotics). After 3 days incubation, the plates are centrifuged and the medium is removed from the wells. To the macrophage monolayers, 0.2 ml per well of phenol red solution (140 mM NaCl, 10 mM potassium phosphate buffer pH 7.0, 5.5 mM dextrose, 0.56 mM phenol red and 19 U/ml of HRPO) is added, together with the stimulant (200 nM PMA). The plates are incubated at 37° C. for 2 hours and the reaction is stopped by adding 20 μl IN NaOH per well. The absorbance is read at 610 nm. To calculate the amount of H₂O₂ produced by the macrophages, a standard curve of a H₂O₂ solution of known molarity is performed for each experiment.

[1152] The studies described in this example tested activity of agonists or antagonists of the invention. However, one skilled in the art could easily modify the exemplified studies to test the activity of polynucleotides or polypeptides of the invention (e.g., gene therapy).

### Example 24

### Biological Effects of Agonists or Antagonists of the Invention

[1153] Astrocyte and Neuronal Assays

[1154] Agonists or antagonists of the invention, expressed in Escherichia coli and purified as described above, can be tested for activity in promoting the survival, neurite outgrowth, or phenotypic differentiation of cortical neuronal cells and for inducing the proliferation of glial fibrillary acidic protein immunopositive cells, astrocytes. The selection of cortical cells for the bioassay is based on the prevalent expression of FGF-1 and FGF-2 in cortical structures and on the previously reported enhancement of cortical neuronal survival resulting from FGF-2 treatment. A thymidine incorporation assay, for example, can be used to elucidate an agonist or antagonist of the invention's activity on these cells.

[1155] Moreover, previous reports describing the biological effects of FGF-2 (basic FGF) on cortical or hippocampal neurons in vitro have demonstrated increases in both neuron survival and neurite outgrowth (Walicke et al., “Fibroblast growth factor promotes survival of dissociated hippocampal neurons and enhances neurite extension.” Proc. Natl. Acad. Sci. USA 83:3012-3016. (1986), assay herein incorporated by reference in its entirety). However, reports from experiments done on PC-12 cells suggest that these two responses are not necessarily synonymous and may depend on not only which FGF is being tested but also on which receptor(s) are expressed on the target cells. Using the primary cortical neuronal culture paradigm, the ability of an agonist or antagonist of the invention to induce neurite outgrowth can be compared to the response achieved with FGF-2 using, for example, a thymidine incorporation assay.

[1156] Fibroblast and Endothelial Cell Assays

[1157] Human lung fibroblasts are obtained from Clonetics (San Diego, Calif.) and maintained in growth media from Clonetics. Dermal microvascular endothelial cells are obtained from Cell Applications (San Diego, Calif.). For proliferation assays, the human lung fibroblasts and dermal microvascular endothelial cells can be cultured at 5,000 cells/well in a 96-well plate for one day in growth medium. The cells are then incubated for one day in 0.1% BSA basal medium. After replacing the medium with fresh 0.1% BSA medium, the cells are incubated with the test proteins for 3 days. Alamar Blue (Alamar Biosciences, Sacramento, Calif.) is added to each well to a final concentration of 10%. The cells are incubated for 4 hr. Cell viability is measured by reading in a CytoFluor fluorescence reader. For the PGE₂ assays, the human lung fibroblasts are cultured at 5,000 cells/well in a 96-well plate for one day. After a medium change to 0.1% BSA basal medium, the cells are incubated with FGF-2 or agonists or antagonists of the invention with or without IL-1α for 24 hours. The supernatants are collected and assayed for PGE₂ by EIA kit (Cayman, Ann Arbor, Mich.). For the IL-6 assays, the human lung fibroblasts are cultured at 5,000 cells/well in a 96-well plate for one day. After a medium change to 0.1% BSA basal medium, the cells are incubated with FGF-2 or with or without agonists or antagonists of the invention IL-la for 24 hours. The supernatants are collected and assayed for IL-6 by ELISA kit (Endogen, Cambridge, Mass.).

[1158] Human lung fibroblasts are cultured with FGF-2 or agonists or antagonists of the invention for 3 days in basal medium before the addition of Alamar Blue to assess effects on growth of the fibroblasts. FGF-2 should show a stimulation at 10-2500 ng/ml which can be used to compare stimulation with agonists or antagonists of the invention.

[1159] Parkinson Models.

[1160] The loss of motor function in Parkinson's disease is attributed to a deficiency of striatal dopamine resulting from the degeneration of the nigrostriatal dopaminergic projection neurons. An animal model for Parkinson's that has been extensively characterized involves the systemic administration of 1-methyl-4 phenyl 1,2,3,6-tetrahydropyridine (MPTP). In the CNS, MPTP is taken-up by astrocytes and catabolized by monoamine oxidase B to 1-methyl-4-phenyl pyridine (MPP+) and released. Subsequently, MPP+is actively accumulated in dopaminergic neurons by the high-affinity reuptake transporter for dopamine. MPP+is then concentrated in mitochondria by the electrochemical gradient and selectively inhibits nicotidamide adenine disphosphate: ubiquinone oxidoreductionase (complex I), thereby interfering with electron transport and eventually generating oxygen radicals.

[1161] It has been demonstrated in tissue culture paradigms that FGF-2 (basic FGF) has trophic activity towards nigral dopaminergic neurons (Ferrari et al., Dev. Biol. 1989). Recently, Dr. Unsicker's group has demonstrated that administering FGF-2 in gel foam implants in the striatum results in the near complete protection of nigral dopaminergic neurons from the toxicity associated with MPTP exposure (Otto and Unsicker, J. Neuroscience, 1990).

[1162] Based on the data with FGF-2, agonists or antagonists of the invention can be evaluated to determine whether it has an action similar to that of FGF-2 in enhancing dopaminergic neuronal survival in vitro and it can also be tested in vivo for protection of dopaminergic neurons in the striatum from the damage associated with MPTP treatment. The potential effect of an agonist or antagonist of the invention is first examined in vitro in a dopaminergic neuronal cell culture paradigm. The cultures are prepared by dissecting the midbrain floor plate from gestation day 14 Wistar rat embryos. The tissue is dissociated with trypsin and seeded at a density of 200,000 cells/cm² on polyorthinine-laminin coated glass coverslips. The cells are maintained in Dulbecco's Modified Eagle's medium and F12 medium containing hormonal supplements (Nl). The cultures are fixed with paraformaldehyde after 8 days in vitro and are processed for tyrosine hydroxylase, a specific marker for dopaminergic neurons, immunohistochemical staining. Dissociated cell cultures are prepared from embryonic rats. The culture medium is changed every third day and the factors are also added at that time.

[1163] Since the dopaminergic neurons are isolated from animals at gestation day 14, a developmental time which is past the stage when the dopaminergic precursor cells are proliferating, an increase in the number of tyrosine hydroxylase immunopositive neurons would represent an increase in the number of dopaminergic neurons surviving in vitro. Therefore, if an agonist or antagonist of the invention acts to prolong the survival of dopaminergic neurons, it would suggest that the agonist or antagonist may be involved in Parkinson's Disease.

[1164] The studies described in this example tested activity of agonists or antagonists of the invention. However, one skilled in the art could easily modify the exemplified studies to test the activity of polynucleotides or polypeptides of the invention (e.g., gene therapy).

### Example 25

### The Effect of Agonists or Antagonists of the Invention on the Growth of Vascular Endothelial Cells

[1165] On day 1, human umbilical vein endothelial cells (HUVEC) are seeded at 2-5×10⁴ cells/35 mm dish density in M199 medium containing 4% fetal bovine serum (FBS), 16 units/ml heparin, and 50 units/ml endothelial cell growth supplements (ECGS, Biotechnique, Inc.). On day 2, the medium is replaced with M199 containing 10% FBS, 8 units/ml heparin. An agonist or antagonist of the invention, and positive controls, such as VEGF and basic FGF (bFGF) are added, at varying concentrations. On days 4 and 6, the medium is replaced. On day 8, cell number is determined with a Coulter Counter.

[1166] An increase in the number of HUVEC cells indicates that the compound of the invention may proliferate vascular endothelial cells, while a decrease in the number of HUVEC cells indicates that the compound of the invention inhibits vascular endothelial cells.

[1167] The studies described in this example tested activity of a polypeptide of the invention. However, one skilled in the art could easily modify the exemplified studies to test the activity of polynucleotides (e.g., gene therapy), agonists, and/or antagonists of the invention.

### Example 26

### Rat Corneal Wound Healing Model

[1168] This animal model shows the effect of an agonist or antagonist of the invention on neovascularization. The experimental protocol includes:

[1169] Making a 1-1.5 mm long incision from the center of cornea into the stromal layer.

[1170] Inserting a spatula below the lip of the incision facing the outer corner of the eye.

[1171] Making a pocket (its base is 1-1.5 mm form the edge of the eye).

[1172] Positioning a pellet, containing 50 ng-5 ug of an agonist or antagonist of the invention, within the pocket.

[1173] Treatment with an agonist or antagonist of the invention can also be applied topically to the corneal wounds in a dosage range of 20 mg -500 mg (daily treatment for five days).

[1174] The studies described in this example tested activity of agonists or antagonists of the invention. However, one skilled in the art could easily modify the exemplified studies to test the activity of polynucleotides or polypeptides of the invention (e.g., gene therapy).

### Example 27

### Diabetic Mouse and Glucocorticoid-Impaired Wound Healing Models

[1175] Diabetic db+/db+ Mouse Model.

[1176] To demonstrate that an agonist or antagonist of the invention accelerates the healing process, the genetically diabetic mouse model of wound healing is used. The full thickness wound healing model in the db+/db+ mouse is a well characterized, clinically relevant and reproducible model of impaired wound healing. Healing of the diabetic wound is dependent on formation of granulation tissue and re-epithelialization rather than contraction (Gartner, M. H. et aL, J. Surg. Res. 52:389 (1992); Greenhalgh, D. G. et al., Am. J. Pathol. 136:1235 (1990)).

[1177] The diabetic animals have many of the characteristic features observed in Type II diabetes mellitus. Homozygous (db+/db+) mice are obese in comparison to their normal heterozygous (db+/+m) littermates. Mutant diabetic (db+/db+) mice have a single autosomal recessive mutation on chromosome 4 (db+) (Coleman et al. Proc. Natl. Acad. Sci. USA 77:283-293 (1982)). Animals show polyphagia, polydipsia and polyuria. Mutant diabetic mice (db+/db+) have elevated blood glucose, increased or normal insulin levels, and suppressed cell-mediated immunity (Mandel et al., J. Immunol. 120:1375 (1978); Debray-Sachs, M. et al., Clin. Exp. Immunol. 51(l):1-7 (1983); Leiter et al., Am. J. of Pathol. 114:46-55 (1985)). Peripheral neuropathy, myocardial complications, and microvascular lesions, basement membrane thickening and glomerular filtration abnormalities have been described in these animals (Norido, F. et al., Exp. Neurol. 83(2):221-232 (1984); Robertson et al., Diabetes 29(1):60-67 (1980); Giacomelli et al., Lab Invest. 40(4):460-473 (1979); Coleman, D. L., Diabetes 31 (Suppl):1-6 (1982)). These homozygous diabetic mice develop hyperglycemia that is resistant to insulin analogous to human type II diabetes (Mandel et al., J. Immunol. 120:1375-1377 (1978)).

[1178] The characteristics observed in these animals suggests that healing in this model may be similar to the healing observed in human diabetes (Greenhalgh, et al., Am. J. of Pathol. 136:1235-1246 (1990)).

[1179] Genetically diabetic female C57BL/KsJ (db+/db+) mice and their non-diabetic (db+/+m) heterozygous littermates are used in this study (Jackson Laboratories). The animals are purchased at 6 weeks of age and are 8 weeks old at the beginning of the study. Animals are individually housed and received food and water ad libitum. All manipulations are performed using aseptic techniques. The experiments are conducted according to the rules and guidelines of Human Genome Sciences, Inc. Institutional Animal Care and Use Committee and the Guidelines for the Care and Use of Laboratory Animals.

[1180] Wounding protocol is performed according to previously reported methods (Tsuboi, R. and Rifkin, D. B., J. Exp. Med. 172:245-251 (1990)). Briefly, on the day of wounding, animals are anesthetized with an intraperitoneal injection of Avertin (0.01 mg/mL), 2,2,2-tribromoethanol and 2-methyl-2-butanol dissolved in deionized water. The dorsal region of the animal is shaved and the skin washed with 70% ethanol solution and iodine. The surgical area is dried with sterile gauze prior to wounding. An 8 mm full-thickness wound is then created using a Keyes tissue punch. Immediately following wounding, the surrounding skin is gently stretched to eliminate wound expansion. The wounds are left open for the duration of the experiment. Application of the treatment is given topically for 5 consecutive days commencing on the day of wounding. Prior to treatment, wounds are gently cleansed with sterile saline and gauze sponges.

[1181] Wounds are visually examined and photographed at a fixed distance at the day of surgery and at two day intervals thereafter. Wound closure is determined by daily measurement on days 1-5 and on day 8. Wounds are measured horizontally and vertically using a calibrated Jameson caliper. Wounds are considered healed if granulation tissue is no longer visible and the wound is covered by a continuous epithelium.

[1182] An agonist or antagonist of the invention is administered using at a range different doses, from 4 mg to 500 mg per wound per day for 8 days in vehicle. Vehicle control groups received 50 mL of vehicle solution.

[1183] Animals are euthanized on day 8 with an intraperitoneal injection of sodium pentobarbital (300 mg/kg). The wounds and surrounding skin are then harvested for histology and immunohistochemistry. Tissue specimens are placed in 10% neutral buffered formalin in tissue cassettes between biopsy sponges for further processing.

[1184] Three groups of 10 animals each (5 diabetic and 5 non-diabetic controls) are evaluated: 1) Vehicle placebo control, 2) untreated group, and 3) treated group.

[1185] Wound closure is analyzed by measuring the area in the vertical and horizontal axis and obtaining the total square area of the wound. Contraction is then estimated by establishing the differences between the initial wound area (day 0) and that of post treatment (day 8). The wound area on day 1 is 64 mm², the corresponding size of the dermal punch. Calculations are made using the following formula:

[Open area on day 8]−[Open area on day 1]/[Open area on day 1]

[1186] Specimens are fixed in 10% buffered formalin and paraffin embedded blocks are sectioned perpendicular to the wound surface (5 mm) and cut using a Reichert-Jung microtome. Routine hematoxylin-eosin (H&E) staining is performed on cross-sections of bisected wounds. Histologic examination of the wounds are used to assess whether the healing process and the morphologic appearance of the repaired skin is altered by treatment with an agonist or antagonist of the invention. This assessment included verification of the presence of cell accumulation, inflammatory cells, capillaries, fibroblasts, re-epithelialization and epidermal maturity (Greenhalgh, D. G. et al., Am. J. Pathol. 136:1235 (1990)). A calibrated lens micrometer is used by a blinded observer.

[1187] Tissue sections are also stained immunohistochemically with a polyclonal rabbit anti-human keratin antibody using ABC Elite detection system. Human skin is used as a positive tissue control while non-immune IgG is used as a negative control. Keratinocyte growth is determined by evaluating the extent of reepithelialization of the wound using a calibrated lens micrometer.

[1188] Proliferating cell nuclear antigen/cyclin (PCNA) in skin specimens is demonstrated by using anti-PCNA antibody (1:50) with an ABC Elite detection system. Human colon cancer served as a positive tissue control and human brain tissue is used as a negative tissue control. Each specimen included a section with omission of the primary antibody and substitution with non-immune mouse IgG. Ranking of these sections is based on the extent of proliferation on a scale of 0-8, the lower side of the scale reflecting slight proliferation to the higher side reflecting intense proliferation.

[1189] Experimental data are analyzed using an unpaired t test. A p value of <0.05 is considered significant.

[1190] Steroid Impaired Rat Model

[1191] The inhibition of wound healing by steroids has been well documented in various in vitro and in vivo systems (Wahl, Glucocorticoids and Wound healing. In: Anti-Inflammatory Steroid Action: Basic and Clinical Aspects. 280-302 (1989); Wahlet al., J. Immunol. 115: 476-481 (1975); Werb et al., J. Exp. Med. 147:1684-1694 (1978)). Glucocorticoids retard wound healing by inhibiting angiogenesis, decreasing vascular permeability (Ebert et al., An. Intern. Med. 37:701-705 (1952)), fibroblast proliferation, and collagen synthesis (Beck et al., Growth Factors. 5: 295-304 (1991); Haynes et al, J. Clin. Invest. 61: 703-797 (1978)) and producing a transient reduction of circulating monocytes (Haynes et al., J. Clin. Invest. 61: 703-797 (1978); Wahl, “Glucocorticoids and wound healing”, In: Antiinflammatory Steroid Action: Basic and Clinical Aspects, Academic Press, New York, pp. 280-302 (1989)). The systemic administration of steroids to impaired wound healing is a well establish phenomenon in rats (Beck et al., Growth Factors. 5: 295-304 (1991); Haynes et al., J. Clin. Invest. 61: 703-797 (1978); Wahl, “Glucocorticoids and wound healing”, In: Antiinflammatory Steroid Action: Basic and Clinical Aspects, Academic Press, New York, pp. 280-302 (1989); Pierce et al., Proc. Natl. Acad. Sci. USA 86: 2229-2233 (1989)).

[1192] To demonstrate that an agonist or antagonist of the invention can accelerate the healing process, the effects of multiple topical applications of the agonist or antagonist on full thickness excisional skin wounds in rats in which healing has been impaired by the systemic administration of methylprednisolone is assessed.

[1193] Young adult male Sprague Dawley rats weighing 250-300 g (Charles River Laboratories) are used in this example. The animals are purchased at 8 weeks of age and are 9 weeks old at the beginning of the study. The healing response of rats is impaired by the systemic administration of methylprednisolone (17 mg/kg/rat intramuscularly) at the time of wounding. Animals are individually housed and received food and water ad libitum. All manipulations are performed using aseptic techniques. This study is conducted according to the rules and guidelines of Human Genome Sciences, Inc. Institutional Animal Care and Use Committee and the Guidelines for the Care and Use of Laboratory Animals.

[1194] The wounding protocol is followed according to section A, above. On the day of wounding, animals are anesthetized with an intramuscular injection of ketamine (50 mg/kg) and xylazine (5 mg/kg). The dorsal region of the animal is shaved and the skin washed with 70% ethanol and iodine solutions. The surgical area is dried with sterile gauze prior to wounding. An 8 mm full-thickness wound is created using a Keyes tissue punch. The wounds are left open for the duration of the experiment. Applications of the testing materials are given topically once a day for 7 consecutive days commencing on the day of wounding and subsequent to methylprednisolone administration. Prior to treatment, wounds are gently cleansed with sterile saline and gauze sponges.

[1195] Wounds are visually examined and photographed at a fixed distance at the day of wounding and at the end of treatment. Wound closure is determined by daily measurement on days 1-5 and on day 8. Wounds are measured horizontally and vertically using a calibrated Jameson caliper. Wounds are considered healed if granulation tissue is no longer visible and the wound is covered by a continuous epithelium.

[1196] The agonist or antagonist of the invention is administered using at a range different doses, from 4 mg to 500 mg per wound per day for 8 days in vehicle. Vehicle control groups received 50 mL of vehicle solution.

[1197] Animals are euthanized on day 8 with an intraperitoneal injection of sodium pentobarbital (300 mg/kg). The wounds and surrounding skin are then harvested for histology. Tissue specimens are placed in 10% neutral buffered formalin in tissue cassettes between biopsy sponges for further processing.

[1198] Three groups of 10 animals each (5 with methylprednisolone and 5 without glucocorticoid) are evaluated: 1) Untreated group 2) Vehicle placebo control 3) treated groups.

[1199] Wound closure is analyzed by measuring the area in the vertical and horizontal axis and obtaining the total area of the wound. Closure is then estimated by establishing the differences between the initial wound area (day 0) and that of post treatment (day 8). The wound area on day 1 is 64 mm², the corresponding size of the dermal punch. Calculations are made using the following formula:

[Open area on day 8]−[Open area on day 1]/[Open area on day 1]

[1200] Specimens are fixed in 10% buffered formalin and paraffin embedded blocks are sectioned perpendicular to the wound surface (5 mm) and cut using an Olympus microtome. Routine hematoxylin-eosin (H&E) staining is performed on cross-sections of bisected wounds. Histologic examination of the wounds allows assessment of whether the healing process and the morphologic appearance of the repaired skin is improved by treatment with an agonist or antagonist of the invention. A calibrated lens micrometer is used by a blinded observer to determine the distance of the wound gap.

[1201] Experimental data are analyzed using an unpaired t test. A p value of <0.05 is considered significant.

[1202] The studies described in this example tested activity of agonists or antagonists of the invention. However, one skilled in the art could easily modify the exemplified studies to test the activity of polynucleotides or polypeptides of the invention (e.g., gene therapy).

### Example 28

### Lymphadema Animal Model

[1203] The purpose of this experimental approach is to create an appropriate and consistent lymphedema model for testing the therapeutic effects of an agonist or antagonist of the invention in lymphangiogenesis and re-establishment of the lymphatic circulatory system in the rat hind limb. Effectiveness is measured by swelling volume of the affected limb, quantification of the amount of lymphatic vasculature, total blood plasma protein, and histopathology. Acute lymphedema is observed for 7-10 days. Perhaps more importantly, the chronic progress of the edema is followed for up to 3-4 weeks.

[1204] Prior to beginning surgery, blood sample is drawn for protein concentration analysis. Male rats weighing approximately ˜350 g are dosed with Pentobarbital. Subsequently, the right legs are shaved from knee to hip. The shaved area is swabbed with gauze soaked in 70% EtOH. Blood is drawn for serum total protein testing. Circumference and volumetric measurements are made prior to injecting dye into paws after marking 2 measurement levels (0.5 cm above heel, at mid-pt of dorsal paw). The intradermal dorsum of both right and left paws are injected with 0.05 ml of 1% Evan's Blue. Circumference and volumetric measurements are then made following injection of dye into paws.

[1205] Using the knee joint as a landmark, a mid-leg inguinal incision is made circumferentially allowing the femoral vessels to be located. Forceps and hemostats are used to dissect and separate the skin flaps. After locating the femoral vessels, the lymphatic vessel that runs along side and underneath the vessel(s) is located. The main lymphatic vessels in this area are then electrically coagulated or suture ligated.

[1206] Using a microscope, muscles in back of the leg (near the semitendinosis and adductors) are bluntly dissected. The popliteal lymph node is then located. The 2 proximal and 2 distal lymphatic vessels and distal blood supply of the popliteal node are then ligated by suturing. The popliteal lymph node, and any accompanying adipose tissue, is then removed by cutting connective tissues.

[1207] Care is taken to control any mild bleeding resulting from this procedure. After lymphatics are occluded, the skin flaps are sealed by using liquid skin (Vetbond) (AJ Buck). The separated skin edges are sealed to the underlying muscle tissue while leaving a gap of ˜0.5 cm around the leg. Skin also may be anchored by suturing to underlying muscle when necessary.

[1208] To avoid infection, animals are housed individually with mesh (no bedding). Recovering animals are checked daily through the optimal edematous peak, which typically occurred by day 5-7. The plateau edematous peak are then observed. To evaluate the intensity of the lymphedema, the circumference and volumes of 2 designated places on each paw before operation and daily for 7 days are measured. The effect of plasma proteins on lymphedema is determined and whether protein analysis is a useful testing perimeter is also investigated. The weights of both control and edematous limbs are evaluated at 2 places. Analysis is performed in a blind manner.

[1209] Circumference Measurements:

[1210] Under brief gas anesthetic to prevent limb movement, a cloth tape is used to measure limb circumference. Measurements are done at the ankle bone and dorsal paw by 2 different people and those 2 readings are averaged. Readings are taken from both control and edematous limbs.

[1211] Volumetric Measurements:

[1212] On the day of surgery, animals are anesthetized with Pentobarbital and are tested prior to surgery. For daily volumetrics animals are under brief halothane anesthetic (rapid immobilization and quick recovery), and both legs are shaved and equally marked using waterproof marker on legs. Legs are first dipped in water, then dipped into instrument to each marked level, then measured by Buxco edema software(Chen/Victor). Data is recorded by one person, while the other is dipping the limb to marked area.

[1213] Blood-plasma Protein Measurements:

[1214] Blood is drawn, spun, and serum separated prior to surgery and then at conclusion for total protein and Ca2⁺ comparison.

[1215] Limb Weight Comparison:

[1216] After drawing blood, the animal is prepared for tissue collection. The limbs are amputated using a quillitine, then both experimental and control legs are cut at the ligature and weighed. A second weighing is done as the tibio-cacaneal joint is disarticulated and the foot is weighed.

[1217] Histological Preparations:

[1218] The transverse muscle located behind the knee (popliteal) area is dissected and arranged in a metal mold, filled with freezeGel, dipped into cold methylbutane, placed into labeled sample bags at −80EC until sectioning. Upon sectioning, the muscle is observed under fluorescent microscopy for lymphatics.

[1219] The studies described in this example tested activity of agonists or antagonists of the invention. However, one skilled in the art could easily modify the exemplified studies to test the activity of polynucleotides or polypeptides of the invention (e.g., gene therapy).

### Example 29

### Suppression of TNF Alpha-induced Adhesion Molecule Expression by a Agonist or Antagonist of the Invention

[1220] The recruitment of lymphocytes to areas of inflammation and angiogenesis involves specific receptor-ligand interactions between cell surface adhesion molecules (CAMs) on lymphocytes and the vascular endothelium. The adhesion process, in both normal and pathological settings, follows a multi-step cascade that involves intercellular adhesion molecule-1 (ICAM-1), vascular cell adhesion molecule-1 (VCAM-1), and endothelial leukocyte adhesion molecule-1 (E-selectin) expression on endothelial cells (EC). The expression of these molecules and others on the vascular endothelium determines the efficiency with which leukocytes may adhere to the local vasculature and extravasate into the local tissue during the development of an inflammatory response. The local concentration of cytokines and growth factor participate in the modulation of the expression of these CAMs.

[1221] Tumor necrosis factor alpha (TNF-a), a potent proinflammatory cytokine, is a stimulator of all three CAMs on endothelial cells and may be involved in a wide variety of inflammatory responses, often resulting in a pathological outcome.

[1222] The potential of an agonist or antagonist of the invention to mediate a suppression of TNF-a induced CAM expression can be examined. A modified ELISA assay which uses ECs as a solid phase absorbent is employed to measure the amount of CAM expression on TNF-a treated ECs when co-stimulated with a member of the FGF family of proteins.

[1223] To perform the experiment, human umbilical vein endothelial cell (HUVEC) cultures are obtained from pooled cord harvests and maintained in growth medium (EGM-2; Clonetics, San Diego, Calif.) supplemented with 10% FCS and 1% penicillin/streptomycin in a 37 degree C. humidified incubator containing 5% CO₂. HUVECs are seeded in 96-well plates at concentrations of 1×10⁴ cells/well in EGM medium at 37 degree C. for 18-24 hrs or until confluent. The monolayers are subsequently washed 3 times with a serum-free solution of RPMI-1640 supplemented with 100 U/ml penicillin and 100 mg/ml streptomycin, and treated with a given cytokine and/or growth factor(s) for 24 h at 37 degree C. Following incubation, the cells are then evaluated for CAM expression.

[1224] Human Umbilical Vein Endothelial cells (HUVECs) are grown in a standard 96 well plate to confluence. Growth medium is removed from the cells and replaced with 90 ul of 199 Medium (10% FBS). Samples for testing and positive or negative controls are added to the plate in triplicate (in 10 ul volumes). Plates are incubated at 37 degree C for either 5 h (selectin and integrin expression) or 24 h (integrin expression only). Plates are aspirated to remove medium and 100 μl of 0.1% paraformaldehyde-PBS(with Ca++ and Mg++) is added to each well. Plates are held at 4° C. for 30 min.

[1225] Fixative is then removed from the wells and wells are washed 1× with PBS(+Ca,Mg)+0.5% BSA and drained. Do not allow the wells to dry. Add 10 μl of diluted primary antibody to the test and control wells. Anti-ICAM-1-Biotin, Anti-VCAM-1-Biotin and Anti-E-selectin-Biotin are used at a concentration of 10 μg/ml (1:10 dilution of 0.1 mg/ml stock antibody). Cells are incubated at 37° C. for 30 min. in a humidified environment. Wells are washed X3 with PBS(+Ca,Mg)+0.5% BSA.

[1226] Then add 20 μl of diluted ExtrAvidin-Alkaline Phosphotase (1:5,000 dilution) to each well and incubated at 37° C. for 30 min. Wells are washed X3 with PBS(+Ca,Mg)+0.5% BSA. 1 tablet of p-Nitrophenol Phosphate pNPP is dissolved in 5 ml of glycine buffer (pH 10.4). 100 μl of pNPP substrate in glycine buffer is added to each test well. Standard wells in triplicate are prepared from the working dilution of the ExtrAvidin-Alkaline Phosphotase in glycine buffer: 1:5,000 (10⁰) >10^{-0.5}>10⁻¹>10^{-1.5}0.5 μl of each dilution is added to triplicate wells and the resulting AP content in each well is 5.50 ng, 1.74 ng, 0.55 ng, 0.18 ng. 100 μl of pNNP reagent must then be added to each of the standard wells. The plate must be incubated at 37° C. for 4 h. A volume of 50 μl of 3M NaOH is added to all wells. The results are quantified on a plate reader at 405 nm. The background subtraction option is used on blank wells filled with glycine buffer only. The template is set up to indicate the concentration of AP-conjugate in each standard well [5.50 ng; 1.74 ng; 0.55 ng; 0.18 ng]. Results are indicated as amount of bound AP-conjugate in each sample.

[1227] The studies described in this example tested activity of agonists or antagonists of the invention. However, one skilled in the art could easily modify the exemplified studies to test the activity of polynucleotides or polypeptides of the invention (e.g., gene therapy).

### Example 30

### Production Of Polypeptide of the Invention For High-Throughput Screening Assays

[1228] The following protocol produces a supernatant containing polypeptide of the present invention to be tested. This supernatant can then be used in the Screening Assays described in Examples 32-41.

[1229] First, dilute Poly-D-Lysine (644 587 Boehringer-Mannheim) stock solution (1 mg/ml in PBS) 1:20 in PBS (w/o calcium or magnesium 17-516F Biowhittaker) for a working solution of 50 ug/ml. Add 200 ul of this solution to each well (24 well plates) and incubate at RT for 20 minutes. Be sure to distribute the solution over each well (note: a 12-channel pipetter may be used with tips on every other channel). Aspirate off the Poly-D-Lysine solution and rinse with lml PBS (Phosphate Buffered Saline). The PBS should remain in the well until just prior to plating the cells and plates may be poly-lysine coated in advance for up to two weeks.

[1230] Plate 293T cells (do not carry cells past P+20) at 2×10⁵ cells/well in.5 ml DMEM(Dulbecco's Modified Eagle Medium)(with 4.5 G/L glucose and L-glutamine (12-604F Biowhittaker))/10% heat inactivated FBS(14-503F Biowhittaker)/1× Penstrep(17-602E Biowhittaker). Let the cells grow overnight.

[1231] The next day, mix together in a sterile solution basin: 300 ul Lipofectamine (18324-012 Gibco/BRL) and 5 ml Optimem I (31985070 Gibco/BRL)/96-well plate. With a small volume multi-channel pipetter, aliquot approximately 2 ug of an expression vector containing a polynucleotide insert, produced by the methods described in Examples 8-10, into an appropriately labeled 96-well round bottom plate. With a multi-channel pipetter, add 50 ul of the Lipofectamine/Optimem I mixture to each well. Pipette up and down gently to mix. Incubate at RT 15-45 minutes. After about 20 minutes, use a multi-channel pipetter to add 150 ul Optimem I to each well. As a control, one plate of vector DNA lacking an insert should be transfected with each set of transfections.

[1232] Preferably, the transfection should be performed by tag-teaming the following tasks. By tag-teaming, hands on time is cut in half, and the cells do not spend too much time on PBS. First, person A aspirates off the media from four 24-well plates of cells, and then person B rinses each well with 0.5-1 ml PBS. Person A then aspirates off PBS rinse, and person B, using al2-channel pipetter with tips on every other channel, adds the 200 ul of DNA/Lipofectamine/Optimem I complex to the odd wells first, then to the even wells, to each row on the 24-well plates. Incubate at 37 degree C for 6 hours.

[1233] While cells are incubating, prepare appropriate media, either 1 %BSA in DMEM with lx penstrep, or HGS CHO-5 media (116.6 mg/L of CaCI2 (anhyd); 0.00130 mg/L CuSO₄-5H₂O; 0.050 mg/L of Fe(NO₃)₃-9H₂O; 0.417 mg/L of FeSO₄-7H₂O; 311.80 mg/L of Kcl; 28.64 mg/L of MgCl₂; 48.84 mg/L of MgSO₄; 6995.50 mg/L of NaCl; 2400.0 mg/L of NaHCO₃; 62.50 mg/L of NaH₂PO₄-H₂O; 71.02 mg/L of Na₂HPO4; 0.4320 mg/L of ZnSO₄-7H₂O; 0.002 mg/L of Arachidonic Acid; 1.022 mg/L of Cholesterol; 0.070 mg/L of DL-alpha-Tocopherol-Acetate; 0.0520 mg/L of Linoleic Acid; 0.010 mg/L of Linolenic Acid; 0.010 mg/L of Myristic Acid; 0.010 mg/L of Oleic Acid; 0.010 mg/L of Palmitric Acid; 0.010 mg/L of Palmitic Acid; 100 mg/L of Pluronic F-68; 0.010 mg/L of Stearic Acid; 2.20 mg/L of Tween 80; 4551 mg/L of D-Glucose; 130.85 mg/ml of L- Alanine; 147.50 mg/ml of L-Arginine-HCL; 7.50 mg/ml of L-Asparagine-H₂O; 6.65 mg/ml of L-Aspartic Acid; 29.56 mg/ml of L-Cystine-2HCL-H₂O; 31.29 mg/ml of L-Cystine-2HCL; 7.35 mg/ml of L-Glutamic Acid; 365.0 mg/ml of L-Glutamine; 18.75 mg/ml of Glycine; 52.48 mg/ml of L-Histidine-HCL-H₂0; 106.97 mg/ml of L-Isoleucine; 111.45 mg/ml of L-Leucine; 163.75 mg/ml of L-Lysine HCL; 32.34 mg/ml of L-Methionine; 68.48 mg/ml of L-Phenylalainine; 40.0 mg/ml of L-Proline; 26.25 mg/ml of L-Serine; 101.05 mg/ml of L-Threonine; 19.22 mg/ml of L-Tryptophan; 91.79 mg/ml of L-Tryrosine-2Na-2H₂O; and 99.65 mg/ml of L-Valine; 0.0035 mg/L of Biotin; 3.24 mg/L of D-Ca Pantothenate; 11.78 mg/L of Choline Chloride; 4.65 mg/L of Folic Acid; 15.60 mg/L of i-Inositol; 3.02 mg/L of Niacinamide; 3.00 mg/L of Pyridoxal HCL; 0.031 mg/L of Pyridoxine HCL; 0.319 mg/L of Riboflavin; 3.17 mg/L of Thiamine HCL; 0.365 mg/L of Thymidine; 0.680 mg/L of Vitamin B₁₂; 25 mM of HEPES Buffer; 2.39 mg/L of Na Hypoxanthine; 0.105 mg/L of Lipoic Acid; 0.081 mg/L of Sodium Putrescine-2HCL; 55.0 mg/L of Sodium Pyruvate; 0.0067 mg/L of Sodium Selenite; 20 uM of Ethanolamine; 0.122 mg/L of Ferric Citrate; 41.70 mg/L of Methyl-B-Cyclodextrin complexed with Linoleic Acid; 33.33 mg/L of Methyl-B-Cyclodextrin complexed with Oleic Acid; 10 mg/L of Methyl-B-Cyclodextrin complexed with Retinal Acetate. Adjust osmolarity to 327 mOsm) with 2 mm glutamine and 1× penstrep. (BSA (81-068-3 Bayer) 100 gm dissolved in IL DMEM for a 10% BSA stock solution). Filter the media and collect 50 ul for endotoxin assay in 15 ml polystyrene conical.

[1234] The transfection reaction is terminated, preferably by tag-teaming, at the end of the incubation period. Person A aspirates off the transfection media, while person B adds 1.5 ml appropriate media to each well. Incubate at 37 degree C. for 45 or 72 hours depending on the media used: 1%BSA for 45 hours or CHO-5 for 72 hours.

[1235] On day four, using a 300 ul multichannel pipetter, aliquot 600 ul in one 1 ml deep well plate and the remaining supernatant into a 2 ml deep well. The supernatants from each well can then be used in the assays described in Examples 32-39.

[1236] It is specifically understood that when activity is obtained in any of the assays described below using a supernatant, the activity originates from either the polypeptide of the present invention directly (e.g., as a secreted protein) or by polypeptide of the present invention inducing expression of other proteins, which are then secreted into the supernatant. Thus, the invention further provides a method of identifying the protein in the supernatant characterized by an activity in a particular assay.

### Example 31

### Construction of GAS Reporter Construct

[1237] One signal transduction pathway involved in the differentiation and proliferation of cells is called the Jaks-STATs pathway. Activated proteins in the Jaks-STATs pathway bind to gamma activation site “GAS” elements or interferon-sensitive responsive element (“ISRE”), located in the promoter of many genes. The binding of a protein to these elements alter the expression of the associated gene.

[1238] GAS and ISRE elements are recognized by a class of transcription factors called Signal Transducers and Activators of Transcription, or “STATs.” There are six members of the STATs family. Stat1 and Stat3 are present in many cell types, as is Stat2 (as response to IFN-alpha is widespread). Stat4 is more restricted and is not in many cell types though it has been found in T helper class I, cells after treatment with IL-12. Stat5 was originally called mammary growth factor, but has been found at higher concentrations in other cells including myeloid cells. It can be activated in tissue culture cells by many cytokines.

[1239] The STATs are activated to translocate from the cytoplasm to the nucleus upon tyrosine phosphorylation by a set of kinases known as the Janus Kinase (“Jaks”) family. Jaks represent a distinct family of soluble tyrosine kinases and include Tyk2, Jakl, Jak2, and Jak3. These kinases display significant sequence similarity and are generally catalytically inactive in resting cells.

[1240] The Jaks are activated by a wide range of receptors summarized in the Table below. (Adapted from review by Schidler and Darnell, Ann. Rev. Biochem. 64:621-51 (1995).) A cytokine receptor family, capable of activating Jaks, is divided into two groups: (a) Class 1 includes receptors for IL-2, IL-3, IL-4, IL-6, IL-7, IL-9, IL-11, IL-12, IL-15, Epo, PRL, GH, G-CSF, GM-CSF, LIF, CNTF, and thrombopoietin; and (b) Class 2 includes IFN-a, IFN-g, and IL-10. The Class 1 receptors share a conserved cysteine motif (a set of four conserved cysteines and one tryptophan) and a WSXWS motif (a membrane proximal region encoding Trp-Ser-Xaa-Trp-Ser (SEQ ID NO:2)).

[1241] Thus, on binding of a ligand to a receptor, Jaks are activated, which in turn activate STATs, which then translocate and bind to GAS elements. This entire process is encompassed in the Jaks-STATs signal transduction pathway.

[1242] Therefore, activation of the Jaks-STATs pathway, reflected by the binding of the GAS or the ISRE element, can be used to indicate proteins involved in the proliferation and differentiation of cells. For example, growth factors and cytokines are known to activate the Jaks-STATs pathway. (See Table below.) Thus, by using GAS elements linked to reporter molecules, activators of the Jaks-STATs pathway can be identified.

| | | JAKs | | | | GAS(elements) |
|---|---|---|---|---|---|---|
| Ligand | tyk2 | Jak1 | Jak2 | Jak3 | STATS | or ISRE |
| IFN family | | | | | | |
| IFN-a/B | + | + | − | − | 1, 2, 3 | ISRE |
| IFN-g | | + | + | − | 1 | GAS (IRF1 > |
| | | | | | | Lys6 > IFP) |
| Il-10 | + | ? | ? | − | 1, 3 | |
| gp130 family | | | | | | |
| IL-6 (Pleiotropic) | + | + | + | ? | 1, 3 | GAS (IRF1 > |
| | | | | | | Lys6 > IFP) |
| Il-11 (Pleiotropic) | ? | + | ? | ? | 1, 3 | |
| OnM | ? | + | + | ? | 1, 3 | |
| (Pleiotropic) | | | | | | |
| LIF (Pleiotropic) | ? | + | + | ? | 1, 3 | |
| CNTF | −/+ | + | + | ? | 1, 3 | |
| (Pleiotropic) | | | | | | |
| G-CSF | ? | + | ? | ? | 1, 3 | |
| (Pleiotropic) | | | | | | |
| IL-12 | + | − | + | + | 1, 3 | |
| (Pleiotropic) | | | | | | |
| g-C family | | | | | | |
| IL-2 | − | + | − | + | 1, 3, 5 | GAS |
| (lymphocytes) | | | | | | |
| IL-4 | − | + | − | + | 6 | GAS (IRF1 = |
| (lymph/myeloid) | | | | | | IFP >> |
| | | | | | | Ly6)(IgH) |
| IL-7 | − | + | − | + | 5 | GAS |
| (lymphocytes) | | | | | | |
| IL-9 | − | + | − | + | 5 | GAS |
| (lymphocytes) | | | | | | |
| IL-13 | − | + | ? | ? | 6 | GAS |
| (lymphocyte) | | | | | | |
| IL-15 | ? | + | ? | + | 5 | GAS |
| gp140 family | | | | | | |
| IL-3 (myeloid) | − | − | + | − | 5 | GAS (IRF1 > |
| | | | | | | IFP >> Ly6) |
| IL-5 (myeloid) | − | − | + | − | 5 | GAS |
| GM-CSF | − | − | + | − | 5 | GAS |
| (myeloid) | | | | | | |
| Growth hormone | | | | | | |
| family | | | | | | |
| GH | ? | − | + | − | 5 | |
| PRL | ? | +/− | + | − | 1, 3, 5 | |
| EPO | ? | − | + | − | 5 | GAS (B-CAS > |
| | | | | | | IRF1 = IFP >> |
| | | | | | | Ly6) |
| Receptor | | | | | | |
| Tyrosine Kinases | | | | | | |
| EGF | ? | + | + | − | 1, 3 | GAS (IRF1) |
| PDGF | ? | + | + | − | 1, 3 | |
| CSF-1 | ? | + | + | − | 1, 3 | GAS |
| | | | | | | (not IRF1) |

[1243] To construct a synthetic GAS containing promoter element, which is used in the Biological Assays described in Examples 32-33, a PCR based strategy is employed to generate a GAS-SV40 promoter sequence. The 5′ primer contains four tandem copies of the GAS binding site found in the IRF1 promoter and previously demonstrated to bind STATs upon induction with a range of cytokines (Rothman et al., Immunity 1:457-468 (1994).), although other GAS or ISRE elements can be used instead. The 5′ primer also contains 18 bp of sequence complementary to the SV40 early promoter sequence and is flanked with an XhoI site. The sequence of the 5′ primer is:

| | |
|---|---|
| 5′:GCGCCTCGAGATTTCCCCGAAATCTAGATTTCCCCGAAATGATTTCCCCG | (SEQ ID NO:3) |
| AAATGATTTCCCCGAAATATCTGCCATCTCAATTAG:3′ | |

[1244] The downstream primer is complementary to the SV40 promoter and is flanked with a Hind III site: 5′:GCGGCAAGCTTTTTGCAAAGCCTAGGC:3′ (SEQ ID NO: 4)

[1245] PCR amplification is performed using the SV40 promoter template present in the B-gal:promoter plasmid obtained from Clontech. The resulting PCR fragment is digested with XholI/Hind III and subcloned into BLSK2-. (Stratagene.) Sequencing with forward and reverse primers confirms that the insert contains the following sequence:

| | |
|---|---|
| 5′:CTCGAGATTTCCCCGAAATCTAGATTTCCCCGAAATGATTTCCCCGAAAT | (SEQ ID NO:5) |
| GATTTCCCCGAAATATCTGCCATCTCAATTAGTCAGCAACCATAGTCCCGC | |
| CCCTAACTCCGCCCATCCCGCCCCTAACTCCGCCCAGTTCCGCCCATTCTCC | |
| GCCCCATGGCTGACTAATTTTTTTTATTTATGCAGAGGCCGAGGCCGCCTC | |
| GGCCTCTGAGCTATTCCAGAAGTAGTGAGGAGGCTTTTTTGGAGGCCTAGG | |
| CTTTTGCAAAAAGCTT:3′ | |

[1246] With this GAS promoter element linked to the SV40 promoter, a GAS:SEAP2 reporter construct is next engineered. Here, the reporter molecule is a secreted alkaline phosphatase, or “SEAP.” Clearly, however, any reporter molecule can be used instead of SEAP, in this or in any of the other Examples. Well known reporter molecules that can be used instead of SEAP include chloramphenicol acetyltransferase (CAT), luciferase, alkaline phosphatase, B-galactosidase, green fluorescent protein (GFP), or any protein detectable by an antibody.

[1247] The above sequence confirmed synthetic GAS-SV40 promoter element is subcloned into the pSEAP-Promoter vector obtained from Clontech using HindlIl and XhoI, effectively replacing the SV40 promoter with the amplified GAS:SV40 promoter element, to create the GAS-SEAP vector. However, this vector does not contain a neomycin resistance gene, and therefore, is not preferred for mammalian expression systems.

[1248] Thus, in order to generate mammalian stable cell lines expressing the GAS-SEAP reporter, the GAS-SEAP cassette is removed from the GAS-SEAP vector using SalI and NotI, and inserted into a backbone vector containing the neomycin resistance gene, such as pGFP-1 (Clontech), using these restriction sites in the multiple cloning site, to create the GAS-SEAP/Neo vector. Once this vector is transfected into mammalian cells, this vector can then be used as a reporter molecule for GAS binding as described in Examples 32-33.

[1249] Other constructs can be made using the above description and replacing GAS with a different promoter sequence. For example, construction of reporter molecules containing NFK-B and EGR promoter sequences are described in Examples 34 and 35. However, many other promoters can be substituted using the protocols described in these Examples. For instance, SRE, IL-2, NFAT, or Osteocalcin promoters can be substituted, alone or in combination (e.g., GAS/NF-KB/EGR, GAS/NF-KB, Il-2/NFAT, or NF-KB/GAS). Similarly, other cell lines can be used to test reporter construct activity, such as HELA (epithelial), HUVEC (endothelial), Reh (B-cell), Saos-2 (osteoblast), HUVAC (aortic), or Cardiomyocyte.

### Example 32

### High-throughput Screening Assay for T-cell Activity

[1250] The following protocol is used to assess T-cell activity by identifying factors, and determining whether sup emate containing a polypeptide of the invention proliferates and/or differentiates T-cells. T-cell activity is assessed using the GAS/SEAP/Neo construct produced in Example 31. Thus, factors that increase SEAP activity indicate the ability to activate the Jaks-STATS signal transduction pathway. The T-cell used in this assay is Jurkat T-cells (ATCC Accession No. TIB-152), although Molt-3 cells (ATCC Accession No. CRL-1552) and Molt-4 cells (ATCC Accession No. CRL-1582) cells can also be used.

[1251] Jurkat T-cells are lymphoblastic CD4+ Th1 helper cells. In order to generate stable cell lines, approximately 2 million Jurkat cells are transfected with the GAS-SEAP/neo vector using DMRIE-C (Life Technologies)(transfection procedure described below). The transfected cells are seeded to a density of approximately 20,000 cells per well and transfectants resistant to 1 mg/ml genticin selected. Resistant colonies are expanded and then tested for their response to increasing concentrations of interferon gamma. The dose response of a selected clone is demonstrated.

[1252] Specifically, the following protocol will yield sufficient cells for 75 wells containing 200 ul of cells. Thus, it is either scaled up, or performed in multiple to generate sufficient cells for multiple 96 well plates. Jurkat cells are maintained in RPMI +10% serum with 1%Pen-Strep. Combine 2.5 mls of OPTI-MEM (Life Technologies) with 10 ug of plasmid DNA in a T25 flask. Add 2.5 ml OPTI-MEM containing 50 ul of DMRIE-C and incubate at room temperature for 15-45 mins.

[1253] During the incubation period, count cell concentration, spin down the required number of cells (10⁷ per transfection), and resuspend in OPTI-MEM to a final concentration of 10⁷ cells/ml. Then add lml of 1×10⁷ cells in OPTI-MEM to T25 flask and incubate at 37 degree C. for 6 hrs. After the incubation, add 10 ml of RPMI +15% serum.

[1254] The Jurkat:GAS-SEAP stable reporter lines are maintained in RPMI +10% serum, 1 mg/ml Genticin, and 1% Pen-Strep. These cells are treated with supernatants containing polypeptide of the present invention or polypeptide of the present invention induced polypeptides as produced by the protocol described in Example 30.

[1255] On the day of treatment with the supernatant, the cells should be washed and resuspended in fresh RPMI +10% serum to a density of 500,000 cells per ml. The exact number of cells required will depend on the number of supernatants being screened. For one 96 well plate, approximately 10 million cells (for 10 plates, 100 million cells) are required.

[1256] Transfer the cells to a triangular reservoir boat, in order to dispense the cells into a 96 well dish, using a 12 channel pipette. Using a 12 channel pipette, transfer 200 ul of cells into each well (therefore adding 100, 000 cells per well).

[1257] After all the plates have been seeded, 50 ul of the supernatants are transferred directly from the 96 well plate containing the supernatants into each well using a 12 channel pipette. In addition, a dose of exogenous interferon gamma (0.1, 1.0, 10 ng) is added to wells H9, H10, and H 11 to serve as additional positive controls for the assay.

[1258] The 96 well dishes containing Jurkat cells treated with supernatants are placed in an incubator for 48 hrs (note: this time is variable between 48-72 hrs). 35 ul samples from each well are then transferred to an opaque 96 well plate using a 12 channel pipette. The opaque plates should be covered (using sellophene covers) and stored at −20 degree C until SEAP assays are performed according to Example 36. The plates containing the remaining treated cells are placed at 4 degree C. and serve as a source of material for repeating the assay on a specific well if desired.

[1259] As a positive control, 100 Unit/ml interferon gamma can be used which is known to activate Jurkat T cells. Over 30 fold induction is typically observed in the positive control wells.

[1260] The above protocol may be used in the generation of both transient, as well as stable, transfected cells, which would be apparent to those of skill in the art.

### Example 33

### High-Throughput Screening Assay Identifying Myeloid Activity

[1261] The following protocol is used to assess myeloid activity of polypeptide of the present invention by determining whether polypeptide of the present invention proliferates and/or differentiates myeloid cells. Myeloid cell activity is assessed using the GAS/SEAP/Neo construct produced in Example 31. Thus, factors that increase SEAP activity indicate the ability to activate the Jaks-STATS signal transduction pathway. The myeloid cell used in this assay is U937, a pre-monocyte cell line, although TF-1, HL60, or KG1 can be used.

[1262] To transiently transfect U937 cells with the GAS/SEAP/Neo construct produced in Example 31, a DEAE-Dextran method (Kharbanda et. al., 1994, Cell Growth & Differentiation, 5:259-265) is used. First, harvest 2×10 U937 cells and wash with PBS. The U937 cells are usually grown in RPMI 1640 medium containing 10% heat-inactivated fetal bovine serum (FBS) supplemented with 100 units/ml penicillin and 100 mg/ml streptomycin.

[1263] Next, suspend the cells in I ml of 20 mM Tris-HCI (pH 7.4) buffer containing 0.5 mg/ml DEAE-Dextran, 8 ug GAS-SEAP2 plasmid DNA, 140 mM NaCl, 5 mM KCl, 375 uM Na₂HPO₄.7H₂O, 1 mM MgCI₂, and 675 uM CaCI₂. Incubate at 37 degrees C. for 45 min.

[1264] Wash the cells with RPMI 1640 medium containing 10% FBS and then resuspend in 10 ml complete medium and incubate at 37 degree C. for 36 hr.

[1265] The GAS-SEAP/U937 stable cells are obtained by growing the cells in 400 ug/ml G418. The G418-free medium is used for routine growth but every one to two months, the cells should be re-grown in 400 ug/ml G418 for couple of passages.

[1266] These cells are tested by harvesting 1×10⁸ cells (this is enough for ten 96-well plates assay) and wash with PBS. Suspend the cells in 200 ml above described growth medium, with a final density of 5×10⁵ cells/ml. Plate 200 ul cells per well in the 96-well plate (or 1×10⁵ cells/well).

[1267] Add 50 ul of the supernatant prepared by the protocol described in Example 30. Incubate at 37 degee C. for 48 to 72 hr. As a positive control, 100 Unit/ml interferon gamma can be used which is known to activate U937 cells. Over 30 fold induction is typically observed in the positive control wells. SEAP assay the supernatant according to the protocol described in Example 36.

### Example 34

### High-throughput Screening Assay Identifying Neuronal Activity

[1268] When cells undergo differentiation and proliferation, a group of genes are activated through many different signal transduction pathways. One of these genes, EGR1 (early growth response gene 1), is induced in various tissues and cell types upon activation. The promoter of EGR1 is responsible for such induction. Using the EGR1 promoter linked to reporter molecules, activation of cells can be assessed by polypeptide of the present invention.

[1269] Particularly, the following protocol is used to assess neuronal activity in PC12 cell lines. PC12 cells (rat phenochromocytoma cells) are known to proliferate and/or differentiate by activation with a number of mitogens, such as TPA (tetradecanoyl phorbol acetate), NGF (nerve growth factor), and EGF (epidermal growth factor). The EGRI gene expression is activated during this treatment. Thus, by stably transfecting PC12 cells with a construct containing an EGR promoter linked to SEAP reporter, activation of PC 12 cells by polypeptide of the present invention can be assessed.

[1270] The EGR/SEAP reporter construct can be assembled by the following protocol. The EGR-1 promoter sequence (−633 to +1)(Sakamoto K et al., Oncogene 6:867-871 (1991)) can be PCR amplified from human genomic DNA using the following primers:

| | |
|---|---|
| 5′GCGCTCGAGGGATGACAGCGATAGAACCCCGG-3′ | (SEQ ID NO:6) |
| 5′GCGAAGCTTCGCGACTCCCCGGATCCGCCTC-3′ | (SEQ ID NO:7) |

[1271] Using the GAS:SEAP/Neo vector produced in Example 31, EGR1 amplified product can then be inserted into this vector. Linearize the GAS:SEAP/Neo vector using restriction enzymes XhoI/HindIII, removing the GAS/SV40 stuffer. Restrict the EGR1 amplified product with these same enzymes. Ligate the vector and the EGRI promoter.

[1272] To prepare 96 well-plates for cell culture, two mls of a coating solution (1:30 dilution of collagen type I (Upstate Biotech Inc. Cat#08-115) in 30% ethanol (filter sterilized)) is added per one 10 cm plate or 50 ml per well of the 96-well plate, and allowed to air dry for 2 hr.

[1273] PC12 cells are routinely grown in RPMI-1640 medium (Bio Whittaker) containing 10% horse serum (JRH BIOSCIENCES, Cat. # 12449-78P), 5% heat-inactivated fetal bovine serum (FBS) supplemented with 100 units/ml penicillin and 100 ug/ml streptomycin on a precoated 10 cm tissue culture dish. One to four split is done every three to four days. Cells are removed from the plates by scraping and resuspended with pipetting up and down for more than 15 times.

[1274] Transfect the EGR/SEAP/Neo construct into PC12 using the Lipofectamine protocol described in Example 30. EGR-SEAP/PC12 stable cells are obtained by growing the cells in 300 ug/ml G418. The G418-free medium is used for routine growth but every one to two months, the cells should be re-grown in 300 ug/ml G418 for couple of passages.

[1275] To assay for neuronal activity, a 10 cm plate with cells around 70 to 80% confluent is screened by removing the old medium. Wash the cells once with PBS (Phosphate buffered saline). Then starve the cells in low serum medium (RPMI-1640 containing 1% horse serum and 0.5% FBS with antibiotics) overnight.

[1276] The next morning, remove the medium and wash the cells with PBS. Scrape off the cells from the plate, suspend the cells well in 2 ml low serum medium. Count the cell number and add more low serum medium to reach final cell density as 5×10⁵ cells/ml.

[1277] Add 200 ul of the cell suspension to each well of 96-well plate (equivalent to 1×10⁵ cells/well). Add 50 ul supernatant produced by Example 30, 37 degree C. for 48 to 72 hr. As a positive control, a growth factor known to activate PC12 cells through EGR can be used, such as 50 ng/ul of Neuronal Growth Factor (NGF). Over fifty-fold induction of SEAP is typically seen in the positive control wells. SEAP assay the supernatant according to Example 36.

### Example 35

### High-throughput Screening Assay for T-cell Activity

[1278] NF-KB (Nuclear Factor KB) is a transcription factor activated by a wide variety of agents including the inflammatory cytokines IL-1 and TNF, CD30 and CD40, lymphotoxin-alpha and lymphotoxin-beta, by exposure to LPS or thrombin, and by expression of certain viral gene products. As a transcription factor, NF-KB regulates the expression of genes involved in immune cell activation, control of apoptosis (NF-KB appears to shield cells from apoptosis), B and T-cell development, anti-viral and antimicrobial responses, and multiple stress responses.

[1279] In non-stimulated conditions, NF-KB is retained in the cytoplasm with I-KB (Inhibitor KB). However, upon stimulation, I-KB is phosphorylated and degraded, causing NF-KB to shuttle to the nucleus, thereby activating transcription of target genes. Target genes activated by NF-KB include IL-2, IL-6, GM-CSF, ICAM-1 and class 1 MHC.

[1280] Due to its central role and ability to respond to a range of stimuli, reporter constructs utilizing the NF-KB promoter element are used to screen the supernatants produced in Example 30. Activators or inhibitors of NF-KB would be useful in treating, preventing, and/or diagnosing diseases. For example, inhibitors of NF-KB could be used to treat those diseases related to the acute or chronic activation of NF-KB, such as rheumatoid arthritis.

[1281] To construct a vector containing the NF-KB promoter element, a PCR based strategy is employed. The upstream primer contains four tandem copies of the NF-KB binding site (GGGGACTTTCCC) (SEQ ID NO: 8), 18 bp of sequence complementary to the 5′ end of the SV40 early promoter sequence, and is flanked with an XhoI site:

| | |
|---|---|
| 5′:GCGGCCTCGAGGGGACTTTCCCGGGGACTTTCCGGGGACTTTCCGGGAC | (SEQ ID NO:9) |
| TTTCCATCCTGCCATCTCAATTAG:3′ | |

[1282] The downstream primer is complementary to the 3′ end of the SV40 promoter and is flanked with a Hind III site:

5′:GCGGCAAGCTTTTTGCAAAGCCTAGGC:3′ (SEQ ID NO:4)

[1283] PCR amplification is performed using the SV40 promoter template present in the pB-gal:promoter plasmid obtained from Clontech. The resulting PCR fragment is digested with XhoI and Hind III and subcloned into BLSK2-. (Stratagene) Sequencing with the T7 and T3 primers confirms the insert contains the following sequence:

| | |
|---|---|
| 5′:CTCGAGGGGACTTTCCCGGGGACTTTCCGGGGACTTTCCGGGACTTTCC | (SEQ ID NO: 10) |
| ATCTGCCATCTCAATTAGTCAGCAACCATAGTCCCGCCCCTAACTCCGCCC | |
| ATCCCGCCCCTAACTCCGCCCAGTTCCGCCCATTCTCCGCCCCATGGCTGA | |
| CTAATTTTTTTTATTTATGCAGAGGCCGAGGCCGCCTCGGCCTCTGAGCTAT | |
| TCCAGAAGTAGTGAGGAGGCTTTTTTGGAGGCCTAGGCTTTTGCAAAAAGC | |
| TT:3′ | |

[1284] Next, replace the SV40 minimal promoter element present in the pSEAP2-promoter plasmid (Clontech) with this NF-KB/SV40 fragment using XhoI and HindlIl. However, this vector does not contain a neomycin resistance gene, and therefore, is not preferred for mammalian expression systems.

[1285] In order to generate stable mammalian cell lines, the NF-KB/SV40/SEAP cassette is removed from the above NF-KB/SEAP vector using restriction enzymes SalI and NotI, and inserted into a vector containing neomycin resistance. Particularly, the NF-KB/SV40/SEAP cassette was inserted into pGFP-1 (Clontech), replacing the GFP gene, after restricting pGFP-1 with SalI and NotI.

[1286] Once NF-KB/SV40/SEAP/Neo vector is created, stable Jurkat T-cells are created and maintained according to the protocol described in Example 32. Similarly, the method for assaying supernatants with these stable Jurkat T-cells is also described in Example 32. As a positive control, exogenous TNF alpha (0.1,1, 10 ng) is added to wells H9, H10, and H11, with a 5-10 fold activation typically observed.

### Example 36

### Assay for SEAPActivity

[1287] As a reporter molecule for the assays described in Examples 32-35, SEAP activity is assayed using the Tropix Phospho-light Kit (Cat. BP-400) according to the following general procedure. The Tropix Phospho-light Kit supplies the Dilution, Assay, and Reaction Buffers used below.

[1288] Prime a dispenser with the 2.5× Dilution Buffer and dispense 15 ul of 2.5× dilution buffer into Optiplates containing 35 ul of a supernatant. Seal the plates with a plastic sealer and incubate at 65 degree C. for 30 min. Separate the Optiplates to avoid uneven heating.

[1289] Cool the samples to room temperature for 15 minutes. Empty the dispenser and prime with the Assay Buffer. Add 50 ml Assay Buffer and incubate at room temperature 5 min. Empty the dispenser and prime with the Reaction Buffer (see the Table below). Add 50 ul Reaction Buffer and incubate at room temperature for 20 minutes. Since the intensity of the chemiluminescent signal is time dependent, and it takes about 10 minutes to read 5 plates on a luminometer, thus one should treat 5 plates at each time and start the second set 10 minutes later.

[1290] Read the relative light unit in the luminometer. Set H12 as blank, and print the results. An increase in chemiluminescence indicates reporter activity.

[1291] Reaction Buffer Formulation:

Reaction Buffer Formulation:

| # of plates | Rxn buffer diluent (ml) | CSPD (ml) |
|---|---|---|
| 10 | 60 | 3 |
| 11 | 65 | 3.25 |
| 12 | 70 | 3.5 |
| 13 | 75 | 3.75 |
| 14 | 80 | 4 |
| 15 | 85 | 4.25 |
| 16 | 90 | 4.5 |
| 17 | 95 | 4.75 |
| 18 | 100 | 5 |
| 19 | 105 | 5.25 |
| 20 | 110 | 5.5 |
| 21 | 115 | 5.75 |
| 22 | 120 | 6 |
| 23 | 125 | 6.25 |
| 24 | 130 | 6.5 |
| 25 | 135 | 6.75 |
| 26 | 140 | 7 |
| 27 | 145 | 7.25 |
| 28 | 150 | 7.5 |
| 29 | 155 | 7.75 |
| 30 | 160 | 8 |
| 31 | 165 | 8.25 |
| 32 | 170 | 8.5 |
| 33 | 175 | 8.75 |
| 34 | 180 | 9 |
| 35 | 185 | 9.25 |
| 36 | 190 | 9.5 |
| 37 | 195 | 9.75 |
| 38 | 200 | 10 |
| 39 | 205 | 10.25 |
| 40 | 210 | 10.5 |
| 41 | 215 | 10.75 |
| 42 | 220 | 11 |
| 43 | 225 | 11.25 |
| 44 | 230 | 11.5 |
| 45 | 235 | 11.75 |
| 46 | 240 | 12 |
| 47 | 245 | 12.25 |
| 48 | 250 | 12.5 |
| 49 | 255 | 12.75 |
| 50 | 260 | 13 |

### Example 37

### High-Throughput Screening Assay Identifying Changes in Small Molecule Concentration and Membrane Permeability

[1292] Binding of a ligand to a receptor is known to alter intracellular levels of small molecules, such as calcium, potassium, sodium, and pH, as well as alter membrane potential. These alterations can be measured in an assay to identify supernatants which bind to receptors of a particular cell. Although the following protocol describes an assay for calcium, this protocol can easily be modified to detect changes in potassium, sodium, pH, membrane potential, or any other small molecule which is detectable by a fluorescent probe.

[1293] The following assay uses Fluorometric Imaging Plate Reader (“FLIPR”) to measure changes in fluorescent molecules (Molecular Probes) that bind small molecules. Clearly, any fluorescent molecule detecting a small molecule can be used instead of the calcium fluorescent molecule, fluo-4 (Molecular Probes, Inc.; catalog no. F-14202), used here.

[1294] For adherent cells, seed the cells at 10,000-20,000 cells/well in a Co-star black 96-well plate with clear bottom. The plate is incubated in a CO₂ incubator for 20 hours. The adherent cells are washed two times in Biotek washer with 200 ul of HBSS (Hank's Balanced Salt Solution) leaving 100 ul of buffer after the final wash.

[1295] A stock solution of 1 mg/ml fluo-4 is made in 10% pluronic acid DMSO. To load the cells with fluo-4 , 50 ul of 12 ug/ml fluo-4 is added to each well. The plate is incubated at 37 degrees C. in a CO₂ incubator for 60 min. The plate is washed four times in the Biotek washer with HBSS leaving 100 ul of buffer.

[1296] For non-adherent cells, the cells are spun down from culture media. Cells are re-suspended to 2-5×10⁶ cells/ml with HBSS in a 50-ml conical tube. 4 ul of 1 mg/ml fluo-4 solution in 10% pluronic acid DMSO is added to each ml of cell suspension. The tube is then placed in a 37 degrees C. water bath for 30-60 min. The cells are washed twice with HBSS, resuspended to 1×10⁶ cells/ml, and dispensed into a microplate, 100 ul/well. The plate is centrifuged at 1000 rpm for 5 min. The plate is then washed once in Denley Cell Wash with 200 ul, followed by an aspiration step to 100 ul final volume.

[1297] For a non-cell based assay, each well contains a fluorescent molecule, such as fluo-4 . The supernatant is added to the well, and a change in fluorescence is detected.

[1298] To measure the fluorescence of intracellular calcium, the FLIPR is set for the following parameters: (1) System gain is 300-800 mW; (2) Exposure time is 0.4 second; (3) Camera F/stop is F/2; (4) Excitation is 488 nm; (5) Emission is 530 nm; and (6) Sample addition is 50 ul. Increased emission at 530 nm indicates an extracellular signaling event caused by the a molecule, either polypeptide of the present invention or a molecule induced by polypeptide of the present invention, which has resulted in an increase in the intracellular Ca⁺⁺ concentration.

### Example 38

### High-throughput Screening Assay Identifying Tyrosine Kinase Activity

[1299] The Protein Tyrosine Kinases (PTK) represent a diverse group of transmembrane and cytoplasmic kinases. Within the Receptor Protein Tyrosine Kinase RPTK) group are receptors for a range of mitogenic and metabolic growth factors including the PDGF, FGF, EGF, NGF, HGF and Insulin receptor subfamilies. In addition there are a large family of RPTKs for which the corresponding ligand is unknown. Ligands for RPTKs include mainly secreted small proteins, but also membrane-bound and extracellular matrix proteins.

[1300] Activation of RPTK by ligands involves ligand-mediated receptor dimerization, resulting in transphosphorylation of the receptor subunits and activation of the cytoplasmic tyrosine kinases. The cytoplasmic tyrosine kinases include receptor associated tyrosine kinases of the src-family (e.g., src, yes, Ick, lyn, fyn) and non-receptor linked and cytosolic protein tyrosine kinases, such as the Jak family, members of which mediate signal transduction triggered by the cytokine superfamily of receptors (e.g., the Interleukins, Interferons, GM-CSF, and Leptin).

[1301] Because of the wide range of known factors capable of stimulating tyrosine kinase activity, identifying whether polypeptide of the present invention or a molecule induced by polypeptide of the present invention is capable of activating tyrosine kinase signal transduction pathways is of interest. Therefore, the following protocol is designed to identify such molecules capable of activating the tyrosine kinase signal transduction pathways.

[1302] Seed target cells (e.g., primary keratinocytes) at a density of approximately 25,000 cells per well in a 96 well Loprodyne Silent Screen Plates purchased from Nalge Nunc (Naperville, Ill.). The plates are sterilized with two 30 minute rinses with 100% ethanol, rinsed with water and dried overnight. Some plates are coated for 2 hr with 100 ml of cell culture grade type I collagen (50 mg/ml), gelatin (2%) or polylysine (50 mg/ml), all of which can be purchased from Sigma Chemicals (St. Louis, MO) or 10% Matrigel purchased from Becton Dickinson (Bedford,Mass.), or calf serum, rinsed with PBS and stored at 4 degree C. Cell growth on these plates is assayed by seeding 5,000 cells/well in growth medium and indirect quantitation of cell number through use of alamarBlue as described by the manufacturer Alamar Biosciences, Inc. (Sacramento, Calif.) after 48 hr. Falcon plate covers #3071 from Becton Dickinson (Bedford,Mass.) are used to cover the Loprodyne Silent Screen Plates. Falcon Microtest III cell culture plates can also be used in some proliferation experiments.

[1303] To prepare extracts, A431 cells are seeded onto the nylon membranes of Loprodyne plates (20,000/200 ml/well) and cultured overnight in complete medium. Cells are quiesced by incubation in serum-free basal medium for 24 hr. After 5-20 minutes treatment with EGF (60 ng/ml) or 50 ul of the supernatant produced in Example 30, the medium was removed and 100 ml of extraction buffer ((20 mM HEPES pH 7.5, 0.15 M NaCl, 1% Triton X-100, 0.1% SDS, 2 mM Na3VO4, 2 mM Na4P207 and a cocktail of protease inhibitors (# 1836170) obtained from Boeheringer Mannheim (Indianapolis, Ind.)) is added to each well and the plate is shaken on a rotating shaker for 5 minutes at 40 C. The plate is then placed in a vacuum transfer manifold and the extract filtered through the 0.45 mm membrane bottoms of each well using house vacuum. Extracts are collected in a 96-well catch/assay plate in the bottom of the vacuum manifold and immediately placed on ice. To obtain extracts clarified by centrifugation, the content of each well, after detergent solubilization for 5 minutes, is removed and centrifuged for 15 minutes at 4 degree C. at 16,000× g.

[1304] Test the filtered extracts for levels of tyrosine kinase activity. Although many methods of detecting tyrosine kinase activity are known, one method is described here.

[1305] Generally, the tyrosine kinase activity of a supernatant is evaluated by determining its ability to phosphorylate a tyrosine residue on a specific substrate (a biotinylated peptide). Biotinylated peptides that can be used for this purpose include PSK1 (corresponding to amino acids 6-20 of the cell division kinase cdc2-p34) and PSK2 (corresponding to amino acids 1-17 of gastrin). Both peptides are substrates for a range of tyrosine kinases and are available from Boehringer Mannheim.

[1306] The tyrosine kinase reaction is set up by adding the following components in order. First, add 10 ul of 5 uM Biotinylated Peptide, then 10 ul ATP/Mg₂+(5 mM ATP/50 mM MgCl₂), then 10 ul of 5× Assay Buffer (40 mM imidazole hydrochloride, pH7.3, 40 mM beta-glycerophosphate, 1 mM EGTA, 100 mM MgCl₂, 5 mM MnCl₂, 0.5 mg/ml BSA), then 5 ul of Sodium Vanadate (1 mM), and then 5 ul of water. Mix the components gently and preincubate the reaction mix at 30 degree C. for 2 min. Initial the reaction by adding 10 ul of the control enzyme or the filtered supernatant.

[1307] The tyrosine kinase assay reaction is then terminated by adding 10 ul of 120 mm EDTA and place the reactions on ice.

[1308] Tyrosine kinase activity is determined by transferring 50 ul aliquot of reaction mixture to a microtiter plate (MTP) module and incubating at 37 degree C. for 20 min. This allows the streptavidin coated 96 well plate to associate with the biotinylated peptide. Wash the MTP module with 300 ul/well of PBS four times. Next add 75 ul of anti-phospotyrosine antibody conjugated to horse radish peroxidase (anti-P-Tyr-POD(0.5 u/ml)) to each well and incubate at 37 degree C. for one hour. Wash the well as above.

[1309] Next add 100 ul of peroxidase substrate solution (Boehringer Mannheim) and incubate at room temperature for at least 5 mins (up to 30 min). Measure the absorbance of the sample at 405 nm by using ELISA reader. The level of bound peroxidase activity is quantitated using an ELISA reader and reflects the level of tyrosine kinase activity.

### Example 39

### High-throughput Screening Assay Identifying Phosphorylation Activity

[1310] As a potential alternative and/or complement to the assay of protein tyrosine kinase activity described in Example 38, an assay which detects activation (phosphorylation) of major intracellular signal transduction intermediates can also be used. For example, as described below one particular assay can detect tyrosine phosphorylation of the Erk-1 and Erk-2 kinases. However, phosphorylation of other molecules, such as Raf, JNK, p38 MAP, Map kinase kinase (MEK), MEK kinase, Src, Muscle specific kinase (MuSK), IRAK, Tec, and Janus, as well as any other phosphoserine, phosphotyrosine, or phosphothreonine molecule, can be detected by substituting these molecules for Erk-1 or Erk-2 in the following assay.

[1311] Specifically, assay plates are made by coating the wells of a 96-well ELISA plate with 0.1 ml of protein G (1 ug/ml) for 2 hr at room temp, (RT). The plates are then rinsed with PBS and blocked with 3% BSA/PBS for 1 hr at RT. The protein G plates are then treated with 2 commercial monoclonal antibodies (100 ng/well) against Erk-1 and Erk-2 (1 hr at RT) (Santa Cruz Biotechnology). (To detect other molecules, this step can easily be modified by substituting a monoclonal antibody detecting any of the above described molecules.) After 3-5 rinses with PBS, the plates are stored at 4 degree C until use.

[1312] A431 cells are seeded at 20,000/well in a 96-well Loprodyne filterplate and cultured overnight in growth medium. The cells are then starved for 48 hr in basal medium (DMEM) and then treated with EGF (6 ng/well) or 50 ul of the supernatants obtained in Example 30 for 5-20 minutes. The cells are then solubilized and extracts filtered directly into the assay plate.

[1313] After incubation with the extract for 1 hr at RT, the wells are again rinsed. As a positive control, a commercial preparation of MAP kinase (10 ng/well) is used in place of A431 extract. Plates are then treated with a commercial polyclonal (rabbit) antibody (1 ug/ml) which specifically recognizes the phosphorylated epitope of the Erk-1 and Erk-2 kinases (1 hr at RT). This antibody is biotinylated by standard procedures. The bound polyclonal antibody is then quantitated by successive incubations with Europium-streptavidin and Europium fluorescence enhancing reagent in the Wallac DELFIA instrument (time-resolved fluorescence). An increased fluorescent signal over background indicates a phosphorylation by polypeptide of the present invention or a molecule induced by polypeptide of the present invention.

### Example 40

### Assay for the Stimulation ofBone Marrow CD34+ Cell Proliferation

[1314] This assay is based on the ability of human CD34+ to proliferate in the presence of hematopoietic growth factors and evaluates the ability of isolated polypeptides expressed in mammalian cells to stimulate proliferation of CD34+ cells.

[1315] It has been previously shown that most mature precursors will respond to only a single signal. More immature precursors require at least two signals to respond. Therefore, to test the effect of polypeptides on hematopoietic activity of a wide range of progenitor cells, the assay contains a given polypeptide in the presence or absence of other hematopoietic growth factors. Isolated cells are cultured for 5 days in the presence of Stem Cell Factor (SCF) in combination with tested sample. SCF alone has a very limited effect on the proliferation of bone marrow (BM) cells, acting in such conditions only as a “survival” factor. However, combined with any factor exhibiting stimulatory effect on these cells (e.g., IL-3), SCF will cause a synergistic effect. Therefore, if the tested polypeptide has a stimulatory effect on hematopoietic progenitors, such activity can be easily detected. Since normal BM cells have a low level of cycling cells, it is likely that any inhibitory effect of a given polypeptide, or agonists or antagonists thereof, might not be detected. Accordingly, assays for an inhibitory effect on progenitors is preferably tested in cells that are first subjected to in vitro stimulation with SCF+IL+3, and then contacted with the compound that is being evaluated for inhibition of such induced proliferation.

[1316] Briefly, CD34+ cells are isolated using methods known in the art. The cells are thawed and resuspended in medium (QBSF 60 serum-free medium with 1% L-glutamine (500 ml) Quality Biological, Inc., Gaithersburg, Md. Cat# 160-204-101). After several gentle centrifugation steps at 200× g, cells are allowed to rest for one hour. The cell count is adjusted to 2.5×10⁵ cells/ml. During this time, 100 μl of sterile water is added to the peripheral wells of a 96-well plate. The cytokines that can be tested with a given polypeptide in this assay is rhSCF (R&D Systems, Minneapolis, Minn., Cat# 255-SC) at 50 ng/ml alone and in combination with rhSCF and rhIL-3 (R&D Systems, Minneapolis, Minn., Cat# 203-ML) at 30 ng/ml. After one hour, 10 μl of prepared cytokines, 50 μl of the supernatants prepared in Example 30 (supernatants at 1:2 dilution =50 μl) and 20 μl of diluted cells are added to the media which is already present in the wells to allow for a final total volume of 100 μl. The plates are then placed in a 37° C./5% CO₂ incubator for five days.

[1317] Eighteen hours before the assay is harvested, 0.5 μCi/well of [3 H] Thymidine is added in a 10 μl volume to each well to determine the proliferation rate. The experiment is terminated by harvesting the cells from each 96-well plate to a filtermat using the Tomtec Harvester 96. After harvesting, the filtermats are dried, trimmed and placed into OmniFilter assemblies consisting of one OmniFilter plate and one OmniFilter Tray. 60 μl Microscint is added to each well and the plate sealed with TopSeal-A press-on sealing film A bar code 15 sticker is affixed to the first plate for counting. The sealed plates are then loaded and the level of radioactivity determined via the Packard Top Count and the printed data collected for analysis. The level of radioactivity reflects the amount of cell proliferation.

[1318] The studies described in this example test the activity of a given polypeptide to stimulate bone marrow CD34+ cell proliferation. One skilled in the art could easily modify the exemplified studies to test the activity of polynucleotides (e.g., gene therapy), antibodies, agonists, and/or antagonists and fragments and variants thereof. As a nonlimiting example, potential antagonists tested in this assay would be expected to inhibit cell proliferation in the presence of cytokines and/or to increase the inhibition of cell proliferation in the presence of cytokines and a given polypeptide. In contrast, potential agonists tested in this assay would be expected to enhance cell proliferation and/or to decrease the inhibition of cell proliferation in the presence of cytokines and a given polypeptide.

[1319] The ability of a gene to stimulate the proliferation of bone marrow CD34+ cells indicates that polynucleotides and polypeptides corresponding to the gene are useful for the diagnosis and treatment of disorders affecting the immune system and hematopoiesis. Representative uses are described in the “Immune Activity” and “Infectious Disease” sections above, and elsewhere herein.

### Example 41

### Assay for Extracellular Matrix Enhanced Cell Response (EMECR)

[1320] The objective of the Extracellular Matrix Enhanced Cell Response (EMECR) assay is to identify gene products (e.g., isolated polypeptides) that act on the hematopoietic stem cells in the context of the extracellular matrix (ECM) induced signal.

[1321] Cells respond to the regulatory factors in the context of signal(s) received from the surrounding microenvironment. For example, fibroblasts, and endothelial and epithelial stem cells fail to replicate in the absence of signals from the ECM. Hematopoietic stem cells can undergo self-renewal in the bone marrow, but not in in vitro suspension culture. The ability of stem cells to undergo self-renewal in vitro is dependent upon their interaction with the stromal cells and the ECM protein fibronectin (fn). Adhesion of cells to fn is mediated by the α₅.β₁ and α4.β₁ integrin receptors, which are expressed by human and mouse hematopoietic stem cells. The factor(s) which integrate with the ECM environment and are responsible for stimulating stem cell self-renewal have not yet been identified. Discovery of such factors should be of great interest in gene therapy and bone marrow transplant applications

[1322] Briefly, polystyrene, non tissue culture treated, 96-well plates are coated with fn fragment at a coating concentration of 0.2 μg/cm. Mouse bone marrow cells are plated (1,000 cells/well) in 0.2 ml of serum-free medium. Cells cultured in the presence of IL-3 (5 ng/ml)+SCF (50 ng/ml) would serve as the positive control, conditions under which little self-renewal but pronounced differentiation of the stem cells is to be expected. Gene products of the invention (e.g., including, but not limited to, polynucleotides and polypeptides of the present invention, and supernatants produced in Example 30), are tested with appropriate negative controls in the presence and absence of SCF(5.0 ng/ml), where test factor supernatants represent 10% of the total assay volume. The plated cells are then allowed to grow by incubating in a low oxygen environment (5% CO₂, 7% O₂, and 88% N₂) tissue culture incubator for 7 days. The number of proliferating cells within the wells is then quantitated by measuring thymidine incorporation into cellular DNA. Verification of the positive hits in the assay will require phenotypic characterization of the cells, which can be accomplished by scaling up of the culture system and using appropriate antibody reagents against cell surface antigens and FACScan.

[1323] One skilled in the art could easily modify the exemplified studies to test the activity of polynucleotides (e.g., gene therapy), antibodies, agonists, and/or antagonists and fragments and variants thereof.

[1324] If a particular polypeptide of the present invention is found to be a stimulator of hematopoietic progenitors, polynucleotides and polypeptides corresponding to the gene encoding said polypeptide may be useful for the diagnosis and treatment of disorders affecting the immune system and hematopoiesis. Representative uses are described in the “Immune Activity” and “Infectious Disease” sections above, and elsewhere herein. The gene product may also be useful in the expansion of stem cells and committed progenitors of various blood lineages, and in the differentiation and/or proliferation of various cell types.

[1325] Additionally, the polynucleotides and/or polypeptides of the gene of interest and/or agonists and/or antagonists thereof, may also be employed to inhibit the proliferation and differentiation of hematopoietic cells and therefore may be employed to protect bone marrow stem cells from chemotherapeutic agents during chemotherapy. This antiproliferative effect may allow administration of higher doses of chemotherapeutic agents and, therefore, more effective chemotherapeutic treatment.

[1326] Moreover, polynucleotides and polypeptides corresponding to the gene of interest may also be useful for the treatment and diagnosis of hematopoietic related disorders such as, for example, anemia, pancytopenia, leukopenia, thrombocytopenia or leukemia since stromal cells are important in the production of cells of hematopoietic lineages. The uses include bone marrow cell ex-vivo culture, bone marrow transplantation, bone marrow reconstitution, radiotherapy or chemotherapy of neoplasia.

### Example 42

### Human Dermal Fibroblast and Aortic Smooth Muscle Cell Proliferation

[1327] The polypeptide of interest is added to cultures of normal human dermal fibroblasts (NHDF) and human aortic smooth muscle cells (AoSMC) and two co-assays are performed with each sample. The first assay examines the effect of the polypeptide of interest on the proliferation of normal human dermal fibroblasts (NHDF) or aortic smooth muscle cells (AoSMC). Aberrant growth of fibroblasts or smooth muscle cells is a part of several pathological processes, including fibrosis, and restenosis. The second assay examines IL6 production by both NHDF and SMC. IL6 production is an indication of functional activation. Activated cells will have increased production of a number of cytokines and other factors, which can result in a proinflammatory or immunomodulatory outcome. Assays are run with and without co-TNFa stimulation, in order to check for costimulatory or inhibitory activity.

[1328] Briefly, on day 1, 96-well black plates are set up with 1000 cells/well (NHDF) or 2000 cells/well (AOSMC) in 100 l culture media. NHDF culture media contains: Clonetics FB basal media, 1 mg/ml hFGF, 5 mg/ml insulin, 50 mg/ml gentamycin, 2%FBS, while AoSMC culture media contains Clonetics SM basal media, 0.5 μg/ml hEGF, 5 mg/ml insulin, 1 μg/ml hFGF, 50 mg/ml gentamycin, 50 μg/ml Amphotericin B, 5%FBS. After incubation at 37° C. for at least 4-5 hours culture media is aspirated and replaced with growth arrest media. Growth arrest media for NHDF contains fibroblast basal media, 50 mg/ml gentamycin, 2% FBS, while growth arrest media for AoSMC contains SM basal media, 50 mg/ml gentamycin, 50 μg/ml Amphotericin B, 0.4% FBS. Incubate at 37° C. until day 2.

[1329] On day 2, serial dilutions and templates of the polypeptide of interest are designed such that they always include media controls and known-protein controls. For both stimulation and inhibition experiments, proteins are diluted in growth arrest media. For inhibition experiments, TNFa is added to a final concentration of 2 ng/ml (NHDF) or 5 ng/ml (AoSMC). Add ⅓ vol media containing controls or polypeptides of the present invention and incubate at 37 degrees C./5% CO₂ until day 5.

[1330] Transfer 60 μl from each well to another labeled 96-well plate, cover with a plate-sealer, and store at 4 degrees C. until Day 6 (for IL6 ELISA). To the remaining 100 μl in the cell culture plate, aseptically add Alamar Blue in an amount equal to 10% of the culture volume (10 μl). Return plates to incubator for 3 to 4 hours. Then measure fluorescence with excitation at 530 nm and emission at 590 nm using the CytoFluor. This yields the growth stimulation/inhibition data.

[1331] On day 5, the IL6 ELISA is performed by coating a 96 well plate with 50-100 ul/well of Anti-Human IL6 Monoclonal antibody diluted in PBS, pH 7.4, incubate ON at room temperature.

[1332] On day 6, empty the plates into the sink and blot on paper towels. Prepare Assay Buffer containing PBS with 4% BSA. Block the plates with 200 μl/well of Pierce Super Block blocking buffer in PBS for 1-2 hr and then wash plates with wash buffer (PBS, 0.05% Tween-20). Blot plates on paper towels. Then add 50 μl/well of diluted Anti-Human IL-6 Monoclonal, Biotin-labeled antibody at 0.50 mg/ml. Make dilutions of IL-6 stock in media (30, 10, 3, 1, 0.3, 0 ng/ml). Add duplicate samples to top row of plate. Cover the plates and incubate for 2 hours at RT on shaker.

[1333] Plates are washed with wash buffer and blotted on paper towels. Dilute EU-labeled Streptavidin 1:1000 in Assay buffer, and add 100 μl/well. Cover the plate and incubate 1 h at RT. Plates are again washed with wash buffer and blotted on paper towels.

[1334] Add 100 μl/well of Enhancement Solution. Shake for 5 minutes. Read the plate on the Wallac DELFIA Fluorometer. Readings from triplicate samples in each assay were tabulated and averaged.

[1335] A positive result in this assay suggests AoSMC cell proliferation and that the polypeptide of the present invention may be involved in dermal fibroblast proliferation and/or smooth muscle cell proliferation. A positive result also suggests many potential uses of polypeptides, polynucleotides, agonists and/or antagonists of the polynucleotide/polypeptide of the present invention which gives a positive result. For example, inflammation and immune responses, wound healing, and angiogenesis, as detailed throughout this specification. Particularly, polypeptides of the present invention and polynucleotides of the present invention may be used in wound healing and dermal regeneration, as well as the promotion of vasculogenesis, both of the blood vessels and lymphatics. The growth of vessels can be used in the treatment of, for example, cardiovascular diseases. Additionally, antagonists of polypeptides and polynucleotides of the invention may be useful in treating diseases, disorders, and/or conditions which involve angiogenesis by acting as an anti-vascular agent (e.g., anti-angiogenesis). These diseases, disorders, and/or conditions are known in the art and/or are described herein, such as, for example, malignancies, solid tumors, benign tumors, for example hemangiomas, acoustic neuromas, neurofibromas, trachomas, and pyogenic granulomas; artheroscleric plaques; ocular angiogenic diseases, for example, diabetic retinopathy, retinopathy of prematurity, macular degeneration, corneal graft rejection, neovascular glaucoma, retrolental fibroplasia, rubeosis, retinoblastoma, uvietis and Pterygia (abnormal blood vessel growth) of the eye; rheumatoid arthritis; psoriasis; delayed wound healing; endometriosis; vasculogenesis; granulations; hypertrophic scars (keloids); nonunion fractures; scleroderma; trachoma; vascular adhesions; myocardial angiogenesis; coronary collaterals; cerebral collaterals; arteriovenous malformations; ischemic limb angiogenesis; Osler-Webber Syndrome; plaque neovascularization; telangiectasia; hemophiliac joints; angiofibroma; fibromuscular dysplasia; wound granulation; Crohn's disease; and atherosclerosis. Moreover, antagonists of polypeptides and polynucleotides of the invention may be useful in treating anti-hyperproliferative diseases and/or anti-inflammatory known in the art and/or described herein.

[1336] One skilled in the art could easily modify the exemplified studies to test the activity of polynucleotides (e.g., gene therapy), antibodies, agonists, and/or antagonists and fragments and variants thereof.

### Example 43

### Cellular Adhesion Molecule (CAM) Expression on Endothelial Cells

[1337] The recruitment of lymphocytes to areas of inflammation and angiogenesis involves specific receptor-ligand interactions between cell surface adhesion molecules (CAMs) on lymphocytes and the vascular endothelium. The adhesion process, in both normal and pathological settings, follows a multi-step cascade that involves intercellular adhesion molecule-1 (ICAM-1), vascular cell adhesion molecule-1 (VCAM-1), and endothelial leukocyte adhesion molecule-1 (E-selectin) expression on endothelial cells (EC). The expression of these molecules and others on the vascular endothelium determines the efficiency with which leukocytes may adhere to the local vasculature and extravasate into the local tissue during the development of an inflammatory response. The local concentration of cytokines and growth factor participate in the modulation of the expression of these CAMs.

[1338] Briefly, endothelial cells (e.g., Human Umbilical Vein Endothelial cells (HUVECs)) are grown in a standard 96 well plate to confluence, growth medium is removed from the cells and replaced with 100 μl of 199 Medium (10% fetal bovine serum (FBS)). Samples for testing and positive or negative controls are added to the plate in triplicate (in 10 μl volumes). Plates are then incubated at 37° C. for either 5 h (selectin and integrin expression) or 24 h (integrin expression only). Plates are aspirated to remove medium and 100 μl of 0.1% paraformaldehyde-PBS(with Ca++ and Mg++) is added to each well. Plates are held at 4° C. for 30 min. Fixative is removed from the wells and wells are washed 1× with PBS(+Ca,Mg) +0.5% BSA and drained. 10 μl of diluted primary antibody is added to the test and control wells. Anti-ICAM-1-Biotin, Anti-VCAM-1-Biotin and Anti-E-selectin-Biotin are used at a concentration of 10 μg/ml (1:10 dilution of 0.1 mg/ml stock antibody). Cells are incubated at 37° C. for 30 min. in a humidified environment. Wells are washed three times with PBS(+Ca,Mg) +0.5% BSA. 20 μl of diluted ExtrAvidin-Alkaline Phosphatase (1:5,000 dilution, referred to herein as the working dilution) are added to each well and incubated at 37° C. for 30 min. Wells are washed three times with PBS(+Ca,Mg)+0.5% BSA. Dissolve 1 tablet of p-Nitrophenol Phosphate pNPP per 5 ml of glycine buffer (pH 10.4). 100 μl of pNPP substrate in glycine buffer is added to each test well. Standard wells in triplicate are prepared from the working dilution of the ExtrAvidin-Alkaline Phosphotase in glycine buffer: 1:5,000 (10⁰)>10^{-0.5}>10⁻¹ >10^{-1.5}0.5 μl of each dilution is added to triplicate wells and the resulting AP content in each well is 5.50 ng, 1.74 ng, 0.55 ng, 0.18 ng. 100 μl of pNNP reagent is then added to each of the standard wells. The plate is incubated at 37° C. for 4 h. A volume of 50 μl of 3M NaOH is added to all wells. The plate is read on a plate reader at 405 nm using the background subtraction option on blank wells filled with glycine buffer only. Additionally, the template is set up to indicate the concentration of AP-conjugate in each standard well [5.50 ng; 1.74 ng; 0.55 ng; 0.18 ng]. Results are indicated as amount of bound AP-conjugate in each sample.

### Example 44

### Alamar Blue Endothelial Cells Proliferation Assay

[1339] This assay may be used to quantitatively determine protein mediated inhibition of bFGF-induced proliferation of Bovine Lymphatic Endothelial Cells (LECs), Bovine Aortic Endothelial Cells (BAECs) or Human Microvascular Uterine Myometrial Cells (UTMECs). This assay incorporates a fluorometric growth indicator based on detection of metabolic activity. A standard Alamar Blue Proliferation Assay is prepared in EGM-2MV with 10 ng/ml of bFGF added as a source of endothelial cell stimulation. This assay may be used with a variety of endothelial cells with slight changes in growth medium and cell concentration. Dilutions of the protein batches to be tested are diluted as appropriate. Serum-free medium (GIBCO SFM) without bFGF is used as a non-stimulated control and Angiostatin or TSP-1 are included as a known inhibitory controls.

[1340] Briefly, LEC, BAECs or UTMECs are seeded in growth media at a density of 5000 to 2000 cells/well in a 96 well plate and placed at 37 degrees C. overnight. After the overnight incubation of the cells, the growth media is removed and replaced with GIBCO EC-SFM. The cells are treated with the appropriate dilutions of the protein of interest or control protein sample(s) (prepared in SFM) in triplicate wells with additional bFGF to a concentration of 10 ng/ml. Once the cells have been treated with the samples, the plate(s) is/are placed back in the 37° C. incubator for three days. After three days 10 ml of stock alamar blue (Biosource Cat# DAL1100) is added to each well and the plate(s) is/are placed back in the 37° C. incubator for four hours. The plate(s) are then read at 530 nm excitation and 590 nm emission using the CytoFluor fluorescence reader. Direct output is recorded in relative fluorescence units.

[1341] Alamar blue is an oxidation-reduction indicator that both fluoresces and changes color in response to chemical reduction of growth medium resulting from cell growth. As cells grow in culture, innate metabolic activity results in a chemical reduction of the immediate surrounding environment. Reduction related to growth causes the indicator to change from oxidized (non-fluorescent blue) form to reduced (fluorescent red) form (i.e., stimulated proliferation will produce a stronger signal and inhibited proliferation will produce a weaker signal and the total signal is proportional to the total number of cells as well as their metabolic activity). The background level of activity is observed with the starvation medium alone. This is compared to the output observed from the positive control samples (bFGF in growth medium) and protein dilutions.

### Example 45

### Detection of Inhibition of a Mixed Lymphocyte Reaction

[1342] This assay can be used to detect and evaluate inhibition of a Mixed Lymphocyte Reaction (MLR) by gene products (e.g., isolated polypeptides). Inhibition of a MLR may be due to a direct effect on cell proliferation and viability, modulation of costimulatory molecules on interacting cells, modulation of adhesiveness between lymphocytes and accessory cells, or modulation of cytokine production by accessory cells. Multiple cells may be targeted by these polypeptides since the peripheral blood mononuclear fraction used in this assay includes T, B and natural killer lymphocytes, as well as monocytes and dendritic cells.

[1343] Polypeptides of interest found to inhibit the MLR may find application in diseases associated with lymphocyte and monocyte activation or proliferation. These include, but are not limited to, diseases such as asthma, arthritis, diabetes, inflammatory skin conditions, psoriasis, eczema, systemic lupus erythematosus, multiple sclerosis, glomerulonephritis, inflammatory bowel disease, crohn's disease, ulcerative colitis, arteriosclerosis, cirrhosis, graft vs. host disease, host vs. graft disease, hepatitis, leukemia and lymphoma.

[1344] Briefly, PBMCs from human donors are purified by density gradient centrifugation using Lymphocyte Separation Medium (LSM®, density 1.0770 g/ml, Organon Teknika Corporation, West Chester, Pa.). PBMCs from two donors are adjusted to 2×10⁶ cells/ml in RPMI-1640 (Life Technologies, Grand Island, N.Y.) supplemented with 10% FCS and 2 mM glutamine. PBMCs from a third donor is adjusted to 2×10⁵ cells/ml. Fifty microliters of PBMCs from each donor is added to wells of a 96-well round bottom microtiter plate. Dilutions of test materials (50 μl) is added in triplicate to microtiter wells. Test samples (of the protein of interest) are added for final dilution of 1:4; rhuIL-2 (R&D Systems, Minneapolis, Minn., catalog number 202-IL) is added to a final concentration of 1 μg/ml; anti-CD4 mAb (R&D Systems, clone 34930.11, catalog number MAB379) is added to a final concentration of 10 μg/ml. Cells are cultured for 7-8 days at 37° C. in 5% CO₂, and 1 μC of [³H] thymidine is added to wells for the last 16 hrs of culture. Cells are harvested and thymidine incorporation determined using a Packard TopCount. Data is expressed as the mean and standard deviation of triplicate determinations.

[1345] Samples of the protein of interest are screened in separate experiments and compared to the negative control treatment, anti-CD4 mAb, which inhibits proliferation of lymphocytes and the positive control treatment, IL-2 (either as recombinant material or supernatant), which enhances proliferation of lymphocytes.

[1346] One skilled in the art could easily modify the exemplified studies to test the activity of polynucleotides (e.g., gene therapy), antibodies, agonists, and/or antagonists and fragments and variants thereof.

### Example 46

### Assays for Protease Activity

[1347] The following assay may be used to assess protease activity of the polypeptides of the invention.

[1348] Gelatin and casein zymography are performed essentially as described (Heusen et al., Anal. Biochem., 102:196-202 (1980); Wilson et al., Journal of Urology, 149:653-658 (1993)). Samples are run on 10% polyacryamide/0.1% SDS gels containing 1% gelain orcasein, soaked in 2.5% triton at room temperature for 1 hour, and in 0.1 M glycine, pH 8.3 at 37° C. 5 to 16 hours. After staining in amido black areas of proteolysis apear as clear areas agains the blue-black background. Trypsin (Sigma T8642) is used as a positive control.

[1349] Protease activity is also determined by monitoring the cleavage of n-a-benzoyl-L-arginine ethyl ester (BAEE) (Sigma B-4500. Reactions are set up in (25 mMNaPO₄, 1 mM EDTA, and 1 mM BAEE), pH 7.5. Samples are added and the change in adsorbance at 260 nm is monitored on the Beckman DU-6 spectrophotometer in the time-drive mode. Trypsin is used as a positive control.

[1350] Additional assays based upon the release of acid-soluble peptides from casein or hemoglobin measured as adsorbance at 280 nm or calorimetrically using the Folin method are performed as described in Bergmeyer, et al., Methods of Enzymatic Analysis, 5 (1984). Other assays involve the solubilization of chromogenic substrates (Ward, Applied Science, 251-317 (1983).

### Example 47

### Identifying Serine Protease Substrate Specificity

[1351] Methods known in the art or described herein may be used to determine the substrate specificity of the polypeptides of the present invention having serine protease activity. A preferred method of determining substrate specificity is by the use of positional scanning synthetic combinatorial libraries as described in GB 2 324 529 (incorporated herein in its entirety).

[1352] Example 48

### Ligand Binding Assays

[1353] The following assay may be used to assess ligand binding activity of the polypeptides of the invention.

[1354] Ligand binding assays provide a direct method for ascertaining receptor pharmacology and are adaptable to a high throughput format. The purified ligand for a polypeptide is radiolabeled to high specific activity (50-2000 Ci/mmol) for binding studies. A determination is then made that the process of radiolabeling does not diminish the activity of the ligand towards its polypeptide. Assay conditions for buffers, ions, pH and other modulators such as nucleotides are optimized to establish a workable signal to noise ratio for both membrane and whole cell polypeptide sources. For these assays, specific polypeptide binding is defined as total associated radioactivity minus the radioactivity measured in the presence of an excess of unlabeled competing ligand. Where possible, more than one competing ligand is used to define residual nonspecific binding.

### Example 49

### Functional Assay in Xenopus Oocytes

[1355] Capped RNA transcripts from linearized plasmid templates encoding the polypeptides of the invention are synthesized in vitro with RNA polymerases in accordance with standard procedures. In vitro transcripts are suspended in water at a final concentration of 0.2 mg/mi. Ovarian lobes are removed from adult female toads, Stage V defolliculated oocytes are obtained, and RNA transcripts (10 ng/oocytc) are injected in a 50 nl bolus using a microinjection apparatus. Two electrode voltage clamps are used to measure the currents from individual Xenopus oocytes in response polypeptides and polypeptide agonist exposure. Recordings are made in Ca2+ free Barth's medium at room temperature. The Xenopus system can be used to screen known ligands and tissue/cell extracts for activating ligands.

### Example 50

### Microphysiometric Assays

[1356] Activation of a wide variety of secondary messenger systems results in extrusion of small amounts of acid from a cell. The acid formed is largely as a result of the increased metabolic activity required to fuel the intracellular signaling process. The pH changes in the media surrounding the cell are very small but are detectable by the CYTOSENSOR microphysiometer (Molecular Devices Ltd., Menlo Park, Calif.). The CYTOSENSOR is thus capable of detecting the activation of polypeptide which is coupled to an energy utilizing intracellular signaling pathway.

### Example 51

### Extract/Cell Supernatant Screening

[1357] A large number of mammalian receptors exist for which there remains, as yet, no cognate activating ligand (agonist). Thus, active ligands for these receptors may not be included within the ligands banks as identified to date. Accordingly, the polypeptides of the invention can also be functionally screened (using calcium, cAMP, microphysiometer, oocyte electrophysiology, etc., functional screens) against tissue extracts to identify its natural ligands. Extracts that produce positive functional responses can be sequentially subfractionated until an activating ligand is isolated and identified.

### Example 52

### Calcium and cAMP Functional Assays

[1358] Seven transmembrane receptors which are expressed in HEK 293 cells have been shown to be coupled functionally to activation of PLC and calcium mobilization and/or cAMP stimulation or inhibition. Basal calcium levels in the HEK 293 cells in receptor-transfected or vector control cells were observed to be in the normal, 100 nM to 200 nM, range. HEK 293 cells expressing recombinant receptors are loaded with fura 2 and in a single day >150 selected ligands or tissue/cell extracts are evaluated for agonist induced calcium mobilization. Similarly, HEK 293 cells expressing recombinant receptors are evaluated for the stimulation or inhibition of cAMP production using standard cAMP quantitation assays. Agonists presenting a calcium transient or cAMP fluctuation are tested in vector control cells to determine if the response is unique to the transfected cells expressing receptor.

### Example 53

### ATP-binding assay

[1359] The following assay may be used to assess ATP-binding activity of polypeptides of the invention.

[1360] ATP-binding activity of the polypeptides of the invention may be detected using the ATP-binding assay described in U.S. Pat. No. 5,858,719, which is herein incorporated by reference in its entirety. Briefly, ATP-binding to polypeptides of the invention is measured via photoaffinity labeling with 8-azido-ATP in a competition assay. Reaction mixtures containing 1 mg/ml of the ABC transport protein of the present invention are incubated with varying concentrations of ATP, or the non-hydrolyzable ATP analog adenyl-5′-imidodiphosphate for 10 minutes at 4° C. A mixture of 8-azido-ATP (Sigma Chem. Corp., St. Louis, Mo.) plus 8-azido-ATP (32P-ATP) (5 mCi/μmol, ICN, Irvine Calif.) is added to a final concentration of 100 μM and 0.5 ml aliquots are placed in the wells of a porcelain spot plate on ice. The plate is irradiated using a short wave 254 nm UV lamp at a distance of 2.5 cm from the plate for two one-minute intervals with a one-minute cooling interval in between. The reaction is stopped by addition of dithiothreitol to a final concentration of 2 mM. The incubations are subjected to SDS-PAGE electrophoresis, dried, and autoradiographed. Protein bands corresponding to the particular polypeptides of the invention are excised, and the radioactivity quantified. A decrease in radioactivity with increasing ATP or adenly-5′-imidodiphosphate provides a measure of ATP affinity to the polypeptides.

### Example 54

### Small Molecule Screening

[1361] This invention is particularly useful for screening therapeutic compounds by using the polypeptides of the invention, or binding fragments thereof, in any of a variety of drug screening techniques. The polypeptide or fragment employed in such a test may be affixed to a solid support, expressed on a cell surface, free in solution, or located intracellularly. One method of drug screening utilizes eukaryotic or prokaryotic host cells which are stably transformed with recombinant nucleic acids expressing the polypeptide or fragment. Drugs are screened against such transformed cells in competitive binding assays. One may measure, for example, the formulation of complexes between the agent being tested and polypeptide of the invention.

[1362] Thus, the present invention provides methods of screening for drugs or any other agents which affect activities mediated by the polypeptides of the invention. These methods comprise contacting such an agent with a polypeptide of the invention or fragment thereof and assaying for the presence of a complex between the agent and the polypeptide or fragment thereof, by methods well known in the art. In such a competitive binding assay, the agents to screen are typically labeled. Following incubation, free agent is separated from that present in bound form, and the amount of free or uncomplexed label is a measure of the ability of a particular agent to bind to the polypeptides of the invention.

[1363] Another technique for drug screening provides high throughput screening for compounds having suitable binding affinity to the polypeptides of the invention, and is described in great detail in European Patent Application 84/03564, published on Sep. 13, 1984, which is herein incorporated by reference in its entirety. Briefly stated, large numbers of different small molecule test compounds are synthesized on a solid substrate, such as plastic pins or some other surface. The test compounds are reacted with polypeptides of the invention and washed. Bound polypeptides are then detected by methods well known in the art. Purified polypeptides are coated directly onto plates for use in the aforementioned drug screening techniques. In addition, non-neutralizing antibodies may be used to capture the peptide and immobilize it on the solid support.

[1364] This invention also contemplates the use of competitive drug screening assays in which neutralizing antibodies capable of binding polypeptides of the invention specifically compete with a test compound for binding to the polypeptides or fragments thereof. In this manner, the antibodies are used to detect the presence of any peptide which shares one or more antigenic epitopes with a polypeptide of the invention.

### Example 55

### Phosphorylation Assay

[1365] In order to assay for phosphorylation activity of the polypeptides of the invention, a phosphorylation assay as described in U.S. Pat. No. 5,958,405 (which is herein incorporated by reference) is utilized. Briefly, phosphorylation activity may be measured by phosphorylation of a protein substrate using gamma-labeled ³²P-ATP and quantitation of the incorporated radioactivity using a gamma radioisotope counter. The polypeptides of the invention are incubated with the protein substrate, ³²P-ATP, and a kinase buffer. The ³²P incorporated into the substrate is then separated from free ³²P-ATP by electrophoresis, and the incorporated ³²P is counted and compared to a negative control. Radioactivity counts above the negative control are indicative of phosphorylation activity of the polypeptides of the invention.

### Example 56

### Detection of Phosphorylation Activity (Activation) of the Polypeptides of the Invention in the Presence of Polypeptide Ligands

[1366] Methods known in the art or described herein may be used to determine the phosphorylation activity of the polypeptides of the invention. A preferred method of determining phosphorylation activity is by the use of the tyrosine phosphorylation assay as described in U.S. Pat. No. 5,817,471 (incorporated herein by reference).

### Example 57

### Identification of Signal Transduction Proteins that Interact With Polypeptides of the Present Invention

[1367] The purified polypeptides of the invention are research tools for the identification, characterization and purification of additional signal transduction pathway proteins or receptor proteins. Briefly, labeled receptor PTK polypeptide is useful as a reagent for the purification of molecules with which it interacts. In one embodiment of affinity purification, receptor PTK polypeptide is covalently coupled to a chromatography column. Cell-free extract derived from putative target cells, such as carcinoma tissues, is passed over the column, and molecules with appropriate affinity bind to the receptor PTK polypeptides, or specific phosphotyrosine-recognition domains thereof. The receptor PTK polypeptide interacting protein-complex is recovered from the column, dissociated, and the recovered molecule subjected to N-terminal protein sequencing. This amino acid sequence is then used to identify the captured molecule or to design degenerate oligonucleotide probes for cloning the relevant gene from an appropriate cDNA library.

### Example 58

### IL-6 Bioassay

[1368] To test the proliferative effects of the polypeptides of the invention, the IL-6 Bioassay as described by Marz et al. is utilized (Proc. Natl. Acad. Sci., U.S.A., 95:3251-56 (1998), which is herein incorporated by reference). Briefly, IL-6 dependent B9 murine cells are washed three times in IL-6 free medium and plated at a concentration of 5,000 cells per well in 50 μl, and 50 μl of the IL-6-like polypeptide is added. After 68 hrs. at 37° C., the number of viable cells is measured by adding the tetrazolium salt thiazolyl blue (MTT) and incubating for a further 4 hrs. at 37° C. B9 cells are lysed by SDS and optical density is measured at 570 nm. Controls containing IL-6 (positive) and no cytokine (negative) are utilized. Enhanced proliferation in the test sample(s) relative to the negative control is indicative of proliferative effects mediated by polypeptides of the invention.

### Example 59

### Support of Chicken Embryo Neuron Survival

[1369] To test whether sympathetic neuronal cell viability is supported by polypeptides of the invention, the chicken embryo neuronal survival assay of Senaldi et al is utilized (Proc. Natl. Acad. Sci., U.S.A., 96:11458-63 (1998), which is herein incorporated by reference). Briefly, motor and sympathetic neurons are isolated from chicken embryos, resuspended in L15 medium (with 10% FCS, glucose, sodium selenite, progesterone, conalbumin, putrescine, and insulin; Life Technologies, Rockville, Md.) and Dulbecco's modified Eagles medium [with 10% FCS, glutamine, penicillin, and 25 mM Hepes buffer (pH 7.2); Life Technologies, Rockville, Md.], respectively, and incubated at 37° C. in 5% CO₂ in the presence of different concentrations of the purified IL-6-like polypeptide, as well as a negative control lacking any cytokine. After 3 days, neuron survival is determined by evaluation of cellular morphology, and through the use of the calorimetric assay of Mosmann (Mossman, T., J. Immunol. Methods, 65:55-63 (1983)). Enhanced neuronal cell viability as compared to the controls lacking cytokine is indicative of the ability of the inventive purified IL-6-like polypeptide(s) to enhance the survival of neuronal cells.

### Example 60

### Assay for Phosphatase Activity

[1370] The following assay may be used to assess serine/threonine phosphatase (PTPase) activity of the polypeptides of the invention.

[1371] In order to assay for serine/threonine phosphatase (PTPase) activity, assays can be utilized which are widely known to those skilled in the art. For example, the serine/threonine phosphatase (PSPase) activity is measured using a PSPase assay kit from New England Biolabs, Inc. Myelin basic protein (MyBP), a substrate for PSPase, is phosphorylated on serine and threonine residues with cAMP-dependent Protein Kinase in the presence of [³²P]ATP. Protein serine/threonine phosphatase activity is then determined by measuring the release of inorganic phosphate from ³²P-labeled MyBP.

### Example 61

### Interaction of Serine/Threonine Phosphatases with other Proteins

[1372] The polypeptides of the invention with serine/threonine phosphatase activity as determined in Example 60 are research tools for the identification, characterization and purification of additional interacting proteins or receptor proteins, or other signal transduction pathway proteins. Briefly, labeled polypeptide(s) of the invention is useful as a reagent for the purification of molecules with which it interacts. In one embodiment of affinity purification, polypeptide of the invention is covalently coupled to a chromatography column. Cell-free extract derived from putative target cells, such as neural or liver cells, is passed over the column, and molecules with appropriate affinity bind to the polypeptides of the invention. The polypeptides of the invention-complex is recovered from the column, dissociated, and the recovered molecule subjected to N-terminal protein sequencing. This amino acid sequence is then used to identify the captured molecule or to design degenerate oligonucleotide probes for cloning the relevant gene from an appropriate cDNA library.

### Example 62

### Assayingfor Heparanase Activity

[1373] In order to assay for heparanase activity of the polypeptides of the invention, the heparanase assay described by Vlodavsky et al is utilized (Vlodavsky, I., et al., Nat. Med., 5:793-802 (1999)). Briefly, cell lysates, conditioned media or intact cells (1×10⁶ cells per 35-mm dish) are incubated for 18 hrs at 37° C., pH 6.2-6.6, with ³⁵S-labeled ECM or soluble ECM derived peak I proteoglycans. The incubation medium is centrifuged and the supernatant is analyzed by gel filtration on a Sepharose CL-6B column (0.9×30 cm). Fractions are eluted with PBS and their radioactivity is measured. Degradation fragments of heparan sulfate side chains are eluted from Sepharose 6B at 0.5<Kₐᵥ<0.8 (peak II). Each experiment is done at least three times. Degradation fragments corresponding to “peak II,” as described by Vlodavsky et al., is indicative of the activity of the polypeptides of the invention in cleaving heparan sulfate.

### Example 63

### Immobilization of Biomolecules

[1374] This example provides a method for the stabilization of polypeptides of the invention in non-host cell lipid bilayer constucts (see, e.g., Bieri et al., Nature Biotech 17:1105-1108 (1999), hereby incorporated by reference in its entirety herein) which can be adapted for the study of polypeptides of the invention in the various functional assays described above. Briefly, carbohydrate-specific chemistry for biotinylation is used to confine a biotin tag to the extracellular domain of the polypeptides of the invention, thus allowing uniform orientation upon immobilization. A 50 uM solution of polypeptides of the invention in washed membranes is incubated with 20 mM NaIO4 and 1.5 mg/ml (4 mM) BACH or 2 mg/ml (7.5 mM) biotin-hydrazide for 1 hr at room temperature (reaction volume, 150 ul). Then the sample is dialyzed (Pierce Slidealizer Cassett, 10 kDa cutoff; Pierce Chemical Co., Rockford Ill.) at 4 C. first for 5 h, exchanging the buffer after each hour, and finally for 12 h against 500 ml buffer R (0.15 M NaCl, 1 mM MgCl2, 10 mM sodium phosphate, pH7). Just before addition into a cuvette, the sample is diluted 1:5 in buffer ROG50 (Buffer R supplemented with 50 mM octylglucoside).

### Example 64

### TAQMAN

[1375] Quantitative PCR (QPCR). Total RNA from cells in culture are extracted by Trizol separation as recommended by the supplier (LifeTechnologies). (Total RNA is treated with DNase I (Life Technologies) to remove any contaminating genomic DNA before reverse transcription.) Total RNA (50 ng) is used in a one-step, 50 ul, RT-QPCR, consisting of Taqman Buffer A (Perkin-Elmer; 50 mM KCl/10 mM Tris, pH 8.3), 5.5 mM MgCl₂, 240 μM each dNTP, 0.4 units RNase inhibitor(Promega), 8%glycerol, 0.012% Tween-20, 0.05% gelatin, 0.3 uM primers, 0.1 uM probe, 0.025 units Amplitaq Gold (Perkin-Elmer) and 2.5 units Superscript II reverse transcriptase (Life Technologies). As a control for genomic contamination, parallel reactions are setup without reverse transcriptase. The relative abundance of (unknown) and 18 S RNAs are assessed by using the Applied Biosystems Prism 7700 Sequence Detection System (Livak, K. J., Flood, S. J., Marmaro, J., Giusti, W. & Deetz, K. (1995) PCR Methods Appl. 4, 357-362). Reactions are carried out at 48° C. for 30 min, 95° C. for 10 min, followed by 40 cycles of 95° C. for 15 s, 60° C. for 1 min. Reactions are performed in triplicate.

[1376] Primers (f & r) and FRET probes sets are designed using Primer Express Software (Perkin-Elmer). Probes are labeled at the 5′-end with the reporter dye 6-FAM and on the 3′-end with the quencher dye TAMRA (Biosource International, Camarillo, Calif. or Perkin-Elmer).

### Example 65

### Assays for Metalloproteinase Activity

[1377] Metalloproteinases (EC 3.4.24.-) are peptide hydrolases which use metal ²⁺ ions, such as Zn, as the catalytic mechanism. Metalloproteinase activity of polypeptides of the present invention can be assayed according to the following methods.

[1378] Proteolysis of Alpha-2-macroglobulin

[1379] To confirm protease activity, purified polypeptides of the invention are mixed with the substrate alpha-2-macroglobulin (0.2 unit/ml; Boehringer Mannheim, Germany) in 1× assay buffer (50 mM HEPES, pH 7.5, 0.2 M NaCl, 10 mM CaCl₂, 25 μM ZnCl₂ and 0.05% Brij-35) and incubated at 37° C. for 1-5 days. Trypsin is used as positive control. Negative controls contain only alpha-2-macroglobulin in assay buffer. The samples are collected and boiled in SDS-PAGE sample buffer containing 5% 2-mercaptoethanol for 5-min, then loaded onto 8% SDS-polyacrylamide gel. After electrophoresis the proteins are visualized by silver staining. Proteolysis is evident by the appearance of lower molecular weight bands as compared to the negative control.

[1380] Inhibition of Alpha-2-macroglobulin Proteolysis by Inhibitors of Metalloproteinases

[1381] Known metalloproteinase inhibitors (metal chelators (EDTA, EGTA, AND HgCl₂), peptide metalloproteinase inhibitors (TIMP-1 and TIMP-2), and commercial small molecule MMP inhibitors) are used to characterize the proteolytic activity of polypeptides of the invention. The three synthetic MMP inhibitors used are: MMP inhibitor I, [IC₅₀=1.0 μM against MMP-1 and MMP-8; IC₅₀=30 μM against MMP-9; IC₅₀=150 μM against MMP-3]; MMP-3 (stromelysin-1) inhibitor I [IC₅₀=5 μM against MMP-3], and MMP-3 inhibitor II [Ki =130 nM against MMP-3]; inhibitors available through Calbiochem, catalog # 444250, 444218, and 444225, respectively). Briefly, different concentrations of the small molecule MMP inhibitors are mixed with purified polypeptides of the invention (50μg/ml) in 22.9 μl of 1× HEPES buffer (50 mM HEPES, pH 7.5, 0.2 M NaCl, 10 mM CaCl₂, 25 μM ZnCl₂ and 0.05%Brij-35) and incubated at room temperature (24° C.) for 2-hr, then 7.1 μl of substrate alpha-2-macroglobulin (0.2 unit/ml) is added and incubated at 37° C. for 20-hr. The reactions are stopped by adding 4× sample buffer and boiled immediately for 5 minutes. After SDS-PAGE, the protein bands are visualized by silver stain.

[1382] Synthetic Fluorogenic Peptide Substrates Cleavage Assay

[1383] The substrate specificity for polypeptides of the invention with demonstrated metalloproteinase activity can be determined using synthetic fluorogenic peptide substrates (purchased from BACHEM Bioscience Inc). Test substrates include, M-1985, M-2225, M-2105, M-2110, and M-2255. The first four are MMP substrates and the last one is a substrate of tumor necrosis factor-α (TNF-α) converting enzyme (TACE). All the substrates are prepared in 1:1 dimethyl sulfoxide (DMSO) and water. The stock solutions are 50-500 μM. Fluorescent assays are performed by using a Perkin Elmer LS 50B luminescence spectrometer equipped with a constant temperature water bath. The excitation λ is 328 nm and the emission λ is 393 nm. Briefly, the assay is carried out by incubating 176 μl 1× HEPES buffer (0.2 M NaCl, 10 mM CaCl₂, 0.05% Brij-35 and 50 mM HEPES, pH 7.5) with 4 μl of substrate solution (50 μM) at 25° C. for 15 minutes, and then adding 20 μl of a purified polypeptide of the invention into the assay cuvett. The final concentration of substrate is 1 μM. Initial hydrolysis rates are monitored for 30-min.

### Example 66

### Characterization of the cDNA Contained in a Deposited Plasmid

[1384] The size of the cDNA insert contained in a deposited plasmid may be routinely determined using techniques known in the art, such as PCR amplification using synthetic primers hybridizable to the 3′ and 5′ ends of the cDNA sequence. For example, two primers of 17-30 nucleotides derived from each end of the cDNA (i.e., hybridizable to the absolute 5′ nucleotide or the 3′ nucleotide end of the sequence of SEQ ID NO:X, respectively) are synthesized and used to amplify the cDNA using the deposited cDNA plasmid as a template. The polymerase chain reaction is carried out under routine conditions, for instance, in 25 ul of reaction mixture with 0.5 ug of the above cDNA template. A convenient reaction mixture is 1.5-5 mM MgCl₂, 0.01% (w/v) gelatin, 20 uM each of dATP, dCTP, dGTP, dTTP, 25 pmol of each primer and 0.25 Unit of Taq polymerase. Thirty five cycles of PCR (denaturation at 94 degree C. for 1 min; annealing at 55 degree C. for 1 min; elongation at 72 degree C. for 1 min) are performed with a Perkin-Elmer Cetus automated thermal cycler. The amplified product is analyzed by agarose gel electrophoresis. The PCR product is verified to be the selected sequence by subcloning and sequencing the DNA product.

[1385] Use of the above methodologies and/or other methodologies known in the art generates fragments from the clone corresponding to the approximate fragments described in Table 8, below. Accordingly, Table 8 provides a physical characterization of certain clones encompassed by the invention. The first column provides the unique clone identifier, “Clone ID NO:Z”, for cDNA clones of the invention, as described in Table 1A. The second column provides the approximate size of the cDNA insert contained in the corresponding CDNA clone.

TABLE 8

| Clone ID | cDNA |
|---|---|
| NO: Z | Insert Size: |
| HFOXC35 | 600 |
| HSSGD56 | 500 |
| HSSCC14 | 900 |
| HSSAP68 | 1200 |
| HSLKB62 | 1800 |
| HSLJD02 | 1000 |
| HSLHV27 | 1000 |
| HSLGA24 | 900 |
| HSLDT25 | 1600 |
| HSLCF96 | 1600 |
| HSKEH21 | 900 |
| HSHCL04 | 1500 |
| HRDFA03 | 1000 |
| HFIIJ14 | 700 |
| HBSAP57 | 700 |

[1386] It will be clear that the invention may be practiced otherwise than as particularly described in the foregoing description and examples. Numerous modifications and variations of the present invention are possible in light of the above teachings and, therefore, are within the scope of the appended claims.

[1387] The entire disclosure of each document cited (including patents, patent applications, journal articles, abstracts, laboratory manuals, books, or other disclosures) in the Background of the Invention, Detailed Description, and Examples is hereby incorporated herein by reference. In addition, the CD-R copy of the sequence listing submitted herewith and the corresponding computer readable form are both incorporated herein by reference in their entireties. The specification and Sequence Listing of each of the following U.S. applications are herein incorporated by reference in their entirety: Application No. 60/179,065, filed on Jan. 31, 2000; Application No. 60/180,628, filed on Feb. 4, 2000; Application No. 60/214,886, filed on Jun. 28, 2000; Application No. 60/217,487, filed on Jul. 11, 2000; Application No. 60/225,758, filed on Aug. 14, 2000; Application No. 60/220,963, filed on Jul. 26, 2000; Application No. 60/217,496, filed on Jul. 11, 2000; Application No. 60/225,447, filed on Aug. 11, 2000; Application No. 60/218,290, filed on Jul. 14, 2000; Application No. 60/225,757 , filed on Aug. 14, 2000; Application No. 60/226,868, filed on Aug. 22, 2000; Application No. 60/216,647, filed on Jul. 7, 2000; Application No. 60/225,267, filed on Aug. 14, 2000; Application No. 60/216,880, filed on Jul. 7, 2000; Application No. 60/225,270, filed on Aug. 14, 2000; Application No. 60/251,869, filed on Dec. 8, 2000; Application No. 60/235,834, filed on Sep. 27, 2000; Application No. 60/234,274, filed on Sep. 21, 2000; Application No. 60/234,223, filed on Sep. 21, 2000; Application No. 60/228,924, filed on Aug. 30, 2000; Application No. 60/224,518, filed on Aug. 14, 2000; Application No. 60/236,369, filed on Sep. 29, 2000; Application No. 60/224,519, filed on Aug. 14, 2000; Application No. 60/220,964, filed on Jul. 26, 2000; Application No. 60/241,809, filed on Oct. 20, 2000; Application No. 60/249,299, filed on Nov. 17, 2000; Application No. 60/236,327, filed on Sep. 29, 2000; Application No. 60/241,785, filed on Oct. 20, 2000; Application No. 60/244,617, filed on Nov. 2, 2000; Application No. 60/225,268, filed on Aug. 14, 2000; Application No. 60/236,368, filed on Sep. 29, 2000; Application No. 60/251,856, filed on Dec. 8, 2000; Application No. 60/251,868, filed on Dec. 8, 2000; Application No. 60/229,344, filed on Sep. 1, 2000; Application No. 60/234,997, filed on Sep. 25, 2000; Application No. 60/229,343, filed on Sep. 1, 2000; Application No. 60/229,345, filed on Sep. 1, 2000; Application No. 60/229,287, filed on Sep. 1, 2000; Application No. 60/229,513, filed on Sep. 5, 2000; Application No. 60/231,413, filed on Sep. 8, 2000; Application No. 60/229,509, filed on Sep. 5, 2000; Application No. 60/236,367, filed on Sep. 29, 2000; Application No. 60/237,039, filed on Oct. 2, 2000; Application No. 60/237,038, filed on Oct. 2, 2000; Application No. 60/236,370, filed on Sep. 29, 2000; Application No. 60/236,802, filed on Oct. 2, 2000; Application No. 60/237,037, filed on Oct. 2, 2000; Application No. 60/237,040, filed on Oct. 2, 2000; Application No. 60/240,960, filed on Oct. 20, 2000; Application No. 60/239,935, filed on Oct. 13, 2000; Application No. 60/239,937, filed on Oct. 13, 2000; Application No. 60/241,787, filed on Oct. 20, 2000; Application No. 60/246,474, filed on Nov. 8, 2000; Application No. 60/246,532, filed on Nov. 8, 2000; Application No. 60/249,216, filed on Nov. 17, 2000; Application No. 60/249,210, filed on Nov. 17, 2000; Application No. 60/226,681, filed on Aug. 22, 2000; Application No. 60/225,759, filed on Aug. 14, 2000; Application No. 60/225,213, filed on Aug. 14, 2000; Application No. 60/227,182, filed on Aug. 22, 2000; Application No. 60/225,214, filed on Aug. 14, 2000; Application No. 60/235,836, filed on Sep. 27, 2000; Application No. 60/230,438, filed on Sep. 6, 2000; Application No. 60/215,135, filed on Jun. 30, 2000; Application No. 60/225,266, filed on Aug. 14, 2000; Application No. 60/249,218, filed on Nov. 17, 2000; Application No. 60/249,208, filed on Nov. 17, 2000; Application No. 60/249,213, filed on Nov. 17, 2000; Application No. 60/249,212, filed on Nov. 17, 2000; Application No. 60/249,207, filed on Nov. 17, 2000; Application No. 60/249,245, filed on Nov. 17, 2000; Application No. 60/249,244, filed on Nov. 17, 2000; Application No. 60/249,217, filed on Nov. 17, 2000; Application No. 60/249,211, filed on Nov. 17, 2000; Application No. 60/249,215, filed on Nov. 17, 2000; Application No. 60/249,264, filed on Nov. 17, 2000; Application No. 60/249,214, filed on Nov. 17, 2000; Application No. 60/249,297, filed on Nov. 17, 2000; Application No. 60/232,400, filed on Sep. 14, 2000; Application No. 60/231,242, filed on Sep. 8, 2000; Application No. 60/232,081, filed on Sep. 8, 2000; Application No. 60/232,080, filed on Sep. 8, 2000; Application No. 60/231,414, filed on Sep. 8, 2000; Application No. 60/231,244, filed on Sep. 8, 2000; Application No. 60/233,064, filed on Sep. 14, 2000; Application No. 60/233,063, filed on Sep. 14, 2000; Application No. 60/232,397, filed on Sep. 14, 2000; Application No. 60/232,399, filed on Sep. 14, 2000; Application No. 60/232,401, filed on Sep. 14, 2000; Application No. 60/241,808, filed on Oct. 20, 2000; Application No. 60/241,826, filed on Oct. 20, 2000; Application No. 60/241,786, filed on Oct. 20, 2000; Application No. 60/241,221, filed on Oct. 20, 2000; Application No. 60/246,475, filed on Nov. 8, 2000; Application No. 60/231,243, filed on Sep. 8, 2000; Application No. 60/233,065, filed on Sep. 14, 2000; Application No. 60/232,398, filed on Sep. 14, 2000; Application No. 60/234,998, filed on Sep. 25, 2000; Application No. 60/246,477, filed on Nov. 8, 2000; Application No. 60/246,528, filed on Nov. 8, 2000; Application No. 60/246,525, filed on Nov. 8, 2000; Application No. 60/246,476, filed on Nov. 08, 2000; Application No. 60/246,526, filed on Nov. 8, 2000; Application No. PT172, filed on Nov. 17, 2000; Application No. 60/246,527, filed on Nov. 8, 2000; Application No. 60/246,523, filed on Nov. 8, 2000; Application No. 60/246,524, filed on Nov. 8, 2000; Application No. 60/246,478, filed on Nov. 8, 2000; Application No. 60/246,609, filed on Nov. 8, 2000; Application No. 60/246,613, filed on Nov. 8, 2000; Application No. 60/249,300, filed on Nov. 17, 2000; Application No. 60/249,265, filed on Nov. 17, 2000; Application No. 60/246,610, filed on Nov. 8, 2000; Application No. 60/246,611, filed on Nov. 8, 2000; Application No. 60/230,437, filed on Sep. 6, 2000; Application No. 60/251,990, filed on Dec. 8, 2000; Application No. 60/251,988, filed on Dec. 5, 2000; Application No. 60/251,030, filed on Dec. 5, 2000; Application No. 60/251,479, filed on Dec. 6, 2000; Application No. PJ005, filed on Dec. 5, 2000; Application No. PJ006, filed on Dec. 1, 2000; Application No. 60/251,989, filed on Dec. 8, 2000; Application No. 60/250,391, filed on Dec. 1, 2000; and Application No. 60/254,097, filed on Dec. 11, 2000.

[1388] Moreover, the microfiche copy and the corresponding computer readable form of the Sequence Listing of U.S. Application Serial No. 60/179,065, and the hard copy of and the corresponding computer readable form of the Sequence Listing of U.S. Application Ser. No. 60/180,628 are also incorporated herein by reference in their entireties.

The application's sequence listing, which the Patent Office published only in electronic form, follows.

SEQUENCE LISTING (4031 sequences)

SEQ ID NO: 1 - DNA, 733 bp, Homo sapiens
gggatccggagcccaaatcttctgacaaaactcacacatgcccaccgtgcccagcacctgaattcgagggtgcaccgtcagtcttcctcttccccccaaaacccaaggacaccctcatgatctcccggactcctgaggtcacatgcgtggtggtggacgtaagccacgaagaccctgaggtcaagttcaactggtacgtggacggcgtggaggtgcataatgccaagacaaagccgcgggaggagcagtacaacagcacgtaccgtgtggtcagcgtcctcaccgtcctgcaccaggactggctgaatggcaaggagtacaagtgcaaggtctccaacaaagccctcccaacccccatcgagaaaaccatctccaaagccaaagggcagccccgagaaccacaggtgtacaccctgcccccatcccgggatgagctgaccaagaaccaggtcagcctgacctgcctggtcaaaggcttctatccaagcgacatcgccgtggagtgggagagcaatgggcagccggagaacaactacaagaccacgcctcccgtgctggactccgacggctccttcttcctctacagcaagctcaccgtggacaagagcaggtggcagcaggggaacgtcttctcatgctccgtgatgcatgaggctctgcacaaccactacacgcagaagagcctctccctgtctccgggtaaatgagtgcgacggccgcgactctagaggat

SEQ ID NO: 2 - protein, 5 aa, Homo sapiens
  Site (3): Xaa equals any of the twenty naturally ocurring L-amino acids
WSXWS

SEQ ID NO: 3 - DNA, 86 bp, Artificial Sequence
  Primer_Bind: Synthetic sequence with 4 tandem copies of the GAS binding site found in the IRF1 promoter (Rothman et al., Immunity 1:457-468 (1994)), 18 nucleotides complementary to the SV40 early promoter, and a Xho I restriction site.
gcgcctcgagatttccccgaaatctagatttccccgaaatgatttccccgaaatgatttccccgaaatatctgccatctcaattag

SEQ ID NO: 4 - DNA, 27 bp, Artificial Sequence
  Primer_Bind: Synthetic sequence complementary to the SV40 promter; includes a Hind III restriction site.
gcggcaagctttttgcaaagcctaggc

SEQ ID NO: 5 - DNA, 271 bp, Artificial Sequence
  Protein_Bind: Synthetic promoter for use in biological assays; includes GAS binding sites found in the IRF1 promoter (Rothman et al., Immunity 1:457-468 (1994)).
ctcgagatttccccgaaatctagatttccccgaaatgatttccccgaaatgatttccccgaaatatctgccatctcaattagtcagcaaccatagtcccgcccctaactccgcccatcccgcccctaactccgcccagttccgcccattctccgccccatggctgactaattttttttatttatgcagaggccgaggccgcctcggcctctgagctattccagaagtagtgaggaggcttttttggaggcctaggcttttgcaaaaagctt

SEQ ID NO: 6 - DNA, 32 bp, Artificial Sequence
  Primer_Bind: Synthetic primer complementary to human genomic EGR-1 promoter sequence (Sakamoto et al., Oncogene 6:867-871 (1991)); includes a Xho I restriction site.
gcgctcgagggatgacagcgatagaaccccgg

SEQ ID NO: 7 - DNA, 31 bp, Artificial Sequence
  Primer_Bind: Synthetic primer complementary to human genomic EGR-1 promoter sequence (Sakamoto et al., Oncogene 6:867-871 (1991)); includes a Hind III restriction site.
gcgaagcttcgcgactccccggatccgcctc

SEQ ID NO: 8 - DNA, 12 bp, Homo sapiens
ggggactttccc

SEQ ID NO: 9 - DNA, 73 bp, Artificial Sequence
  Primer_Bind: Synthetic primer with 4 tandem copies of the NF-KB binding site (GGGGACTTTCCC), 18 nucleotides complementary to the 5' end of the SV40 early promoter sequence, and a XhoI restriction site.
gcggcctcgaggggactttcccggggactttccggggactttccgggactttccatcctgccatctcaattag

SEQ ID NO: 10 - DNA, 256 bp, Artificial Sequence
  Protein_Bind: Synthetic promoter for use in biological assays; includes NF-KB binding sites.
ctcgaggggactttcccggggactttccggggactttccgggactttccatctgccatctcaattagtcagcaaccatagtcccgcccctaactccgcccatcccgcccctaactccgcccagttccgcccattctccgccccatggctgactaattttttttatttatgcagaggccgaggccgcctcggcctctgagctattccagaagtagtgaggaggcttttttggaggcctaggcttttgcaaaaagctt

SEQ ID NO: 11 - DNA, 262 bp, Homo sapiens
  SITE (172): n equals a,t,g, or c
ccatctcagaaaatagattttctgtgtatagatacagaggcacttagcttcaaactgcttagtaaatattagggagttactttgccatcagctttggtaattatcaaatgtcatttataagaatgttataatagtgaccttctctaacagtctgtggcctggtataatatangtgtattagaattatgggtgttattattgacaaagattggttgagtttaatgtattatgatattattgcttatagacataactgaacaca

SEQ ID NO: 12 - DNA, 445 bp, Homo sapiens
caggaatgcctggaatagggttggccgggagaaggggaagacttaagggagaatttcagcagacactgtgaacaagataacctagtatcccttcctttcttccttagcttgtttccacagtaaagctaaactctgtggaataaaatcctgtggtcccacaacgcaccccacaataacacattcacaagcaagggatggctcccatgctctgcccagctcccgtctgtgggctgaagtttttttcttcttcagaaggaaggtgtgtaactaggaagtgactttgagactttctcagtttartggatggccagctgaataagtgttttagtattgttacatwacagtacatatggacttaaaaatataatttttgttcmactcaaatcaatgcaaccctacatcctgtgcaattaacattttagacctcactaaatatattatggca

SEQ ID NO: 13 - DNA, 319 bp, Homo sapiens
  SITE (287): n equals a,t,g, or c
  SITE (289): n equals a,t,g, or c
tttttttttctttttcattttctcagctaagcttaacttgactgaataaataaactgtgttttcctaaaatgcattgagaaaggcgactatcagaaagggcttattcaaagatgaggtctgatgttggtggcccttgatctaacctaagtggctaattaaagcgcttacccctgcatccacacccctgtgacagtttgaacttcatttgcggggaagggtcataaacatccatcttccttttgtacagaagtggaaattccatttcctggaacctgatattcatgcnantacaatttctttgcttcctctggaaaattt

SEQ ID NO: 14 - DNA, 148 bp, Homo sapiens
  SITE (144): n equals a,t,g, or c
ctttatcacttttaaagatataaaaggttgcactgcactctggagaaaatgtcaagagcagcttcaaagaaattctgacgagtaatccacacagttggggaggggagaagttgcatgtatttttaatgaaaaaaaaaaaaaaancccc

SEQ ID NO: 15 - DNA, 158 bp, Homo sapiens
  SITE (150): n equals a,t,g, or c
cacaatgtttaaaaaaaaagaaaagaaaacagaaaacaaaacaaaaaaaaaccacaaggtattcaggcaacaaaatagcacggtgaataaaatagtacctcacatctcaataaacacattttggataaaaaaaaaaaaaaaaaaaaaaangggggggg

SEQ ID NO: 16 - DNA, 226 bp, Homo sapiens
  SITE (211): n equals a,t,g, or c
cctggtagtatatggtattaatattaggctgcatttgctgtactgcctcggtaagcttttaaaatttcccaagtctctctaaaacaaactttgagatgaatactttgtgctccagcagttccctgcagaagccttggtagacccaggtcttcatgcagtgaaaggatgcttccccagctacaaaaaaaaaaaaaaaaaaaaaagggggggnccccccaaaaaaacc

SEQ ID NO: 17 - DNA, 260 bp, Homo sapiens
  SITE (253): n equals a,t,g, or c
ataggatcaagacttttatgaatgttgttttaaaaacctagctgattttattcaaaattattttaaagaatttgaattttccacttttaatcataaccttaaatctctttttttacaaattgcacaaagtgactttggaatgttacttttatagaataaaataagttgatgaaatcaaagactatcaaagaaattagtaagtagccagcaggagaatattttagaagttggaaaaaaaaaaaaaaaaaaaaanggggggg

SEQ ID NO: 18 - DNA, 338 bp, Homo sapiens
  SITE (288): n equals a,t,g, or c
  SITE (299): n equals a,t,g, or c
  SITE (337): n equals a,t,g, or c
ctcactcttcactaggctaagtgcccttcatttcaacttacaagattttcatcacccactaattcaatgtccatgtgccttactgaagtgtatgttccagtaaggtctagatcttgtctaccttattcaccaccatactcccattcccggcttctgcctagatgctcaataaatatttataaagttagaatttaaccaaagcatgtgctcagatcagctgtcactgaartcatctgcctcacttatgctattctgctacatcttttcttgctgacttaagtgaaggantttaatccaanctcactaataaggctttgggttttgccaaaagaaaaanc

SEQ ID NO: 19 - DNA, 251 bp, Homo sapiens
  SITE (251): n equals a,t,g, or c
ttgccttttctaccaagagatgaaatagtcaagcatggctttcattgaatgccaaactggattttccttattcatgcaggtttgttacactggtctagattcagattagttggggtggcaactcaggaggtaagaaatgagccttgataatttaatgaagtkagagaattttaattcagttgttattttgcagtarttggtgtatgtgtcataacagaatgcctgacttttctgaagaagcctaagttccn

SEQ ID NO: 20 - DNA, 181 bp, Homo sapiens
gttgtcttggtgtaggaattggaaagcaagagtggaaaggaacgtaataactcgttggagtttaaaaatgagggtcttggcaagtaacactgatgtctgaaaaaaaaaaaaaaaaaaaaaaaaaaaaaaaaaaaaaaaaaaaaaaaaaaaaaaaaaargggggggggcccccaaaaaaaaa

SEQ ID NO: 21 - DNA, 454 bp, Homo sapiens
  SITE (401): n equals a,t,g, or c
  SITE (452): n equals a,t,g, or c
  SITE (454): n equals a,t,g, or c
ctaagaactagtggaacagcaagtttagtaattttcctaccaaattttaatgtacattttaaagccctactaaatattttaatattttatatattgctataatagaacaaattgtatatagcatgcttcctgaattggatagattttaatatcatgagagtagatagatatactaacagaaataaattcattttactaataagtgcttggcatataaaaacaatactttggggggatagaataggaggcatgaaaatttgggctaatacaatttccttctaaatttactgaaaaatgagaaagatcttcaactttcttgcaaaatcattcactcaaaatacctttgcaataaaataaacttcccaacatctgacatgggccatactttaaaaggatgcttntcataccttttaaggatcttttctgtgatttactagaaggaatgtggattntn

SEQ ID NO: 22 - DNA, 277 bp, Homo sapiens
  SITE (250): n equals a,t,g, or c
  SITE (252): n equals a,t,g, or c
cgcgtccggacctatgaagtcgcttatttgacttaaaacaatcattactaaatccaattgattgaaatacactaaaactttttcagtaaattaaataactatgaaatgtttgggatattatctaaacatattcaagattaggcagaaaaaccacattagttraattccaaaaagttttcgcttcttacttagtgtatttttcattttaaataattsttcaacacagaaaaattagcttttaaaaaraaananaaaaaaaaaaaaaaaaaaaaaaaaa

SEQ ID NO: 23 - DNA, 126 bp, Homo sapiens
  SITE (109): n equals a,t,g, or c
agaagaagtgactatgaactcagaatcacatgagaattattctcacttaggagagagagacmatctagtagtcagaaaaaatgttacccattaacaaagagaacagaangaagagatgtctatccc

SEQ ID NO: 24 - DNA, 361 bp, Homo sapiens
  SITE (328): n equals a,t,g, or c
  SITE (332): n equals a,t,g, or c
atgttttcagctttgaaaacctttagtggtttcctgttgtctgaagaggaatgcctcaaatacatggatggtattcagcatcttcccacgtggccctagccttccttcccaaaccatcttctgccttgaccacccactgggttgcagcccaagtaggccacacagttttattttgctaccttgcttgtggtcttccttctgtctagaattcctgctgtgggcctcacctcctcatcaccccacaacctgaagaaacaactgtctatgggaaactcaaagatttctcttctttctaggcagaatttttgggtcctgttcattcatcgcntttnagcatttaatagggtaacaaagggaaatc

SEQ ID NO: 25 - DNA, 424 bp, Homo sapiens
  SITE (303): n equals a,t,g, or c
  SITE (405): n equals a,t,g, or c
cgtccgatttgtgacctcattcacctcctccaccaggaaagtttttcattctgttcatttgcccatataattgatgggtgatgactaaattaacaacacgtttccaaagcccagatacctatataaatacataaaacatttctgcactatttcatgttatgatttacaaccccatcagacagacaagcttaggcccatttttatagaacagaagactgaatttaaaagarggtaagtaacttgggacaaactggctctcttcatccatttttttagcgagttatttttgaactaktgttgttncactgagaatcgaaagaattcaaagactatcttggctttgtttgttcaagtgaacgtkgtttaaccatgccaggattccccctgatgcgaatttagcataanactccatcttatcttctcc

SEQ ID NO: 26 - DNA, 474 bp, Homo sapiens
  SITE (273): n equals a,t,g, or c
  SITE (339): n equals a,t,g, or c
  SITE (376): n equals a,t,g, or c
  SITE (416): n equals a,t,g, or c
ccggtccggaattcccgggtctacccacgcgtccggttccaggttctctaaacaaatgttaggaatttggttaagtgggatttattcacaaattgggtcttactattctcctgtatctaagtgaattaaatagtttagaaagagaagagaatatgtggcaatcaatggttaaagtaaagaatttgtgtttcatggactgtaaaagggtagaggggggcaggtcaaggaaaaccaacgtaaacatgaatgttatgtggcctgctgtggcatganggataaaatcctttgtgtctaatccaggaatccgtgtgtcttctaccggaatccatgaaatctgangctaacatgctagcttgcaatcagggtaaaatcttanatcctccattgttcttgacataaaaattttcctttttatncttagctctgattccaaatcccccaaggcttaaagcatcattaattgttataatccta

SEQ ID NO: 27 - DNA, 407 bp, Homo sapiens
  SITE (319): n equals a,t,g, or c
acccacgcgtccggaaagaattatttttgttaatggcatggtaaatcaggggacttgttagcgaaacggctcagaaaacgggtcttgaaaatgaaaggtataatacttgtcagatttccaaattccctcttgggaacaaagatggtaaccataacatatttgctaaatcccatcactttaatacctttatgttgcttgagatatgggatgctaagggaaktacgtacataaatcaagggtaaaaacataaaaccaaatccaaagaaagatataatggctgtaaactcagacctgatttcagggttagtattctgataanaatttttggaagccggttcattccacctttaacatggctttaaaaagaaagcttggctccaagcccatcctttttaccattggccccc

SEQ ID NO: 28 - DNA, 456 bp, Homo sapiens
  SITE (357): n equals a,t,g, or c
  SITE (414): n equals a,t,g, or c
ctattatgtgagaaaaaaacttggtgtagaacagtatgtatcttatgcttcctttttcataagaaaggtgacaaaatgtcttcatgaaacaaccactggaagggcacataaaaagctgatcacatggtttatgtatggaaagaggggaatagaaactctcagctcacatggcaaagatkgaggtagacttttcactggatacttctatttatttaccaagtgaatgtattctcaatttaaaataagtcaatgaaactgacaaatttgtttctttgaacttctttttcagctcaaattttgaaatattatttattccgttaggggcccttttagtcatttttttctgaatgcaagtangtcccatctgccaatttttacattggctggaatcatgccatggtgactcattacatntcccttagcatgccatggttgcaatcccatggactaactaag

SEQ ID NO: 29 - DNA, 348 bp, Homo sapiens
caacttgcactatttcatactgggataggaatatctgtcatttcctctgccagagggagaaacagccaggaccatagataattttttcccccagtgtatagtaagaagataaatkgatggtttcttcttgattcttcctgggagaattaagtataattagtacttccaatacatgcaatgttaatgaggyaaagaaaatatagtaattaagaatgcatcattggcttcagtttcaggtgataacttcatacatgtctgttatgtattttatgataaaggaataattctgtkaataacttagtttcgtaacttcatgtagtgaggcgtagttttggaaaaactatgata

SEQ ID NO: 30 - DNA, 439 bp, Homo sapiens
  SITE (119): n equals a,t,g, or c
  SITE (336): n equals a,t,g, or c
  SITE (341): n equals a,t,g, or c
  SITE (407): n equals a,t,g, or c
attaagtgggggtaattaggctaaattaattttaaaattgtagtagtgcattctggatcaacaatagcgtaaataatttccggggctaatgatcttgcagctggggtcctttctgttanatggactctgttcttgacattattggccattttctctgctttacccattctatttaggtaacctggggggtatagtttaaaactggaattcccacccatttagctaggctgccaaaacagatcaaagaacaagcgatctcatcaaggaaaagtggcgttttgtgaaaagactcacaggatattcttcatctatttgtatatctgttcatctgcctanccaanatatgaatactattactactaataataaatagtattagtatataattttcaaaaaatttaatatangtctgggtactggtactatgtcacatacatta

SEQ ID NO: 31 - DNA, 314 bp, Homo sapiens
  SITE (296): n equals a,t,g, or c
  SITE (313): n equals a,t,g, or c
gcctcacctatgctgtcgccctgtcagcacctaattcagcttcccatggagaaaggcctccctgttgacagggccgtgctgggactcaggactgccaaagtcagtcttctcgcataaaaggctcagtgagtcctggagacacttggaagccagacagaatggaatttctccctattttctttacagctgagaaaacacacacaaacacaagagcatatttattgcgatatttctatcccaaagtttgtctttaaaaaaaaaaaaaaaataaaattwtttctctgcccatccacccntatccccctacccccant

SEQ ID NO: 32 - DNA, 194 bp, Homo sapiens
  SITE (176): n equals a,t,g, or c
actggttagatcggggccatggattggctgcctttaagaacgcagggacattgtgctgtgcggtgaggtttgcgcaaacccattcgatttctgccttggctggttctcctttaatgaarttgactttggctctcatatcattggtcttgggacgaaaaggttcagaagctattcantaattttcttgcattaca

SEQ ID NO: 33 - DNA, 424 bp, Homo sapiens
  SITE (269): n equals a,t,g, or c
  SITE (399): n equals a,t,g, or c
  SITE (404): n equals a,t,g, or c
  SITE (422): n equals a,t,g, or c
ctttttcacatttggttagtttttttgtgactctctggctaagcattccctctacgatttgccacataacctgtcagctttgtttcttccagaagataaccctcttgatctatctttggccccaaaccttgagccatctacctcccactccattctgggatgtttgtattctggtctggctggcacagcagtttccctgggacttgcttttgtagtcatccagtaattcctcttctgagtttgttcccatgttattttctttctgggtntattttattgtttgagcacagaacttttttccatagtatagaaattaaatgttatgaaaattatacaattctggaatgttttcatttccccttttattaaaaggtaattcactgggtgttaaaatccaantccanaaacgtgatgccactttnga

SEQ ID NO: 34 - DNA, 357 bp, Homo sapiens
  SITE (346): n equals a,t,g, or c
  SITE (349): n equals a,t,g, or c
  SITE (354): n equals a,t,g, or c
aaaaaacaacaaaagcaaagaactatatacttcttttagattttatcctttttgaatcaaaasaccttgatgataaatctcagcggtraaaatttagaagaaaactgtattgataatggtgggaaattcaattaatgaatcattggcattctatataacttttaagagaacaagggattatattttggaattcatcacacttacctccattttcttctccatgggcatttgcctcggccatatctgtaccatccaattcagattcacagactaaatccaacgtgccatctgctgggcatgacgactcctctttctgttttattttgaaaattgatgatttatgganaanatttntta

SEQ ID NO: 35 - DNA, 374 bp, Homo sapiens
  SITE (177): n equals a,t,g, or c
gtcttataccttagaaactgaatttatgagagtacagataaactctgataaactttaatacagcttgttagagcttctgcctctatcagtagaagaccaccttgatgaaagtagacaaaataaggacaaaaccagcactggaactaggactttgtgtgaagagtgactgctcattanaagagaatcctacatgagaagtaagtggttgtcattaattatgtatgtgtttacatcaatcattttagaaaatcgccatatataatcctctatagcattttttcttccaaagtttattcttttaatgtttttctctsaaattaactgttatccttttcttttaaaaatattttttatttaaataatttttgaagggt

SEQ ID NO: 36 - DNA, 242 bp, Homo sapiens
  SITE (106): n equals a,t,g, or c
ccacgcgtccgatcgcgagcggccgccctttttttttttttttccttggacaaataatatttattgagagcccactttgtggcaagcactgtgctaggtgcagggnaatcagcagtgggtccagtccaagctcacgccctcacggatctacattctagaagccggstacctaagcaaacctatgccaacaaaacttctctctccctgctcaggggctgggatcggagcaagggatgggatga

SEQ ID NO: 37 - DNA, 558 bp, Homo sapiens
  SITE (409): n equals a,t,g, or c
  SITE (444): n equals a,t,g, or c
  SITE (492): n equals a,t,g, or c
  SITE (535): n equals a,t,g, or c
  SITE (546): n equals a,t,g, or c
gttgcttctcctagaattaaggtgactaacactcccaggttgcctagaactctcctggtttttagcaatgcaagtccggtgtgccaggaaatccctcagttccaggtaaccaagacagttgatccccttacctagaattgaaaatacgttctccagctgaagccaagaggcatctataaatcaaaatgagatctatgttaatatattttaaaagattttactttgttttgtaaggtagtatagcacttgtaaacttcaaaacagaattttgttaggaagaagaattattgggacgctagatttctatagtgtcaagcatgctaaaagtctaactgaatgcagaaagggttattttcagtagagcttcatgtccaattttataatataaaccaattgggaaagtaaaatncatcctgaattccatttkgcacctaactttctggnaacattcctgttttccaaaaaaacaagctatcataatcccaacacaantttcctattgtttccaggaaaaattaattaattttttttttanaatttaaattnggggtttttaaa

SEQ ID NO: 38 - DNA, 335 bp, Homo sapiens
attcctcccttgtttgtccatcaccatccatctacctactctccatctacccatcatcccttcaccccccgtccatcatgatccatccatcagtttctttacctgtctatccatcatccattgtccacccacccaccaaccatccatccattaaacaaattgaacacattttatgtgccaggcacagtctttggctctgaaaacagcggtgagcagaatagactaaggcgtccagatgttctgtcttcatggracttaggtttctgtttgtcaaagagatgacagtgtgggatgaatgrtaaaaacaggctgttagattgtgatacgtattagga

SEQ ID NO: 39 - DNA, 516 bp, Homo sapiens
gttacttttaaataccattaccaaaactattttattgctttaaattttgctactaaataccaacctcttaaattaatcaaatattttatttcagtagattgcattttattgttctgaaacaaaaggttggatataactttattttttttttggttactccctcacttctatgtttatttttaccaatttgatttagttcatatgctatacgtattcagaaacaactctcgaagtgaacctactactgtaaaatattgcagagtgctcacatgggaaaattactattctaggraaataaatcttatagtaatttagtattcattattataatggatacttcagkgaatawttcaacatcagctttttgctaatgacctatatgcttcaaccctttctcaagaactttcattttttgaattaagacttaacatagattacctcccagtgagataaagtctccccaggaagatccaaataataataaaaaatagttcataataatggaaatcttttaaa

SEQ ID NO: 40 - DNA, 487 bp, Homo sapiens
  SITE (357): n equals a,t,g, or c
  SITE (459): n equals a,t,g, or c
  SITE (467): n equals a,t,g, or c
  SITE (477): n equals a,t,g, or c
gtgacgcctgtcaggtgaccggtgccgggaattcccgggtcgacccacgcgtccgagagctgctggagtaggcacccatttaaagaaaaaatgaagaagcagcaataaagaagttgtaatcgttacctagacaaacagagaactggttttgacagtgtttctagagtgctttttattattttcctgacagttgtgttccaccatgattactttctccttcagcgaataggctaaatgaatatgaaacagaaaagcgtgtatcagcaaaccaaagcacttctgtgcaagaattttcttaagaaatggaggatgaaaagagagagcttattggaatggggcctctcaatacttctaagnctgtgtattgctctgttttccagtccatgagaatgtccagttcctggaatggctctcagatctgggaaggtagtaatttaaagccctcctaatggtgtgatnccatatcnattacccacngtatgataac

SEQ ID NO: 41 - DNA, 382 bp, Homo sapiens
  SITE (100): n equals a,t,g, or c
tgccaatagaaaccggcccactgtacagacgcgcaagtttataacccgggaagagctgctctcagagcggagggagaccatataactctgggactctgcngtacctcctagaggaacagagcgcctctcagggtcagaggctgctgcaaatgcgggtcagcgggtcacggtcgcgcctgtcttgctgatgctcatgggaaatgtagttcaaagggcatgggcggtgccttcggtgcaggcgagagattggtcarcgcggcgtcgcgkggcaacacccggctgargcgccccgcgttgtgcggcgccacatccgggaagcgggctccaakcaamcgctccgggttgaaggccatcttgacgattccaagaacaccccttgaac

SEQ ID NO: 42 - DNA, 337 bp, Homo sapiens
gggccatctatagatgttcagagcttcactgtccacggagactctcagcaactggatgtgttcatagccaccagcaaacatgcctacgccacatacctgtggacaggtgaggccacaggacagtctgcctttgcacaggtcattgctgatcgggamwaaattctgtttgaccggaattcagccatcaatagcagcatagtccttcacctcagggacaatgctgctcttgatggctgaggtgaaggactatgctgctattgtggaacagaacttgcagcattttaaaccagtgtttcagctgctggagaacagatactgtcccgagtcgggaacacag

SEQ ID NO: 43 - DNA, 240 bp, Homo sapiens
ggtggctcggatgggaggaaccaccgcggaccggggacagggggagcagggcagtgctctgctgggtgaggggcacccagctccagaggctaggtgggcgtcgctggtgggtggactcctgggcgctgcgcgggaccgcgccggctgggttagcgcgggcggggcgcttagtcccacccccagaggaaggcggaagaggagcccgagcctggccgcgggctgggccccgccgcagctcca

SEQ ID NO: 44 - DNA, 965 bp, Homo sapiens
  SITE (439): n equals a,t,g, or c
  SITE (908): n equals a,t,g, or c
gtttctgggcccggaggatgcggccttagccaatcccagggctacagggcgcttttaaaatgcaggaacctacttcagggaaccatacagaggccaaattcagaatccctacttgaaccgctgaccttttgccctctccaaggccggaagcaagcccttgcctgatgcacgcctcagtcgccccgtctgtaaagtgggcagcccatcaaattcacatctccctggctgagagtcatctggagaaataatgactatgtgacctaatgaaaattgcacggtgcctgccgagcgaggtgggtaagccactggcccaacgctgtcattacaggaggtgaagcagcgcktgggctgatgactggcaaggggtgcagccgcaggaacctttcatcatgggttcccttgggaggccaggtaggtcagctctgaaagcacccggtgntgcggggcctgccttcctgtggcttcggcttgggcgccatcccaagccgggttggccagaactctgcctgtgcagccccgcccccaggcaagcaggaaacaatgcacctgagcaacctcctcccatctgcagaggaggaagctaaggtgtaggggggtcaaggcactggcctaaggtcccacagccaaggggtggctgggaggtgcaatcaggtctgcctggcacagagtctggtctcctgaccacgatgccaaactggttattattgtcaccacaatagaatactaataatagttgtcgtaattattattattgtggagggctgttctccaggcaggcaggtctgggttgctgcgtcactggggcaggaggctggctagtgcccacaatgaggcagggtcctgtcccaaacagcactaggagaatgctggagatgggagctgagcccatcctgcagcctgggtcagcnacctggggcctcaccccaccctccatccaatgctgggtggcgggcagcctctccaat

SEQ ID NO: 45 - DNA, 339 bp, Homo sapiens
  SITE (310): n equals a,t,g, or c
  SITE (324): n equals a,t,g, or c
  SITE (328): n equals a,t,g, or c
tgtcacttcaaccttctaatggcttgaagcaactttgctcattgcccatcaacaccagtctgaatcttactttctagggaaagcgcttggctgcaggctgacttgaatttgtgttcgggatcagctgtaatcacatgggcgtgatttattggttttctatctagtgctttctgtttgtactgaaaatatgcaatttgttttccttctgaaacaatcaaagtgaattattttaaattgatgcctgcttaactcatacgggtggctcaacctgtcaatgatcaaaaagtcacttaaaagcataacgcatggnagccccctccccgnccancaagtatttgg

SEQ ID NO: 46 - DNA, 428 bp, Homo sapiens
  SITE (349): n equals a,t,g, or c
  SITE (361): n equals a,t,g, or c
  SITE (371): n equals a,t,g, or c
  SITE (427): n equals a,t,g, or c
cccacgcgtccgcacctatgaaaattctggccaaaggtgccaagaaacttccccagattcacctagatagtacattatgagtcaaaggtatgaattcaggttgtgttcttaagatacccaccttctagtgtaccatgttatctcccaagaggcttgagaagaggctattcaggaaactgcatagagactgggtccaaagtggacctcagagagaggatgaagaacagcgtatctcttgtcccaacaggtccaagtcaaagaggtattactagcagggacatagatcagtgagtgaagggaatcacgacagagaggccagagaagggggagattgatgtcatcttttcantattctgactanacgtcttaancccagctggtccttccatttctaatgtgccaccccactccagaagcaggggacttnc

SEQ ID NO: 47 - DNA, 613 bp, Homo sapiens
  SITE (478): n equals a,t,g, or c
  SITE (558): n equals a,t,g, or c
  SITE (569): n equals a,t,g, or c
  SITE (596): n equals a,t,g, or c
gttcaaggggattccgcccccccatgcttattcttttgagctctaagtaagacttaaagttctttttgcaagcaaaatttcctcacttttatagggtttaaatgtgcaaggaaagttgcagaaaataaaggagttaagtatttatgcctgtaaagttggaaaaaacattgtattttacaaccattgccacattggtgtctttaccttcaaaagtagtttttaaaatagtaatatcttggcggaagtcaatatctgatttttctgtggttcttataaattatgtaacatggttatcatcaattattttccttcctttctctcagtttatttccagagtcctaaaaatgccatattttccctccaaaaagttgctacagccttkgttttaaaatctttccyctagtttttgttgtkggttggkggtttgctaaacagtagaaaaacatgtaagggcagaagtataattcaggatctaagntctttaacctgggtatcctattggccttcaagtattaagaaagctttaataaccaggttttaatttccctttgggtggcntaaaactcaanccaggaaaaagcaaataactcactttnaggaattaaaggaaaaa

SEQ ID NO: 48 - DNA, 556 bp, Homo sapiens
  SITE (431): n equals a,t,g, or c
  SITE (542): n equals a,t,g, or c
ggtgaatgggaggagcaaaatgcagcaattgacagtaaagactaagtatgaacagttaagagtttcccaaacactggatcagcaaagtttaggacgccttcagaactgagcccagaaagaatggtagggtttataggagccaaagtagataaataccatgtgcgacaccagagaagggtagatacacgaagtataggaagggtgttcattgtatacagcatcaccttaaagaatagttaaaagatggtctagtgagactggaaaaagctgataaaactttaaatagacttctttcatgcaagacttcctgttaattgtaatatattattaatctctatgagaagaagtacaatatgcagtatttccctgcattaatcacagagtcatttttttttgttaatcatgtgtatgtcattgcacacacggcttancttcacttttgtcactagcatattgttatccattgttatattttgttgtgatatatgcctattaaattaacatagtaagaataaaagaccttttcattattatatttaaancaagtctgaactca

SEQ ID NO: 49 - DNA, 409 bp, Homo sapiens
  SITE (350): n equals a,t,g, or c
  SITE (352): n equals a,t,g, or c
  SITE (391): n equals a,t,g, or c
  SITE (395): n equals a,t,g, or c
agaaaaacaaacaaaaaacaaaccagaagaagtatttactggtgattttagtatgttggtgattagtagctgagttaaattgctaaacatgtcacttatctagcaatcttaactatccagaattcagccaagcttccagaagagagcagaaaggcagctacacagtctgtatgctaatacttaaaccctctgctcacaggcaacccccttgggccttcattcagagcctgttcttactactttagtccagggctaattgtagcctgtagggatacttttgcgttgaatcagaaaaaagtatccttcctgaagtaccctcctattagcaagtagagctttgtgggagggananaaaaatcctctgaacagactacccctttgtgcacatgantggntagcccctacttga

SEQ ID NO: 50 - DNA, 520 bp, Homo sapiens
  SITE (330): n equals a,t,g, or c
  SITE (434): n equals a,t,g, or c
  SITE (438): n equals a,t,g, or c
  SITE (500): n equals a,t,g, or c
ggacaatttagtaaagagactagacctcttttataaaattataattactatgtagcagaaaggagccaggacaagaatgaataaacagattacaaatattgttgctgaaataaaaatgttcaataggaggattaaagtccaaaaagaaaacttccccaatacaaaaagagatagaagacatagagaaccaattcagactattaggaatctagaaagaagaaaatggagaaggaaatgctatcatgtggaagaggatttcctagggatgaataaaattcattgaatgcccagcaacagtgactgacaaaatactcactaagatacttcatngtaatactgtatcatatcaaggagagggagaaagagtgtcagtgattttagagaagccaaagaaccatattttcagtgcagcctttagtacgtggggagacacncacncaaagctatcatttgtttagctttgtgatggcggtattagaagtttaggtggaaaatttggngtattctggactgcgacttt

SEQ ID NO: 51 - DNA, 151 bp, Homo sapiens
  SITE (136): n equals a,t,g, or c
accacggcccacccctccggccgcggtggtcgggaccataacagcgcaggctctccgcccacgcctgccctcggctcccaatccgcgctgccgccgcccagcttcttccacaccagctggtcttgcttctggagcntctcttggagcagaa

SEQ ID NO: 52 - DNA, 496 bp, Homo sapiens
  SITE (427): n equals a,t,g, or c
  SITE (482): n equals a,t,g, or c
  SITE (483): n equals a,t,g, or c
  SITE (489): n equals a,t,g, or c
gttctagatcgcgagcggccgccctttttatttctttctttataatccatgtgtccttagttttatttatttacttatttatttttgcttcactgcacttactaagatctctagttcaacactaagttgaattgaggttggaagccatcctttttttgtttctagaaacaaagatgcaaaatttcaccaataaacatatttttgtgtagtttttggtaaacatattttagcagattaaggaaatccattctattcatacagagttcttcacaaatgtgtgttaatgtttatcaaatgctttttcagagtcttcggagatgaccatgttggcatttttcctcctttgtttcacaaaacagaacttccatttattgaattttttgaaaggttaaaccactttgcctactttgaatgaaccccaacttcntttatacattaaataatgaatatgttttaatatataaccttccttatatatactnnaatttnaatttac

SEQ ID NO: 53 - DNA, 536 bp, Homo sapiens
  SITE (259): n equals a,t,g, or c
  SITE (486): n equals a,t,g, or c
  SITE (503): n equals a,t,g, or c
ttttggtcaccttgatgactgagggatattactggttatggagcagaaacctggaatgctacccacattgcaatttgaaaacacagttccggtaagaaagaaaagacctacaccttgtttaactggagaatgtaatgttgagtcagccarcaggtgaaaaataagtttataattatctgagcccaaccacttacctataaaaacaaagcaggagaagtacaggatttgtaaatgtatacaaagatttttccagaagacngctatcctgaaaatccaggaaatatgttgtttataatcttatttttaaaaattgcttgccattttgggaaaatgtcattaactgtaaaactattcctatttgtgtcaccaataaagcataatttatctgtccaaaaaaatttgaaaccactgctatttctgatattttatgactttgcttggggcacaattgcacctcacatattatcaccccacgtattccctccngttattacaactgtgtntttgcactatccataatttgctgactaatctag

SEQ ID NO: 54 - DNA, 161 bp, Homo sapiens
  SITE (3): n equals a,t,g, or c
tantgtattatatgaaatggtcaatggacttctgaattctggtgcagagtgtttttttttcataatactataaaagttatatttccttttgaggaactaaaatgcaatcttcscctgtggtttaggaactgggtttttkgtttgtwttttttttccctcct

SEQ ID NO: 55 - DNA, 661 bp, Homo sapiens
  SITE (1): n equals a,t,g, or c
  SITE (7): n equals a,t,g, or c
  SITE (325): n equals a,t,g, or c
  SITE (653): n equals a,t,g, or c
ntcgaanagagaaaattagaactggaaagaaatcggaagcgactagagactctgcagagtgtcaggccatgttttatggatgagtatgagaagactgaggaagaattacaaaagcagtatgacacttatctggagaaawttcaaaatctgacttatctggaacaacagcttgaagaccatcataggatggagcaagaaaggtttgaggaagctaaaaacactctctgcctgatacagaacaagctcaaggaggaagagaagcgcctgctcaagagtggaagtaacgatgactcggacatagacatccaggaggacgatgaatccngacagtgagttggaagaaaggcggctgcccaagccacagacagccatggagatgctcatgcaaggaagacctggcaaacgcattgtgggcacgatgcaaggtggagactccgatgacaatgaggactcggaggagagtgaaattgacatggaagatgatgatgacgaggatgacgatttggaagacgagagcatttctctctcaccaaccaagcccaatcgaagggtccggaaatctgaacccctggatgagagtgacaatgacttctaagttcccatttacctacaagtctgagggttttaatctgccaaggtccgttcgacgcggncgggaatt

SEQ ID NO: 56 - DNA, 399 bp, Homo sapiens
  SITE (86): n equals a,t,g, or c
  SITE (125): n equals a,t,g, or c
  SITE (127): n equals a,t,g, or c
  SITE (364): n equals a,t,g, or c
cctgtctctactaaaaatacaaaaaattagccaggcatggtggtgcatgcctctagtcccagctactcgggaggctgaggcagganaattgcttgaacccgggaggcggaggttgcaatgagcananatcatgctactactgcacttcagcctgggcgacagcgtgagactccgtctcaaaaaaataaaaaataaataaagtatatccatcagtccyttctcttttccttcttcccccaaaatcctcatcttaaccaacacaccaagtataagagcactcctatgcttctgcagatggagggaaraacagctcttgttttataggctctggagttaatacctggataatgtgagatctggaaanataactcatgaacttagtcccttgtggttcttatc

SEQ ID NO: 57 - DNA, 279 bp, Homo sapiens
ggcagaggtttaaacatctgagtggccacttgtctgcagtactgtcataagtactcattaaatcctattcctgtccacaaggattgcaagggcgcaaacagatgataagaatcagtgatcactcactgattgtgtccttgcagtctctgggtggctgcagggcacaaaggatagcatgaacctcgccattggctgcagggcacaaaggwtagcatgaacctcgccatcctcaacttacatcattgggtttaagcagggttttattaaggacagtctggg

SEQ ID NO: 58 - DNA, 433 bp, Homo sapiens
  SITE (340): n equals a,t,g, or c
  SITE (352): n equals a,t,g, or c
  SITE (372): n equals a,t,g, or c
  SITE (388): n equals a,t,g, or c
gctcgaacagctggttgatgcgcccttgcaggcgatcctgttcaaacattagcgcatgaccagtgaggatgcgggtcaggccaggattacgctcaccaaaaccgagaagcagcaacacaatcagacgcagcgcgctgtggtgtctttctcatctttcagaatcaggttgatgcgagtaatcaggctatcttygrtaaactcaatcaggstatcgaacatgcgggtcttactggggaagtggcgatacagtgccgyttcggaaacgccgacagaggsggccarttttgccgtcgtgatacgttggtttccatcgttggrttccagcatmagsgccagagantgaagtatttcntcgcgacggttccttttcgnatttgtttttctgccntttacaaatacccctgaaataagcatttgccaggggcacccagtt

SEQ ID NO: 59 - DNA, 380 bp, Homo sapiens
  SITE (325): n equals a,t,g, or c
  SITE (352): n equals a,t,g, or c
  SITE (355): n equals a,t,g, or c
gatgggcctgattgcaaacctgcgcggtttcacggcccgtgtcatggtattaatcgcctttcccctcatggggagggattattccacgatgaacagcggcttaccagtcatctcttgcgggatttccatacccatcagcgacaacatggtcggcgcgatgtcagaaagtttgccgccttcaaccgctttcacgttcttatcaccaacgtaaatcagcggaactggcaggttggtgtgtgccgtgtgtgcctgacccgttgccggatcgcgcatctgytcagcgttaccgtggtcagcggtgatcagcagttgtccacccacggantcaaccgtttcgggattttttccacgnagnattcccagcgtttcaaccgttttaa

SEQ ID NO: 60 - DNA, 345 bp, Homo sapiens
ggcacgagtaatcctgagttaaataaaggaatatagggttgtctaaatttttttttaatgcttactttggagattttatatcatacaatactaagctctgtggctgggatatcaataaggcatttaggttttttytaggaatggtagtgctgtgatcactggaagtgaattgtccatccattctaggtccaacacctctgacaccttggctggcacaggcttgctccattaggaaacaacagtttgtctgactgtgttccaaagctggttacacgctttctggaaaaaagaggctgggtgccgatttcactttgccgtttctatggacaacggttggcatcatat

SEQ ID NO: 61 - DNA, 407 bp, Homo sapiens
  SITE (28): n equals a,t,g, or c
  SITE (363): n equals a,t,g, or c
  SITE (371): n equals a,t,g, or c
  SITE (383): n equals a,t,g, or c
aacgttgcccgcgaacacgggatgatgncgaatatcgaaatcaaacccaccacctttttcccagggctgcctgatgcgctgcctgtattgtcataaccgcgacacctgggacacgcatggcggtaaagaagttaccgttgaagatttgatgaaggaagtggtgacctatcgccactttatgaacgcttccggcggcggcgttaccgcatccggcggtgaagcaatcctgcaagctgagtttgttcgtgactggttccgcgcctgcaaaaaagaaggcattaataccggggttaagaattaataccgtcggcgtttaaatccatgaacatgccgaccatcaggatagccaccataatgacaatnaacagcanacccgtgaatcnaacaacggttgcattaatcaaaaa

SEQ ID NO: 62 - DNA, 339 bp, Homo sapiens
  SITE (118): n equals a,t,g, or c
  SITE (314): n equals a,t,g, or c
  SITE (320): n equals a,t,g, or c
ggcagaggttacattcacattattgtgtaaccaatcttcagaactcttcatcttgcaaaactgagattctatcctaattcaacagtaaccctcctcggccccctccccagctctgggncaacctccattctactttgtaactctacaaattggactacttgagatacctcaaaagagtgggaatcatacagcgtttgtacttttgtaattggcgtatttcactgmgcgtgtcttcagagtttaacaatgtagtagcaggtgtcagawtttccttcctttttaaggctgagtcactttccagtgaatgtctaggncacatntgtgtattccgttcgtcaa

SEQ ID NO: 63 - DNA, 468 bp, Homo sapiens
agccactcatcaaaccctggcacttgctggctgatgatgtcgttttcttcgatcatcaactgcataccaccgagaaaacacggtgccacgttgtcgtaatgaatgctgccggagatacggccttccagctcgcccatcaaagccagcaaacgagtgtcattaagcggcttgccgcagtgttcattcatcgccatcagcgccgcgaccaccgaacaggcactggagcctaagcccgaaccgatcggcatattcttttccagggtcatcgccactggaatttgcttacccagttcctggcaaaaacgytcccagcactgataaacgatattttcccgtggttytgacggcagcttatcggcaaagcgtccgaggttgttgagactgaatgtctctgccgcctcaaccgtgactacatctccgagcaatgcaccatcaacaggtgtcaccgccgccccgagcacatcaaac

SEQ ID NO: 64 - DNA, 310 bp, Homo sapiens
  SITE (243): n equals a,t,g, or c
  SITE (301): n equals a,t,g, or c
ggcagagccataacatgcagaactgtgtcagtgggagagaactagaacagaactagaactagtcagtgtctagaacaatttatttaaaccacttaaccctatgaggagaacaacctggggaartgaaaaaatgctatgatctgccagtgtaggatggtgacttacaaccctgracttaatgcagtcattgatttagtttccctttrataatccatgggtttttaaagatagtttcaaagtttntctctcttctctccttcaccggaatggtcatgccattggccaaaattggccaagtcangccaagggc

SEQ ID NO: 65 - DNA, 367 bp, Homo sapiens
  SITE (230): n equals a,t,g, or c
  SITE (317): n equals a,t,g, or c
  SITE (328): n equals a,t,g, or c
cctgactggcggtaccgtgatctctgaagagatcggtatggagctggaaaaagcaaccctggaagacctgggtcaggctaaacgtgttgtgatcaacaaagacaccaccactatcatcgatggcgtgggtgaagaagctgcaatccagggccgtgttgctcagatccgtcagcagattgaagaagcaacttctgactacgaccgtgaaaaactgcaggaacgcgtagaanactggcaggcggcgttgcagttatcaaagtgggtgctgctaccgaatttgaaattgaaagaggaaaaaagcacgcgtttgaagatgnccctgcaacgngaccccttgtttgccgttaagaaggaaggcttgtttgtc

SEQ ID NO: 66 - DNA, 345 bp, Homo sapiens
  SITE (343): n equals a,t,g, or c
acttgacctcaggagttggcaggccggcctgggtaacatggcgaaacctcgcctctacaaaagaattacagaagttagctgtgtgtggtggttgcgcgcttgtagtcctagctacttgagagactgaggtgggaggctcgcttgagccctggaggttgaggctgcagtgagctgtgatcatgccggtgtactccagcctgggcaacatagcgatagcctttctcaaaataaaaaggaaaggaaagaaaagaaagaaagaaaaaaaaagaaacagcagcctttcttcaaattaaaaagggaaagacaaggaaaaaaaaaaaaaaaaacccggggggggccccgnta

SEQ ID NO: 67 - DNA, 150 bp, Homo sapiens
  SITE (116): n equals a,t,g, or c
tacgggaaacaaagattacagtgaaaataaataaagaataggaaaagaagagaataggtagaattaaaacttttttacaggtcagcaaaatcgrcaagtttttagctagrtttctnaaaaaaaaaaaaaaaaactcggggggggccccgt

SEQ ID NO: 68 - DNA, 279 bp, Homo sapiens
  SITE (209): n equals a,t,g, or c
  SITE (237): n equals a,t,g, or c
  SITE (254): n equals a,t,g, or c
aagtacatgccactaccagccctgaaggtctcctccctccaccccttttgagtatacttttttttcttttttttattttgaatacactttcaattaatcttcccaaagatcctgacgtgcttcttctgctccagargcatagcggggctccctactgcctacagaattaagttcaaactcctggctttgtaattcaaggtcctctgtgnaccatgctgcactgtgagctccctgagnaactcagaggagtgctnaagtcctgggacttaggtactttat

SEQ ID NO: 69 - DNA, 341 bp, Homo sapiens
  SITE (243): n equals a,t,g, or c
  SITE (246): n equals a,t,g, or c
  SITE (335): n equals a,t,g, or c
aattcggcagagctgatttctttgatcacgtaaatagccccagaaattggcatttgatttagtatgtttgtattatgaacttctcccctgcaggaattatgtaattcctgtatcaatttgtatgaaaacattttcatatgtcttttgaacttttaaagaaatttattgatcaggaatttaagttaagcattaattgggttccagctttggaattctttaaattttaggagcatttttacctgnatnttatacttagttccattggaacagagctctagcctggacattttcccatttccctgtttacacctttggactgtgtaaagcacacacanatatac

SEQ ID NO: 70 - DNA, 358 bp, Homo sapiens
  SITE (324): n equals a,t,g, or c
tagaaatgtgaaaaatatcacaaagcctttaaatggttgtmacacttgattgtaggtaagaatccatactgaagaaaactcctggaagtgtaaaaaatgtggcaacacttttaataaatgctcaccccttattgcacaggaaagcatttatacttcagaaagattgtacaaatacaaggaatgtggaaaagccattattatctgctcagattttactcaacattagagagttagtacgtaataaaagcttataaatgcatttttgtcaagagatctttcagaaatataagccttaaagtgargaagaggagccattgtgctggntcactctgtatgccagcactttgggaggacaagg

SEQ ID NO: 71 - DNA, 502 bp, Homo sapiens
  SITE (360): n equals a,t,g, or c
  SITE (472): n equals a,t,g, or c
  SITE (491): n equals a,t,g, or c
aattcggcacgagaatgatttggtttacccatacagttacatattaattttcatcatttaatacaacttaccctacaccgtrgcttatttttcaagtttctctgaacatctttgttgtcattcacctctttgtctatttgttctgtagagaaaacaagtgtcattgcttttgtcttctccatctagacttttgcagtccttagactatagttctccttagctctattcaaatagtgcacttgcaaggcgctgcattcttctcaaagtcagccatgatgcacakatttataattacatacacakakaattgaatatgattttagagtcttgaaaaactgatcttctttggcactatcctgnaatgtttctgattttcttaaagtgcctgacaatattgagtaacaaagcttaccatcaccacattgcaccattatgtattattctgtctccatcaatgcagtgacatcactgntacatcataccagcaaggntttaaccacaa

SEQ ID NO: 72 - DNA, 279 bp, Homo sapiens
taattcggcagaggtttacatggcatataacggattgattaccttagatgtttgcacctaactgtatatragcaaatratgctggattaatgttcatcatartcagtatggaaatggcattttgactaggaaaaatgtcctcattcttaagggatgcaggctgaagtcttcagcattttcattgtataggctcatggataaagcatcagttatgctagtattacttggtggaatctaggtaaagggtatacaggtatccattgtgactatattcctgta

SEQ ID NO: 73 - DNA, 435 bp, Homo sapiens
  SITE (280): n equals a,t,g, or c
  SITE (287): n equals a,t,g, or c
  SITE (408): n equals a,t,g, or c
  SITE (412): n equals a,t,g, or c
aattcggcagaggtaaagattagctaattttaagatcatttaaggctatttctagtcactttctttctcataccaaaaatctcacagaaataatttaaaccacaaacaagaaccaaaattgtaagaacaaggacatgaaatcacatcacttctaagtgatgcaggtcgtgtgggtcagtgagaacaccctgggctgggcagattcggaggctgccatttgtcttttccctctgctgcagaagcacatgcagttacttcaaggccattttcaaagcacctncacctgnggcagcagcaacaaacttcaaatccctgtcgaaaaacacagcagagccttccagccctgggggaggcactggcttgtggagggtactgagggcccctggcagtttccagaaattccattgnccanctgtggcagggccaggccagggg

SEQ ID NO: 74 - DNA, 377 bp, Homo sapiens
  SITE (248): n equals a,t,g, or c
  SITE (252): n equals a,t,g, or c
aattcggcagagaaaaatacaaaacaaaaactaaagacccattaaaactggaattagagagttaatttaatgtcgtggatagtaatgttttattaaaaataacattgcacagttatgctggtggcttcagcattctcatgtatgcatgtgtcatgacagctgagttcctcactgctttccttattcaaactagctgaggccttcatacagcaaggaatggcctcatttgatctttgcttgagaagtgngtgncatccacatattaagttcacctttacatgactamtttgtacctctttgttccatgtaaatacaagttgtcattaagtatttttgttaacttccaaaaattattatatggaataaaaaccaaaatt

SEQ ID NO: 75 - DNA, 426 bp, Homo sapiens
  SITE (319): n equals a,t,g, or c
  SITE (389): n equals a,t,g, or c
aattcggcacgagttgaaaggaaaggaaccctttgatcagggcataactgaaatccctttggttctcattatttctwaatctaatccagccaatgaaataggaataccaatttatcattaatcttgccagtggtaaggagggggtcatagaaacacatagggctaattatgaagttaacagtctctactttaaatgtaaatatgaaacaccttggtggtccaagaagaatatacatatatctacatgtgagtatgtatacatatacttacataagccttgtttgttaaggaatcagtaatgtagcatgtaagtwttgangactttaggagaaagtrgcccgtattttactgctcmtattttcytaaaagcttttggaaaaaatctggtnccttaaggggaatgttggttcccaggggatgtggccc

SEQ ID NO: 76 - DNA, 404 bp, Homo sapiens
  SITE (377): n equals a,t,g, or c
  SITE (383): n equals a,t,g, or c
  SITE (392): n equals a,t,g, or c
aattcggcagagcaacaagagtgtagcttatagctgcctcctaagagtgtggcgatggccattggagaggacagtgggaacttgctttcctcacctcttgggagtgccatctgacaagctgtgaggatmtgagggccgtcgcctgccatcttgtggttgaaatccagcacagtgagagaaagtgctgggagccccagtccagtttattattcacaggctgtgtgtgtttcaccgccgtgctgtttggctgatgttttcagccttcagagctctctcttgaatggcaacatctgagctatcckctcctgttctgtgactggtgttttttccctgtggcccggggaggtgccccattcgagtcccttcaaaaaaaaagncttggncctcagggntcccattaatga

SEQ ID NO: 77 - DNA, 319 bp, Homo sapiens
  SITE (95): n equals a,t,g, or c
  SITE (98): n equals a,t,g, or c
aggtggctaggacctgaggatggcctttaggagtgaagagtgatctctggctgacagctagcaagataacaggaacttcactcataaaactgcangtnagcgaattctcccaacaaccagagagtttggaaaaggatcacaaggatgagaaggcatccctggatgacagcttgattttatcctggtgagatcctgagcagacgatccagacaacacgtagctggacacctgatttacagaaactgttggataataagtttgtgttgtttgaagtttgtagtaatttgtaatgcagcaatgggaaaacaaatacaacttt

SEQ ID NO: 78 - DNA, 200 bp, Homo sapiens
  SITE (146): n equals a,t,g, or c
ggcagagggtacgaaccagactccacgtgaagatagaagaatcaactttaagacctttttgatgagcctcttttaatccttttcctgctgtgtcccaattttccacatkaagtgtgcctgcctgtggaaaccatgggccatgcatnataatctcctgcagaagcttaatgtctgtgaaattaacctgagttccaggctgt

SEQ ID NO: 79 - DNA, 374 bp, Homo sapiens
  SITE (223): n equals a,t,g, or c
ggcagagtctagacttatcccaaagatctctgcccaaatgtgttaagtttttacccgtttgcgtgtctccaggaaaactgacgctgcttcattgggatgcccacgccaggrctggcacggggtgcactgaggtcattgaacgggctgggggcacttccagagcagggaagacttgtccaggttttactaattgttggttgacaaggggtgtgagccaacggtntttgggcacagaaatagactgtgaaaccttggggcctccaggcaccttccgagacacacagaggggcattcacagcagccccgacctcaccacacctaattggacatccctgtggccgttcctggtggtctttggtgtctgaggccaattc

SEQ ID NO: 80 - DNA, 279 bp, Homo sapiens
ggcagagcagaagtacacaatttggatgcaaaagttgattcaggaaagactgtaaaactcaactctccactggaaaagataaactccttttcgccacagaaaccgtttaggtttttraacattctgtctgaagaaatgaatagaactcataaaacacttttgccatacagaagcaggwtggatgtcctggggagraagcgcctgtrggatagtttggattgtgaagctgactagccactttttgtcatgggaacatcatttttgccttgaaaaagagtg

SEQ ID NO: 81 - DNA, 330 bp, Homo sapiens
  SITE (293): n equals a,t,g, or c
  SITE (294): n equals a,t,g, or c
  SITE (326): n equals a,t,g, or c
ggcagaggaactactccaaagagcctagttaatcatttggggaaactaaattaacattaatagatctcccttatgaatgctgaaaaaataatgctataatgttagtgwgtaaattaaacttctaggagtacatactatatttctcaatagttattcaaagactatgagatacttgtctcttttccacataaaaagactttcttcaaattagggatccattcaatacattgctctatgccttcaatccactattgagacctacgttgaaactctacttttgcatgtgtacactnngaatgttctgcccagtttggtaaagttcatgnttat

SEQ ID NO: 82 - DNA, 665 bp, Homo sapiens
  SITE (141): n equals a,t,g, or c
  SITE (663): n equals a,t,g, or c
  SITE (664): n equals a,t,g, or c
ggcacaggttaagtcctgtatcaggcttcaaaaagaagaggaagtcattacccaattgttcatttgagaaacaaactccacatgtatcagcaatgtgctcatttcctaaacaagcctattggctgcattactagatatagnaatgaaatattttgaattctaggtgccccattttaagaaagattgatattgacactgtccagggacatgtagtcagaacatgtaaggatctccagatttttgtgtcctgaaggttttcaaagacttggaggagagggcaatggtttgtagggtacagaatactcttattctgtgtggtcccaaggagagaactagaaccaatgatggagttttaggatgatttctctcacaatgcaggatatttaatcagcaattagagactttcataaatcaaacataagccagatgacatctatgaagaatrttgtaaatrttttttgcttagcatgggagattggtctgggtagtctctgcggcctcttttttaaatctggaattttgtatcatgaatgtcaaatgaatatttctttttctttttaaataggacactgatgaaattcaagttaactatcctggaatgtttgaattgatggaagatttacaaggtaaggcactttaaagaatttttagactccattgggnna

SEQ ID NO: 83 - DNA, 256 bp, Homo sapiens
  SITE (139): n equals a,t,g, or c
ggcacaggaaaatgccttatttaaaaggaggccaagatgagtatcaatgaaggctgtcaggtgcggtatcccacaaggctctgttttctgcctttccctggtccacattttcaacagtgaacttacacgtgcacctggnagssagcatttgtgmaaatctgtgaagtattgcacagctgcaggggcaaccaacatgatgggcatagaaatggacttcaggaggytttggctagaaagatgatttaaaagctcggcc

SEQ ID NO: 84 - DNA, 343 bp, Homo sapiens
  SITE (117): n equals a,t,g, or c
  SITE (337): n equals a,t,g, or c
aaactatggctgaacttagtttttggataatctagttcatgtgcattaggctgccgtatatactactatgaatatttagctgcagtatcaatgtggcataaatactgcggcacattncttcgaaaaccgcattttcaaatttatccccgtaatcaatgtgggcctattaaaaaaccaaatcatgatacaagaaacaaccttgggaaaagttatttccctttgtaatacctttaaaaatccagrgtattatattgcattttactgccactgtgggaaacaggttyctagrtttycatactccatcttaaagtgcatttttccagtttacatgtaagtnttattt

SEQ ID NO: 85 - DNA, 361 bp, Homo sapiens
ggcagagcgctcccgcccccacccccggacactcgccgcccatcggcccgcgcctgaaagtaagagggagggccggactaattttaaacagccggcctgccctactttgctgccgccccgaagcggacttgtgcacagtgcggaaagaggcccttttccagatggccagcctacctcctctcccctccctctcgccgccgtcagccccccgcaggcagccctttccggcgcgctgtttccgggccaggactctgggaggcgcactaccacccccacaagcttccccaccagcccggccgyctccagtgctggaggaagaggagagagarttsggggtgggttgccytcccytggttcccag

SEQ ID NO: 86 - DNA, 199 bp, Homo sapiens
  SITE (141): n equals a,t,g, or c
gtatactttgcacacaataaaatgtactcattgtaagtatgcagtcaggtaaattttaacaaatgtaactctsgtgaaccaccaaccactgttaacatatkaacataggcatgatttctgcctcattgtaaccagcatggntacaatcgctttagttttgttaattttgctatagaatttttctaaaggttattacaaa

SEQ ID NO: 87 - DNA, 295 bp, Homo sapiens
  SITE (146): n equals a,t,g, or c
  SITE (210): n equals a,t,g, or c
aggggtctcaggtttctwatcagttaacagttagatggggataataatgcctacctcatagggcttttgtggtagttaaaagagataatatacatacaatgacgaacatagtatatagtagatgtttaatgtctaaaatttttttncgtgttaagactaacttatctctgaggtctttcctcaattttttaattcttgtagcaaagcttnaattttttaaaaaaggaaacagattgttgctttgttttccaggctgcagtgcacaggttccaattggcagcacaagccagcctcg

SEQ ID NO: 88 - DNA, 217 bp, Homo sapiens
  SITE (127): n equals a,t,g, or c
ctgtgaataaatcaggaaatatgtgaaataattatttwatgaatatgtattacctaaagttccattagttcacatttwattttkgcattcagaaaatctaattctttacccatcctaaccttttagncaagcaatttkgtagtcaccctcagscaagccaatagtgtagctatactctggaaacccttcacttcttgaagaaggaaaaagtcttcct

SEQ ID NO: 89 - DNA, 257 bp, Homo sapiens
  SITE (46): n equals a,t,g, or c
  SITE (122): n equals a,t,g, or c
  SITE (131): n equals a,t,g, or c
  SITE (243): n equals a,t,g, or c
accacagagtgttataaggatgaaataacacaatgtgtgagaaacntgtggwaaaactctaaagcaatggcaaatatacatgtatcctcagccctcccattctggtcctggtgacaattttnaatttctcnccccgcctcttgagcataaaactatccatatatgtatctctgtcctctcttgccgttctggrmtttggtagttgcaggttgaggcttcctttcckgtggttgacccctttgncacttcctaccagg

SEQ ID NO: 90 - DNA, 262 bp, Homo sapiens
  SITE (141): n equals a,t,g, or c
  SITE (205): n equals a,t,g, or c
aaaaagtgaaagaaagtgacaaactagttgcaacaagtaaaatcaccctacaagacaaacagaacatggtgaagagagtcagcatcatgtcttacgcgttgcaaggtaagatgaaagggtccttatgaaggtgctggtggnaagtttttttttccccagcaaagtttcccttgatagagagaaatccagatgtgagcagcagttnaagtgaagtgaagaccttttgaagcccctcgtttgcaggwtcccggtgctgatgaaa

SEQ ID NO: 91 - DNA, 348 bp, Homo sapiens
  SITE (277): n equals a,t,g, or c
  SITE (294): n equals a,t,g, or c
  SITE (299): n equals a,t,g, or c
aggatttaatgagaatcgacttttgccaagcactgtgctacccaccttgcacacattatctcatttaatctttatgacaacgctatgaaatagataccattattattgcccccattttaccgatcgagaaaaccgagacagaaaaaatatagctcaactgacacagctagcagtagcagatgtgggattcgaactttgtgaaatctgacttgggaagcccaggcacaagatgggaatgcaggttgaaaaatccaaatgcctatggggctaggcaggnaagagtgaaatgaagtnaaagncacacccgttagccacacagaggagtgggtgggggactgtgggcccaag

SEQ ID NO: 92 - DNA, 240 bp, Homo sapiens
ataaatggctgcatttataatgcaagcaagaaaacacgttgatgttagaaaaaacgggagagaaacaaatagttttctctgtaaatgtactcttttcctgggaatttttccstcaaaatcccgctttctgccttagttttaaaatatattsactttctgcttaaaggagaatacatttgaattcatctagacaatatcttttggtkttctaattgctttccctcttttattggcctgtta

SEQ ID NO: 93 - DNA, 257 bp, Homo sapiens
  SITE (226): n equals a,t,g, or c
  SITE (247): n equals a,t,g, or c
agtacaaaagggggtgggctagcttgaagcaagcttacagtggcgtgacagcagggatacagaggcagaacaaaaacagttaatcaaattgttgtaacaggtttataactcaggattgcacataacctttgctatgcccgcagatgtcccttatctaggttagcctaggcacgggcttatcccataaccttcactgtggtgcccaggcagctcaggcttctcatgnaccttcgctgtacttcttagnataaaacagg

SEQ ID NO: 94 - DNA, 163 bp, Homo sapiens
  SITE (83): n equals a,t,g, or c
agaaaaagaaggattgcatcagagcattgtgccaatacagtttgcattgaactgccttcccccgctcccccaaaaatttgaantttttttttgcaacactcttacacctgttatgggaaamtgtycaaacctttgtaagaaaaccaaataaaatttgaaaatt

SEQ ID NO: 95 - DNA, 269 bp, Homo sapiens
  SITE (211): n equals a,t,g, or c
ggcagaggccaaagtagtccaaacacgcttcaatgaggacagttatatttagcaggtcctcacccctgcaagagaacagcatatcctcactattattattcatgtgttattggcaaaaacatagcttgcatctttccagaggcagagtttcaaagacagggttttctttgagaacataagcacattgcttaagtacataacaaggttattnaacacttgcactcaggggaaaggaaatagctattgcaaattaatgtgtgcactttaat

SEQ ID NO: 96 - DNA, 321 bp, Homo sapiens
ggcagagcttcattcctagacatatgccctcacattcattaaatctgtggccttcaaaatatgttcaataacgaaatggatgactggaacactagtcaccatgtaaaactttttccacggaaaaataaataaattttgagattatratagtcaagctttcaaaatattaaatgttaatatattaaattaaaagttagtaagtctctggtttgtgtattccacaaaaatctttagtatactagccacaagctacatttacgkgcacaaggcttcacacygatggttttgttgcatgrcttttctctgtgaaatattgtctgt

SEQ ID NO: 97 - DNA, 117 bp, Homo sapiens
ggcagaggttttatggaggtatttattgaagtatttttatcaaacatgactatttaaaatccctatsaactttgtgtagtgattctttcttgttctatgacacttagtaatatatct

SEQ ID NO: 98 - DNA, 74 bp, Homo sapiens
cttcttcarcaacataattacctcctgtgmgtgggaaagtggggaaagtatgattaacaaaggctttgatgaga

SEQ ID NO: 99 - DNA, 346 bp, Homo sapiens
  SITE (212): n equals a,t,g, or c
  SITE (239): n equals a,t,g, or c
  SITE (275): n equals a,t,g, or c
atccggccaattttcattattttctagtttttattatttctgttttcacccgtgaattatttagaagtacgtgtaagtatctaaacacatatctcttgaattattattattattattttragacggaatttcactctgtcacccaggctggagtgtagtggcacgatcttggctcactgcaacctctgccttctgggttcaagtgaattctnatgcctcagccttctgagcagctgggnattacaggcatgtaccaccgtgcccagctaattttngtatttttagtagagacagagttttgccatgttgcccaggctggtttcgaactcctgggcctcgagtggat

SEQ ID NO: 100 - DNA, 254 bp, Homo sapiens
  SITE (159): n equals a,t,g, or c
ggcagagtatcacacacgcatgactctcccataacctattgagtatgtttacttaatatccaacatattgctattcagtataaattcctgccgcaactttcctcctctgaactgcctgtgttgtttctggtagagaccatgcttcccagcctgcaggcncaaaccctgtgtaagaaataaaggtctccttactagacattttttggacctttggtcagttggctggtttagggtttcttggtggacactttggc

SEQ ID NO: 101 - DNA, 117 bp, Homo sapiens
  SITE (92): n equals a,t,g, or c
aggggagattcgttgagtgtcctctaccatttaacttcgtaaacctttgtttcccaatgtgtggcctgggtgctaactrttactaggaaccntcctggggaatgcctattaaaaatt

SEQ ID NO: 102 - DNA, 214 bp, Homo sapiens
  SITE (130): n equals a,t,g, or c
  SITE (192): n equals a,t,g, or c
ggcagagccagatttattctaaccttccaagtaaagttgttccactagtaaagttgttctggagtatattttttttaaaaaaaacacttaaaatgttccacttctttcatgaggctaagtcaactctganatcaaaccaaggggaaagaaatgaaattataggtgagtttacttagttatatacaaaagganattattagcctctgctgattgg

SEQ ID NO: 103 - DNA, 255 bp, Homo sapiens
  SITE (106): n equals a,t,g, or c
  SITE (205): n equals a,t,g, or c
aatttttatatatttataattagtgcatttttctctaagttacgttatgctccaatttaaaagttttaaaatgtatatgtatatgtgtgtgcatatactgcttgtntgtgtgttcctcaatcaaccactacaggaaaaaaatactaacagcaggaaataattagcacttttgggaaaaccaagcagatatcttctctgaacatgnactggacttgtgggcttcatacttatcactttacttactaaacatctgat

SEQ ID NO: 104 - DNA, 363 bp, Homo sapiens
  SITE (311): n equals a,t,g, or c
  SITE (356): n equals a,t,g, or c
agaaagctgagggcgcccaataacatgtcatgatcccttgaacaagctgttagatctgaaagccattaattgaaaaggagtctgagtcccaaatagatcactgtgcccgacagactcactcatttagttattttmcaagtctctgaatatataatttggatagatatatttggctgtgaagctgaaacttcacattaggtccttgtcccgaggggtatgggttatcagatggaggaaggctaagcagataacactggaaacatctttatacggttaaggcccaagggattggaccaaaaacaatattgccntcctgagtgggatagtgggaaattagtaccaccttttaaggtttnttttttt

SEQ ID NO: 105 - DNA, 410 bp, Homo sapiens
  SITE (339): n equals a,t,g, or c
  SITE (381): n equals a,t,g, or c
ggcacgaggaagcagatccagggmcagtragatgccaaatgagatagattcatatctctggtcttcagaataccatgattttggtttccttggaggtaaaacaaggagagagaaataacatttatagtttgacagttatcagagtaattcatatgttagaacagagagtggggcagtccccttctcagggcaarcagaccttacaatggcattatctggcctactaggctgattactttctcaggrataaccccctgtgcatttggttcacatatactcagtgactgttcagtaatgagctgtgggtcctgcattwaatccaaacaagstcttaaatgntgctgcattttaaaattaaggtttttgtccttaaagtggttnttttttcatccactatagtttaggttttt

SEQ ID NO: 106 - DNA, 498 bp, Homo sapiens
  SITE (430): n equals a,t,g, or c
  SITE (446): n equals a,t,g, or c
  SITE (449): n equals a,t,g, or c
ggcacgaggttttgggggcattcattgcaggtgtggcagtatactgctatygaracatgtttgttcggaaaaacagaaagatccataaagatgcagagtccgcccagtcatgcacagactccagtggaagttttgccaaactgaatggtctctttgacagccctgtcaaggaataccaacagaatattgattctcctaaactgtatagtaacctgctaaccagtcggaaagagctaccacccaatggagatactaaatccatggtaatggaccatcgagggcaacctccagagttggctgcttcttcccactcctggagtcttacacccgtgsttcaccagaagwccctgkcaggccatggaagagccactcaggaaaagggcccatggccatgggagctttcaaggaaggaaacccctcagtttttttnccgtctagtccggcanctnattccccattaagtcatggggcatatccccatggccattgttctttcca

SEQ ID NO: 107 - DNA, 252 bp, Homo sapiens
  SITE (225): n equals a,t,g, or c
tatcactggaatcttcaaacaggaaaacaaaacaaaaggacagaacaaatatttaaagataatgttcaggaaaattctgctcaggtaaaaatagatggragtgtacattgtgagagggcaaattttatgctggggaaggttgactgagaacaggttgtgagtgtgccatatcctacaggaattattaaaacttctggaagatgaagcaagaacctcccaatgggntggaacaaacatgtcgtctttttactg

SEQ ID NO: 108 - DNA, 139 bp, Homo sapiens
  SITE (92): n equals a,t,g, or c
gcctaataattttaagttgaaagctggacaccttgtttgaaactatagacatggaggtatttatgcctggaaatggtcatacctctgttttngctaggcctttagtttgggtattgggttaatatagtaaagaattgag

SEQ ID NO: 109 - DNA, 468 bp, Homo sapiens
  SITE (380): n equals a,t,g, or c
  SITE (435): n equals a,t,g, or c
  SITE (441): n equals a,t,g, or c
  SITE (467): n equals a,t,g, or c
atttgtaaatgtagttgtaaataatacagcaaaccaaattctatacagttttaaaagttgtccagcattgtcatgttagttacattttagaaagtaaatttgattaaatatatcattccagtaaaaccaataaaagatattttttcatcccaataaaaaaagrcatatttagtaaaatctgkttttatttctaagaaaagcattaaaaatctagggaaagaaggatgatttctcaacatgaaaatggatgtcttagacaaatagacaaatagcaaatattgtatttaatggcgacatgttggaaattaaaaacacaatgaggtggttgctattaccatttcacttaatggtgttgtgaagttgaaccagtgaaggaggantaaattaccattgagtacccctcttatatgtggggactcccctaatttattgttnccgttngtcagggtagggtttgtttgttatgnc

SEQ ID NO: 110 - DNA, 481 bp, Homo sapiens
  SITE (153): n equals a,t,g, or c
  SITE (179): n equals a,t,g, or c
  SITE (415): n equals a,t,g, or c
  SITE (422): n equals a,t,g, or c
  SITE (438): n equals a,t,g, or c
aaccctcactaaaggggcaaaatgagtttgcaaatcatcatgtatatgatacatgatatatattgtgtaaatatacgtgtgaatacataaataggtaaagaaacccttttagccttgtttaatacagtctctccttaaatccattatgctggnaaatacttgtttggggcacagctagncagcacagtacatcagccacagcaccaagcaactttcatttattgtgttgtctagtgcacaccacagccctacaaggtagatattattgcccatctctcctttatagrtaagaaggrtaaattaacttagtatgccagcatttgaacccagttaatttttaagttaagctagataggtccacagtcctgtttttcacaatttcagatgggaaaaactctgaaactgcaaaacctancaggacntaggttttaatccccncatattgtggatatttatatattttactggaaccaattaaaag

SEQ ID NO: 111 - DNA, 324 bp, Homo sapiens
  SITE (324): n equals a,t,g, or c
tattgctaaggaaaatgatatcttagagattcctagaatcatttagtttkaaggattgatcacgttgtttattgattttgttaagcaaagtattttgtagtaaagatactcatttgtacaaaatatcacaatttgagttttctgtcaatgataattttttttaaaatgacatttaagatgaatgttttaaattataataatacctgtycacagttgaaaattaaaaaccatgcaggagggtgtaaaaagcaaaagccccaccacattctctaatctccaatccactaggtgtgtaggaaaccatccacttatttaatccggccn

SEQ ID NO: 112 - DNA, 212 bp, Homo sapiens
  SITE (208): n equals a,t,g, or c
ggcagagtctacgtccaggctgggtraraagagaggcagtggggcccaggaggctggaggaagccttagggttcaractggggtgcacgtatcgaagwagctcagggtttgggcaaggggatacctgccggggttcagccttgagggtgggtttaccgggttcacgaatctttctctctccttacccccgyccgcccgcccgcttgcntgct

SEQ ID NO: 113 - DNA, 355 bp, Homo sapiens
  SITE (319): n equals a,t,g, or c
  SITE (335): n equals a,t,g, or c
ggcagagttggagagtctaataataacattaatttatgggggtgttgggtgggcagcagtttatagttttttaagacttcattgattattgtgattcttgcctgtctgagaaatggtgctgttaattagcagtacagaaatctggacaatcattagaatcatgtagagaatttaaaggcagtaacaaccatactccctaaccctactctraatctcttgaatcagatctctgggaatgaggcccagaaatttgtgttttttggaaaacactcccaaatgattctggacagtacccaggttttgaggaaccattggtttnatgtactcctaaaaancttaacttaagtccagggga

SEQ ID NO: 114 - DNA, 71 bp, Homo sapiens
gaaattttaaaatggcatcctctaatacagacgtttataaaacttaaatgaaatgattgggcttaaccata

SEQ ID NO: 115 - DNA, 606 bp, Homo sapiens
  SITE (7): n equals a,t,g, or c
  SITE (17): n equals a,t,g, or c
  SITE (18): n equals a,t,g, or c
  SITE (26): n equals a,t,g, or c
caccaanggcaaaatgnnagctttgntacggtccgaatcccgggtcgacccacgcgtccgggaaaagagatttatgcgaaggaagcagtaagtgagaacttttattctatttactcctgcacgtttaaatattgtttacagtgagtatatcaacatgtaagtgttaaaagacaataagctactagtgatttttaatataaaattaactataaaatattttaaatattagcaaataatatagcacactcatgaacctaattcccacattkgatagttgttacattttgccatgtttgtttaaaggtctaagtcataaaatcttataaagctaaaccccacccttctctttctcctctctctccaggataattactgttttatagtttgtggatatcattcccttacttgtgtttatacttttaccaagtgtgtatgtattcaaaaaacagttgttttgkgattttaaaatgtaaatgaatggcgttatgctccatgtattctgcaacttttcatcatacattaggttttggcgatttagccataatttggcatgaattcaggtcttttaagttttattccattgtaagaataaacaagtttgttcaa

SEQ ID NO: 116 - DNA, 451 bp, Homo sapiens
  SITE (279): n equals a,t,g, or c
  SITE (343): n equals a,t,g, or c
  SITE (409): n equals a,t,g, or c
  SITE (450): n equals a,t,g, or c
acccacgcgtccgcagaggcactccctgaaccttggacctcccggtctatataactctaaaaaattaatttattttctttataaattaccaagttttaggtattctgtaatgagtgacagaaaatgaactaagacagcatgtgtaatacaatgtgaagaagtgtatgaaatataaagaatagactgaaaggcaaaatgatttaattgtccatgttttattaactaaagggaacttgtactataattaagacaatgttctctcttctgttcctattttantttatttgagttcataaatttcccatatcatctcgctccatgctgtgtgagatctatttatttnttactcttgatcttattactagtttaatatttgcctggggtcctactccaaatctgccttgatatnaagagtcaacaccaatggatttcctgaataactttgctccnc

SEQ ID NO: 117 - DNA, 236 bp, Homo sapiens
gggtcgacccacgcgtccggttgcatgtagcttggcgagtttactgtgtaatgaataatagactggaacatctaccaataactttcacataaatgttcaaaatagaagtgtattttttcaggtttctggaaataaatagtaaaataaatggcacaaatagtttcaataaatttaccaatttgagtgttttcagctctatttcaaaactcataactaatcttcagaattactggaat

SEQ ID NO: 118 - DNA, 542 bp, Homo sapiens
  SITE (494): n equals a,t,g, or c
  SITE (505): n equals a,t,g, or c
  SITE (531): n equals a,t,g, or c
  SITE (540): n equals a,t,g, or c
aagattacagctagatctagcaagamattttaacgttcttctggccagtgatctgtgaagtacataatccaaagtattgtgtgtgcctaataaaatctttaaatgcccatttgagagggtattatgctgatatcttaactgagatcctttgtgggcaaaacaagtgttcctcattttttaactgtgaataacatcttgcatctgamaattagaaaataagaggtttcaggttctctctgctaaatccggtttagctactaagaagtgccaaatcatagaactgactctgtgctctgggtggtgtggctttctctgcccttcagagattccaggtcagggttccaggttggcttcctaagtagaaatccatttgtcaaaaccagacaccctcagttagtgaatgtttagggcatgggtttctgcccatgcatagggaaaggtcttcccaagtggggcagggctccacaaagaggagggatgggccttgggaggtnggctgaacatnctgcttttattacctgaacatcttgncagggcagngc

SEQ ID NO: 119 - DNA, 354 bp, Homo sapiens
  SITE (349): n equals a,t,g, or c
ggagtcatttcaactttcaagtcttattatttaagacatttcataaggctacagctgccatagacagtgattcctctgatggagctaggaaaagtctattgaaaacctgctggaaaggattcaccattctagatgccttaaaaacattcatgattcgtgggaggaggtcaaaacagcaacatgaacaggagtttggaagatgttgattccagccctcagggatgactctgagggatcccagacttcaggggaggaagtcactgcagatgtggtggaagcagcmagagaatgagattggaagtagagcctggaaatgggaccgaattgctgcatcccaggtaaatgtgangggtg

SEQ ID NO: 120 - DNA, 349 bp, Homo sapiens
  SITE (41): n equals a,t,g, or c
  SITE (329): n equals a,t,g, or c
  SITE (334): n equals a,t,g, or c
  SITE (344): n equals a,t,g, or c
agttgctataatagcagagctaagcttactgctttgcaktntgtaaatgtccccaaatcacttagcaacaataccaccagacttttgttcttttcttatgctgtagatactaaggaagagcagcttggcttaattttaatttagggcaacaatgttcttaaactgattgcaaaacaaatagtgactttacagtttctgtatactcattcatctaaccatagtgaaagagtatttttctttgagctcatgctcctagacttgatagtttttcaaagaattctcactggaagctccattggcaagagcyacttaaamcagttawyckgganckganttcctaatcnggaaa

SEQ ID NO: 121 - DNA, 617 bp, Homo sapiens
  SITE (317): n equals a,t,g, or c
ttttttttttttttttttttttttttttttttacaagggctggaactgtgatttaatattaattcaagaaaactacctctaacaatcactgcagtggcggaggaaaagaaatcctaagaattggggcaagatgcagcacaattcatctctggctcttgggaaatctgagagaagctcaggaagtagcttgacttagtcatcaatccatacctaaagctgctcctcagccaaattcctgcatttgtggtctggatgcttggcagagtcatgctgagggctggcacacccattgctccaggaaacccgactggcttgcntccctcctytcctgggcctagcgaggcagaaatggcaatgktcggtcagtgctaagagccagkccamtccgaccctgamactggcytccytctctgsatttggccagaaggtaaartgaacaagatccagtccagcacccccgccaactagctgagaggcacagtgaccctaggagatgtccagccagcytccaggctgagagttgttcttcccggtgaccaagcctgggcacttggggcctcagctggcctaccagtgaaggcctgagggtggtgtcttctcatctttacggacgcgtg

SEQ ID NO: 122 - DNA, 204 bp, Homo sapiens
gggtcgacccacgcgtccgatcaacttaatacttaggaaaccctgctttttaaggaacttctagaagtgtgattctttacccttattaagagattcttggtcagaagtggatcagaaatcctggaaatgtggatagaagaaaaatgtcaatggtaaatggagaatacaggcccacaatctttttttttttttttttttttggcc

SEQ ID NO: 123 - DNA, 557 bp, Homo sapiens
  SITE (496): n equals a,t,g, or c
  SITE (511): n equals a,t,g, or c
ggggtgtcttggccggaaacacccgggtcgacccacgcgtccgcattttttgagcagacgaaccatattaaaaaataaatagcttatataaatgcactcatctgaaatgccattatgaacaatccaagtcttttaatcaaaaaccttgatggatcaccactgcatcatcacagcatatgcagtcacccggagatcccagagcttatgttatctttcacagaagcagatatacagaggggttatcttttcatctgctgaaaaagtttcaatgtttttatgtgcatgtacaatgcttacatacaaagtcaacattgtgataatgcactttcctgtagtcaaatttgcaaaatatgtgtaaaatgaattagaactctttaaaagcctttatacaatttatatctccagtattggaaaagattaaatacataggatagcaaattgcagaaaatgatgctgacaatttaaaatagtgaaaaaaaaaaaacctaaaacgrcngcamcaatacccaangaaactgraaaacctgatacatgaaaaaatggggtatagggatagg

SEQ ID NO: 124 - DNA, 428 bp, Homo sapiens
  SITE (373): n equals a,t,g, or c
  SITE (414): n equals a,t,g, or c
  SITE (426): n equals a,t,g, or c
aggcaagatgggcccagctctgtgagctcagcttctcacctcttagttgaacaagtgcagtgtgggtcaatacatgattgctgctcttgctgccaggaactgtcccagcatagaaaggaatgggacacaatccctgccgtcaagattctaagggaggaagcaggcaggtcgactggtgcctcatctctgcagggctccagccaaggtttgtgaaggattttgcaggcatatggagtggggactgattgatcccgagagggactggggaaagctctgaagargggatgacatttggtttgaactccaaaaaatggttgccttacctgtatcctgaatttttgargtggcttataagaacatataccataaaaangaccaatataaatttaaaatcagaaaaagagaaaatggctnggcatggtggcnca

SEQ ID NO: 125 - DNA, 444 bp, Homo sapiens
  SITE (18): n equals a,t,g, or c
  SITE (363): n equals a,t,g, or c
  SITE (404): n equals a,t,g, or c
  SITE (440): n equals a,t,g, or c
gcagatcaaaagacaggnggggatcatcccgatgatcggcttaatctgcctgggcatgggcagcgctgcgctttacttgctgcgactcgcccttcgcagccccgacgtctgctgggacagaaagaacaacccggagccctggaaccgcctgagccccaatgaccaatacaaggtacctctcgatggctctagggttgccccccatcctcttatctcctggtcctggcacccacaactcccgtactagaagcaaagggaggcttggggtactcagcgcaaccccctttccctctcctcttagttccttgcagtttccactgactataagaagctgaagaaggaccggccagacttctaagccangctgggctggccagtgccatgcaagccacagccagccagcncatccacttcttccaatccttcccgcaggcccaagnatca

SEQ ID NO: 126 - DNA, 455 bp, Homo sapiens
tatcctactggtagagataaggaaaaaactatagaggagtgagtctttgcttgagattatagtgatttttaagagatggcaccaaaataagagtccagaacaagtggcaaaacccaaggggcacttatttcctattgcctgatttttaaagttgctagggtctaactatgaatctttgtattggataactattttgggggttaggggagtgataattatttatggttctgactgtwccttttgtgtttggaacaaattaataaaaagatacaagagtcacagagatagagatttagaaatgttagcwctataattggtaaaagtgaattgtagaatgctccttgggattcaccaagaagatggagccttccattgttacctccttaattctagacatagagttaacccagtagaaggagttgagtctgcagagaagacaagcagaacagcaccta

SEQ ID NO: 127 - DNA, 213 bp, Homo sapiens
  SITE (159): n equals a,t,g, or c
  SITE (163): n equals a,t,g, or c
aaagaagatagacgcgagtacctactgtatgatcctgtagacatgaaattctagatagaatttagttatagaaagaacagtggttgcctagggtggtaagaaaagggtgattgactgcaaaagggctcaagggagtgtttaggggtcatggaatgttcntgangcttgatggtagtgatgcttccataggtatatgcatttgtcaaaacttat

SEQ ID NO: 128 - DNA, 649 bp, Homo sapiens
  SITE (43): n equals a,t,g, or c
  SITE (44): n equals a,t,g, or c
  SITE (547): n equals a,t,g, or c
  SITE (550): n equals a,t,g, or c
  SITE (566): n equals a,t,g, or c
ccggaattcccgggtcgacccacgcgtccgtatggagaagcannagaaggagggcattgtttgcaaagaggacaaaaagcagtccctggacaacttcctatccaggttccggtggaggaggaggttgctggtgatctctgctcctaacgatgaagactgggcctattcacagcagctctctgccctcagtggtcaggcgtgcaattttggtctgcgccacataaccattctgaagcttttaggcgttggagaggaagttgggggagtgttagaactgttcccaattaatgggagctctgttgttgagcgagaagacgtaccagcccatttggtgaaagacattcgtaactattttcaagtgagcccggagtacttctccatgcttctagtcggaaaagacggaaatgtcaaatcctggtatccttccccaatgtggtccatggtgattgtgtacgatttaattgattcgatgcaggctatggttaccatagttaccaccaaggataccaggatggttaccaggatgactaccgtcatcatgagagtnaancaccatgggatacctnactgagcagaaatatgtaaccttagactcagccagttcctctgcagctggctaaaactaccatgtggccagctccattcttcc

SEQ ID NO: 129 - DNA, 445 bp, Homo sapiens
  SITE (20): n equals a,t,g, or c
  SITE (389): n equals a,t,g, or c
  SITE (417): n equals a,t,g, or c
attgactgaagcatggaagngtatacatagctttgttctgatcctgttgaatgacagcaggaccaaaatgaaagtctaagaacttttaacccaagaagtgaaatatctacccagagctgttgtaattttcatttacttcaggggtaaaaaaaggatatctgcaacactatagtttccgctatttatatgctgcgcatacctcctaatacaacaaactatataggaagcaattcttgcgactttcatttgctgaaaggaaaataaatctcaagtagaatcctctcccctttaaggaagaaagggagatggagtaaaaaaggataagaaagaataattacatttagtawtccaactaatctccttaaaatcagattgaattttccttttgnctcacttctgacactcccaaagtcccanctctttaaacttatcagttgaaatgaga

SEQ ID NO: 130 - DNA, 337 bp, Homo sapiens
ccggaccgsccggaattcccgggtcgaccccgcgtccgggtttatgtcaggtatagygtttcaagggatttgagggtcagatggggaaatgtagccccttattttgccagtgtgaagcagataccctgcttttctttacagtagcggagtcagcttaagagctttaaaggtcctaaacttcaaaaacattacagtgccccatcctccgccttaatgtaattcaaaatacaaacaatactaaactgtaaaataaatgtaacaaagtccaataaagtttttatttttttctcaaaaaaaaaaaaaaaaaaaaaaaaaaaaaaaaaaaaaaaaaaaaaaa

SEQ ID NO: 131 - DNA, 630 bp, Homo sapiens
  SITE (431): n equals a,t,g, or c
  SITE (543): n equals a,t,g, or c
  SITE (559): n equals a,t,g, or c
  SITE (628): n equals a,t,g, or c
actgccctaccggtccggaattcccgggtcgacccacgcgtccggtaacgawttgctwtatacagtgacccaaattctgtatctctaatggatgggccatgcatgtttccatgctgacaaaccagcaggatttttttgagtcttcactctgctgcaacattttctttcagtactagccaacatttacagatctcgatatattttcatttacttgctaaacaacaaatactgtggtcaagtactctttgcaaaaatctaagcaatgacaattgtttggtgagctgtgaaatgccattaaagaagaaaaatatgaatgttgcactgaagaattattagtactgattttttttaaaccaaggagttttgaggatcatycagactttctaattagccatgtgtacaggaattttgcctgccctgggttaatttgnctagatttgtatgcagggttttactttaggactttgcagtacgtgctagaaagactgatcccgctctgcctagctatttaagtgtagataagtgagcattggctttgacgtncaacaaactgggtttnaggtcaactataatgaccttaggtaagctacttgtttaagccttaaattccctggctggtaaaaacaangg

SEQ ID NO: 132 - DNA, 404 bp, Homo sapiens
gcagaaaatcaaagtgkwtawagtattagcagtctcagtttccagacctaacctttaacctgctgtacaacttgggcaagttacctcccttccctttgagctatagtttccttctttctaaaacaaatgggctagaccaaatggtccctatagtaatggtcttcttgtaaactttcttgattgtgcatctttaaacgaaaattttttgggcatgctccatattccttgtgtgtgtatawatgtttacacatatgtgcatatatataaatcacataggaatatcacattaatatcctatgactggctgggcatgtggcccagcctgtaatcccagcacttgggagccaggcagaaggatgcctgagcccaggagttgagaccagactgggcaacgtagaacactt

SEQ ID NO: 133 - DNA, 487 bp, Homo sapiens
  SITE (437): n equals a,t,g, or c
  SITE (446): n equals a,t,g, or c
  SITE (458): n equals a,t,g, or c
  SITE (485): n equals a,t,g, or c
cgggtcgacccacgcgtccgaataatcatcatggagaatgagttatccatcccctgaagcataaataaatgtaaattctgatgttgaatttatacaccaaattgttagattttagattttatcctcattttactttgcttattttcttatatactggtaagatcttatagatgctgtaatatagtaaaatgtagaatgtatgccataaaattaacctgaattagagtatttttgcatgcatgaggaagtctgttaaggacataataactttatatatctgatctctaaactaaacctaggcttttaattttggctatccagataaaagaacttagtatttcattgtcagkttaaaaaaaaaaaaaaggcggccgtctagaggatccagcttacgacgcggctgcacgcatagtttctatggggcactaaattcaatnatgggccgnggttacacggcngactggaaaacctggggtacccaactnaa

SEQ ID NO: 134 - DNA, 455 bp, Homo sapiens
  SITE (451): n equals a,t,g, or c
aattcccgggtcgacccacgcgtccgagcccctctcatsctaactcaagcacagcctcagcagctgtcagacttacgatacttttatgcatttgtgccccagaagggtgattagactagataatttgtgagatgcttccaactcaggagagacataatttatatttttaagaaaaaggactatggaaactttagttttttgtaattattatttttgcagagaataagatgtccattaaacaaagattgatgttactaatccaaaaagttgggaattatcatacctgtaaagcacttcttcatctgcctttaacaggatgtgaatttggctgtgatgtcatggtatcacctctattgtctgtcctgtcaaagagaaagctacatagaaaagtgtttctcaracttgaggagtataggaattttttttttttatagaaagacaatctcttggnactg

SEQ ID NO: 135 - DNA, 525 bp, Homo sapiens
  SITE (293): n equals a,t,g, or c
  SITE (386): n equals a,t,g, or c
  SITE (396): n equals a,t,g, or c
  SITE (422): n equals a,t,g, or c
  SITE (433): n equals a,t,g, or c
gaaggtaccggtccggaattcccgggtcgacccacgcgtccggttcatgtgattaaaatgtctttgctttccaaaaagttttgcctgagattacttcaaatcgcctggctggggtgggatttggagagggggcttcttgctgccttctgggcacagcgcctcagggccgggcacagggctggaggcacggggtgttggggggcttggcacttctctgggtcctggaggggctccttggcctctgtgggccccgttcccccgaatgtctctgtctcccagcccttttrgtttgnttctgcatcatgtctcgcctctcctgggcaccctgtccccccttctcctcttatctgctctgacgggcgctctctcactccctgccctcattnccaacatcgngtcctcacttcctggctcttcagganctctccctcanctctctgtcccccgcttgggtttctcctctctatcttcctttccttcttttcaaaacccccaattccaaggccccccttcccaagggttttt

SEQ ID NO: 136 - DNA, 112 bp, Homo sapiens
  SITE (34): n equals a,t,g, or c
aatacgactcactatagggaaagctggtacgccngcaggtaccggtccggaattcccgggtcgacccacgcgtccggttaaaggagacctggaaaatgctttcctgaacctg

SEQ ID NO: 137 - DNA, 642 bp, Homo sapiens
  SITE (507): n equals a,t,g, or c
  SITE (531): n equals a,t,g, or c
  SITE (587): n equals a,t,g, or c
  SITE (611): n equals a,t,g, or c
  SITE (615): n equals a,t,g, or c
  SITE (628): n equals a,t,g, or c
tgcagccaattgctatgaccatgattacgccaagctctaatacgactcactatagggaaagctggtacgcctgcaggtaccggtccggaattcccgggtcgacccacgcgtccgtgctgacacttttcttgtttgttattttcagcctctttaattgtgtagttgccatgaactgagatgagaatgaagagaccatgtatagggtaaagattataagcctgagtttggtctgttgaatgagagatcccatggaaagatccaattagtgatatcaagtaggccgttaaatataagactgagtatatacacgtgtgagtcattgttttataagagtaactggagcccaagaaaagtgtggatttaattatgcagagagggagttagagtaaaaagaaaagaatgacggtggttgagacttgagggtctcctaactttaatggccaattagaggaacatgaacttacmaacaagcctaaaaagaacaggcagggctgggcgccggtgctncacgcctgtaatcacagcacttanggaggccgaggcgggagawcmtgcgtcagggaycaagaccatctggctaacatggngaatccatctttctaaaattccanaaantacttggcgtggnggcaggacctggag

SEQ ID NO: 138 - DNA, 472 bp, Homo sapiens
acccacgcgtccgtttcagtagaatataggaagtactgtgaaaaaggtatgttcagggagttagaggactctagtggaggccagctaacagaacctgggagagaaagggcaatactctcaaaaaacatattttaaccacatctcaaagagccagtgggagtgaatcaggctagagaagagggtaggaaatggggaagggagtcagaagaaagggtatctcttcctggaaaatagtacatgaagaaaaagctgagttgtgtgtcagtaggtttgtatgggaattagtgtttcaggagtaccaagttcaagataggaagtaggaagagataagactgcagggaagtctcatatcttggaaagttgttttagggaatatgragctttacccataggctataaggagccattgaagaatagtagaagcmctaactaatcmaaaacagtcatttacattattcacaaaaatgacctg

SEQ ID NO: 139 - DNA, 735 bp, Homo sapiens
  SITE (308): n equals a,t,g, or c
  SITE (325): n equals a,t,g, or c
acccacgcgtccgcaaccacgggtttatagagagaggaactgaacagctgttgattcccatctggaatatatttaatgtttgcctgcttgtggagcatggtatttaaagggtgtggatggatgaatgtttaaaaaaaaaacacacaaaactatgcacaagctgtatgagagatggctaggtccatctatgattttttttaaaagaagaattttaataccttttctttgacagtgaactgtatttagaaatatgatctttattgtgaaatgctcataaaatgcaaccaaactgcatgtttggccatagntaggaataatatattanaagaattaatggaaagtagtattgtctgggtttcatgaaactattccagataatattctccagcaaaacttatggtaacctgtattttataatgtcaatctgctggaccaagttaatttagaaaataatttttaatcctcagattttcaaaacttggactactgcaagactgatatgtactttttatgcccaaatcatatttttcaaagataggacatcataaggcatcattatttctaatgtatcttttaactagatagaaaaagctttactgtctaaacaggacttctgctcaaaacctaatgggaaagctatttctggggtaagatttgtaacagtgcttctaggtcatttcatgttttatagggaaaaagatctttgtacacctcctcaacctgttagtagaaatg

SEQ ID NO: 140 - DNA, 1973 bp, Homo sapiens
  SITE (5): n equals a,t,g, or c
caggnccggtactgtcatgggggctttggctacctgttgtcacggagtctcctgcttcgtctgcggcmacatctggatggctgccgaggagacattctcagtgcccgtcctgacgagtggcttggacgctgcytcattgactctctgggcgtcggctgtgtctcacagcaccaggggcagcagtatcgctcatttgaactggccaaaaatagggaccctgagaaggaagggagctcggctttcctgagtgccttcgccgtgcaccctgtctccgaagtaccctcatgtaccggctccacaaacgcttcagcgctctggagttggagcgggcttacagtgaaatagaacaactgcaggctcagatccggaacctgaccgtgctgacccccgaagagggcagggctgagctggcccgttgggctccctgctcctttcacaccacactctcgctttgaggtgctgggctgggactacttcacagagcagcacaccttctcctgtgcagatggggctcccaagtgcccactacagggggctagcagggcggacgtgggtgatgcgttggagactgccctggagcagctcaatcggcgctatcagccccgcctgcgcttccagaagcagcgactgctcaacggctatcggcgcttcgacccagcacggggcatggagtacaccctggacctgctgttggaatgtgtgacacagcgtgggcaccggcgggccctggctcgcagggtcagcctgctgcggccactgagccgggtggaaatcctacctatgccctatgtcactgaggccamccgagtgcagctggtgctgccactcctggtggctgaagctgctgcagccccggctttcctcgaggcstttgcagccaatgtcctggagccacgagaacatgcattgctcaccctgttgctggtctacgggccacgagaaggtggccgtggagctccagacccatttyttggggtgaaggctgcagcagcggagttagagcgacggtaccctgggacgaggctggcctggctcgctgtgcgagcagaggccccttcccaggtgcgactcatggacgtggtctcgaagaagcaccctgtggacactctcttcttccttaccaccgtgtggacaaggcctgggcccgaagtcctcaaccgctgtcgcatgaatgccatctctggctggcaggccttctttccagtccatttccaggagttcaatcctgccctgtcaccacagagatcacccccagggcccccgggggctggccctgaccccccctcccctcctggtgctgacccctcccggggggctcctataggggggagatttgaccggcaggcttctgcggagggctgcttctacaacgctgactacctggcggcccgagcccggctggcaggtgaactggcaggccaggaagaggaggaarccctggaagggctggaggtgatggatgttttcctccggttctcagggctccamctctttcgggccgtagagccagggctggtgcagaagttctccctgcgagactgcagcccacggctcagtgaagaactctaccaccgctgccgcctcagcaacctggaggggctagggggccgtgcccagctggctatggctctctttgagcaggagcaggccaatagcacttagcccgcctgggggccctaacctcattacctttcctttgtctgcctcagccccaggaagggcaaggcaagatggtggacagatagagaattgttgctgtattttttaaatatgaaaatgttattaaacatgtcttctgccaaactgtttttaggtctagggaaaattgagtaaggagaagaatccaaggaagggatggggatcgtcccgagggacccatgccttcccacctcttccctcccctctctcccctyccctkcccaktttccaatgacaaacggtgctgtcagaggatgattttaatccagcccaaa

SEQ ID NO: 141 - DNA, 764 bp, Homo sapiens
  SITE (659): n equals a,t,g, or c
  SITE (690): n equals a,t,g, or c
gcgkccgcgctgctggcgrsmtccggctccggaggtctgtgcggccctcaatgtcactgtgtccccggggcccgtggttgactacctggagggggagaatgccactctcctctgccacgtctcccagaaaaggcggaaggacagcttgctggccgtgcgctggttctttgcacactcctycgactcccaggaggccttgatggtgaagatgaccaagctccgggtggtgcagtactatgggaatttcagccgcagcgccaaacggcggaggctgcgcctgctggaggagcagcggggggcgctctacaggctctccgtcttgacactgcagccctccgatcaagggcattacgtctgcagagtccaggaaatcagcaggcacaggaacaagtggacggcctggtccaatggctcctcagccacggaaatgagagtcatttccctcaaagcttctgaagagtcatcctttgagaaaacaaaagagacttgggcattttttgaagatctctatgtgtatgctgtcctcgtgtgctgcrtggggatcctcasattctgctcttcatgctggtcatcgtctggcagtctgtgtttaacaagcggaaatccagagtgagacattatttggtgaaatgccctcagaacagctcaggggagagctnactagcgtgaccagcttggccccactacaknccaagaagggcaagaggcagaaggagaagcctgacattyctcgcagtccctgscaaarctccgatagcccccac

SEQ ID NO: 142 - DNA, 470 bp, Homo sapiens
  SITE (418): n equals a,t,g, or c
  SITE (463): n equals a,t,g, or c
caataatggaagtgaaccaaggtttatgattagtttaattcagcccaacttaggtccattacaaatgatggagggcttttattaatttcagaggtttttaatattgtattttattttgtgccgtggttgatttacacacatttctttaaagttaaagatcaaggctattcactcctctagggagaagcagataggaaaaggaagatagtgtcagtgtcctcattgtgagttaagatggtggttcacagttgttcattctattgtattattatcttttgctgtgtaatgaattactgaacaatttaatggattaaaacaacaataaacatttgtcatttctcacggtttctatgtggcaggaatccaggagaggcttactgggggcagttttagcttagggtttcttgtgaagttgcangcaagatgtcaggtgagttgcagtcaccgaaagcttgactgtgcnaagagtg

SEQ ID NO: 143 - DNA, 562 bp, Homo sapiens
  SITE (464): n equals a,t,g, or c
  SITE (555): n equals a,t,g, or c
gggagaggaggagaggagaggagcctaccatgcgcttcccccggtgcagatcgcgggagagcccaatcacggggcgagctggacctggctgtgatcatttataatccttgactcctccgctccgccacttgtcaagatgacagtttctgatctgccatttaaggagcttagaagtctccactctgtcctaagaacaagaaaaaaacactgaatgaactggaaatcaacaacttctttaggtccctcaaagaagggaggtcacagggaaagctgctgcccccaaatttggagagataaatggggcagatacatagaatcacaatctctgtatccgtggagcagaaacccacctgcagaaacctctgctggaaccatgccagggaggtaaaccggaaccgtaattgatgaatgctgaaggctccgtgtggccaagtctgagagataaaaactccacggagactcantcggggggccttcacactttgtgagtttaagagctctaccatttctccggtgtatataggagaaatattccttgtgcctcggcagggaganaggaaag

SEQ ID NO: 144 - DNA, 381 bp, Homo sapiens
agcctgggtgacaagagcaaaactccatctcaaaaaaaagaatgaatcaagaaaataagacactacatcagtgatgccaactatatgttttgcaaacaattcagtttaattaaaattcacttttgttatttttttgtttttattgtcatgattatgtaaagttcaataaacatttatttattgtcaaaaaataacacttgcaacagcatcagaaaataccaataaatagtrataaatctaatgaaaaatgcacaagasttctacactgaaaactacaaaacactcctgagataagtaaatctaaataaatggggaaaatattccatgttcatggatccagaagactctataatgttaagatgtcgattctccctcaaaatg

SEQ ID NO: 145 - DNA, 404 bp, Homo sapiens
  SITE (363): n equals a,t,g, or c
  SITE (375): n equals a,t,g, or c
  SITE (395): n equals a,t,g, or c
agtttttaaagtattttaatggagacaatttcaaacatatatgatgttagaataagataatgaaccccctcctactccctctctccaacatttatcagcttatgaactattttatccccattgctgtgttcaccagattctttggaaacmaatccctggcatcatgctatggtgtgaaataatattttagaatagctttcagcaggttatggtgacctgcaaattatgccttaactattttatagttacttttaatgttactttatattttacttttaatgggaaatagtaattatatcccttctagggamcttatttccttttacackgctgcaaccacctcctttttttttttaaaagggngttccgaaaggntggctacttacgaatcaagncctagaaac

SEQ ID NO: 146 - DNA, 510 bp, Homo sapiens
gcattgcattgaattattaattaaataaatttattaattggcattgcattgaatttataggttaattttgaaagaatgtggcgtctttgaaatgctgattttttttcactttaaaaaaatgacttttttttttaccactgatagtatttcatatggtccctcagtaatatttcttagagatggttaaaaataggttctgagtcatcttaagcatatttcyaggaatttgttttattgctgtcatgaatataatggttttgctccagttcatttcatagtttaacatatcaaatattaggtatcttaaaaatcacaaatgctatttcaccctgcaggttagcagtattaaaatagaatcatcaaatcccccatcagtgggggcgscgggggggggttgtagaaacagtcctgatatggtttgggctcttgtccccacccaaatctcatctcaattttaatccccacgtgtcagaggagggccctggtgggagatgattgggatcacgaggg

SEQ ID NO: 147 - DNA, 384 bp, Homo sapiens
tgcttgagttatctgtcccgattcaaatctgttaccatttttcttctttttaaaaactctttaatgaagtatctctcccccagcacctatcaggatttggtcttgcatttgattggtttgctaacagaagtagccaaagaaggatcaaattcagccaaatattgcttcaaaatatgtgtaaataaatggacaatgtttaaataattgkagttaacaaataaggaaaatgtaaawtgattacmataaaaattagttttttaawatcaatttawgcyagagtaaaatataaatttcctgtttatatgactcagtagcatgactaatcagttgcaatttaacaagagacattgctttttaagaggcaggctttttgtttatgaataa

SEQ ID NO: 148 - DNA, 452 bp, Homo sapiens
gtaaaatcacaggttcttccccagttctgaaaaagaaataggaaggggcaacgtggcagtcagtgtgaaaagaaaccacgcatttgcaggaagcaagaaggggttccgcagcactggctgcttccggcacctgcagtgcgagggtaaacaggcctactggggagtcggttggccctgggtttgagtcattgggctgctgcttggctgtgacctggaacaagtttttcccctcttaatctctctgagatgagattcctttgagtcatatgcctacctcggtgggtggttacgtggattaaattatatcatgtatatgaagcactcagcctggcatgtggcatgcaggtarggctcaagaaatggtgtcagtgtgaatattctcccctgaatgttggaatgttgtgtgaaggtgaaacagggattgtgtccctagctcttacttaaattcaacc

SEQ ID NO: 149 - DNA, 543 bp, Homo sapiens
  SITE (235): n equals a,t,g, or c
  SITE (346): n equals a,t,g, or c
  SITE (527): n equals a,t,g, or c
gattccccaaagggcagaaatttaaataaatatggcagtgtttaaattaacagataatttaagaagtaaaatttaagcatttattagtaacgtgtaagcaaaaatggaacgtaccagttgttcattgggtatagatttgagatttaagggtagtttttatgtgtgagaatttaaactttgaggcccccagaactatttacaggccagttgcagtggctcatgcctgtaatcccancactttgggaggccaaagtagaaggatgcttgaagccaggagtttgaggaccagccagggcaacacagcacaaccctgtccctacaaaaaaaaattttaataataagccangcttggtggtgtgcacctgtagttccagctacttgggaggctaagggcaggagggtcatgcagtcccagcaatttgaggctggggactgtgagctataatcacaccactgcagcttgggtgacagagcaagaccctgtcttaaaaaaaaattaaaagtacaagttcaaaaagccagtaggntaaggttaaacgggat

SEQ ID NO: 150 - DNA, 462 bp, Homo sapiens
  SITE (293): n equals a,t,g, or c
  SITE (444): n equals a,t,g, or c
gaaaaagtgaagaaaacatatggaagatgttaccaggaaggaaaccaagcaatgaggatcaatgaattcaagaagtgcctacaaacgctttggagaacagagggatttttaaaagggataaactcagaggatgataagaccggatagatgtgacaagaggacttcttcaaaaccactatttctagtgcttgaagacatttattaaataacataaacccaaagaagcttgccttacataagctctttatgctgtttgggtagaaaaaatctcgcaaactaaatccaagtttganaatgcaaaactactgaatcagttcaaacctaattattattttcaagtcaccactgtacctactacaagcccctcacaaatcatgccagattaaacacctcaggccctcaaatttctatgccttcaaatcactattcagaagctgtgctttncctcctagttaaataaat

SEQ ID NO: 151 - DNA, 467 bp, Homo sapiens
  SITE (326): n equals a,t,g, or c
  SITE (449): n equals a,t,g, or c
  SITE (454): n equals a,t,g, or c
  SITE (465): n equals a,t,g, or c
ggactaaatagtgacggacatttttaaggctacttaagaaatggcaaaaatacatttagaggtgtgaacccgaacacactgcgcgctttaagccccgcgagagccggggccgcccgcttctgtgcgcccgtagctcctttctcgggtccgggattcgccggtgccggggacagaaacctcctgccttcttagttcatgacccttgtagatgaacttccctgttttctgcactgcttagaccagaagacgggaaaccgtggactgccgcacccttccctggaagcaggcatgsccgtcgtccatcaaacgcgaggactgcgcccacntcgtaggaaggacgccgcggtctgstaaaagcttcggctttggctgcccgagggamctttcccttcccgktttcgagggggatccattcttggaacggtgtttcgggtgggcacttcaatgcnttganaaccccttaanta

SEQ ID NO: 152 - DNA, 426 bp, Homo sapiens
  SITE (120): n equals a,t,g, or c
  SITE (295): n equals a,t,g, or c
  SITE (379): n equals a,t,g, or c
  SITE (423): n equals a,t,g, or c
ggcgctcagcactgaaatctgacatgagaacaggaacaargcctgtggaaacccgctttctctcgagcaatgacagcgcggatccacaggctcactcatgctccccatcaactagcgaantgttggcaccacatgggctgcgggcaccggtcctgcccatcacaggacacctggcaccctcgggtggaggggctcaaggaccaccgtgagtctggggtctcctctgagtgggcaaggagcatggagcaggccacgtatgagggtggatgcggcatttcaaggggcatgtggttanggcctcctttcttccagcacagctgttcttccagaacaccacgccaggacgggagaattccaggggacggcagaaccctgttcntttgttgggattgtgttgatgaggggagccgaaaaaggcagttnagg

SEQ ID NO: 153 - DNA, 466 bp, Homo sapiens
  SITE (417): n equals a,t,g, or c
  SITE (465): n equals a,t,g, or c
aaaagcatcaataataatactgctatatgtgtagaaggaaaattgatgtaagtatactatttcattattcttttaataaaactttagttatgtgtaagcacttaagagttaatgcatgagaaatagcatcctccacaaagcaaagacctaacaaggttatgaactgaaggcaaaaaagtaaaattactgtgcaggtcctagccatgttgattgctaccagctttcttgtttttgcatgtttactcaagtttttcttaaaataatgacagttcaaatttgtatagtggtttatttttttctgaggtgctaataagtggactggtattatctgcttaattatatatgatcagttaatatttactacakgcattycagtccagattcycacaycyaaattgggacaaccagatataaatnactgatccagaaaagggatcaaaattacttaaaactttgccatacggnc

SEQ ID NO: 154 - DNA, 443 bp, Homo sapiens
  SITE (361): n equals a,t,g, or c
  SITE (415): n equals a,t,g, or c
  SITE (418): n equals a,t,g, or c
  SITE (419): n equals a,t,g, or c
  SITE (433): n equals a,t,g, or c
aagatatttctacaactatattcttggctgatggtagtagcagcaccaccattttttcattatttaattttggaaaattgaccactatttttttcatctaaggctgtgtccttattgtactgaagcacccaatcaactcgatgtaaaaaaagaaagtcttttaaataatgtggaattatgaagacaaaacaactagtgaggaaactaaattgtttttatctaattattttgtaactcatctgtgaactatagataattctgctggtttttgcattcctgaaacagttgctgtgagaataaataatatacttagtaaaacattatgtatgtttggagataatagatgcataatggacttcancctkgtttgtagctgcctggaaaaattaaatggatggaacrgaaaaaaaaaaanggnngaaaaaaaaaaaangggggccccc

SEQ ID NO: 155 - DNA, 318 bp, Homo sapiens
  SITE (294): n equals a,t,g, or c
gtgcctgtttatttccgttactcgtaatacagataactacattaatttactaaaaaccctttctagtaaatataataaaacttggtcagaaattattcatatttaaatggtggctgttttatcaatttgtgtgattgggagtgagggggaaataagctaattacactaacatataagtatataatattgtatagtaaacattttgtagttctttaaagtaattaataaaatttgtgattttaaattttttttagcacgggtcatgttttgttttacycatatattcatggcatncagtggtgtatttagataaggaga

SEQ ID NO: 156 - DNA, 439 bp, Homo sapiens
  SITE (308): n equals a,t,g, or c
  SITE (353): n equals a,t,g, or c
  SITE (375): n equals a,t,g, or c
  SITE (413): n equals a,t,g, or c
ggcatatgttagggctagtgggtaaacccagctgcacctgagagtaggggtatatgttagggcttgtgggtaaatccagttgcacctggcagttggggcatatgttagggctagtgggtaaacccagccgcaccggagagttgtgggtatatgttagggccagtgggtaaatccagctccatctgagatatggggtatacatgaatactagtgggtaaatccagctgtacacgagagtagggggcatatgttagggctagcaggtaaacccagctgcaccccagagcaggtgtatacatgagtgctantgggtaaatccagcagacgtccggactgtgscttgaaggtgttcntcgagagagagaaagtttgatnccgaatttaattaaaggctttaaaaatttaaaaggccngagatgatggtaaggttttgggaggt

SEQ ID NO: 157 - DNA, 322 bp, Homo sapiens
  SITE (165): n equals a,t,g, or c
ggcaatctggtcacgcctgcagtaccggtccggaattcccgggtcgacccacgcgtccggtccctattttgacattatctttcctacagcaaactttttagaaagctgcctgccgccttgatgtttcacctttccacgcttaattcgggtgttaaatctaacgtnttcatttgtaaaaatctttgttgatgctaccttggaagcagtcatctctcagtcttacatttggagaatgtggatggcatgacatcagaattcctttatataatttaacttcagaatagtctgagatcatcgaagcacgatggtcaagggaattccg

SEQ ID NO: 158 - DNA, 490 bp, Homo sapiens
  SITE (463): n equals a,t,g, or c
ggggagaaaggtacaagatattcttttagaaagcaagaggaaaagggaacttaaaataaatgaatagttaaggctgaagataatatatatacaaaaactctgctttaactggaaaaaatgatctcagtggtttcatgatagggaccacatttttatttagatttttagttgtattatcacactttcctggtcaaggaaatctccagccttagggtatgaagtcatccattttgaaactcttcagtcccttggcagggtgagatgctttgccatcataaaatggccatatagagtggcatgtggccatgtcagtgattgtaaggttaatattccgtaatgaccgcaaaggaaccactgtgcagccatttatcttaaacacaggaaggaaaattgttggctgatgcctaataaaaatgaatcatctgggtgtcaaagctcttttaaaagcttttaagattggaanggctaaaattcaggaaagggaagtatc

SEQ ID NO: 159 - DNA, 172 bp, Homo sapiens
  SITE (4): n equals a,t,g, or c
gtcngaattcccggtcgaccacgcgtccgaatttaagaaaaccattttaaatttatttatttttttaaacataacacgaggaaggtgttaaaactggtgtaatagctcaatagaataagtattccagatttaacaccttcctcgtgttatgtttaaaaaaataaatgaattt

SEQ ID NO: 160 - DNA, 338 bp, Homo sapiens
  SITE (328): n equals a,t,g, or c
  SITE (333): n equals a,t,g, or c
gtgattttgggatatgactatggtaatatattcttcgttaattgccccagataattctgctacaaatccgtaaatcaacagcgtttatctaaaagtggtttcatttgtattttaaattacagagctaaagctaggatatacataatgctgtcagtgttgcctttcttcagaaatgaagaattgacgcgtaaatattgaactcttctcagagagatttagtcaaaattcagttcctttttgagtaacaactaagtgggaagtcaaacaactctragtatatgtgggtgggagaactaaaaagaggaagatggagctaaaagattatgcnacaanggccc

SEQ ID NO: 161 - DNA, 283 bp, Homo sapiens
  SITE (94): n equals a,t,g, or c
ctgcgctcaaatgttttgaattttggaacatttcttgtttctgacttttagattagggatactcaccccgtaccaatatttggagtcctttaanctttcttacctatcaatcaatcattttcatataatctaatgtctaaggactccaaatattggtacggggtgagtatccctatttggagtccttagacattagattatatgaaaatgattgattgataggtaagaaaggttaaagagaaatggactttttaggaactagracttggaaacgkraaaattt

SEQ ID NO: 162 - DNA, 255 bp, Homo sapiens
agattatttagtgaatcactttggttatctttgcttttgctacttaacatcaagttcagtcttaatatttcagaggatcctctccactaaataagcaatattcttccttgggccaccactcccagccttaccttgacttttaaagccaactttgtwctttctccaacttttcccttggattgcaaattcatgcagagtcaacaagtggcaccaaagaaatcccctgaattgcggraaaaaaaaaaaaaggggggg

SEQ ID NO: 163 - DNA, 455 bp, Homo sapiens
  SITE (324): n equals a,t,g, or c
  SITE (375): n equals a,t,g, or c
  SITE (423): n equals a,t,g, or c
  SITE (452): n equals a,t,g, or c
agagaataaaggaatcacgtggacatcagctctgaggcctgtggcccacttgcttctgggctttctatagacatttgctggtgacctgcccaggcaggctagagtaccctttctcattgcaccctgtgttcccatcctcctttccttcttccttccttccttcctttcttcctccatcccttatgaaaccctcgttgtgcagttacttattaggtgctgtgtgagcgtctgaagtctcccctcacccacttttccatttggggccacttggccagtgattgcatcagtaccagggttctaggagccatgcagggatccccagtngggcagagtggccgtagcattttggaaaggaagagagagaattggagacanggcttagggacaaagcagggttccagaccagggattaaatgcaatccnaaggtctggatgagtcaattcccagcaanggg

SEQ ID NO: 164 - DNA, 327 bp, Homo sapiens
  SITE (242): n equals a,t,g, or c
  SITE (320): n equals a,t,g, or c
  SITE (322): n equals a,t,g, or c
gaagtattgtttttatgagcttgtttttccaaaagggaataaaatatctacaaagcgttagtgataacatctgagaagtttctgctaactctgaaaatgccgtaactatttacacacaatgttaattttctcctattttagagcctgrggttaatacacctcattcttgtcttacagaatttctataacttgaatgkttatgtctcttctttgagcctctttctctcttttatgtataagtnctgagatatgaatagaatgtgaaattaaataattttatttcattatgaaaaaaaaaaaaaaaaaaagggggggccgcncnagggg

SEQ ID NO: 165 - DNA, 359 bp, Homo sapiens
  SITE (334): n equals a,t,g, or c
  SITE (345): n equals a,t,g, or c
gcagctttgatcactctgtagtcttctggcacttaacccttgttcaggccttgcttctctctgtggggtcctcttccctatgcctcttgccttccaagtcctactcatgcctcaaggcttcccataaggcctttcctggttattacagcttatggtgatcacatcttaagattttttccagctcaggactcagaggacttttctctttatccaatgtcttgttacatacatatatataccctttttgtattatatgtattttctgttttccaatgtggtttttaaaaacctagatctttggtagatgggaaaacttatttatccaaggttttanaatgaatttanactttggcatacca

SEQ ID NO: 166 - DNA, 555 bp, Homo sapiens
  SITE (475): n equals a,t,g, or c
  SITE (484): n equals a,t,g, or c
  SITE (489): n equals a,t,g, or c
aatttttaaataattaaagttataaatttatggatgggatcacttattaatattgcatcatctgaaattttaaaaatatgtatgccagtcttgttgctataatctgcttagaaaaaagaacaaaacaaaaagactacatttttcaagatttgatttttaagaagtacttaattcttggagaggagaagagagtcatataaataaaatatatcatgagagtgatattactgtggtatatagagtatttctttgcattagacccagtgttagtttgcatatattctcatgtcctcattgtaacaatttttagcgagtattatttttcaggtgagaaaattttacttcagagattaactggtgggaggtaacataataacagggaaggagccagggattatcttaatttcaaatcccacttccataccattatgctatacttaaggatatgtgttcacagtgtacctactgcagttgntatggatcngggtngcctccttggaaattttcatccgggtttaaatttagaatgrgttgatttttgtggagtccttaatt

SEQ ID NO: 167 - DNA, 383 bp, Homo sapiens
  SITE (287): n equals a,t,g, or c
  SITE (371): n equals a,t,g, or c
  SITE (379): n equals a,t,g, or c
ggaagaatgccatgatgagaaggcacctaatcagtggaacaggccctcactagacacaaatgccagtgcattgatcttggacttcacagcctccgtaacaactaagagtgttcaaagaagaggaatcacactttggccagcagtatacctgcagccctgcgctaaagtttgctgaatgaaaatataagtgggctctcattttgaatataaggtgtgctgcggctaacttaaacaagataaaacacctttcatggtatttaaaaacaccagtgggttttctccctatnagtctccactcccagctccagaggactggtaatcctaaaacttgggagcaccatcttagataagtgaaagcggagttagataantttggaantggg

SEQ ID NO: 168 - DNA, 365 bp, Homo sapiens
  SITE (360): n equals a,t,g, or c
aagtacatgggattccaggagaagattcctatgaacatgttataataattctgtagacgagtgtatttttgtttgtagctcaaacagttacagtccacatactagagagcacctttaaacacagcaaatgtttagtcagagatttcaacctaactgtgcttagaaatgaaatcctgtaaacaatttggtgatactggcaaatttaaagcatctacctccttccaatctaattttcctcttcagattgttaattaaagaaaatgaaaagtatactttaattttattgccaaaagcactagtttgcyttattcatgcaaamcataatactcaactgctattgcccgcagatctacaaaagcngggac

SEQ ID NO: 169 - DNA, 426 bp, Homo sapiens
  SITE (355): n equals a,t,g, or c
  SITE (402): n equals a,t,g, or c
gcggacgcgtgggggacgggggcttccagcccactgaacacccctgtcctgccatagccccagaggtaccaccttgggctctgcccagtgctgcttcaacacctccagatgggaggagagggacctttccttccagttctaacccccacatcagtcaagggaaccctgtacaaaatgctgagaaagccaaagaaagtcagagtgcaggcagcttcttgtgacttactgcgggggctccttgtgtctcccctcctcctgcctgttagacttctccttgctggctgggcccacgcgtggatgcacgggtgcggaggatgggaacccaggatcaytcagcaaagtgcttcttgtcagnttctggcaaaggggagaaatcaagggtcaaccaaaagttttaaatgnaaattggaggactcctaactttat

SEQ ID NO: 170 - DNA, 232 bp, Homo sapiens
  SITE (179): n equals a,t,g, or c
  SITE (232): n equals a,t,g, or c
aattaaataactgttttgggtcagaatataaatgctgggaatatacattttattacttcttaatctgggtgtcaaagattttaccacctggtaaataatgttggacttcaacttgttactggcacattttaatagtagatgaaacatgtwtttcttggttatgtgaataaatgtatgtngtgctcttcatacttgttggattgtatagagattaaatagtgatatgtatatn

SEQ ID NO: 171 - DNA, 375 bp, Homo sapiens
  SITE (112): n equals a,t,g, or c
  SITE (309): n equals a,t,g, or c
  SITE (351): n equals a,t,g, or c
tgtatttttagtagagacggggtttcaccgttttagccaggacggtcttgatctcctgactttgtgatctgcccgcctcggcctcccaaagtgctgggattacaggcgtgancaccgcgcctggccagtcatgatatatttaaactaaccagatcatttaccatgtttgagactttgtggtagcttctaaatctttttctgtggaagaaaatagagaaaaaataaggaggtgaggaaacaggaaaatttttaaaatgagattagttaattgaaaaatggggtgtcacatcatgtggcattctatttatnaaaccattggataattttaatatcacatcctaatcccaattngggggggtttcccatagcagatag

SEQ ID NO: 172 - DNA, 375 bp, Homo sapiens
ggcaacactgtggcctgaggcatgataagaaacggctttgtagctgaaagaaaaataaacattccatgattgtagatgtctttgttagtaggaccaacctcctatttaccataaactgtctcagtcttggcactgaaagtccagtgtccctggaaacccatcagtccggggcaaaccaggatagttagtaaccttagtttttggtacactggttttactgcctctgcagtggaacagaagttcttgcactgttttagagctttgctgagccgagaacaaaatctcctgagaataaaataattgtgattccaaatggacatttttggatggtggagagaggtatccccaaatcctcggtaactaatgagttccctc

SEQ ID NO: 173 - DNA, 361 bp, Homo sapiens
  SITE (190): n equals a,t,g, or c
  SITE (360): n equals a,t,g, or c
  SITE (361): n equals a,t,g, or c
tcctgatgttaatgtaaattctccatttttgttgttttcccaagattttagatcttttgtgtttcaattatgaattttagaataggcttgctaattactataaaaaggagtatgattatgctgagactgtaattggggttgggttgaatttgtagatcactttggagacattttaacagttttgaaagtnctagtcatgaacatggcacatctctccatttatttaggtcatctttaattttcctcagcaacattttgtagttttggtagaggtcttgtatatcctttgttaaatttattactaaggattttatgttgtatgatgcaaaaataaatggaattgttttttaaaaaaaaaann

SEQ ID NO: 174 - DNA, 366 bp, Homo sapiens
  SITE (338): n equals a,t,g, or c
  SITE (343): n equals a,t,g, or c
  SITE (356): n equals a,t,g, or c
gccatgaaaaactgttattcttgctctgctttaggtaaatggttcaaccagtctttattgtattcgaatcatctatcttttcacttttaattattttaactgggcctatccccgtaccccttttccctaggtagaagtttaatgtagttccmatcctcattttaacycmatactttacyagggaagcacaactgkgtacattaaaccatatgaagatttgaatcaacacagagctattcaactctttcttctactaataaaaccatccatcattaaatcttaatttagtagggcttataagaatataacgggtatatccagccatatccttggatganggaanggtttgttggacnaaaatttatc

SEQ ID NO: 175 - DNA, 409 bp, Homo sapiens
  SITE (378): n equals a,t,g, or c
  SITE (394): n equals a,t,g, or c
  SITE (400): n equals a,t,g, or c
  SITE (401): n equals a,t,g, or c
gtggtagacgtagagaagcagattgaggccttccgcagccgcctgatccagatgctgggggagcctcttgtcccccaactccaagacaaagtgcacttgttgaagctcctgctcttctatgctgcggacttgaaccctgatgcagagccctttcaaaagggctggagcggctcctgagggcctgccaagcactgaatgccaagaatacctcctgaactctctctccaactgctcagaagctctaaaagcatgaaaagtggttaaaatcttacaggaccaaacctgcattattaatcagtaggttgtaattyctaactctagtaatactttttttaawtatccatcctagcckgtyctcaaatatggcttaaatatacnaggtatatatattacnaaaacnnatcaatta

SEQ ID NO: 176 - DNA, 357 bp, Homo sapiens
  SITE (333): n equals a,t,g, or c
  SITE (339): n equals a,t,g, or c
  SITE (353): n equals a,t,g, or c
ggctcactaaaaatatccctttgacatcagatgctcctatttcttcctattttccttaaatgattatttttttgtcagaaaatttttcaaatttgggctttatatttgagaaattaaacaacccacacttttctagaggtgacgttatgtttaagtcaataactgaagtagaaaactttgcatttggatagttctacattgaatatgagtttactttgtttcttcaaagtctcctgtatacggctgttgtaaggagtggaagaggaaccacttggtgttttctgttgtttaaactttggatgaatgtaaaaacgatcatatgggaatacctcnaaatanggaaaggcaaccantgtc

SEQ ID NO: 177 - DNA, 305 bp, Homo sapiens
  SITE (287): n equals a,t,g, or c
acaactgtcatcagaatcatcgtgtacaaaagtcaggccaggacccacgtaccaaacctaagcagggtggctgactactaaaataaaatatttaaataagacttagagtctccaaatagtcaaaatacaaaatgtccaggttgaaaacagaataaataataaccttggcagattactcattgcagatttgctcacactcatttggttaaaaggattattctggatacaactgaaagtaatagttatatcmagatcaggaaaatcacacttaatggaaaacaagatancactgacaccagaggtga

SEQ ID NO: 178 - DNA, 442 bp, Homo sapiens
  SITE (410): n equals a,t,g, or c
acgcgtccgacagatagttatgcaagaagaccaatttgaactcatggaaacagtgacacgatttatggttaagtgggggaaaaaactagtttcaggataatatgtatggcaagatcccactcttggagagaaaaaaagatatatgtgtacagtgtatgcacctgtgtctgtaaaggcccacaacaaagtcatcaaactattaacagcagtggcctttgagaaagggagtgtgagtggaatgaagaggccaaagagaatacagattgctcagcacttcatagtgtgatttaatcttttgtaataataatgcmtttgtacatttcctatgtgactttttttaactagaaaaaatwaaccaccaccacmaaaaaaaccaggawtccrgaatgtggktggccyaaaawctgggnattacttcctaattttaccaaaatgtccttac

SEQ ID NO: 179 - DNA, 168 bp, Homo sapiens
  SITE (164): n equals a,t,g, or c
ggttaccgtcagaatcaacaccatatcctgaggaagccctggtatttccccaagtctgcctatgtattagacactctaatcaatgctaacacagttcagtttttgagggaactagttttgtcataatactacacccctctattgtttttaaataagaaaaaaanaaaa

SEQ ID NO: 180 - DNA, 432 bp, Homo sapiens
ctgggaaaacaacgatatggcaggagccagtcttggggcccgcttctaccggcagatcaaaagacatccggggatcatcccgatgatcggcttaatctgcctgggcatgggcagcgctgcgctttacttgctgcgactcgcccttcgcagccccgacgtctgctgggacagaaagaacaacccggagccctggaaccgcctgagccccaatgaccaatacaagtwccttgcagtwtccactgactataagaagctgaagaaggaccggccagacttctaagccaggctgggctgccagtgccatgcaagccacagccagccagcccatccamttytttccatycttcccgcaggcccaaggcatmattcgggcaactgttccgtaatggttaaaaggcgggttccagcaargggagtgtcaacctaatttct

SEQ ID NO: 181 - DNA, 295 bp, Homo sapiens
  SITE (287): n equals a,t,g, or c
  SITE (289): n equals a,t,g, or c
attgagttgtttcaattccttatatattttggatattaaccccttgtcagatgtttggtttgcaaatatattttctcattctgcaggttgtctccttactctgttcattatttttgtagttatgcagaagctttgtagtttgatgtaatcccagttgtccaattttgcttttgttgcttgtcatttggggacatacccataattgatcttagccaaaaggctgagaagtgatttgggtcatattaaaaaatatcattgccaagaccaatataakggagtttttttcnanggtttc

SEQ ID NO: 182 - DNA, 377 bp, Homo sapiens
  SITE (365): n equals a,t,g, or c
ttctgtgtgtgcatctgtaatcctagctactcagggggctcaggcaggaggattgctggaacccgggagacggaggctgcagtgagcactgcactccaccctgggcgacaaagcgacactctgtctcaaaagaaactagttccatatatatttatccttccctaacaattaagcattattagggataaaagagcttctgctttcatgttgccatactcctaacattcaagataaagataacttttaagtctcttccaaagttatctaaaatggttaagcagtatttgtgctagcaaaactatgggagctggttcacaagcrgatcttgagaccaaaatrrraatatrtrtgtawttttatttaantatatatccccc

SEQ ID NO: 183 - DNA, 427 bp, Homo sapiens
  SITE (379): n equals a,t,g, or c
  SITE (401): n equals a,t,g, or c
  SITE (422): n equals a,t,g, or c
gtgaaggagataaacacttctacaacttaaatttaattttaatagcagtagaagagaacataaggaatagaggttaattttacccagaagcaggatagagaaaatattacagagaaaatcacatatcacatgggctcgaaagatgtagaggtttttgacaaatgaagaacaaccataacaggtagagggaacaccatgaaccagggcatgaaactgaagtgcataacatattctagagagagaagggtgtgggcatgagttagggctggaaaaacaggttggaacagataagtaagggtcycaatgcatktccaagagcttgcagttattttccaggcatgagtaggcgccaaaaaaaagtagggtgtttttttttttnccccgggccctttttaaggggngggtttaatttgggggcccancctgg

SEQ ID NO: 184 - DNA, 403 bp, Homo sapiens
  SITE (365): n equals a,t,g, or c
  SITE (380): n equals a,t,g, or c
  SITE (383): n equals a,t,g, or c
  SITE (398): n equals a,t,g, or c
atttttttgccattactttcaatggcaaaagccacaataacttttgcaccaaccttatatatatttgtgtagattaatatgcaatatattccataggtgatattaaggttttctttgacttaaataatgtttaagactgggaagaggatcaatacccattacacatctttaaagagaacaaactaactcattaatgctagtatcagatgttctttctttttttattctcaaatatttcgaacaacagaatgttctttcttataaaaccaaaaccaaaacaaaaaattcagctgtgagttagacataccttatcctacctaactagtcactgtgacacacttaccccccagccctcacacctatgnacattccagctccanggncatcaatttttaaantttct

SEQ ID NO: 185 - DNA, 331 bp, Homo sapiens
  SITE (128): n equals a,t,g, or c
  SITE (130): n equals a,t,g, or c
  SITE (135): n equals a,t,g, or c
aaaatatatatatagttgttttaaatggtgataagaagaaatggctggtcacagtggctcatgcctttaatcccaccacgtactttgggaggcaaaggtgtgtggattgctggagatatatatatatnancagancatgatcttggctcactacaacctctgcctcccaggttcaagcaattctcctgccttggcctcccgagtagctgggattgcaaacgtgtgccaccatacctggctaatttttgtattttgtagtagagaaggggtttcaccatgttggccatgctggtcttgaactcctgacctcaagtgatgggccactcgggct

SEQ ID NO: 186 - DNA, 486 bp, Homo sapiens
  SITE (434): n equals a,t,g, or c
  SITE (440): n equals a,t,g, or c
  SITE (464): n equals a,t,g, or c
atttaatgccctcggaattatcatcttaattcccagataagagtaattgtcacttctaaaactcttcagatattttcctttgcttttgacagtggttctctaaatttaggttcatcaatatcacctggaagcttgttaaaattccaaaaaacaacaacaaaaaaacccctgcttaaatataaaatggatcatttcctctgattttctgttgtaatggaaaatgcatagaatttggggctaaagtatggaatcttgggaagccacttattttttaaatgctgctgataattatagcagcagttctcaaactttttgatcttagaatttcttatacttttaaaatgtattgagaacttcaargggttttggttataatagccaccatattaccatttagaaacacttcacaaggtatcmtttaaataacccttatnggtacnwgtagcttcggaagggattcccanggaaattttgggagggtggtta

SEQ ID NO: 187 - DNA, 378 bp, Homo sapiens
  SITE (347): n equals a,t,g, or c
gccacgttcagcaggcattcccacttgccactaactacccaatacttggagagcattgaagtcctgaagtcactccgatacctagttcctttgcagtccaaaaacaagcttagaaaaagacttgctccgctggtgtatgtacagtcagactgtgacccaccatcagacagggacagctatgttcgcgagctgatgacttacatcgaggtcgattcctatggtgaatgtttacgaaacaaagacctccctcagcagctgaaaaatccagcctctatggatgccgatggcttttataggatcatgcacagtataagtttatcctagctttgagatgcatttgtgatganacatcactgggaagttctggaggcatggaaa

SEQ ID NO: 188 - DNA, 365 bp, Homo sapiens
gcagtaccgtccgattcccgggtcgacccacgcgtccgcactgtgttgtaaaaatcaagtttgttgattcagtgttggcaattcaataacagtaagttaaacccaataaccaagttggcaattactattctctgtcatgtattacaaaaacattgtcagtttatcataatgtggctgtccgtccccagttttggtgtcaataaataacttaaatagaagtttttaaatgttgatttaaaaagaagcaaataaaatagccaaaatagaaaagtcaaaataggaaaatcttaaatgtgttcaatatactaatgatcttttatttcttccttaggttaatgccttagataagaaaacgtgtatcatgt

SEQ ID NO: 189 - DNA, 551 bp, Homo sapiens
gatataactcttattggccaggtttggataacataccaacctctagaccaatcagtataagagatttgggaattgtgattgaccaatcttcagtgacatgaccacagagaggcaaggtgaagattttggcagcccacacaaccgcaactagtgaagaagagtacaccaaggagacagcagtgctgcaggtgcaaaaaccaaatggttgtttgctacatcttattaaatgaagctgtgacataaaaacattttctattcctatatttcccaccaattccaattattcttcacctgtttgtttgtccaagttagagaggttttaagatcattctctttcatatgttctttaccattgaaagattacatttgcattgtttgttttaagccaagagtarggccctggatatagctargctcactgkggttttgcmaactttatattgggrtgaatgcmagtttcacygratwaaaagctggtcctctacttcaactgtatcacatagatgtataaaggttctttcagtttatcccaagagtatgtgctagtattt

SEQ ID NO: 190 - DNA, 404 bp, Homo sapiens
  SITE (398): n equals a,t,g, or c
ataaaatgggatggcaatgtggggagaagtgatgtcagcaggatggtgaactagaatgtaccaggccttgtaccctacaaaaacaatgattcaataactatccacaaataaaagtagttatgggagagctctgaagcccagttaagaaactgtagccacctagtggaggcaaaaaaaggaaaatgaaacaaacaaaaaaaatcctgaggattagtaaacagaaaagggtaggaaaaacagtagcattgtagaaaaactatttagaaagccagaagaccctagaagctctggccactgaggaccgcagcagcccagatggctgcagactgctgcagcctttgccagcaaggacccttgcaatctttaccmacakgggtccattgccagrttgctagagntcactt

SEQ ID NO: 191 - DNA, 573 bp, Homo sapiens
  SITE (555): n equals a,t,g, or c
cccaaatacatatgaccatatgtaaataccaccttgcatttcattgttcttcacaagtgctttgtgcccctttaattaaaaacacatgaaatgaataacaaaacaagacccaaatagagtttattttattctcagagtttggactacaattttctaagatgtttctggttcaagactgtcattttctatttcaaccgaaaagtaagcatttaacccggtgaataaatgtagatcctgccattcattggtattttaaagaaccacttgaaatcggatcattttatttaaaaataaaaaatgttaatgccagttggcctactataaaaagccagggaccatgttaggaattaggaaaagtaaccagcattactgcacctcttgttagactctgtgcattaataaaacacacctagagtctgttgtcatttcactaatwggrtaagrcaaattttttgctttgaaaaaatttttctgcatgcccgggtgtctgtctctgggctgaggttttgtctatttttacagtgttttcaatccagccataaaattaactgtggnttttttttttcccaaagt

SEQ ID NO: 192 - DNA, 252 bp, Homo sapiens
catgcctcctccttcctcttggtctcagcactgatgggaggctggtgcccaagctgtggcctgcagtctgtgaggagggctgtcttgcctcacactcctcacagcctacttccccttccccggggctgagagggtgaaagtgtgtggggaaggagargactggtttcctgggttctcaggggccaggaggagtaacagaaccaggtctgctccccamcttactcggatggcctccctgcccctctgctggca

SEQ ID NO: 193 - DNA, 376 bp, Homo sapiens
  SITE (367): n equals a,t,g, or c
agaggaaagcccccaatccgtgtttcacaggtactcacaagagaaaatgctaggagggttgtgccttgctaagggaaggaagaaaagttgggggtggggagcatgagatttgatgcagttagtaaagaatgaactctgaaaagtgttacgagagagagagagagacttaaaacaaccatttgtttagctcatgactctatagattggcaattgagctgagttcagctgggtggctcttctggttctggctggatacacccagcatctgcagtcagctgggctgttcaaaggcctcgattcacatgtccagtaattggctggtggttgccctgggtgacaggatctctggggccattgtttctcatcntccagcaag

SEQ ID NO: 194 - DNA, 349 bp, Homo sapiens
ctagaagtccaagttaaaggcaccagtacgtttggtcgtctggtgagggctgcagtcttctgagagagaaacactgtccttacaaggcagaagggcaagctaggcaattgctatgtgaggtctcacctttataagcctcttaatgccattcaccaggggaagagcccttatgacctaattacttcttaaaggcctcacctcttaataccatcacattggccattaagtttcaaagttcatgaagcctaaactttggagggaacacattcaaaccatagcaatctgtgaatgaaaatttattttacacacttgggrtccagttggaagctattttaaagcatgcttattt

SEQ ID NO: 195 - DNA, 574 bp, Homo sapiens
cccacgcgtccgcagaaagcagatgaatggttgtgagaggctggggtggggagggggatggggagtgatttctttctttcttttttttttttttgagacagtcttgctctgctgcccaggctggagtgcagtggcacgatcttggctcactgcaagctccacctcccaggttcacgccattctcctgcctcggcctcctgcctcagcctcccaagtagctgggactacaggtgcccaccacgcccagctggggagtgatttcttaatgggtatagggttcttttatggggtgatgaaagtgctttggaaccagatggaagtggtgatcgcacaacattgtgaatgtactaaaggctgctgatttgtacactttaaaaaatatcttcaggtgttcaatattgctttcagtctattttggtaagatttttctagaaaattgtttattttgtctgttttaaaagttgttcctttgtggatatcatctgtttgtcattggtgttctgcagtttcattatgatttatgtgtcttttttccacataaatttttcaaagttaaaaaaaaaaaaaaaaaaaa

SEQ ID NO: 196 - DNA, 285 bp, Homo sapiens
  SITE (273): n equals a,t,g, or c
  SITE (274): n equals a,t,g, or c
gtcttttatatttttgtatcccccttagcacttggcatagagccttaccttggcacggtacccaatagatatttgttgaatgactgaatttctaattagaggtaaattatctaaagagtaagccaagataggggtgaattttttctttgaagctttattttattacagatatcaattgaaatgattttttaaaataaattatctatatttgtatgttttaaaaaaaaaaaaaaaaaaaaaaaaaaaaaaaaaaaaaaaaaaaaaaaggggggnnccccccagggg

SEQ ID NO: 197 - DNA, 323 bp, Homo sapiens
  SITE (258): n equals a,t,g, or c
  SITE (264): n equals a,t,g, or c
  SITE (266): n equals a,t,g, or c
tgctctccagttgtatgatatttatgatagtatgtgaataatgttaagtagataaaatgtggtctgctgaggctgagtgctcagcytgagtatatactggtatgtgacaggtccactggcggcctggggttcttctgtaaagtgagtagtttggggtaactggtatccaggcatctttctagattgaattttaaaatcccactaattgatatgcatctggttgatgactcctcttctctctttatctttttaatgtangaaganangatggtgatgcaccggttacaaaagatgagaccacctgcatttcacaagacacaaga

SEQ ID NO: 198 - DNA, 360 bp, Homo sapiens
  SITE (299): n equals a,t,g, or c
  SITE (306): n equals a,t,g, or c
aaataaattttgtcccttaggaacgcatacaataactgtttaagtctactagtggatcagtactccacatcatggggctcagtcaacatggacttgtctagccatctctactgaagttggcatttttattacagtaacattgattaagggacataaagactggctaactgaagcatatactatctgtttcaacagctttcataatcttagctgaatctcttgaaatgtgggtaaaaagtagaaaaaaggaaaaagaatctttatatcaagtagcattcatagaatgggtgatcccagangtctctncttcctgaatctccttgacaaattttgtgacaaggcaattcacctcctccacaa

SEQ ID NO: 199 - DNA, 111 bp, Homo sapiens
  SITE (109): n equals a,t,g, or c
gcagcagattatatgaaaaagtaacagccaaataatattgataatgatgggacttgccatcaagctttaaaatcttctaattaattctttttttttttttttttttttngg

SEQ ID NO: 200 - DNA, 531 bp, Homo sapiens
  SITE (347): n equals a,t,g, or c
  SITE (348): n equals a,t,g, or c
  SITE (398): n equals a,t,g, or c
  SITE (430): n equals a,t,g, or c
  SITE (450): n equals a,t,g, or c
taacattcttttctgctgaccccaaattattaaaccttctcaaaccaattgcaaatcaraaagtctttgaatctgtctatgacctataagcccctgcttcaagatatcctgcagtttaaggccaaaaccaatgtgtaaccttgatttatggttttggccataaatcattgatttattattttgcctatagcttctgctttcctgaaatttacccctgctttacaaacccttacctgctagtcatagggaaggtcaaggtttaagcgttacttgagctacctgagcctccttgcttggcgccctgccaataaaacactttcttctgttgcaaaccaccatgtgggatnntctggttctcacggtgccgggctagttagaacccattttcagtttctatnaacaggtgtggagggttaagataattctttcntttcccttatggtgtaaaancatcactcctgtttgcagtagccttttctctttttccccttgatccctgccccccaattcccttcaccctctacttcaagg

SEQ ID NO: 201 - DNA, 324 bp, Homo sapiens
  SITE (212): n equals a,t,g, or c
ggttcccaaactctctgcactttggaatcattgggaagcttcaaaacatactgatgactgtgtgactgtgttctgcctctgggtttgtratttgactgatttarggagtatcaagggttttggaatttttagaagatcaccaaggtgacgctaatgggcaaatgagttagggattttagtcctacttcgagttcaggtgaaatggtgagganagagatgctgcgtttgttcttctttacttcacatccactgctgcagatctaccagccccttattttgttcactcaacacaacaagaattttttcttcaggaactctgtacct

SEQ ID NO: 202 - DNA, 461 bp, Homo sapiens
gttggctatatattatgggtgtgctgggtgcatcatgtaactggcatgtgggtgtaccctttcctggaacacattggcccaggagccagaatcatcttctttgggtctacaaccatcttaatgaacttcctgtacctgctgggagaagttctgaacaactatatctgggatacacagaaaagctgtgcatttggatcagctgctatttggcaatacgaatcactgaaatccaggggtccagagttattttgatggcataaaagctgattggttggatagcataagaccacaaaaagaaggagacttcagaaaggagattaacaagcggtggaataacctaagtratggccagcggactcaggtatcatagctgcaaacgtccttgtattctgtttgtggagagtaccttctctgcagtggacagtgatctgatatttcaaatctwatccagcctcaaaagt

SEQ ID NO: 203 - DNA, 516 bp, Homo sapiens
  SITE (443): n equals a,t,g, or c
  SITE (450): n equals a,t,g, or c
  SITE (467): n equals a,t,g, or c
  SITE (486): n equals a,t,g, or c
atctgagacccaagcctagtaaaataattgtaaacattcgcttgtgaaagaattctgtttcgtatccacagtagaggtcattttcctctttagggactttcttgatggtaaatgtacagcagttgatattatcatggctgtgaatagaaatgactgctgagaagcagcacggtgagaacaggttcacacttcctgccagtgctactgaagactttttgtacttgtccactctgctcctaccagaagtcaaaactatagggccaagtgcctcacttcattggagaactacatcttctcatagtactaaatgtaataaatatatctttagagatctgaagcaaaatgtgatgttggaatataaagctgtactcttaggcatkgcatagctgtattttctgtgtwaagtacagccagcaaaatttgtttgctaaaactaaattccnttactgnaaagggaaaactggaanaattttaaaccatgagttncataggaaagggatgggaccttggaaatct

SEQ ID NO: 204 - DNA, 348 bp, Homo sapiens
  SITE (327): n equals a,t,g, or c
cagagccagtctttctgcccaactctgtggttttggtcacccaggggaggcgtcaccttctccataaggcactcactgggtccgttccccaaccctgcttggttcttgcactgggctttgcagccaggaggagagagccctgtgctcagcgccctccccaggcacaccccgcccactccctgtgtgctggggcgtgaggatgcctgggcggttgtgtgcataacgatgttcttcttttctccctctccaatgctaacccgtcggaactaacagcaagcattcagaatgagcgtaagtgccctgtgtgcctctctgtgcctctggganttgggagggaggaatgaggca

SEQ ID NO: 205 - DNA, 78 bp, Homo sapiens
cacagctcctgcagatggcatggaacctgggcttgagtattgccactgattcttttttttttttccctaaatatcctg

SEQ ID NO: 206 - DNA, 465 bp, Homo sapiens
  SITE (219): n equals a,t,g, or c
aatttaattttcaacaagtcataccagtgcactgacactgctctgtcaagtatcactaatgatcagtcttcatcttaactgatcttgtatagtatttgataattattttctcatagtagtctaaatgttagtacgttatagattggttctagacataagctacttcttgctttgtaatattctcccccttcttgctttgtaatattctccccgtaagtntcagctatcacctattacgtcaagatgacaaatctttctccaaccaagagtctaataatcgctatcattttactggacagactcccaattctgtgctagaaatacctacagtcggataaaactgttcctctgaaaaaatccctcatactcccttgtcagcctatcccaaaccaccactgatgtcttgtccaatagttttgccttttccacaatgtcacagaaatgggaatcataagtagcctactg

SEQ ID NO: 207 - DNA, 456 bp, Homo sapiens
  SITE (446): n equals a,t,g, or c
ccagcccttccgccacggccgtctctggagagcagcagccatggccctacgctaccctatggccgtgggcctcaacaagggccacaaagtgaccaagaacgtgagcaagcccaggcacagccgacgccgcgggcgtctgaccaaacacaccaagttcgtgcgggacatgattcgggaggtgtgtggctttgccccgtacgagcggcgcgccatggagttactgaaggtctccaaggacaaacgggccctcaaatttatcaagaaaagggtggggacgcacatccgcgccaagaggaagcgggargagctgagcaacgtactggccgccatgaggaaagctgctgccaagaaagactgagcccctcccctgccctctccctgaataaagaacagttgacagaaaaaaaaaaaaaaagggcggccgcctaaarratccaagttacttnccctttcatg

SEQ ID NO: 208 - DNA, 426 bp, Homo sapiens
  SITE (404): n equals a,t,g, or c
cagagcagtgggaaaggaaaggagggatttgaaattgggagtaattgaatcaaacttgcattcgagatctgatggctgccaagtaaagaatgatcagaacagggtgagaaaaagactgagcctattgcaattgcctgggcaagagagagaggtgtcagctgaaacaatggcagtgaggtgaaaaggagggcgtagatcagagtgacactaaggaggcagaatctataagacttgatgatacagacttgaagatttgatgagggtgaggggcaaaagagagggaggaattcaggataataggaaattgagggcaagacgctgatctgtaggaaaatgtaagttaaaatgtgtccatcttcagatgagatgttcttggcatggccaggtggagatatccctcagtnaaagtctatatgtaacttcagg

SEQ ID NO: 209 - DNA, 317 bp, Homo sapiens
  SITE (283): n equals a,t,g, or c
  SITE (294): n equals a,t,g, or c
  SITE (311): n equals a,t,g, or c
atatatagacaggtgggacagagaactctctagatcttaccatgctaccatttagttcttacatatttgagtgtacaaccaattgtttaccaagaacttatgtccttcttctaatattcttgttttatatattcttcaattgcactcttattctagtgataatatattcgggtgatttgggaaagtgaggtgcatgtcctactgaaatagaattccaaattttgcacttaaatttgcacacatttcagaggaagaaagcatttatatttgccgagttcctaangggttttaggncccaattattaaggacnattttc

SEQ ID NO: 210 - DNA, 565 bp, Homo sapiens
  SITE (513): n equals a,t,g, or c
  SITE (532): n equals a,t,g, or c
cagcagagaaaggccttatgaatgcagcaaatgtggaatcttcttcacttacgccgctgacctcactcaacaccagaaagttcacaatagaggaaaaccgtatgagtgctgtgaatgtggaaaattcttcagccagcactccagccttgttaaacatcgcagggttcacaccggtgaaagccctcacgtgtgtggtgactgtgggaaattcttcagccgaagctccaacctyattcagcataagagggttcacactggtgaaaagccatatgagtgcagcgactgtgggaagttcttcagccagcgttccaacctcattcatcataagagggttcatacgggcagaagtgcccatgagtgcagtgaatgtgggaaatctttcaactgcaactccagcctaattaaacattggagagttcacactggagaaagaccttacaagtgtaacgaatgtggggaaattcttcagccacattgccagcctcattcaacatcagatagttcacactgggngagcggcctcacgggtgtngtgagtgtgggaaagccttcagccgaagctctg

SEQ ID NO: 211 - DNA, 262 bp, Homo sapiens
  SITE (216): n equals a,t,g, or c
  SITE (248): n equals a,t,g, or c
agcgcacctcgcagctgccgggcgggccctggggggagctgcgtccagcagagctgctgggtggttgctcctcccgggctctcatctccggtatccgggccgacccccgcaccccctacttcccttgccctcgctgctctctccttagaggcgactctttggggaagggccagcaatcccgccttccccggccccagtagtcacccactctcccancccacctctgttccttttcgcggccccgtctnccgcgccctcaggg

SEQ ID NO: 212 - DNA, 374 bp, Homo sapiens
gacagcaccaaggagctggtggccctccaagggcagcatccaccctgcagcgccaatgaggatctgctgcacctgctcacgctctccctggacctcttctacacggaagacgagatctatgagctttcttatgcccgggagccgcgttgtcccaagagcctgccaccctcccccttcaatgcacctctggtggtggagtgggcccctggtgtgacacccaagccggacagggtcacactgggtcggcatgtggagcagctggtggagtctgtgttcaagaattatgaaccctggaaggccgaggaacaatctctcaggaggactttgaagcgactctcgggcaattttcccttcgcctgccatgggcttcaccc

SEQ ID NO: 213 - DNA, 297 bp, Homo sapiens
  SITE (179): n equals a,t,g, or c
  SITE (279): n equals a,t,g, or c
agtagaaagcagggaaaggggctgagttctgggtgtgagttaatctgggatggagatacaggaagagccatgaaaccagcacagcccaataaagatacaacccaggtgcggatgtaatttttcatgatctagcagccatttaaaaaaagataaaaagggctgggggcggtggctcacgnctctgaatcccagcactttgggaggccgaggcgggcgtattgcctgaggtccaggagtttgtgaccagtctgggccaacatggtggaatcctgtcttctntttaaaattgccaagaaa

SEQ ID NO: 214 - DNA, 260 bp, Homo sapiens
  SITE (48): n equals a,t,g, or c
aattcggcacagaaggttctggcccccgttttctgtgggtaatacctnatactgcgaccaggcacaggggcggaggagaccccggggtgggagcctcatccttcgtgcgctcgcccaggctctcctgctttgctccctgctgcctgctgcccagtgtgactggtgatggtgggcgggtgagcgctgtcagtcgctgttcctgtgctggatgatggggcagggaaatgccctctctgcaatgttttgcagcagacctgcat

SEQ ID NO: 215 - DNA, 375 bp, Homo sapiens
  SITE (244): n equals a,t,g, or c
  SITE (372): n equals a,t,g, or c
aggatcacttagagcgtcgcccttcagccctgctgtgagtgtttttggtgctgaatccccttgtcttcacctcacccattcacggcgactagaaagactcgctgcaggacctttcagtaatgggagcagctgctccagaagggacgcgggactttctaggacacactttgcctgcatcacaagtgcacagtgacaggggattcattccacactccatctgacaatgtgaacacaatgggaaaangggaggcagtcagtgggtggaaaatgtttaatttttttaaattttatttttactctctggttcaccaagsttatttaactacaccattttgaaattcctttttagggaaaggttgttggttgttcctnccc

SEQ ID NO: 216 - DNA, 382 bp, Homo sapiens
  SITE (83): n equals a,t,g, or c
aattcggcacgagctcccatgacaggcctggcatgagctacctcgtccagcctagatacattcttgaatatgtaactttgggnagatttattaattgattaaggactaggaggtccagctaaaatgcaattggatttataaggtacttaaatccagatttaaggtatgaaatcaagaatggcgaagaaatcaatgaactgaggtcttaaagaatcaattcattttattgactagctgaatacaagggatgattgacacaagatgaaaattgagtgttaagaaagaataacaatgggcaagtatgaatgattaggrcataaaagggagcaaaagragratgtaagraaaaatgtaaatagctatttatcaaacctttttatat

SEQ ID NO: 217 - DNA, 560 bp, Homo sapiens
  SITE (535): n equals a,t,g, or c
tttttttttttttttttttttttttttttttttgaggaggggccacracatttattgaactctgaggagcacaragggggctccctggcgcgtytgtgctctccagccaccctggaaracsctcaggggaccccaaragccttcccagcacgcggmatytytgtgaaggcagggccyccagcaggctccgccctccaccccactcctggggtcaragccccaacatcctccatgaccctcctytcctggcgctccccatgggtggcaggaragccaccccccgattccagcacacaacctggggcaraaactcgagcccagacaacaatggctctraggggaaaccgagtcagcatggcagggctgtktgagaraggaggggtctcaggcaacakttctggacggttctggatggcagaggagaagggcggacgttggggctctgaccccaggagtggggtggagggcggactgctgggggccctgycttcacagagatgccgcgtgctgggaaggctcttggggtccctgagcntcttccagggtggctggagagcaca

SEQ ID NO: 218 - DNA, 331 bp, Homo sapiens
  SITE (251): n equals a,t,g, or c
  SITE (322): n equals a,t,g, or c
  SITE (324): n equals a,t,g, or c
aattcggcasaggacttgataaactactctgccagttttttattgaatacggacacaatcgctttgaaagagaaaatcaagtgatgacatcggaaacaggattattagagagctcctgactgagtaaagaaaaatctaaatgacaaatggccggtcgtgcaggtggagattgcgttctgtggttgcctgcgccatccctgagagcatccagagaaaacagggaaaaatgtccactgcaaccttccacccgncgsctgaatgtgagggctgcagcacgtgttcacctgctgctgtggagacagatttgaggccggacacctgngnattttcc

SEQ ID NO: 219 - DNA, 339 bp, Homo sapiens
  SITE (310): n equals a,t,g, or c
  SITE (336): n equals a,t,g, or c
agctctcatagtgctgggattacagacataaactactgcacccagctaagattatatcatatttttactgcatcttttctgtgtatagatatgtttagatacacaaatccttcccattaggttactgttgtctatggtattccctatagtaacaagctgtacaggtttggagcctaggggcaataggctgtaccatttattaatagcctaggtgtgtagttggctataccatctaggtttgtgtgagtacactctctggatgtttgcataatgaccaactcacctcatgacacatttktscaaatgtatnccccttcattaagtggtggcatgtgngtg

SEQ ID NO: 220 - DNA, 330 bp, Homo sapiens
  SITE (272): n equals a,t,g, or c
  SITE (328): n equals a,t,g, or c
  SITE (329): n equals a,t,g, or c
aattcggcacgaggtctgtgtggcccataagatattgtgaaaaattttaattaaaaaaatatattgtgaaaatgccagtacgtggcttcagaggctagatcataaagggcacagtggcttctaccttgcactcctggrtccctacctgtggggacatcgcactgccatgcatatcatgagaacactcgagcagccctctggagaggcccatatagacaagaaccaaggcctcttgccaacagccagcccaggggaaatcacgtgagtagggncaccttgggaagagatcccacagctcttcagtattcacgtgacctcagccttggtnnt

SEQ ID NO: 221 - DNA, 304 bp, Homo sapiens
  SITE (205): n equals a,t,g, or c
  SITE (264): n equals a,t,g, or c
  SITE (273): n equals a,t,g, or c
tcgcttgaacccgggaagcggaggttgcagtgagccgagatcgcgccattgcactccagcctgagcaacaagagtgaaaccccgtcctcccccacccccaaaaaaagaagctggagttcttggatggaaaactccagaggacattgggcaactgggaggaagctaaaaaggggggaaagggaaaaaaaaagatgggggtcttggntggaaaactccagaggacattgggcaactgggaggaagttaaaaatggggtgaaagggntcccaaatnaaatgggtatgacacatggtcagtgtaggct

SEQ ID NO: 222 - DNA, 317 bp, Homo sapiens
aggataaaaggcttcacggtacagaccatgatgtgctgagaaagaagaagtcaggaaaccctctgcagtcaggatccaggagaagaatttgtaaaaactgctttggtaaagtaaacaccaaagcacacaggmggaagtattttactcaacaaatattatactaagatattaacagtttttgaagtaatgcactttcttmttttatagagatgcagatagatctttgagcatacctgrtgaacattacactcatttgcggtaagtggcacttttattgaggttgtattttcatcgtacacttgtatctgtttccatgc

SEQ ID NO: 223 - DNA, 357 bp, Homo sapiens
  SITE (150): n equals a,t,g, or c
  SITE (353): n equals a,t,g, or c
ggacaagttcagcaatcagtaaatattaatcagtgagtgaatgaattccgtttaacacccctatgaagttggtactgtcatttcctccagttcacaaagaataaagggaaacacagagaggctgcgtgacttgctggtcacacascstgnagtgaacggagccggatttgacccaacccagagcagggctccgcacgtggtgggggcttaggaaactcagtctggcgggttcacacacaggcctcaggctctgctctgcttccaaaattccgctgagtccaagaggtgggatgatccagggcacagcctctgttcagagttgctgcagaaacattgggcgcaaactttgaggntgaa

SEQ ID NO: 224 - DNA, 622 bp, Homo sapiens
ggcacgagatttaaccaaaacaaggacgcctttctctcattactcttctaccaccttcccatgttcctcacaacccgtgagtcagggtcggctcagctctatgcactttaactatgagagacaggagcccgcctcccctcctgaggtgctgtagctggsaaattgcttgtgcacccgatgacaacttttgtatatttagcagaaaaagtggtggcaaggatctgtccagctcaattttttttacagtttcaatgttcgaaatctctcagacaatctcctgaaaggcacattggccttgacagtatctgagcggaaggaaattttccccatctcacagggctgtccactggaagccgggacgtggagatccactgtagagcagagacttgacatgccaaacgctcctcccacaccttgctctacaccccacgaaacggggagacactggtcccgttgaagcttcgatggcttttaagtgttattctaagaagggaaaataagcatgaaagattcaagggggaaatggactatctcttaattgtttatgcctttaattgacatgtatggcgcttggtttttatttcttttcaatgtggcatgcaaaaaaaaaaaaagtcgacgc

SEQ ID NO: 225 - DNA, 310 bp, Homo sapiens
  SITE (267): n equals a,t,g, or c
  SITE (275): n equals a,t,g, or c
  SITE (305): n equals a,t,g, or c
gtatcacatttaaggaagacactttggaaaaaagtctaacaaacaacagaagaaccagaagacagaagaaataaagtgagcaatgaactcaaactgtggtgtgtgttctttccccgcttgtccccttctcttcctcagcagattttaccattgtgggaaaagtgttcatttcattgactgacaccccaggcggaaaaggaaaaggaaaaggaaaaaaatctcaaattgattgttttaacctcaatggttcataaggaatgtgggacntttctttngggaattcagagttttgtattataatttantactg

SEQ ID NO: 226 - DNA, 271 bp, Homo sapiens
  SITE (238): n equals a,t,g, or c
  SITE (243): n equals a,t,g, or c
caagatctaaccacatactgtctgtagaaacccacttttaaagatacagatatgttggaaaaaaagatagatggaaaaagtaatattagcagtaatcaaaaggaaaccaaaatgactatattaatatcaaccaagtaggtatcagagtgtttcacccaccaacagagtagrcattcttttcagctatacacggaatatcaccaggacatgctatatttaatgtcataaaatcaatctncaatnttaattttaaaaggttaaactcatataa

SEQ ID NO: 227 - DNA, 294 bp, Homo sapiens
  SITE (253): n equals a,t,g, or c
agcgaaaggcacagcccctgttgaacaatgctcccctgctgttacattctttccagattctgggaaactccttccaggttacctaggaaacataggtaatggcttccgactgttgctagttcctgggcgatctcatcatcctttactaatttcccttaatcccacgcatctttgtagatagtcaattttttgacctcagctcagttttccctctcacaggtaccactagtctcccactggaaccctgactggngctgttgtttctagttcagatgtccaggtttccacatggaa

SEQ ID NO: 228 - DNA, 203 bp, Homo sapiens
  SITE (162): n equals a,t,g, or c
  SITE (174): n equals a,t,g, or c
cccggcgtatttagagaatggtgagagcactgggaacccgggtgggcagtggcgggagaagcagctggaaggaagaggctgagaagtagatcctggaggcccatgaacccccctgctgggaagctgcgaactttkcccagctgcctcagcagtcgccttccnttcacctttggnactctgggttcctcaggacgtcctcccgt

SEQ ID NO: 229 - DNA, 244 bp, Homo sapiens
  SITE (124): n equals a,t,g, or c
  SITE (216): n equals a,t,g, or c
aaaaatcttccctccgctcccctcctctccttccatgtttttattgagaagaaaaataagaaaaaaagtgctgggttggggccaggcgtggtggctcatgcctataaatgccaacacgttgggnaggccgaggcagccggatcacaaggtcaggggttcaaaaccagccagcctggcccaacattgtgaacccaatctctactaaaaatacaaaanttagccaggtgaggtggcacatgcctgt

SEQ ID NO: 230 - DNA, 308 bp, Homo sapiens
  SITE (283): n equals a,t,g, or c
  SITE (290): n equals a,t,g, or c
  SITE (294): n equals a,t,g, or c
ggcacgagcctgggctcagaaatcagtcatggcacccggcacctgcgtgccctcaccaaattcaacctgtcctccccagctccattgtcagccactctccctcccactgccctgaagatggaaatgtacccaaccttcaagcccctgtsggtccagctcgcgaatttccggctgaagattcattatcagatggatgagatgttcatctccacttacacagcctacggcttgtgtgtggagaaagatgttgagccaacaaaatggtctgcaacacaaaattgtnactactncctnttcactctttattg

SEQ ID NO: 231 - DNA, 310 bp, Homo sapiens
  SITE (285): n equals a,t,g, or c
  SITE (306): n equals a,t,g, or c
aagaaatgggatatcccaaaattgcaacaggataagcaacccttttaaaaaaaattgatggttagatttttttcagatgccacccatttatctaaaacttcaattttaagtcagagaattatcaattaataaaaattgatttatatttactaggtataaggcaccacacaggatgctgttggggacttgtaggtaaatgagatatggatatttttccagttactacagcagaggacctcagtgtccagcgtggaagtgaccagagacagagtgggatggggaggnggtcacagcagtggccaggtnccag

SEQ ID NO: 232 - DNA, 334 bp, Homo sapiens
  SITE (147): n equals a,t,g, or c
  SITE (231): n equals a,t,g, or c
tcctggcactgatcccccagagctgcctgaggcttcccacaggcagccaggcagcctccgccatgcggccccgtccctttcacggcccctgggcggagatgtgttcatttcagtggaattacggtggcagatgggaccctgcatttnaagctggggaagcaggaaaggggcccagtgttcccaggactgtttaccgtgtggccagtgtttttattcagtcccttgtctgtnaaaactgtcctgaatggggtgacaaagtgcaggggggaagttgagaaatgcttcaaaagaccaagcttggggcaattttttttccagagcagtgacccagttc

SEQ ID NO: 233 - DNA, 118 bp, Homo sapiens
  SITE (38): n equals a,t,g, or c
agttggaggcttaaaacagtagattagatatgtaagtnaatctctcttacttcctaaaactatactaagacatcaggaaaaaggttttttgggttgttttttttttaaatgcataaat

SEQ ID NO: 234 - DNA, 212 bp, Homo sapiens
  SITE (152): n equals a,t,g, or c
agggaagaatctcaaaacatgaagacaggtcttttaaaataattttaaaataagacaaaaataattaaaaagaatgaataaagcctttgagatgtctgggactacataaaatgagcaaatttatgattgatcagtactcccaagggtgaggnggtatcaaaaagtataggaaaatctgtttaggaaattaattgatgacaacttcccagtct

SEQ ID NO: 235 - DNA, 110 bp, Homo sapiens
aagtggtggtgaggcctgggcaggctgctggtggtctaccttggacccaaggttctttagtccttggggatctgtccactcctatgtgttatgggcacctargtgaggtc

SEQ ID NO: 236 - DNA, 291 bp, Homo sapiens
  SITE (239): n equals a,t,g, or c
aggaaaaatgccaactcatgtcttttgcgtctatagctcttgctctaaccatagtgttattttctgtccagggtcttaaaaatgaaaagaatcttctattcatcgtctgagtaactttcacttacttgttgacttttttccttttgcttctgaaaacaagttttgtggracccttcactacacttcagtaaatttactaaagaataaagaatatgggartagaggacttaagtttgttnccgatatttttcagtaaacgggaagtaaggggtttataaactattatttacc

SEQ ID NO: 237 - DNA, 112 bp, Homo sapiens
  SITE (106): n equals a,t,g, or c
ggcagagtcaaaacttgccaaattgtgtaatatgcacattgtatatcagttatacctgaataaagctgtttttttttaaaaaaaaaaaaaaaaaaaaaaaaaaaanggaaat

SEQ ID NO: 238 - DNA, 358 bp, Homo sapiens
  SITE (328): n equals a,t,g, or c
  SITE (336): n equals a,t,g, or c
  SITE (342): n equals a,t,g, or c
aagcaacagtggaaagcagtaagaactaattacagatatcagctgctacctactgtatgtggaacagatttcaaatttcaagaccaagcaagataattgtctacttggaactaaaaaaataaaaataaaaatttaatgctcaaaagaacgaaacagagtaactgcaatgtattatctacactattgagttttcaaaaattactagacagaaaagtatgacctatacttgtgggggwggtgctgagggaggaagccattagaaactgactttaaatgggtcgatctgttagatttagcagacagagactttcaagtcagctattatatnatatgttncaaggnattaaaatctgttttt

SEQ ID NO: 239 - DNA, 340 bp, Homo sapiens
  SITE (255): n equals a,t,g, or c
  SITE (309): n equals a,t,g, or c
  SITE (324): n equals a,t,g, or c
acgcttggcgattacattcgccaacggcgcctgttactggccgccgttgagttgcgcaccaccgagcgtccgatttttgatatcgcaatggacctgggttatgtytcgcagcagaccttctcccgckttttccgtcggcagtttgatcgcactcccagcgattatcgccaccgcctgtaaattttattgcccgcgcgttaactcccgcgcgggtaattgctccatccattgcataaacacctgcggcggcatcgncttcgcaaagaaccatccctggcaatagcgcacgccgcgtttgcgcagcagttnaacctggttcctcanttttggacggcttcag

SEQ ID NO: 240 - DNA, 350 bp, Homo sapiens
  SITE (20): n equals a,t,g, or c
agtagtcatgtggtggaacnataaactgttacaatgggaggagttttttttttaaacctcttaaaagttgatgtatatatatccttaccactaagcatatcttttcaattaggcatgtggcaattcctttcttgatgtttttagggaaaatgagccaaataatattttaaaaaatgtataagccaagctagtttctatcctttcttctattaaactcaggatcacacaagtaggcatgagtgtgcacaaatatttatgccttgcattgttctgagaattagtaaaagaatatcttgaaagcatgatataactttgtatttgtatccaaaaatatacaaagttgttgaatt

SEQ ID NO: 241 - DNA, 302 bp, Homo sapiens
  SITE (285): n equals a,t,g, or c
ctttggagttcatttcaaaagcccagtcatatgtatgttaaagaggttcacatatcactggctcatagaaagaargccagtttcctgtgtgcttttcaagactgccggaggcactcccagctaacctaaagtcatttctcccactactccctatggacccttccgctgacacccggtcacccagatgctgtcttgctcctgraacacgctatgtggcaggtcacctgaggagtctatttctgttagcctggaagatggtctkaaaaaggttttaaaccccaggtntggcctgtggacccagt

SEQ ID NO: 242 - DNA, 349 bp, Homo sapiens
  SITE (302): n equals a,t,g, or c
  SITE (313): n equals a,t,g, or c
ggcagaggggcaaatcttctcaacctacttgggctttcatttccttgtctgtaaaatgaggtatttagttcctcttggagttttttgcaagggtgaagtgagatgacgttagtaaattaccagccattgttagtcacttaatactgggagctacaattattatttttattcataagctgaggtaaaatatccttccattagatttacaagacaagcatcgaaaattaaaataatggattttacaagccctagaacttgtcctgtgttatagttgttcagatgaatctgtatgacttgtttgncctgttaaaanttcatgagctgaaatccacatatcagaacctgtgga

SEQ ID NO: 243 - DNA, 579 bp, Homo sapiens
  SITE (474): n equals a,t,g, or c
  SITE (579): n equals a,t,g, or c
aatgcagcttctgtcctttcttgggatgtctaaaacatgacaaacagggtgatctgttgtacacactatcttatgagggagatggtgacttctccttttttctgtggatcagtgctattgtgtgttctcagtttaagatagcagatcatctcagcagtaagcacaccaacagaactgagttccagaaaggaagcagtttctggtgctttgcatatgtccaaatccatgcaagtgggagaaagttccagtgcacacttcccatgcttctgagtctaggcgttgtggtgaatatgcaggaatcattcatgagacagaatgtattttgttgtatgacagaaggcttttccaagcaaactgcggtgagcgtagtgttgaatatgttgcatgtccatgttaggaaaacagaatccagtcatcagctaatacaaatgrtttcccagagcagtgtttgtttcaagcttctgtycaaatagntttgggcttttctkgcagggtctctgtggwtttccccaccyatggtacttttcygtgtttaacycacttwtttgggtataactcgggaacggtctcgggtggggn

SEQ ID NO: 244 - DNA, 237 bp, Homo sapiens
ggcacgaggttgttttctttgataagcagctatttatgattctggaagattaaggcagataggaaaccccatctgagattttaataaatccctcaaacaataaaccacatcatggacatacagctggaccctgccagagatgacctgcctctcatggccaacaccagccacatacttgtgaagcactatgtactggatttggatgtggattttgaaagtcaagtcattgaggggacc

SEQ ID NO: 245 - DNA, 546 bp, Homo sapiens
  SITE (397): n equals a,t,g, or c
  SITE (473): n equals a,t,g, or c
  SITE (475): n equals a,t,g, or c
  SITE (501): n equals a,t,g, or c
  SITE (540): n equals a,t,g, or c
ggcacgaggtcaccttacatggtttattaaaaagcaattaagcatgctgagacagagagattatcgtggattatctgggtgggccctaatgcagtcatgtatgtaacttataaaacagaggagagggagattgacgcacacaagagaaatccaggtgaggacggaggcagccatgggaacgatgcacccacagcccagggatgctggcagccctcaccagaggctggaagaggctcctccagagcctgtgctggacttcaggccagtggaactgatttcagacttctggcctccaagactgagagagcagatttctgttgtttaagccacccaccccgtttgtaattactttcttacagcggccaccgaacaccatgccagtagccaggatggggcngtgggttctggctgcagcttccagggacaccagtggagagaaggaagccacgcatggagagcgggccaggtcaaantncttaaagaaatggaatcggatcatcntctgttctcaacgtggtcattcaaatttgagcacacggnattttc

SEQ ID NO: 246 - DNA, 346 bp, Homo sapiens
attaccgctgagacccagagactggctgttcccagagaatggcccagggggaggagggctggtgtggaggggcaacctggactgaggccgaactcccttgggctcaccccacccacccctacctgagcatcagcagtggggggagggcagcatcgcaggggcagggactccctgggtgaggacagaccagccctcccgagcacctggcactcatgggctgaggctgacttctcctggaagaaggcccagagtggaaggaagaggcagaggtwaragtggtggctgggggctctctgcagatggggtggccatggararggytgcattcacaacgcaacawagattt

SEQ ID NO: 247 - DNA, 325 bp, Homo sapiens
  SITE (297): n equals a,t,g, or c
  SITE (317): n equals a,t,g, or c
ggcacgaggagcaagtaattttagcttttttagagccttgtgggtccatttcaagttagtttagtgcctaatgtgttaatagcacagtctctgcatgaggattgcaatgttaagcatatccttgccctctgcttgacctcacacctgaactcaccttccttaatatctcacccatccatcgcttttgctacagctgagatctctggatcctctcatctttcccagtttttccctcaccggtttgtcacctggcctgcctgcctcctctagtcttggcctcttcttgcccacccttgnattcaattgccagagttgantttcaagt

SEQ ID NO: 248 - DNA, 328 bp, Homo sapiens
ggagttgggggcaaaggagggtgcgcaggaagatgggatggggacgccccacttaagttgtgtagatctctcctacacttcttcaagctcggtcggcctccccgcccctgcgggctcccgcgcccagctcggccctgggggtccgagaaccctggcttcggggactggcattttcaccccattaaaaaatcctcatggttggggggaggccatctgcttatgggtggacatgggcacaggggcttctcagatgagctaggagccgtcctgagggggtgaccggtgccttgggtccagagttccggacccccaggaaatcgcaggtcgc

SEQ ID NO: 249 - DNA, 475 bp, Homo sapiens
  SITE (404): n equals a,t,g, or c
  SITE (419): n equals a,t,g, or c
  SITE (446): n equals a,t,g, or c
  SITE (464): n equals a,t,g, or c
cacgagtgccgctaaccttcttcatcctttggtggcaaagtagaaagattccagaattaactcgacctttctaaagacctgggctcagaggcagctggcactgactgagcacccactatgtgccaggcactgtgctgaatgcattagatcatcaattatgaatttgacaccaaggacctggtgtgcctgggcctgagcagcatcgttggcgtctggtacctgctgaggaagcactggrttgccaacaacctttttggcctggccttctcccttaatggagtagagctcctgcacctcaacaatgtcagcactggctgcatcctgctgggcggactcttcatctacgatgtcttctgggtatttggcaccaatgtgatggtgacagtggccaagtccttcgaggnaccaataaaattggngtttccccaaggatctgctggagaaangcctcgaagcaaacaacntttgccaagct

SEQ ID NO: 250 - DNA, 515 bp, Homo sapiens
  SITE (445): n equals a,t,g, or c
  SITE (462): n equals a,t,g, or c
  SITE (492): n equals a,t,g, or c
  SITE (510): n equals a,t,g, or c
ggcacagtacaagtaggcttctaaataaaatttttaaaaagagcaaacggtgatcaagtgacttttaatacaatatgatgactaaattattgctaatttgttttaatccccccttttgtggggataggatagctgcaaaggatggcaaaggcttgaaaggattcaacagtgagaatccctgaagtatgctttgcttggtgccttatattcattcttctcgaatcctctatgagaaccttagtggacgttagccagattttatacakgaagagctgaggctcagagaggttgaaagtctccaaaagctgcggagtaagagtggtagccgactcttactttaagagtaaaagcacaagtttgaatctgtatctccgtggtacctttaaatagaactctaatagcacttcacttctaaatggccaggaatataatccactgcttgaanccggtatgagtatgtanccctttgttaagagtagcaccacaaaaaancctactaataaccatatncggaa

SEQ ID NO: 251 - DNA, 170 bp, Homo sapiens
  SITE (157): n equals a,t,g, or c
cagcccggatcccgaccgcccccgccgctgaggttcctgcgtgaagaccagctgggagcccactgcctgctgccacctccaactccggccccctcaccatgcactccctggacgagccgctcgacctgaagctgagtatcaccaagctccgggcggncaagagagaagcg

SEQ ID NO: 252 - DNA, 313 bp, Homo sapiens
  SITE (294): n equals a,t,g, or c
ggctgtggctgggcctggccaaggcgggcatggaggccgcgctgctcaacgtgaacctgcggcgcgagccctggccttctgcctgggcacctcgggcgctaaggccctgatctttggaggagaaatggtggcggcggtggccgaagtgagcgggcatctggggaaaagtttgatcaagttctgctctggagacttggggcccgagggcatcttgccggacacccacctcctggacccgctgctgaaggargcctctaattgccccctttggcacagatccccagcaagggcatngacgatcgtctttttctaa

SEQ ID NO: 253 - DNA, 240 bp, Homo sapiens
tatctgacattgtgtaatacatattcagccatgcattaattaaaatgttacgtgtttaatgtgagtccctatctgaaaataaataatccttccggattaaaataaattcttgccgggaaagaaagaggaaataaaccattagcggaaaaccagcggcacccagggtgacatgccccagtacggcggcccgatagtccagggttcagcgggggggcccggtacccaattcgccctataggt

SEQ ID NO: 254 - DNA, 350 bp, Homo sapiens
  SITE (137): n equals a,t,g, or c
ggtccatgccctttaatcacttctcatagctgaaggctgccgaaagctggatccctcctgattcctttgtttgggattgggcttcccacatctagcctatcacttattattttcccgaagcgtggagggggaggctngcggggtcaccgatcctcgcagaagcccgggactcagaacccttagccgtccctctccactcttctcggcagtggttaacagtgcagtctctgccgtcgggtagaactcgactgaaatcctgactccttcctttaggagctggattacctttgagaacagccccagcccaggtgggaaggaggscagaaattgggcagctgtggtggattctc

SEQ ID NO: 255 - DNA, 371 bp, Homo sapiens
  SITE (339): n equals a,t,g, or c
  SITE (353): n equals a,t,g, or c
tttccattgctgtgactcgattcacgaatcctgtattcagtgctgacaaaatagccgccagcaagcagtcatttactgcaatctcataacaggtagtgaatatgatcaccattcgtgatgtagcgcgtcaggctggcgtctctgtggcaacggtttcccgggtgctcaataacagcacgcggtcagtgccgacacgcgtgaagcagtaatgaaagccgtgagtgagctggattatcggccaaacgccaatgcccaggcgctggrcaactccaggttagcgacaccattggcgtggtggtgatggacgttttctgatgcgttttttcggcgcgctgggtnaaaagcggttgganctggttcgctccaccagc

SEQ ID NO: 256 - DNA, 286 bp, Homo sapiens
  SITE (155): n equals a,t,g, or c
ggcgcgtctgaatatggtcccgggtgcagattcgcacagtctcgggttctgctcacatgctgacgaccgcgctcttcccacccggccgcgccatagcagcctccgtcactcttcaccgacctcgactgcccaagccccgcgcgtccagccggcancaccgccgcgcgcgctctcttagtcgcgcatgacgacggtcactcgcagtcgccagaatacacagatcagagcgcatcaacgcaatcaactgagttagctctagttactgtcagtttatatttgacggaga

SEQ ID NO: 257 - DNA, 360 bp, Homo sapiens
cggcacgaggtgagccaccgtgcccagcaagttttttttaaataccattttttttgtttttctgaactgaacattcaactaaaggacaaattaaagggggtacttttctcctcttctgtttcttcttttttgaaataaagaataagcttttccaaagctagaattgtttctagcacctattccaacccagtacattatcattgatctgaaatgtgatgattattggaatgcataaacattggacgtattttggaatgtattaaaactgaaatggataaaaattagtatatawgtttattttgttctatctcctttggttgtatttttctctgcagtattaaacatttggaagagaaaaaa

SEQ ID NO: 258 - DNA, 326 bp, Homo sapiens
  SITE (223): n equals a,t,g, or c
caagaccctgtctcaaaagaaaagaaaacgattactgaaaccatattcgttattggcatttgctttcctccccctattcttgtacccaatgtgagccatagatctaatacaaaatttcctcgtagccacacttgaaaaagcaagtggaaacaggttatttgagtactaatgtcttttatttaatcaaatatttgtaaaagtgagttgggaatggtggtatgtncctatagtcccagctacttggaaggccaaggcaagaggaggcccggtacccaattcgccctatagtgagtcgtattacaattcactggccgtcgttttacaag

SEQ ID NO: 259 - DNA, 254 bp, Homo sapiens
gtatcatatttctacatttatttcacttcatttccttttcagtgctgtccacaatgacaatttcaaccaggctttacttatgctaaaatactgtgcgcgggtggsractcagcccacaccaggtaacatgcctcagcccagcccccattggacagctgagccctctggccccctctctctggacgtgctgctctcatctcacactcaacatacctccatctgatgacatcctcccacctctagcttccactact

SEQ ID NO: 260 - DNA, 314 bp, Homo sapiens
  SITE (272): n equals a,t,g, or c
  SITE (305): n equals a,t,g, or c
  SITE (308): n equals a,t,g, or c
ctaacccacccaagatgacacagtaaggtaaaaccacagtagagcccaggcctgtttgactctgaagtccaggctcctttccaacttagtgccctaaakgcctgattggggtgggggtargcaggaagattcaagcactgattgtttgtagcccaggctgggagggcaacagctctagaaaaaaagtcactcactgctttaaccatcttccagctaactgcaatgaggtgtacagggccatggggctctgggatgaactcttccacctctanaccttgtgaaacaaggattcccagacacacccnccnaatggg

SEQ ID NO: 261 - DNA, 484 bp, Homo sapiens
  SITE (478): n equals a,t,g, or c
  SITE (484): n equals a,t,g, or c
cgctgtacaaactggcaggcgaactaacaccgtttgtcctgcatgtagcggcacgtaccgttgccacacatgcactctctatttttggcgatcattccgacgttatggcggtgcgccagacgggttgcgcgatgttgtgtgcagcaaacgtccaggaagcgcaagactttgctctcatttcgcaaatcgcgacgctgaaaagccgcgtgccatttattcatttctttgatggtttccgcacgtcccacgaaatcaataaaattgtcccgctggccgatgacacgattcttgatctcatgccgcaggtcgaaattgatgctcatcgcgcccgggcactcaacccggaacatccggtgatccgcggtacgtccgccaatcctgacacttatttccagtctcgcgaagccaccaacccatggtacaacgcgtctatgaccatgttgaacargcsawgaatgawttctctgscgcgamaggncgtcan

SEQ ID NO: 262 - DNA, 525 bp, Homo sapiens
gtcagcattgagccaatagtggtggatgagggagtaagttaccatcagcgtctctgcctgcagtaattatgcacggcggcggctgtcctgttgctgtgccagggtatttgcagaagcttcatgattccagaggaacaatgtcacactttgtagaagtgccacacttagcttggcccagtgaattgagtcgttagcgtagccagctgtctcctgtaatggagtgggaacactggaagggggctgtcttctgtgatggaatggggacactggaagaggcactttcttttgctgctcagctgcactttctgctcacttcttggatcatgcctctacacctgctgatgactgagctgtgccccatttgccgatacaccagcacctytagaccccaagggcggcccttctggtggttggaatctgggttctgacattaaamacttgagaaagtctaagacaccccttggctacaacaagagwtgcatggaataattccaccaaggagggggacaaatatgggttgccata

SEQ ID NO: 263 - DNA, 706 bp, Homo sapiens
  SITE (668): n equals a,t,g, or c
gctgcacgtgggtgtgggagagcgccacttggttatgatgaaatcgctgccatgcggcagaccccccaaaatccctcagtgtcttcctgatctagcaaatagtcacagctggtgtttcacaattaggtggagtgcggggagtgggctaggggggacacctgtgatacaaggttagctgctgtacctactcagggaacagcaaccatgtatatccattcggctggacttttgattgttcaataactgaggaggtatttatatttatttgtcttttattctaatatttttaccatgcattgaacgcaacaggagggtatttcagcaaattcacgacaaggtaatcgtcttatcactttttgtaggccattaatggtcaggaaattgcccatactctgtcattattgkttaataaatcattaaattatttcattaaaaaagaaaaacaggtatggtcaaacgaggaagcatatgtgacataaaaaacatgaaggatatcttattttcactatttgagaagaatatattttatttttagtactgkggcataatatataactttttataataataactgkatgcattatgtagtataagcttttaattgkatcattcatcacagktatatgtaaaaataaattgacatggatatgccataccattggaagccntaatgatgttgggcacttttttccttccaatttttcaa

SEQ ID NO: 264 - DNA, 450 bp, Homo sapiens
  SITE (408): n equals a,t,g, or c
ggcaggaccggcgacccggcccgtggagccggcgcgggcgggctgctgaggtggctgtcgccggctccgagctgcggcttcccgggccgagcccccgatggaggccgaggccgcggacgctcccccgggcggkgttgagtcggsgctmagctgcttctctttcaaccaggactgcacatgaaatcccggacgtctacatcgtggagcgcctcttctccagcagcctggtggtggtagtcagtcacacaaaaccacggcagatgaacgtgtatcacttcaagaaaggcacagagatctgtaattacagctactccagcaacatcttgccataaggctgaaccggcaaaggctgctggtttgcctagaagagtccatttatattcacacattaaagacatgaagctggtnaagacccttctggatattcctgcaaacccacaggctatgtgc

SEQ ID NO: 265 - DNA, 469 bp, Homo sapiens
  SITE (387): n equals a,t,g, or c
  SITE (442): n equals a,t,g, or c
  SITE (455): n equals a,t,g, or c
  SITE (458): n equals a,t,g, or c
gctcgtgccgcaccactgctgctctcattctagaactgcactatccagtagaggagcctgtagcctcatgtggatatttaaacttaaattaattaaggttaaataaaatttaaaatttagttcttcagtcacactagcaacatttcagatgctccacaggcacatgtggctaggggctagtatattggttggcacaaatatagaatacttccactctcacagaaagttctattgatagtactgctctggactaaaaataatattgattcaaaccaatgagccactcaacacttttatttttggcataagagcatgaatttttacttcataagggacatttaaaaaaaatatggagtgggttggcatggtggctcacacctgtaattncagcactttgggaggcccaggcaggcggatcacctgagggtgggagttcgagacnaggctggcaacgnggngaaacttctct

SEQ ID NO: 266 - DNA, 544 bp, Homo sapiens
  SITE (345): n equals a,t,g, or c
  SITE (451): n equals a,t,g, or c
  SITE (460): n equals a,t,g, or c
  SITE (499): n equals a,t,g, or c
  SITE (512): n equals a,t,g, or c
ggtgattctctagcctcggcctcccaaagtgctgggactacaggcgtgcgtcaccacacctggcccatgcaaaaatagcaaaacttcaaagacgtattaaaacagtattattatttcaaaggaattgtttgaaaccaaacatgttatccagtaatggagcctctaaggttgcaaattcagaggctatgattttggataagaatcttgagtcagttaatagtccaattgaaaagtcttctgtgaattatgagccttctaacccttccgaaaaaggaagtaaaaaaattaatttgtcatcagatcaaaataagtctgtttctgaaagtaacaatgatgatgttatgntgatttctgtggaaagtcctaatttgacaactccaattacatcaaatccaacagataccagaaaaattacatcaggaaattctagcaattctcccaatgctgaagntatggctgnacagaagaaacttggatctataattgattgacaaagaangcctatccactgnaatacagaaaggccaggatccccctggagcca

SEQ ID NO: 267 - DNA, 108 bp, Homo sapiens
  SITE (97): n equals a,t,g, or c
ctttacctgccgcccatgcggatgagcagctgagtaatattgccgttaaacttacggtcacaattccctttgttatgcaaaaccacaaataaaccgngataatcatca

SEQ ID NO: 268 - DNA, 323 bp, Homo sapiens
  SITE (260): n equals a,t,g, or c
gcacccgcgggaggagacagaggaagccggttccaggcggtgcaggagcaagtcacagggtttatgttaatgcgggccctccccgcgccggcggcttagcctatgagccggggccctggcagacagcttaattaccgctgcagcgcgcctcagcttgtgttccttggctccctaaaataataaggatggcgtcaccgacttccccgggccatgtgctccccgcctgccttcagagctctatagtaggaaacaaacaacanaaaaaatcagagacgtggatgcttttttcttggggagatttttttgtttgttttaaagtaata

SEQ ID NO: 269 - DNA, 625 bp, Homo sapiens
gagttgcctggtccgcttcctccccgcggaaatgcacaattttgaggaagagttaacttgtcccatatgttatagtatttttgaagatcctcgtgtactgccatgctctcatacattttgtagaaattgtttggaaaacattcttcaggcatctggtaacttttatatatggagacctttacgaattccactcaagtgccctaattgcagaagtattactgaaattgctccaactggcattgaatctttacctgttaattttgcactaagggctattattgaaaagtaccagcaagaagaccatccagatattgtcacctgccctgaacattacaggcaaccattaaatgtttactgtctattagataaaaaattagtttgtggtcattgccttaccataggtcaacatcatggtcatcctatagatgaccttcaaagtgcctatttgaaagaaaaggacactcctcaaaaactgcttgaacagttgactgacacacactggacagatcttacccatcttattgaaaagctgaaagaacaaaaatctcattctgagaaaatgatccaaggcgataaggaagctgttctccagtattttaaggagcttaatgatacattagaacag

SEQ ID NO: 270 - DNA, 385 bp, Homo sapiens
  SITE (351): n equals a,t,g, or c
  SITE (359): n equals a,t,g, or c
aaatttaactgttgttaactttatgccatatgtgtttcaagactatatgtacaatttagaaataaaatgttatagttcagtcctgcttcaaatctctcttttgccttatttgcttttctcctttttcacaggtaaccactattctaaccactattgtatgtgccctttacatctacatttttaaactttgcataatatcgttatggggaatatcattaaaacaatgcataatattgtttggtatgtactaaaaatatacataaattatatttcattggctatatttatttacgaatggaatttttctactggattwaatatawttttggaggatttatccawgtgggrtangtttaacntggatggcaacacctttaggaaaatt

SEQ ID NO: 271 - DNA, 285 bp, Homo sapiens
atactttaggtgcactatagaaggtcgcctgcmggtaccggtccggaattcgcggccggtcgacgtaaaataattacatattatatataaaatatttctytttttgagggcagctactgagtgataaaagcatagtagaaatcactttggttaaaagtaactcaaatttttctcttaagtaatctaccaacttcctgatgtttttctttaatawtttggaactgttcaagacaraatggagcctacatatatggtgttccactagtatgttgaaaatgtcatatc

SEQ ID NO: 272 - DNA, 243 bp, Homo sapiens
  SITE (179): n equals a,t,g, or c
acatcaaggtcaacataggcatcatttccagcagagacaggagattctttactcatcagctcttgaatggctgtcatgacaacatgttgaacagattcctccatcatcataatggcttggatgtactcttgcttctgttcacagttcacagcacagcctaagatgagctgaagcatccntccaagctctgctgcatcagaatgctccccaataaggttcacatcaggaagggtgaaagtcatt

SEQ ID NO: 273 - DNA, 335 bp, Homo sapiens
  SITE (217): n equals a,t,g, or c
  SITE (328): n equals a,t,g, or c
atatttaggtgcactatagacggtcgcctgcaggtccggtccggcattcgcggcggtcgaccttctccagcttcaggaagctcatcagcttagggatgaggctagggtccaggggctgctccaggatctggccctcgctggtgatccttctcaccttgcctccttcctcacctgcctggtggaagagcacaatctgttggatgtgcctctccgccanctcacagtacacatcgtccttcagcaggctcatcatgaggcggtagtagccttccgaggcatgaggggctgagatgacccctactctgttcttccctggcaaagctggccngggtgtt

SEQ ID NO: 274 - DNA, 553 bp, Homo sapiens
  SITE (456): n equals a,t,g, or c
  SITE (466): n equals a,t,g, or c
  SITE (486): n equals a,t,g, or c
  SITE (533): n equals a,t,g, or c
  SITE (540): n equals a,t,g, or c
ccgggcagattgctacaattggtttttaaagacagtatgtggaaagtcagaataattttagattaccaagcaattagggggcacagagaaagaacagcaggagatggcagactgctctacttccatcttcagtggggttaaaaaaaaaaaaargccacaataacaacagaaatttaactgaaagtgatgtccaaactcaaagtagagtataataccacctggtaattaatgtcatacctgacagagatatataaaaagaatgaatgactacagtcaaattcaacttaaagtttaagcagaatcccaaatttaagtaagtctcttttcattacatagatatttgatctgatcagagcatttgctttgagaccaagagatctggcatttacttattcataggattgaaaaaagaagaccttggcttctaaccagccattcatcaggcacaacagccgnggcagccacnggaatgtagcggatattggnagtttaatatatgtacaggaatagctataccgtgaaataatagacanattcgcntagtgccagtagt

SEQ ID NO: 275 - DNA, 400 bp, Homo sapiens
acctcaaaagcagaacacacacaaaaagaactgctgtcactaagtctcactaataccatcagccattatttcataaaagaaggaccacatttcacactccaccccgtcccccccaaaaaattaccaaggatatcccagaaaactggatgcctttcaattgaatgaatttagcgtcacgacctgctcactctcctactcctgcttttctggtaccttcccagagtggatagagcattatcaagaggcagggcccccctgcctgttcactagcaggtgccgagggccatggcaaaagggaacagtggtggcctgggcctccagagggcccctgagtgagccaggggtttcctcgtttgtctgcaaktaggggaaggcacctgatgccggtttaacaaggaca

SEQ ID NO: 276 - DNA, 518 bp, Homo sapiens
  SITE (518): n equals a,t,g, or c
cgacctcccaaagtgctgggattacaggcatgagccagcgcacgtggccggggaggtgttcttatgggaggcgcccatcatttctgcccatatttgttgtcagaactcaggcttgtgatattccacctatattccttgctccttttgagtgacttttcctcttatttacaccattctccacccctcttcatcctgctctgtggccaggagactgtcctgtatggattgccccagtgggcttcctgtcctctggctcctggttggttttagtcaagaaactctctggtcggagattgccaaggtattttatttctctagtccctccctgctggctcccacaggttggctgtgttctcctacttaaggctgcagcttctgtgcgctgccctctctgtgcagccatatcctttccaagctgtgtcactgctccttcccctggaccttttaggctttcagttgaaatctgttcaactgacattcagcagccctctcagtggcaaaggtatcttgattttccn

SEQ ID NO: 277 - DNA, 478 bp, Homo sapiens
cctgacaatgaaaaaaaattgaccctggatacagagatggggcagagactttagggaggggcaaccaagttgcctaacatttagagggaggaatataacaggtagagagcagatatatttaacaaaaagttttctgcttggttggagtgccttggccaaaagcattcttgtaaaatgcaacttcatcacttcctctatactacatgaactcccagggtcagcattcatttattggatcagcaagatatttgaggctaggccatactctgggactcttctataactcctcaataattgccttttattaagagctaaagatgtatcaagcatttttcaaatattatccatggtgttcacaactgtcatgatccactctgttatcttcatctgacagaagagagatcaggtgacttgttcaagattacatagagtatatatatggtagagctgcaaacctgggctttttctaagactgctc

SEQ ID NO: 278 - DNA, 552 bp, Homo sapiens
  SITE (5): n equals a,t,g, or c
  SITE (448): n equals a,t,g, or c
  SITE (466): n equals a,t,g, or c
  SITE (544): n equals a,t,g, or c
  SITE (546): n equals a,t,g, or c
tcagngccagtgttttaacaagccagccaagagcacagcttggcagagaggggtctgccggaagcagcaaagtgggtggttgtcaaccaggtctggctttgggattcagattcagatctactgcctagagccacctgtttcaaatgaaaggatctgctatggcatggtccattcatctttacagacatagtcttaaactatcaggttaaatgatagaaatgctaatgaagttgtgcattcttcatatatcatcttctaccacttgaccttaaaatgtcacatacaaactaagtaccaacaatatccttcatttgcttggtgctttgcagtttaaaaaattactttcaaatatagtattttctcatttggtcctacaggtccttacctacctgcaagtaaatgggagaagatacaataagtcctaccattggttggccagtccctcaanccccagttacagataagnaagcctacattatctaaggggtttacaaggaggaccaaaaattcccccatctgaggggccagaattctccaatctagngnacctag

SEQ ID NO: 279 - DNA, 442 bp, Homo sapiens
  SITE (402): n equals a,t,g, or c
  SITE (406): n equals a,t,g, or c
cggaggaggggcccgaggctggggcggctggtggcagctgcctcagtgacgactgccggcatcgcggcgacctgaggagatcaagccgcagccccgccgtcgccaccactcccgccagtcttccttctccgctcccggccggggcgtcaggaatgggccccaatcgccgtgggccccgcaccctgcgtcgcccgtargccccagtagccggagccgaccggcctcccactacccctcgccctagccaagccgtccccaccccaaatccccgggaaggaagatgagggagacgggcccggcgcttagcagccagagcagcagcagcagcagcagcggttcggggggaaggtgtttcgccgtttcctcttcagccgccargacaagatgggcagcggccgcggnagangggctgagcccgggctgggtggtgccgcctgctgaa

SEQ ID NO: 280 - DNA, 278 bp, Homo sapiens
  SITE (248): n equals a,t,g, or c
  SITE (258): n equals a,t,g, or c
actccactgactctctcttttcctgataacatggccagcaagaaagtaattacagtgtttggagcaacaggggaagctggtggcagactccgccaagcacctgggtctgaagcacgtggtgtacagcggcctggagaacgtcaagcgaactgacggatggcaagctggaggtgccgcactttgaacagcaagggcgaggtggaggagtacttctggtccattggcatccccatgaaccagtgtccgcntggcggcctnactttgaaaaacttttctcg

SEQ ID NO: 281 - DNA, 507 bp, Homo sapiens
  SITE (504): n equals a,t,g, or c
cccggcacgaaggggcggggctgggctcgtggctgagccagcagctgcagcagctacgggagtggccgggtggccggcgggtgccagccgccatggaggccgtgccccgcatgcccatgatctggctggacctgaaggaggccggtgactttcacttccagccagctgtgaagaagtttgtcctgaagaattatggagagaacccagaagcctacaatgaagaactgaagaagctggagttgctcagacagaatgctgtccgtgtcccacgagactttgagggctgtagtgtcctccgcaagtactcggccagcttcattacctgcagagtcgggtccccatgggctcgggccaggargccgctgtccctgtcacctggacagagatcttctcaggcaagtctgtkgcccatgaggacatcaagtacgagcaggcctgtattctctacaaccttggagcgctgcactccatgctgggggccatggacaacgggtgtctgaaganggc

SEQ ID NO: 282 - DNA, 427 bp, Homo sapiens
  SITE (381): n equals a,t,g, or c
  SITE (421): n equals a,t,g, or c
cctttgaattccttagtatgtagtgaagaaaatttagttgttagttgctttgggaagcctacttatggagtggaaaccaggaggttatcatggtagttgaccttrtaagaaaaatgattcttcttcagaaattaaaaacataactattgccagatttagctctggaatgtttagaatcaggctagaatagcattttccaaagaatattctaagagctattagctcctctagatattttgttgggggaaaaaggggattctgtggtcagatgagtttgggaaatgctgaacacttcattcttctttagcaagtacagtcagtacatcaaagactgagcagtycagtggtacataaattatcycgccckgcatattccccacntcttaacacagatgttttttacccgtaacactcacccagnaagggt

SEQ ID NO: 283 - DNA, 635 bp, Homo sapiens
  SITE (30): n equals a,t,g, or c
  SITE (31): n equals a,t,g, or c
  SITE (498): n equals a,t,g, or c
  SITE (623): n equals a,t,g, or c
cgtgctgtcgtcgtcgtagctgccctgggnntcctcgtcctggttctggagggccgtggggagcatccctctggagctcgccgtgtaagggtccgaggaggagtgggagcggccctgcgacgtggggcggggccgcccggcctgggtcagtgagagcctgggctgggaaggtgaccgacccgcgtctctgctctggggtcccgggtggtgctgggacgtggcgacgggaggagggggctgctgttgtggggcccggccgggtgtcatccttctgggaacactgggatgctgctgtgaccgtgctgcgggmggacgagcaggggacgcgtggcggtctgtggaccctggctgtgctttgggagaatgaccctccgtgtccgcgtctgtgctctgttgaacatcctgagccttggaggccagggaggagtacttgccctgaggatgtgtatctgcccctgtggatttggggttctctgggatgggttccttccgatgcangctggcccctctctgcgggcttctccttaagtcctcccagccccgggagatgggctgcctggaggaggaaggcacgtggtcattgacaacggtggcaagaagcggcttctcatcctcctcgtctncatggatactga

SEQ ID NO: 284 - DNA, 394 bp, Homo sapiens
ccaaatatttgggcatagtaactaaagaaagcttcaacaaacttccctggtgattgttttgcacccttatatttgagagtaatgggtatagggagatattccttcattgctttaaggagttaaagcaatattccttcatagttgatacttcttcatagttgatattccttcattgctttaaggaatctttatgcacagttagctatcaaaccatgaaagtcagtgctttataatgcaaaagaatacaatgaaaatttttattgaccttgagcaaatcactttccttccttaggctttagttccctcaactatagaatgagacagtaagctagataacttctggtgagcctttctattttatcattctattgaaatctggtgctaaaaattatgg

SEQ ID NO: 285 - DNA, 430 bp, Homo sapiens
  SITE (9): n equals a,t,g, or c
  SITE (12): n equals a,t,g, or c
  SITE (427): n equals a,t,g, or c
acactatanaangtacgcctgcaggtaccggtccggaattcgcggccgcgtcgacgtctgaccttgcccagtgatagactgggtttataaaacaatatattggcatattgtgattctttgtaattgactataaattggttttgaaatgtccaaacatacgttgtgtgtctttttctgccagttacttaaaacacacaatacaatataaagacacacaacgtatgttttaagtaactggcagaaaaagaattggaaatgaaatttccaatccagacaatgtagtattaaagaaaactttgttttaaatatgcggtaccatgttaaaattactcctgtttaggaataaatccactgttgaatttkgaatgttcmctaagcttattatgtttaaaaagaaccgtgttgattargaaaacctacccaaaanccc

SEQ ID NO: 286 - DNA, 154 bp, Homo sapiens
  SITE (6): n equals a,t,g, or c
ccaaancgttgggaattgcaacccctccctcaatcccatgggggggggstttcccccaaacccctaactttgcccaccctkaaggccaaccaccaaccacccagggcaaaagatattggctaaaggttaccttggtccaaggcggccgaaaatt

SEQ ID NO: 287 - DNA, 579 bp, Homo sapiens
  SITE (429): n equals a,t,g, or c
  SITE (522): n equals a,t,g, or c
acttcccttaataaaaatggttattgattcttaaatgactccttagtatggactttcattttgcttctgtccctgcaaacgtgacatgttgaagttccaacttccaatatgatggtattgagagatggggcctttgggtggtaattagggttagattaggtcatgagggtggggctgccataatgggattagtctttgtaagaagagacatgagagagtttattctctctctctctcctccacgtgagagagtgagaaaatgagagagaccgagaaaggggctggctagctataagctgggargaaagccaccacccagaaacgaattgaatagcaccttggtcttggacttctcagcctccaaaattgtgaraatataaattyctgttatttatgccatccagtctaatcttttgttatggcaccccnagctgatcaatacactccaaaaacaaattagtagcaaagcaaagtttttccaagaaaagcctatgttaaagaattctcaatgaaacatcttangatttaaaagcagatgaactatttattatgtttcttatggtacttttcattttatac

SEQ ID NO: 288 - DNA, 295 bp, Homo sapiens
  SITE (259): n equals a,t,g, or c
gtacgcctgcaggtaccggtccggaattcgcggccgcgtcgaccctcatttatgcctatttgacccgtatattttaaggtctcattcactacctgcttttttttgggaagacttctgtgatggttaattttatatatcaacttctctgggctaagtacccagatacttggtcaaatacaagtctagacattgccgtgaaagtgtttctttaaatgagattaacgtctacaccagcagacatggagtacagcagaaggancctccaccgtgtggggggggcctcatccaagcaagt

SEQ ID NO: 289 - DNA, 563 bp, Homo sapiens
  SITE (509): n equals a,t,g, or c
  SITE (548): n equals a,t,g, or c
actataaagcgtttcatgactgttaatgctctaatcatatgattttgtggcacagaagtagatactgggtctaattaggcaaattaacagtgcataaattgtaaactaggtcattggtgggctgtttaggtctgggaagagataatgctcatttaatttactcaaagagccatttatcaaatgcctacttttgtgtcaggaactgggcatgctaagagtattctaatggaatatggargarttacaccttacttgctgttttgttttgtccttttaacttggtcaatgttttacttgtattactctcataacatcttcaataccctgtcttgaatccattgatttgtgtatttatctccctccccttcattagattttaagcactttcaagaaagggacttggtcttatttatagaccatgcatccaagtgcctcacagatagatccttgagaaatattgttaaactgaactgaaaagtgaacgcctatgtttttggtctgcacttganctagaatcaaaacacaggactcttgacttccattcccanatgcttttccctcta

SEQ ID NO: 290 - DNA, 117 bp, Homo sapiens
  SITE (104): n equals a,t,g, or c
acggagatggtgggtgataaaatctaatcttcatcaaggatgttggataaccagtaaaaagcagctrtatgttaataaagctgtattgcctgtccttctttacnactgcactttaat

SEQ ID NO: 291 - DNA, 303 bp, Homo sapiens
  SITE (205): n equals a,t,g, or c
  SITE (267): n equals a,t,g, or c
  SITE (293): n equals a,t,g, or c
acggtgaaggccacagattctcttcagtttgcctatccagtggccaagtctcagatgtcatctttctcaacccctcagcaacattcgacacaacatattactttcttctctcgagttccaggacaccccactcttggtttgcccctattctttctcagtccttttgtttgttcctaattctcttcccacttattgtaaatattanaacatcctaggggctgggtgtggtgactcacacctgtaatcccagcactttgggaagctgangtgggtggatcacttgaggttaaganttcgaaacca

SEQ ID NO: 292 - DNA, 304 bp, Homo sapiens
  SITE (233): n equals a,t,g, or c
  SITE (271): n equals a,t,g, or c
  SITE (299): n equals a,t,g, or c
ttaagcgattttcccacctcagcctcctaaatagctggaattacaggatgaaccaccgtattaagaggctcgcctcttaatatggttacaatagcaattatgcctccaacacatgcttttgggagggacacattcaaaccatagcaaatacctcctgaaaatttgacctgaacatttacataagctgtcacccgggaacttatcttctaatgcaggtgttaaatgactattanagatactttgctgaaaacttggtgaaaaaaccacaaancatgaagaatttttaaccccctttaganattaa

SEQ ID NO: 293 - DNA, 664 bp, Homo sapiens
  SITE (4): n equals a,t,g, or c
  SITE (42): n equals a,t,g, or c
gcgnccgcctcgggasccggagagawgscagccgggaccgangctggcctcgcccgagccggccctgggtgtggggaaccgcgctgaggagctggaaactttcccggcagaaacaagtgttgaaaatgttaaaggctgtgctgaagaagasccgagagggaggaaagggaggcaagaaggaagcaggaagtgactttggtccagagacttctccagtcctgcaccttgaccacagtgctgactctcctgtgagcagtcttcccacagcagaggacacctatagggtgagcttggccaaaggtgtctcgatgtctctgccttcctcacctttgctgcctcgacagtctcacttggtgcaatcaagagtgaacaaaaaatccccaggtcccgtcagraagcccaagtatgtggaaagcccagagtgcctggagatgcagttataatgccattcagagaagtagccaagccaacagagcctgatgagcatgaagcaaaggccgataatgaaccgagytgttcgccggcagctcaagaactgttgacaaggctgggatttttactgggaraagggatcccaagtgccacacacataaccattgaagacaaaaatgaaaccatgtgcacagctctggagtcaaggcatcagtccttgctccacactaac

SEQ ID NO: 294 - DNA, 317 bp, Homo sapiens
  SITE (282): n equals a,t,g, or c
  SITE (290): n equals a,t,g, or c
  SITE (315): n equals a,t,g, or c
ctgaaattctttctcgtgatggtgtcaagaacgtggacactggctggggctggagactcaccagcatccggagaccctcctgagccctccagcaatacaactttgacacaaactatgaaatcacagatccaagaagctcaaagaacccaagcacaggaaacatgatgaaactacatgaaggaacatcagaattgaattgttcaaaatcagtgataaagagtaaatcttaaaagcaaccagaacaaaatatccatccatatacgccmgaaattaagatagttntgacagcngattttaccaattgaaaaaaaaacnca

SEQ ID NO: 295 - DNA, 414 bp, Homo sapiens
  SITE (334): n equals a,t,g, or c
  SITE (342): n equals a,t,g, or c
  SITE (390): n equals a,t,g, or c
aaaaaaaaaaaaaaaaaaaaaaaarttgaaatcatacctccctcacagtttgctcacaaaraaattccttgtggacctcaaaatgtttaccctaaaaacagagttcttttgaatttcaccctagcaatgtaagcggatagcttatcttcataggtgcaggacaggtcatctttctgctcacctgagaaaaatgcatatctggttgcttcccctgcccaattgtttacgcaaaaatgcagagtcactgagccagtctatagtataagtgactattgctctattccactcctcatatgttaaattttatattccagtgaaaaggctgagcaaagantcccaaanaaatgcaacccttttgttctgtttattctaccccatgaacggaaaaangggccccccatttccccggccccc

SEQ ID NO: 296 - DNA, 371 bp, Homo sapiens
  SITE (359): n equals a,t,g, or c
  SITE (367): n equals a,t,g, or c
  SITE (370): n equals a,t,g, or c
acaaatcttttggaagaaaaagaaaatatggaagtgtcatgtcacaggaggaaatgtaagactattggaacaaattttgaataataatgattctttgacaagaaaaagtgaatcatcaaacaccacctcactaactaggtcaaaaatagggtggactcctgagaaaacaaacagatttccttcctgtgaagagctagaaacaactaaagtgactatgcagaagtctgatgatgttcttcatgaccttggccaaaaagagaaagaaacaaatagcatggtccagccaaaagaatctctgagtatgtttgaagcttccagatcttccacagaattctgttaagcttcaaacaaccaatacnaccaagantcnt

SEQ ID NO: 297 - DNA, 424 bp, Homo sapiens
  SITE (380): n equals a,t,g, or c
actttagtactaaaattcctcagggcaaaaaaatgtgtgataaatttttcagcataaaatttacattccctttgtgaaagggctgtcttccagtaaatgcagtcaataaatttatctccaaaggcacaaatgtgtacacaaaaaacctcaaacatctggtgaagtggtttctttgagaaaagccaaaatacagtgcttttgaggttggtaagccatgaaaaatctcttttgaaatagaattaagatgcttttgctgttattacagaaaaaaaaagtctctaattttctttgaatatccagtatctcttaaaaatttttgttttgcaaatttgttaaaaactggttaacgtaatttgcacgtgagatagtgcaacttcaancaggttttttgttgttgttttttaaacacagttggaaatatggg

SEQ ID NO: 298 - DNA, 255 bp, Homo sapiens
  SITE (242): n equals a,t,g, or c
  SITE (251): n equals a,t,g, or c
acgtttatggaaacttaggtaacatacagttttcagaagatagtcaaggcctaaggaggaaaaatgtttatttttttctctactttggaakaatcaataggagttgtaatttactgtgttcgacaacatggtagccaccatctgtgtcttgaatcagtcatctagttattcacatatataaatatatatataaatatcagtaaacatttacctgaattcttttttttctttgaaagggtctngctgtgtcncaca

SEQ ID NO: 299 - DNA, 421 bp, Homo sapiens
  SITE (337): n equals a,t,g, or c
  SITE (339): n equals a,t,g, or c
  SITE (353): n equals a,t,g, or c
accatgtgggaaagagcccttaccctcaatatgggctccaaacattcctgctaatatatcacaaatgatattggctggccggtaagtttcctattcatcaaatcatttccaaatgacactgacttacttaaaggttttctcttgaagcttggcctttttgaagccttgcctgcctccatctagaatagcaaacatcatgtcaaccgggtgatgaacgctggggatctggcaaccggcagtgtctgcccttggcccagacatggcatcaccttccttttatttkgggtttaatccattgggaacctgaaaaaccagtggaactccatggggtccacananatcctggctagtcnaaaagttccttgaatttttccaaacatttccactccaatccaaaataatcccagttgggcccaaaata

SEQ ID NO: 300 - DNA, 286 bp, Homo sapiens
  SITE (155): n equals a,t,g, or c
  SITE (261): n equals a,t,g, or c
actgaaataatctggtcacagaaggacaaatactgcatgattccacttacagaatgtatctaaaatagtcaaaatcatggaaacagagaatacaattgtggtttccaggggtgggaggtggtatagggaaatggaakttgtttttccattggtanaaagattctattatgctagatgaataaattctacagatctgctgtacaatgttacacctatagttaacaaaatagtactgtgcacttccaaatttaaaaaagatanatttgtgtttaatgtttagtactgc

SEQ ID NO: 301 - DNA, 399 bp, Homo sapiens
  SITE (42): n equals a,t,g, or c
  SITE (322): n equals a,t,g, or c
  SITE (398): n equals a,t,g, or c
aagtacgcctgcagtaccggtccggaattcgcggccgcgtcnaccaaatctctttgtccttttgggaatggaaaacattatgtacttcaaagcatactaagcctgatttgaaaatatagttgggatattgttactgtggcagttgggagggtctttagccttcacacagtgcgtggatgcttcgtgtgtaaatgcttgagccacaaacttgtgagaataagtgacgctggcaactttgatatgctcattcataaggaagaaacttctgtcttttaaattctctggaacaactgggatatagttcctcattttaatccarggnaatktctccctgaaccagactgttaaaacaraagatttgagttgcacatttcacttggcatacagcacgtttggtnc

SEQ ID NO: 302 - DNA, 537 bp, Homo sapiens
  SITE (335): n equals a,t,g, or c
  SITE (405): n equals a,t,g, or c
  SITE (425): n equals a,t,g, or c
  SITE (428): n equals a,t,g, or c
  SITE (495): n equals a,t,g, or c
acggtaacaatcagtgcgatgcctaggatgagcaggagcccacctcccgcggctgcgatcaccacagtgataagctgataggggtttccacagttgagaccaccaaggccaaatgggcaactcatgcaggtttcattttcaagcctatatccatcttcacatgctcggcaggagtggtccatcttgttgaactgaaagtatcccgacttgcactggcacagggcaacgccgtccaggtcagtgcakatggaggtgtctttgtcacattcgggactcttccgcttgcacaagctgcccgctctaaagatccgcctctgagatcccaaggagctggnagacctcagcagaaagacttgcaggagttgacacatttctgcatcctatcagccaggtcaaatagcgtcncattggaggccagggaaaangtngtttgcagtgagatcaccaccgcgttggactccctagaagcgtgaactgtagatcggatgttactangtaacgctgaaaaacacatatttaacgttttggtgatctcat

SEQ ID NO: 303 - DNA, 164 bp, Homo sapiens
gtgtgtgaaaggctatagggctttcccggtgtcacctcctgccctggcctgggaagtgtcgtggggacagctgctccggagactcctggctgccasgcttgacttgggcttgattgatttascctgttacctgkaaagggcactgctgctccctgcccacgtca

SEQ ID NO: 304 - DNA, 324 bp, Homo sapiens
  SITE (22): n equals a,t,g, or c
attttttgttatgatgtctgtntggaaagcggctgtgcagacattcaattgttattattatgtcctacaagcattaattaaaaaaaatatggaccagccaagtgggtcagcacgtccgtggagtctatggactgggattcagccatccagacgggctttacgaaactgaacagctacattcaaggcaaaaacgagaaagagatgaaaataaagatgacagctccagtgacaagctacgtggagcctggttcaggtccttttagtgagtctaccattaccatttccctgtatattccctctgaacagcaatttgatccacccagg

SEQ ID NO: 305 - DNA, 333 bp, Homo sapiens
  SITE (142): n equals a,t,g, or c
  SITE (206): n equals a,t,g, or c
  SITE (250): n equals a,t,g, or c
aattcggcacgagctcccctgtcccgggcattttttccaatcccctccttggttatttatttattcagttttcctacctttccatgagtcaatccagcccattaaattttctttgaaaatcatccacttcctttggattttnacatttatgatgaaaacgttatacacagtctcttacaattttagaaatagtctctgtatatatngttaagtccatttttatacctttaatgctgtatatttgtatttnctttcttttttccatgagactagtcaggggtttgtctatttaattagtctgcagagaactaggtcttggtattagtcattaag

SEQ ID NO: 306 - DNA, 108 bp, Homo sapiens
  SITE (107): n equals a,t,g, or c
aattcggcagagccatagtttccaattggccagtttcgttctctaaccaaacagctgctgcctgcttactgagtgtgsatgcccacgcacattacactgagtgtaant

SEQ ID NO: 307 - DNA, 583 bp, Homo sapiens
  SITE (55): n equals a,t,g, or c
  SITE (106): n equals a,t,g, or c
  SITE (501): n equals a,t,g, or c
  SITE (524): n equals a,t,g, or c
  SITE (558): n equals a,t,g, or c
aattcggcacgagtattaatctaaacaacagctcttaggtgtaataatgatagtnataactgacatttatacagcatttactgcatgcctggcattggcctaatgntttttatgtgcacaattcacatgcatttaatttgtstaagggcatgcaagtataaagtttgtgtttgattccacgtactcaagaggcacagtttgtgctgttactcttatgcttcgttacctacctgcttgctactattatctccatatttagctaaagaaatagaagctcagaaaagttaaagtaacttgttggaacattagtttttagcaaaccaataaatatctgttattgaactgaaatgagaggcacagctaatacatgctagacccaggattcgaacaatggctatctgtcctgaaagcttatccttttctcactactcctgtactggaggataacaaaagggcattttttaagggaagaaggaggcagtatttaatttttaggttacnccagtgatatataagtacagtcngcttttttaaaaagtgggcccaaatccggttacncttaagaccccccttgacgctatgc

SEQ ID NO: 308 - DNA, 170 bp, Homo sapiens
  SITE (34): n equals a,t,g, or c
aattcggcacgagcccagctgggatatttttttntttgctagctggattactatttctggttgttggacggcatattcagatacatcactaaatcaactgttgccacaagtattttcttgagagattttaaaacaaggaatactttttttccattttgtttcattgatct

SEQ ID NO: 309 - DNA, 266 bp, Homo sapiens
  SITE (191): n equals a,t,g, or c
tggtcgagagggccacaggacgggattgtatggctgcaggaggctacacagtcccaggaggctgcttctaagaggcccacgtggyctgcatggggatgcgcctggctgyccagcatgtggwcatktgaattgyacatgtywcactgggatgcctacagaaaagtagacagaagatgtggaaaaagtttttnaaatgttgcaaattaggtacttttaaaataaaaaaaatagcttataattataaaagcatatgtaatcttaaatag

SEQ ID NO: 310 - DNA, 252 bp, Homo sapiens
ggtgacgaccgtctagaatagtggatccccgggctgcaggattcggcagaggtaattgctaccactttgctgttcaagacataacttacctatttttagaccaagattatagcgttataagacacttggacgtggatgattgtatagagctgtattaaagagcaagtcagggattttaaawtgatttaatttatgtttaaactrcatgattgtccacttgagtatggtagttcttgtcagcatcagtgtgtg

SEQ ID NO: 311 - DNA, 435 bp, Homo sapiens
  SITE (52): n equals a,t,g, or c
  SITE (410): n equals a,t,g, or c
  SITE (413): n equals a,t,g, or c
  SITE (422): n equals a,t,g, or c
aattcggcacgaggcgagggaagctggggcgcccactgggctcgggcggcanttcgcggagagaggtgccattcacatcaaatgtagccattttagaggtgtcaaaataaatcagccatatttaataaattccagctctactcttctaccctgtagcccaagaagcagcaacgatggggtcaaaggatcatgcagtatttttcagggaaatgacacagttaattttgaatgaaatgccaaaagctgggtattccagcatattaaatgattttgtggaatctaatttttttgtgattgatggagattccttgcttgtcacatgcctgggtgtaaaatcattcaagtggggacagaatctccactttwwctatctggttgaatgctatcttgtgggtcttctgagtaacggnggncattcaccntagtttctttaag

SEQ ID NO: 312 - DNA, 398 bp, Homo sapiens
  SITE (310): n equals a,t,g, or c
  SITE (339): n equals a,t,g, or c
  SITE (349): n equals a,t,g, or c
aattcggcacgagtctcagtgtagtttttatagaaaaacacaaacccagaaatgtaaaataattaatttttaaaatacatcctcaggacttacaagtccaaatcaaaataactgttatcttttagagtagtactcttaggggccaacatacccattgcagcccttcactgttgccccaaatgcatttagacctttttacattagaagtacctgatcacaggccaggcatggtggcttacggctataatcccagcaatcccagcacttttgggagggttgaggcaggcagatcacttgagggtcaggagtnccaagaccagccgggccaacattggcaanaccctatctntggttaaaattccaaaattagttcgggtgttggtggcacatgcccgtaa

SEQ ID NO: 313 - DNA, 370 bp, Homo sapiens
  SITE (350): n equals a,t,g, or c
  SITE (366): n equals a,t,g, or c
  SITE (367): n equals a,t,g, or c
agtcattagaggacaacagtgaaccatcaaaaattctatgatggaggagccaaacatcaataagatagaagcagatttgggatatcctggaggtaaagcaagaattattcataaggaatctgatatcattactgcgtttgctgttaataaggcaaatagaaactgcatagcaatcgcttccagtcatggatgttcaagaactggatgtttctggaattctggccacacaggtctacacttgggtagatggatgatatagaagtggaaaccaaaggatcagaagatttcttggttatacaggctcgtgatggatttaacagctgttccaaggtacaactcccatatacacntagccaatccgggcanncca

SEQ ID NO: 314 - DNA, 202 bp, Homo sapiens
  SITE (34): n equals a,t,g, or c
gaattcggcacagagttcttttcgctgacgcggnactacggcagtggatggctgaattggagcacagaggaaagctgaggtcaaggaagttaaataaatggtatctgagaacctacctctggtgatggtcatatcggtgtctccgagggtcgtactcgccccccacgtccaccacgatgtcacaggaagcgagtttttcggg

SEQ ID NO: 315 - DNA, 373 bp, Homo sapiens
  SITE (35): n equals a,t,g, or c
  SITE (352): n equals a,t,g, or c
  SITE (357): n equals a,t,g, or c
atcagccgtgactatcccataacataatatttctnatttcattcttttcctttctcctaccaatttaatctgcaatcacttcaagagaagtctgtttaaaggatattcacattctgagatgaaaactcccattttagggaaccaagactgaattccatgaatttacatggatgtttggaaggtgtctgcaacttaatctgtgttcgtttctgagatgttgggcaactccttcttggaagatgtggtaatggtctcttcgaaaagaaaatgaatcatctgagttttggccaaaatagttgatcggattacctatgaaaatggactctcacccaacttacaagaatgtttatgntgttnggaaactctaaatatt

SEQ ID NO: 316 - DNA, 270 bp, Homo sapiens
  SITE (42): n equals a,t,g, or c
  SITE (135): n equals a,t,g, or c
aattcggcacagccagcctggggaaaaaagcgagaccctgtntctcagaaaaagagagagagaaacagagagcaaggagcaggtgggttataatggagtccctggcaccaagcagagcctgatggccgcccttgntctgaacttcctagttatgtgaaaccaaccaccaggccagttgggttgggtttccagccctgtgctcttgtctgtcctcactgacagacaaaaataacttcatcagtcggttcttcagacccacagtcccatgga

SEQ ID NO: 317 - DNA, 897 bp, Homo sapiens
  SITE (786): n equals a,t,g, or c
  SITE (836): n equals a,t,g, or c
  SITE (844): n equals a,t,g, or c
tttcacaacttaatcacctcccaaaggctccatctcttaatacgatcacattggggattaggtttcaacataccaattttgggggtacacaaatattgaggtgatagacacttccaggcttttgccaaacattagtaaacaatttccagtgaatactctgccccattctctcctactcaagcagagtatcttaaggsagcagattggagtgacgttactttaagggtaactttgaagccaatctaattcatactcaaaaaagtattccaaaattttggtactctattatgggttacaaaccccttgtgacaccatatttaagagccactgctattgaggcttgcactctcttgcttgaaatgaggtgctcccaaacctgggagatggctcccaaagaacaagagaatcaaccccatcgtgcatttatgtgctgccccagataatccacaggcacaaagaacttgagcttcctggtgtgttcttcagaaaaaaaggaattcaaaaagcaaatgtaaaatgcaacagaacttggcctcaaagtgatgttggaaaaatagccagtcctgatgacttggtcgaggtaacttgctttgcccactgttaactacagagccatatgataatggaacatcaaggttttccagataaacccaaagccttttgtgtctataccttgtaacctgtcatgttcatcaacgttttagactgtaccattgctctttctcccttctttattcattttatatgggggacgtttgactaggatcaccagatgtagatttgggnatttttccataccattaagatggtatgataatggattttattaatttacnccaatgcntaaaatatgatggtattagaacatccggaattattaacattcttggcctactt

SEQ ID NO: 318 - DNA, 368 bp, Homo sapiens
  SITE (343): n equals a,t,g, or c
  SITE (365): n equals a,t,g, or c
  SITE (367): n equals a,t,g, or c
cagaaatgttcatactgaaagagtaaatcatagtgagtattgaaaataatgtctcacatggtactaatgcttgtcgggtgaggagttgaacatatgacagtgtttacctgggcgcatgtgaaagggtaaattatgattgcaaaagggatctagtgataagtagtgattaaaacaagttattttgtattttctggaaaaggatgttatactagctcaatagtggttgaatttaaatgtttttcaagcctgccagggagtgaagaaagctttgggcaaatatggtcctgccgatgtgggaagacactacagggaagtgggagctacagatagttaaagatgatgntggacattggacctctttgggncng

SEQ ID NO: 319 - DNA, 323 bp, Homo sapiens
  SITE (317): n equals a,t,g, or c
ctatgacacacacaaaattctatttttctgctaacagaaataaaatccccaactgatggaccacttttctgatctagtttttgattgttttttaggaacttaaaattcttagtgactcatattttaaaatgcacagactcagtttctgttttaaggaatatggcacaaagatatttagggaaaaagtatgtatgtacacgcacatatatacatagtatatgtgcacacaaacattaatgaggtggtaaaacttctaaaatagagtccatatccaacatcctctttctgggagtctgtctttcctmccattctttttnaattta

SEQ ID NO: 320 - DNA, 173 bp, Homo sapiens
  SITE (131): n equals a,t,g, or c
aaacacattttaattgacaacactagggctgttgtacaaaatagtaatgatagccatgggaagttttaaccttattcctgtgagaagtgttcttaaaacttatttaagtggctaaactaaaggtttaagtncctttttttaaagggaaagttgtccccaggattcatccctaa

SEQ ID NO: 321 - DNA, 431 bp, Homo sapiens
  SITE (341): n equals a,t,g, or c
  SITE (389): n equals a,t,g, or c
ggtttgccatcttaacataactattccctaaatcatattacaagattatcgaagttcaatgtctgtacaaaagtggctccagctaagctttcatgctaagtaaatgtaaaatgccatcattttaaatttgatccagtagattatcataaaatacagactccagaatagtagtgtgttttgctgatttctctaatttgtttagttttcctctaggggcactcatatacttctaaggaatggcagaccttggaaattctaggtcttcctgtaaataatgaaaggaagggaatgtgggaagaaaagcaaccaaggggaaggatacagaagttaactaattaaanggaggggcttgtccygggtagatgggatttaaagaacagaggtgtgsntcaccacctatgggaaaaccagccacagccaatttaaaggtc

SEQ ID NO: 322 - DNA, 369 bp, Homo sapiens
  SITE (343): n equals a,t,g, or c
aaattacagacgcccaaacctaaactcagatatactgacttaggtaggtggagggaaggtcctggaaatctgcaccctaaggaacttcatgggtgatgcagatgattaggtctgtttgttaaccactggtttagagaattgtggcaagccttkgagaggggggattgctgattaaataaaaacacattacatgttatctatgtaattatctgtgtgaacatacatacaggactttgattctacctgttgctgagccattaagtttctccaataatgcaaaatgcaaatttcttgtcaagaaatgtattgttctcatcatctgcagtccaactcacttacttgnataaacaagcacccaaacaagaacat

SEQ ID NO: 323 - DNA, 409 bp, Homo sapiens
  SITE (374): n equals a,t,g, or c
  SITE (378): n equals a,t,g, or c
  SITE (401): n equals a,t,g, or c
gcgattctcatgccttagcctcccaagtagctgggattacaggtgtgtgccgcaatgcccagctaatttttgtgtttttagtagagacagggtttcactatgttggccaggctggtctcgaactcctggcctcacgtgatctgtccacttcagccgtccaaagtgctgggattacaagcgtgaccactgtgctgggcccgaggccctggacttcttgctgtaactttccatgcattttttttaaaaggagcagtgtggattttcgcaccctttgtggaactaagttcaatgcgctctatccaaatttgcctaattggaactataagaaagtaataattccatttctatcccctcagggaytgaacaaagggaantaantcccaggcatatcagtgggtcanaacagaga

SEQ ID NO: 324 - DNA, 333 bp, Homo sapiens
  SITE (333): n equals a,t,g, or c
ctcttccasrgmctcaataagaaatgcagcctttgattttaacactgtaggctcattttgtacttctggcctccagaaacttgggatgataaatttgtsctatttaagccactaagtttgtggtaatttgttaccacagcataggaaatgaatacaaatatcaaagtgtttgtggacatattttaagactacctcaggcaaccctctggtcacaaattatttatagttctcccacatgcaaaataaacttaccccttctaaggccccaaagtcttatcccattatagcatcaattcaaagttcagaatcttatcctctacgtagtcccagggn

SEQ ID NO: 325 - DNA, 1050 bp, Homo sapiens
ttcctggaagctctttgtaggaatttattaattgctataagactatgttgctgttatatatcatggagatggtgaggtcaagaatgacagaggctgaccattcagcagggctcaccatgtgaaggccggggtttgtcaccacattgaaagccacatctcttgacttggttggtgaacttagggttaacctgatagagtactgaccaactcaacctatcccctcttaaaccacagatagaaacaattactctaacttttgggtcccttatacatacttatgtcagagcacatgtaacactttttttcactttatttacatgtttgtctcttattaaatcagctccctatgggtaggaaccttgkcttaawtatccttgaatcctcagcatttttcacagggcatggaacacagtagacatttaataaacatttactgactaaatctgagaggaagaggatcctctctcaatatcagaaaactacttgccacacgacagttcggatcttagtccacttagtctatcttagtcagcttgggctgctataacaaaataccatacactgggtggcttacacaacagaaacttacttctattaaaggttggaagttygagatcaggatgccagcattgttgggctctggtgaagtctctctccctggcttgccaatggccacattctcaccctctcactcatgtgtcatcacttgatgccgagagagagcaagcaagctctctggtgtctcttcttataagggtactctaatcacagcatgagggccctaccctcatgacctcatccaaatctaattgccttcccaaatcctcatatctaaatacatcacattggaagttaaggcttcaacatatgaatgtgtggggaaggacataattcagtccctgaaagaagtgtcatatttccaaggacagtatatttctgtctggtattaactcccaatcaccttgattgatcttgatgtcctcaaaatttcctcagggaaaccattgcaatggtctcatccactacattctttaaaatagaattttccgg

SEQ ID NO: 326 - DNA, 478 bp, Homo sapiens
ctccatgaggtcatacagctgcttgaggwtgctcggagagtaagaagcagaatgagaactagaacagaagctcactttggcctgaaggctcatgtgctgagcatcttcccttgtctgtctccacccctagcctggtgcccagcatgtagaagaccttcatcctagatgcaatgggattaaacttggagaaaatgggattaaacttggacaaacactacctatttggacttgtgatgatggctttcaaacttcttaaagcaatgaagtattttttccagaagaaaccttacacaagaagccagcacactgagtcaagcatatgtaggtggaagatatctggttgagaccaagtagagataaacctgtagattcmactgtgccaccacatgaaattctaaggaatccactgactgtgatctgtaagctcctactccacaggggktcagggcrcacagcttgaaaccggaggcaggagagt

SEQ ID NO: 327 - DNA, 508 bp, Homo sapiens
  SITE (450): n equals a,t,g, or c
  SITE (470): n equals a,t,g, or c
  SITE (492): n equals a,t,g, or c
gtgggattataggtgctcgctaccaagcctggccaattttttgtatttttagtagagatggggtttcaccatgttggccaggctggtctcgaactcctgacctcaggtgatccacccacctcggcctcccagagtgctgggattacaggcatgagtcactgcgcccagccccaaataattacttttaaactatagtatctaaatttactttaatgttgacttcaactgatgcaaattaatttgataattttctcactgtttcccgttatcattacatagatgctggctaaaataatatacttcctctcaaacttttaacgtaattccaggttcaaaatgcctgattaaactgctacaagaatattctggtacctctagaactccacagagataagttcactcaactcttgggaaccttgtattctcagggtggcaatatggagaaacaantcccacagattggcattggntgggttatttgttttgggccantcggttaaaacacatc

SEQ ID NO: 328 - DNA, 277 bp, Homo sapiens
  SITE (139): n equals a,t,g, or c
ctaagcccagggttctccatgacagcattcccagtatcaaatctgtttcttattaacatgtccctgcagtggagtcgacagtaaagggcctcggagggttctggagaccagaaaggaggccggatgaaagaggccagtntcatgcatcatcagacattcctgcaaatgtgtaaagaatccacgaggagggagggggagggcaagcattgccagatgtctccaagccaaccctttaacccattcctttacctgcttcccaccttcaagttttgtttct

SEQ ID NO: 329 - DNA, 337 bp, Homo sapiens
  SITE (302): n equals a,t,g, or c
  SITE (318): n equals a,t,g, or c
  SITE (332): n equals a,t,g, or c
cagcatttaagccaggaagacagagaaatgttggtagaatactgaaggacatagctagttaggaaaatagaatcaattaggaaaaaggaagtgaatgcttagttttcttgtatgaaaccagaggcaggagtaggctatcccatctaaaaaagatgtcaggtggatcaggtttgatgtcttatgcctgttaatcctagcactttgggagaccgaggtgggtgggatcactttgagtccagctgttcaacaccagcctgaggaacatgggcaaaaccctgttttttacaaaaacaaaacaaaanccaaaacacacatggnaaaaacatttgctngggct

SEQ ID NO: 330 - DNA, 331 bp, Homo sapiens
  SITE (10): n equals a,t,g, or c
  SITE (86): n equals a,t,g, or c
tgatattttntgaccacgcactttcacctccctagccccatttcccatctaccctaacagcacctcccctccacccccacttcctngcactcttccaccaccttcactcccctagctgtctggcgcctggtcctggttctgcctcctggtccagtcactgcttggtgaggctcagtgagtccagaagtgctaggcagcaggggtcaactccctcagaagagggaggccccagcctggatctccgaggggaggaggtgggaatgcagatactcctaggtgcaacagttycagggaaagcaacacagtttaaggtgcrgaaaagytgggtcct

SEQ ID NO: 331 - DNA, 226 bp, Homo sapiens
aaaatgcctcctttcatggctggtattccactttgtatcagaagctctagacagataattaggcaagaaatgaaaggyatccaaattggaaatgaagaagtaaaactatctttatttacagatagcatgattctatacgttgaaaatgccaacacagcaagaccctgtctctacaaagaaattttagccaggcgcggtggctcatgcctgttaatcccaggacttt

SEQ ID NO: 332 - DNA, 325 bp, Homo sapiens
aattggcacgaggtgatgtccagagaaaaatagctgattgggccacaatyacaacaaaaactaataaaacagtagccatttttttctgatacttggtccacagtcagtatgttaaactatctttcaaaacatttcttcccaagggcatacaatactttctgtctcagatccttaccaaccacccctcaccaccaataaaaagtgagaccaaagtacctctcagtcaacagaaataaaaggtttccttwaaaattcagagtaatactcagacaaawttgggatttaggcatacatagtcatcactccagtgggaaaaaactgtgtg

SEQ ID NO: 333 - DNA, 319 bp, Homo sapiens
  SITE (221): n equals a,t,g, or c
  SITE (292): n equals a,t,g, or c
  SITE (295): n equals a,t,g, or c
aattcggcagagcgtttgacctattgaaagctggtgtggaaataaaagtatcacatatttatttgcataagtctgtgacagaagcaaaaactggaccgagagagttcttgctcctcatcccagggctcttatcctaacactgaagttattggsatttctgcaatygaagggcatttttttttccataaaaaaaaattgagctttctgaatgttttcaaatntctcctagccctaatgtgttgagtgataacacactgtagaccactgaaaagggtcatcagagagtgatccnggnggggggcttgttttttggctctga

SEQ ID NO: 334 - DNA, 351 bp, Homo sapiens
  SITE (327): n equals a,t,g, or c
aattcggcagagtcggcasagtttcaatcatgtagaaatattgaaaacacagtacaacctatataacatccatctagatttaacaatttatatgtaatttttcctgaaataccagtggtaagttttagatataacattataaccataaataattgrgcattcatctcctaaaaatgaaggacattctcccacatacctggkawtatsattatcaatctaattctatgrtatatccagtccatttccaaatttctcccattgtccccaaaacatattttacagttttaatgaggtagaattagcatacagaagtgggacttgtttaangtgtaccatttggtggggttttgg

SEQ ID NO: 335 - DNA, 613 bp, Homo sapiens
  SITE (591): n equals a,t,g, or c
  SITE (595): n equals a,t,g, or c
aattcggcagagctgaaaacttactgtgaatttggccttaagataggcaaggccaaattgttaagacagaaaggctgttggtaaagagggaagattaaataggaaagtcaaggtaaactaatagtagtctagtagcatcacctttttgtattaatgattgtctattgcctgacattttgatgagtcaaaagccttttcaaagatttatcgataagcaactttataatttctttgtagtattatacaattgcctctcaacatatatatgcttctcctatgccctttaattcccaaagtgttcagtcctagatgtttaactccttagctacttttgtaccagggatcaaactgattgaaagtaaatggtttatgtgggtcaaaaatgaggaaccaggctttgccattaagcttgattcttctaactctagctgagtcccacctggctttttcttggcttctgtaatcatgaactatttccaatagccagtggatataaggagttatagtagaaccaatggatggtttatagttgagaccctctgcattgtatgttacctatttcaagattaagagtcatgctgggcacggggntcanacctctaatccagcactt

SEQ ID NO: 336 - DNA, 249 bp, Homo sapiens
aattcggcagaggcgggctcttggggtcccatggatggagtcttctgctcatatgtcacaggcaattcacaggcacctgctggcccaatcatgacctgcggtggctcagtgtgagcgcatgcctcacctctgtgacagtaggcaccgtccagtgaataagtccacttaatggttcatctcaaggaaacagtcctcaaacaaaaggcttggtatacggtgatgttcactgcccagttaattatactggta

SEQ ID NO: 337 - DNA, 313 bp, Homo sapiens
  SITE (52): n equals a,t,g, or c
aattcggcagagctgcatcatccatgctgttgctgagctatttctccaagtntcaccatcactctaggtgaagaagggtggtgaggaccttaatgttttcttcttacattgcagtgcggaatatgtatgttatagaatattttacaaatagtgcttctctagctaaccaagacaagcagccacacatatgtcagaaaaatcatctggcaatgatgcctgacatcctgctggcctcaccttgggattccagacatggctgcagtraaacagttctgtgctagyttctcacatccaggaaatatcttttgtggcc

SEQ ID NO: 338 - DNA, 381 bp, Homo sapiens
  SITE (313): n equals a,t,g, or c
  SITE (322): n equals a,t,g, or c
agcggcagagtatcgcctggggccagtgcacactctccacagggggtttccagcatgtgggtgatttctaaccaagctgacataaatcagactgtgcagagcagtgacattctgatcactgcactgggagacacctggatagtgttacacttccctgcattaggaggcactggagttgagctggggaggtgaacttttagctgtatcaaaataacaatgtgggagcaaagaagatgctgggatgagggggcataccagtaattaacccaacctttacagacaggttgtgtgaggcgttctgaacttcggcatnctttggganataatttatttacaaactggaaccccgttaaattcaagaggattttgtttccctgaatg

SEQ ID NO: 339 - DNA, 370 bp, Homo sapiens
  SITE (296): n equals a,t,g, or c
  SITE (305): n equals a,t,g, or c
  SITE (357): n equals a,t,g, or c
attttataacctagtttattatttttatagacatataaacaaaaccatttttaaatagtttctaaaatggatttatcttagttttttacaatttaatagtttgtaaaatgggtttatcttagtttttacaatttgtgtgaaatagggtttctaatgtaagtggcagttaaataactaaacaattatagcagatcttcaagtaaatttggataattaagggttaaaatcctcctaattgaaacagtgcccaacatactcctccctttttttttggtgacatttttagctttttaccnttgtgggantattctatggggtgctgaccatagtctggggcccgatcccgggtgggttccncaggtttttggac

SEQ ID NO: 340 - DNA, 480 bp, Homo sapiens
  SITE (393): n equals a,t,g, or c
tatgcttgccatgtgatagggcctgcaacctcattgctaggcttactaagaaaattttagtttttcaaaagcattataatttcctaagaaactgaattytttttttatatgtttgagattcccatcattagtaatataagatgaaaggtaagtgccaaaaatgtatttttaaagaccctcaagtttaagatttatcctgattataagccaagttttatagtatatttaaccaattccatcaagaataattttaatatcaaaaattagtgttttctgtagccattgtccatgtcagagttacagtcctttttgtcattgataatataacctatgargcagatwaggattgaggaatatgactggarggawttamttatttwgctwagctgacanggtcgsttcttaagatgacatttggtttcagtaatctgaccactccctcctcccagctgcggggtgaggtggcctgtagggaggggc

SEQ ID NO: 341 - DNA, 395 bp, Homo sapiens
  SITE (16): n equals a,t,g, or c
  SITE (258): n equals a,t,g, or c
  SITE (381): n equals a,t,g, or c
aattcggcacgagtgnatgtgcccttcttactaccttacaaaaaaggccagcttctttttaattaagtctcatttgtttaaaccagggattgacattttggttaaaccattggttgggcaaattatgacccattggctgattgcctatttttgtaagtaaagtgttactgaaacacagccacgtattgactgtggctgccttcatgctatgacagagttgagtaattgtgacggrgactatatggcctgcaggtcttnaaatatttactctctgggccctttaggtttggtgatgccgtttaaagcacctaaacatgaatttytgttacttgtaggccagacacattccyaatgggatycaaccattaaccaggttccttnaaacaaattggggg

SEQ ID NO: 342 - DNA, 384 bp, Homo sapiens
ctgaattaagagcatccagaaagcccaggccctccatagctacaaaaagaaagagcaccaaatggcatcatcagacctccttcataatcctacacctgcaaacacagtccaggcataaaatgagccagtgtaagaccctgcctcaacttaggacacgataagctcaagaggaccaggaagcacatgcaggaggattcacacaggatattcttgttgttattctaggtttctcatggcaggcaagccatagctttggrtgtgaattatagcttcaggtrgctgacgagtgagcccttktgaacatgaccagttcaccttaccagtgccccttgaccattcamagattggcacagtccctattttatttttaaattattcctaggt

SEQ ID NO: 343 - DNA, 314 bp, Homo sapiens
  SITE (306): n equals a,t,g, or c
agggacacagaggagcagttccagagttggtaaatacatcagctggggcattgctaaaccatcagtttccttcacaactttccactaagccatgtgtcagctttgccttataggctggctccttttttatcagtgggaaaaattttcccaaaagcttctggagacttctcttgtcacatgctccttcttaaaccggtcgtgagcaagggagaaaataaggttactgtggttggctgagactagtccagattactcctgggtcaaggccaggcatgcttagctcacacctataattcccaacatttnaggaggct

SEQ ID NO: 344 - DNA, 317 bp, Homo sapiens
  SITE (184): n equals a,t,g, or c
  SITE (290): n equals a,t,g, or c
  SITE (306): n equals a,t,g, or c
gagatttcttggcctttgcattcactcttccatctctttggaatgcccattcctgaactctgcatgacttagtccttgtgagtttccaagttttggctcagtagacatttcttagctatgggaatctaaattcggttcccctgcctcctttcatcccttttcacctttgtcatctgtaaattgnctgtttgggaatcattatttgtattcttatgcgtgtccttcttctcccaggaggattataaaactcaaaagggtagggattgtccaggtgtggtgggttcgcactntgggtttctggcgcgnttggggggggt

SEQ ID NO: 345 - DNA, 350 bp, Homo sapiens
  SITE (175): n equals a,t,g, or c
agggattacaggcgtgacacctgcacccagcctaaatctggtattcttaagagccgaaaagattatgcatcttgaataggcaagcagtttaataaatatttcatgtcagaagcaagttgtaatattatgaggacaatttctagatattcctaagtaaggaagtttcagctctgcntgaatatttttaaaaggtctcccccaacccccacatctttcccaccagttttttatagttcctttttaaagcagaattgagcctgtgggtgttttgttctagtcctagaattcactgcagaattgtatwaacatttgggmaaattctctgttcccccaagcctgcaggcccatgg

SEQ ID NO: 346 - DNA, 370 bp, Homo sapiens
  SITE (40): n equals a,t,g, or c
  SITE (134): n equals a,t,g, or c
  SITE (344): n equals a,t,g, or c
aggaactatattttaatgtttactgaagccatcaagcttnttttgaattgatgcaggagtattttaattacattaaaacatggcattattttaaaagtaatctatgtttttaatttaaaggctacttatgcttnccatggtagagagtacaactaaggaagttttgttaacttgcctccctctttcttttcctacccctacctaaatcataggctattaaaatgaaatctgggccgggcgtggtatctcacgctgttaatctcagcactttgggaggccgaggcaggaggatcacctgaggtcaggagtttgaggaccagcctgaccatgtgggggaaaccccnctctacttaaaaatacaaaattagcc

SEQ ID NO: 347 - DNA, 350 bp, Homo sapiens
  SITE (320): n equals a,t,g, or c
  SITE (332): n equals a,t,g, or c
aattcggcagagggaaagttttaaaataataaatgagcaactcccacaaatggtacttaatttccacaaaactttttagtaaaagagtatacaatctttttaggagcacatttacctaaaaaaaattttttaatttttaaattttttttaaggaagtagaaatattaaatttccaagacaattttctagcatctactacttggtcattttaatttacacttttgcaacaacagatttcaatacagttatccatttgcaattcatacatactttattccatcatctaccacatggttcaaggtgttttatgtggaacgttnccctcctacttncataggctctttggccct

SEQ ID NO: 348 - DNA, 268 bp, Homo sapiens
  SITE (159): n equals a,t,g, or c
  SITE (266): n equals a,t,g, or c
agcaggccttcatcagctgctccttgctgggttccggagaaaatgctcccttcttggagacatcggtgacccacagaatgcacaggttcccgcaaacatggacttatcgcacatccacattgatgtcagaaaggtcacagctatatgctgaccataatnaatgatggggacgtggaccccggcacccagagtgggcaccgcaccatgcttaaggaggaagcaatgagcaagccagccctggatgttttctggagttcgagagaggntt

SEQ ID NO: 349 - DNA, 375 bp, Homo sapiens
  SITE (356): n equals a,t,g, or c
  SITE (362): n equals a,t,g, or c
  SITE (368): n equals a,t,g, or c
aattcggcagagcagactcctccccggcacatcccaggcgtggtagaggtgacattatcttataaatctaaacagttctgcaaaggagccccaggaaggttcatttacacagcattaaatgracccaccatagactatggcttccagagactgcagaaggtcatccctaggcatcctggagatcctgagagattagctaaggagatgctgttgaaaagagctgcagatctagtggaagctctttatggcacaccacacaataaccaggacatcattttgaagcgagccgcagacattgctgaagctctctacagcgtccccaggaatcccagccagtttccagccctttttagctncccagngcacantggcatg

SEQ ID NO: 350 - DNA, 394 bp, Homo sapiens
  SITE (199): n equals a,t,g, or c
  SITE (221): n equals a,t,g, or c
  SITE (339): n equals a,t,g, or c
aattcggcacgaggaaataaaaatgtgaactccaggatggggtattttcgatggcttttattctgttacctcagtgggtacccagtactgggattccacgtggcttccttaatgtcccactttttctctctttgtttctctattaaaggaaaaagtacccacctccatgatattccagagacctagagatgagggaaanctgtactttttgagctcactgncccttccactattctctctataagtctccatggccaacccctgtggcattaattggtgttctctatcctgatacctctcaaagacatcctaacccttcttccccaagcccaggttgtntttctaaactgtgtagcaaacctccctgtgtgtttagtcgatacctcaaatgtat

SEQ ID NO: 351 - DNA, 324 bp, Homo sapiens
aattcggcagagtgcatttacaatgttgggcaaccatcaccactatccagatctttcttgttatcccaagcagaaactctgtacctattaacggtaattccccatttctatcttcccacagccctcggtaacttctgttataatttggctctgaattatttattctaggtacctcatataatttgaatatgtatttgtcttttgtgtcttatttagtgtaatgttttcaagttcatccatgttgtatcttgtgtccaaattttattcctttttagggtgaatacttttccatkgtatgtatataccgsatttkgtatccatcat

SEQ ID NO: 352 - DNA, 492 bp, Homo sapiens
  SITE (383): n equals a,t,g, or c
  SITE (460): n equals a,t,g, or c
  SITE (485): n equals a,t,g, or c
ttttgtagagatgaaggtctcgttttgttgcccaggctggtctcaaactctggactcaagcagtcctctcgcctcagcctcccaaagtgctggtattacaggtgtgagctactgtgccctggctctgtaacaccattcttagctgtggggctgaaaaatatggctaaagggctagactttatcagctggctgcactttgtcagcccttggcttatctgattgtaggagagatgatacctgtaaatcttacaaaggcctgtgtagatgtatctttgaatgagatggctaatcttgtgtacctttcaaatacamcagaagaacataatcattttcatttttgaatgtgaaggacaacatttatactgatgtacccgagtataggnttatgtcttctcagacatttaggattcaggttcaataccattttgkgttatttttawtttaaaatataggctcaccnggcccccattggggtatttttgggngtggttg

SEQ ID NO: 353 - DNA, 415 bp, Homo sapiens
  SITE (332): n equals a,t,g, or c
  SITE (415): n equals a,t,g, or c
aattcggcagaggattaagtaggcacagggtacggctcttttgtttgcttaatccccaacagtagagccttataagtcctaggtattctttcctatggggaacagtccccaggatactttctgctgcattcagatgagagctaatagctaatctttaaaaccattaagctgcacttagctgagccttcacttacagattctgggagaccctttgctattacacagtggaatcaaactttgtgaggtcatgagtgtagtcaaataagccttttctgtgagaaatcagtgagacatacatttcctcaatctcagtgctcaggtggggtatatgnytttgctgccytttgtttaaaacaggaattttttagaaggttttttaatcccaacatcccctgaatttttaatagggttactn

SEQ ID NO: 354 - DNA, 354 bp, Homo sapiens
  SITE (290): n equals a,t,g, or c
aattcggcagaggaaaaagtgatgatcagggtcaggtttatagggtaatcaccatgaaacaattgtaggtatttagtgaacactcactaagtgcctagcatsctgggacaacagcagtaaaataaggagacatggcccctgcatacaggatttttatatattagcttaaaagtggaatttaaaatgcaaacaaaagcaatggtgatggttagaaggtgaaacatggtaattcacagttwtcaggttaaggtaacagttggcctttggaatgggatkttttatggaawtgnacttttacatcggccaaagggggaacatttaacttcatcttggcgtttgttttccccttggctg

SEQ ID NO: 355 - DNA, 317 bp, Homo sapiens
  SITE (267): n equals a,t,g, or c
aattcggcacgaggtgaactgacaatgaaagatcaccaaactcataagggaacaatctactatgaatgagagtcagcagaaacaacaaacagatttagtctatgaaaaacatcagggattggcatcattagagaaacaatataaaataaccactgyatgggaatgcttaaagatatgaaagaagaaatcagccaagcacagtggsttcacacctgtaattttagcactttaggaaaggccaggcaagaggctctcttgaggccaggngtttgagaccagccaggggaacatagagagactctatttatttaaaacaa

SEQ ID NO: 356 - DNA, 354 bp, Homo sapiens
  SITE (331): n equals a,t,g, or c
  SITE (349): n equals a,t,g, or c
agggaatacttaactcagagttgtcacaagaatgaaataatatgatatctataaagcacccagcacaatgcctcgcacaatgcctgaacgttaacagttgttatgtctttagctatatttgtcatctgtgarttgaaacttattatacaagctatggttcctcttagctccaaacttctgagatcccatgacctttaagagcagctatgcagttcagaatattaagtttgcgctcctaaatctctgcagacgtgctgggcaggttggactgtctcccagttaatagggatggcagaactgggccacattcaggggctgggccaacaagggntggggatggggaaggggnaccat

SEQ ID NO: 357 - DNA, 89 bp, Homo sapiens
aattcggcacgaggtaaaggggtttgcctgggaaaagatgaagattttcagtaaagaaaaaaaaaaaatagggtggccgggcatggtgg

SEQ ID NO: 358 - DNA, 456 bp, Homo sapiens
  SITE (201): n equals a,t,g, or c
  SITE (415): n equals a,t,g, or c
  SITE (453): n equals a,t,g, or c
aattcggcacgaggagcactttaaatagtgaaagaccggtttttcatttttgccccaaaggtaagaaaactgtgtgccctttaaaaaggtacccttctcatagtgactaagtgtcatacttagtcaaagcctttgataatgaactttcttacaaataaactatagctttatattttctcaatagaaacttctgtaagtatnaaactacatggaaataaagaattttgcataggaaataaggaatttcaaatccacttcacaaattgtaggggtacttgaaataaaatattctacagtagrgrttttcttctgggagccagtaactgrtttcttttttctgtagctgccttgattgatttgatattgttactgaaaatggacatgtgtattttactggraactgwtacccaacagnaaattacacagtggcctgggccagttgcagtgggtccngcc

SEQ ID NO: 359 - DNA, 350 bp, Homo sapiens
  SITE (226): n equals a,t,g, or c
aattcggcacgaggtcatcattaccgtcactcctgattcccattctcctcagggcttaggtctttggaagctcctgggctgggattgggttgggattggaggctgtgggtttggaggcatcttygagggcactgccgctctctgcccgagtgaatgctctgaccacagatggaattcatcgttcactgtaaaaatcaaatacgtggcccttgcgtgtttttttttnctcttttgacaagrcaattgatgtgccatctccagcgtatctgcttggggtcggaagctttggctttagcctcctctagaacaaccagcgtgtctttggggtttatttgcagtctacaggatcc

SEQ ID NO: 360 - DNA, 433 bp, Homo sapiens
  SITE (285): n equals a,t,g, or c
  SITE (376): n equals a,t,g, or c
  SITE (403): n equals a,t,g, or c
aattcggcacgagaaggggacaaataataaacttttttaaataacatggtattttaagacaaagaattattttgtgaaatcttgcatttcttgtcaggaaaggggaaaattacataattagagtcggcaagaaaaaaaatgtattcagtataataattagtgctaaaggacattagtgaccagtataaatcttccggccaatattatatagtttgcacaaaatcatagcatcacaattctgtataagcagtgtgtttatgcattcttttaacaactttattgatntataattggacatacagggaaaccacatatttatttttawttatttgtttttttgagacagatcttgctttgttgcccaggctgaggtgcntggtgcatcttgggtcactggcgtctngtctccgggttcaggggctctcctgcctcg

SEQ ID NO: 361 - DNA, 135 bp, Homo sapiens
  SITE (129): n equals a,t,g, or c
aattcggcacgagatttccttcttttctgagaggaaaagccattaattttatggttaatcataagggaatattaggcctataaagggggaactaaccaagggtttcctagaaaagcttggtgtcagctnattcta

SEQ ID NO: 362 - DNA, 448 bp, Homo sapiens
  SITE (12): n equals a,t,g, or c
  SITE (346): n equals a,t,g, or c
  SITE (358): n equals a,t,g, or c
  SITE (394): n equals a,t,g, or c
  SITE (414): n equals a,t,g, or c
cccgggctgagnatcggcacgaggtggggggtagggatttgggaagagagacaagggctttaggaggtgggagagcagctggcctgcatttttattggtgttaatcttgggatggattgaaattttaaaagttaagacctaatataatttcaaaggccaaatattatttcagaaagtcccagtggcaaactctggtatttaagaaagttgagaccatttttcttttccttcctactaatttgattaaatttcttaaaacctcattgtgcccatttgctgcaaatgtttaagcatctctcaagtatattttactttctgaggatggtagacttactcacttgcggantccacacacccntgaaagaggtgggtttaaaaagttttaagtatttanttggtttgkggtttaattcngtgggggaccmsagggggcaatgagctgcagagg

SEQ ID NO: 363 - DNA, 484 bp, Homo sapiens
  SITE (390): n equals a,t,g, or c
  SITE (432): n equals a,t,g, or c
  SITE (441): n equals a,t,g, or c
  SITE (457): n equals a,t,g, or c
aattcggcacgaggtgatctacctgccttggcctttcaaagcgttgggattacaggtgtgagccaccgccctccaccgtaagcttctcttctgtccttactgtttccgcctggaacacctcacatggacttcaattgggaaaaaaaagtcatctgatttctcagatgtgcaagttattagcaaattcaagacctataagagaattaagaaatagccaaagaaaatgcagccctttctgtaattatttttttagattctcatgaaaaatgttatttgtgggrttagcagaagratccakttctggtctatgtcattttattttctgcaccmgcttcatctgttgagttggaaatggcctctggggtccagaggattaggaagtgggtaggntttcttcgctgggtaatcccaagttgccttaaggactcccantggggaggngaggtgggtgggtcantggggtcgggggttcgagaccagctgg

SEQ ID NO: 364 - DNA, 315 bp, Homo sapiens
ggcagagtgttaagcccacagcagtctttaatctggggttattcttattaccaccattgaatccaactattgatgccattgtttattgccactttccaggactctattcaatggccatatgttaagaggtgtttcactgtagctgatgggaacatggaactcttactggcctggtgtgagctctgaggaataactgttccctgtttgtttctgatggtttttccccagccacatttgttttcttatagagrtatgctgatcagtattcagccacaggtttkaggrggaactctctgargatattgggrgttctct

SEQ ID NO: 365 - DNA, 324 bp, Homo sapiens
  SITE (222): n equals a,t,g, or c
agagattgagagaggccttctggggacagcctgcctgatatggtgcattctcctctscctctgtctccctggatgaggcctgaggcagggcccgctcccaccccagctatgtcctgatctcagggctcagcagagatgaggtcarygccaggcccctgtggctggctgggtaggtccctggcaggtaacttctcatgctctggcaagaaaccccagatgggnctctttctccaactcaactctacaagcaaaatgctggtatttacttcttcatttgattttcaggggtttatttctcagttgctttcagagcttgacatgggg

SEQ ID NO: 366 - DNA, 167 bp, Homo sapiens
aggatgtgatgagaacggggaggtggcgcagttttgcttttcctccataggaagaggaggacttccacagcagcgatagttgctaattgttgtgtagagatttccaggatgagattgggttgctgtctggaaaaaytagccagagccatgggagtgggatgtggatg

SEQ ID NO: 367 - DNA, 453 bp, Homo sapiens
  SITE (20): n equals a,t,g, or c
ggcacgagctctaatttctnccttgtgggttacaataatgaatgcatgtaagggcctagcccagagccagaacacagttggccttgaataagtagccttcccttcccctcgttctattgccctcctacccctccaccctaatgttggcttttccaccctatcagttactggggaggatgaggagtgccagtccttcctgggaaattgtagccctagggaagtctggaatgggcagagcctctttccaaaaatggggagggggcacatggctccctggagcaccagattcctggcagatatgctgccctgytgagagtgggtacagagccccgyttaggtctctgttttcagggagytccctccytcctgtttcataaggggggacccagaagaaaccaggagccagggagtcaggytgatgaggtggttgttgcctttaggggcccactttag

SEQ ID NO: 368 - DNA, 127 bp, Homo sapiens
ttctaaaacccaagaggaacaatttcaaacctactgagcttttcagtgatcattgtaatattggggagaaggttctaggaagacccataaactgagagaatcctcacatgatsctgcctgagaattg

SEQ ID NO: 369 - DNA, 298 bp, Homo sapiens
  SITE (29): n equals a,t,g, or c
tggaagggtaggctacatcagcggatctnactccactcgttaaaacttcatctcttcgtttgtttactgtaagactgactggggtgttttggtatttggrgggttggttgraaggatatgaggaattctatttgtttgctttaacttgttcctaaggagttaaaactaagttttagttcatttaaaatacaaaaacagtcaaagctaatctgtgcctgataggggttgttccccatgggaagtttgggggaggggtcgtgsctacactagggggtgctgttcgtgttctgtttcttcc

SEQ ID NO: 370 - DNA, 641 bp, Homo sapiens
  SITE (11): n equals a,t,g, or c
  SITE (19): n equals a,t,g, or c
  SITE (637): n equals a,t,g, or c
cgatgacaagnctcatttnacttttattccctttggaaatggtataaacgcctgagtggaaggaatgtgtktaaatatgtgccagtaagcagcaaaatggactgatctgactcctcaccttttgttcctaataattcttgcctagragratgatcagtgagtcagaggagtacaatcaacagataaaagcaacttcagctagtcaagcattcgagaagttgttggacatttttaacacatagraaaccacattatctttattctctgaaccagtaaagaaaattaaggtacagtctattggatgattgtactaatacttgcttactgcgtaggactccaagtatttgaattggcttttgttggtctgaatctatatatccatcttgcccacctaactgctatttttcctaatggctgtttcaaagtccacgtgagtcaaattggtatctttgtgctgacatagataatggtatggtcactgttgaaattggacagaaggcactgccaaataascagttaaagtaaatctgaatttaggatgaggtatgatttcatagaccaaaatagcttcatagactttactgttttaaaatgttatgaattatgacaattattacttaaatgatgttggcgggcnatcc

SEQ ID NO: 371 - DNA, 310 bp, Homo sapiens
taggtaatgcatgattcttgcaaattaaattttatttggcaagttcagtaacagccttatggcttccatgctataatcaaagggatgtatttgwttcagttaagatagaatctgtgtttctatttcttttatttcatcttattagaaaagtaatgctctgtatagaaactagargaaaattaaaatcatctagtccccacctaccagacaaccagctttgatgtacatcatttgatgtatgtttttgtttttttaaccataaaagggttatatcctttccgccactgttttcactcatacattgtggaaa

SEQ ID NO: 372 - DNA, 324 bp, Homo sapiens
  SITE (8): n equals a,t,g, or c
  SITE (321): n equals a,t,g, or c
  SITE (324): n equals a,t,g, or c
ggcagagnatgctttctctgcatttattagaataattatgcttttcctctatctgttattataatgggtcagatttatagattttcctcatactaagcctatccttgtattccttggataaatctaacttggtaatgtttacttttttcataacttttagctattaagtagataccaaatttcctttcaaggtcaagtttgatagttataaaaaactagtgatactaagtcatagaaaatatactttaaaaaactagtgatactaagtcataggaaawtatactttattttataaaaggactttaactgtaaaargtaaanaan

SEQ ID NO: 373 - DNA, 166 bp, Homo sapiens
  SITE (122): n equals a,t,g, or c
gactggcctgggatagagatacacatttggggggagttggcatgtagagagatttaaagcaataggaatgagtgagagagggagagagaagaaagagggcctagcactgtgatttcattttnctattgactctgttttttgaatttaattttagacattagaatag

SEQ ID NO: 374 - DNA, 224 bp, Homo sapiens
  SITE (7): n equals a,t,g, or c
gtacctntcacaggaggacacctgatctgaataccagtcagggacctgagacgcgttgagcccctccccacagtgcccagggtaggtgcgccgctctytgccccttccgggagctctgctttttctacctttagagatttctttcatcctctattacgtaggcctgactttttgcctaataaaggaaaaacaaccattctatttagcactctttttttttttcc

SEQ ID NO: 375 - DNA, 218 bp, Homo sapiens
tataacagatacccagtacacaacccagatctatttcagtatttgtttttgttgttgttgttttgagacagagtctcgctctatcccccaggctggatggagtgcagcgccacaatctcggctcactgcaacctccacctcccatgttccaagtgattctgaatgcctcagcctcctgagtagctgggattacaggcacctgccaccacatctgggct

SEQ ID NO: 376 - DNA, 293 bp, Homo sapiens
  SITE (287): n equals a,t,g, or c
gggaaaacattttacacaggtcaaccgtaagtttggccatattaaatgaaaagaagaactcaaaatgcatgtggtttggccctgaggagcatcttctgatctggtggcttgtgaaaaagtcagctttatggccaggcacgttggctgatgcccgaaatcccagcactttgggaggccaaggtgggcggatcacctgaggtcaggagttcaagactagcctggccaacatggtgaactttgtctctactaaaattacaaaattagtcgggcatggtggcggggctgtnaatccc

SEQ ID NO: 377 - DNA, 620 bp, Homo sapiens
  SITE (573): n equals a,t,g, or c
ccttttatttggagatgcttttatactttatgaccacttgaagtctctccaattgttacatactgagagtgtaaaacattgagataataacttatacaaatagtcacaaaatggagaattgaatattggctcctgagttactctctcctattacccaaaagcccatgatacacagcctgttgtaaatatagtttcttttcaccttgaaaacattgccataaaactgaaaacactttctaaagttgtaaatttctattagcatattactgatgatttttaaaggagactttccattaaaaagaaatgrtaattttcttaattgcaagattaaacatggaaggtaaaagccatatgaaaatgataatactcataaaataagagtacctctggtcattagaaaactggaaagaaaaagattacagaattactagattaataggttgtggtcatctctgaaaattatgcttagtagaagatattagtgagtatttctataagtcagttaatattcaccaatattttggtaactccataaagcaaggcttagaataacatcctgatatgactaaagantgcgctcagctgggcgcagtggttcacgccttaatcccaacaccatt

SEQ ID NO: 378 - DNA, 219 bp, Homo sapiens
aggggaaaaggcaacttctgcaaagtgtcctcttgaaaagttcttcataagacacaaatgaggacacaccttcttttaaaaatcttaggagcatctgcaagtatatagtcaagaatgtcaatttaaagagtaggagattgtcttgaaaataaggtactgaaacactttctgtgacagagactgccattttcttacctattatccatttttttactatct

SEQ ID NO: 379 - DNA, 380 bp, Homo sapiens
  SITE (357): n equals a,t,g, or c
ggcagagcttcttcagctgaggcagagtctggagttgtcctaatttctccatgaaagtttgggrrtttggggtyagaaacagggaaagggacattcctgggtcagacccatagtgggtatttctaaggaggggtggaaatcaaagaaacaaaatgctgatatctccaattggagataaatatgccatgtatgcattgctttaggcagtcattggtgacactagccagcaatgtgggaaacatgtgggrttgaatgtgtccaaagagggactttcagcttaccttgggcatgtyttcaaaggaatgcagagagttgaaactgggttccttcacctgtttttttccatggaggtgtggnttaaggggactacagacttcagg

SEQ ID NO: 380 - DNA, 328 bp, Homo sapiens
  SITE (235): n equals a,t,g, or c
  SITE (323): n equals a,t,g, or c
ggcacgagctcaggacagatccatacctcctggctttgtaaatacatgtgcrttagaacacagccgggttctttcttaaatgaaatacttaaatgtattgtcttatggctgctttcacactacagcagcagagttgagaagttgtaacaaagactgtgtggtccacaaggccacaaatatttaccctttggcctgstgaccccttaatccatccaactggctgcctgtgaagtgnatctcttaaacctcagatcgaaccacaccactcttctgctkacaaaaaaaaaaaaaaaaaaaatttttttggggggccccggaaattngggtt

SEQ ID NO: 381 - DNA, 460 bp, Homo sapiens
  SITE (355): n equals a,t,g, or c
  SITE (451): n equals a,t,g, or c
ggcagagcggcacgagcaggcctggagtggggtaagggtataactggaaaaaggaacatgagacaatggaaagagcttgtacattcagaatcgggactcctgggttcagcatgtgacttcctcacttgacctctagagtgrtccttttggaaaatgcccactctctgtaggcatcagtgcagtaataagttggtagcaggatgtgggttgggggaaaaaatcagatttggtttatttgtttacaaaacattttgggttcctcaggcaaaaggtatttattagtagtggttagtcatcctgagaatttccctyyacccttggtctttcctgtcagatgttycwagtccacaaccangggtgtaagtcattttgaaggccaagctccaggcctgcttccctccatctgctttgctttttcccccagtgcataaagtggctgatttctgccccngtccccacg

SEQ ID NO: 382 - DNA, 354 bp, Homo sapiens
  SITE (321): n equals a,t,g, or c
ggcagagaatgagcaagccttcatattttgtgtatatgagtaatatatatttctattttctggggaaaatgctgtttacgatgcagattataaaacactgatgttaacgagggattaggtatttttaccttattttgcagaaatacaggttaccatacacctattatattaagtgattgggtcaagctcagtattgagatcaactacaagtcacaggctggacatttccaagatggcattcaagtgttcactgtctaagactagtactatggtttaaagagtggtttcaggaccagcagcagcagcattactgggggaacnggaatcagaagctccagggatgggacctaggaa

SEQ ID NO: 383 - DNA, 409 bp, Homo sapiens
  SITE (355): n equals a,t,g, or c
  SITE (384): n equals a,t,g, or c
  SITE (409): n equals a,t,g, or c
ggcagaggtggtttcgtatataatcacaatcagctgtctgttatctaggggcaggttgtcctctctraggttcacctstgaaaaatttcaatcctgatcagacctttctctcatcccagcaaaacatagttgggaaaataaaccttcttgtaaccctcgtgggcatccatcccggggcactggccagtgggtaggagtgtttaagtcctgagtcggggattcttggttccactctggctctggacgagtcacaggctcccctgtgggctctggtccagaagttaaagaggagggccatggacttagcctcagaggctgttttgagcataggatgaccctgtggggaactggtggncccatgccccggcccacaggacttttcanttaggcgagtcgttgttgtggcctn

SEQ ID NO: 384 - DNA, 347 bp, Homo sapiens
  SITE (307): n equals a,t,g, or c
  SITE (330): n equals a,t,g, or c
gggcacgagaccttactttatgagactccatttgtgtacctttcaggcctctctttgggctcaagattgagaaaaagaagaatattagataaaagttggcttcacctcccctggggggctgctttctgctgcttttatgagatgsttgtttagttttttcccttgsaagaagacaagatctggggccctgttgaggatgtacattctgctgctagaaatgagcagggttggccgggcatggtggctcatggctctaaatcccagcgctttggggaggctgaggtgggcggaatcacttggaggtcanggagttgggagaccatcctgggnccaacaagggtggaaat

SEQ ID NO: 385 - DNA, 440 bp, Homo sapiens
  SITE (376): n equals a,t,g, or c
  SITE (399): n equals a,t,g, or c
  SITE (405): n equals a,t,g, or c
  SITE (408): n equals a,t,g, or c
gggcacgaggctaattatatttgttatccccgttgctatttaccaaatctatatctatattcaataaaaagagcttaatgaaaacctgtgyacccaggattctgttatacatgmttcagaacaaagtatctggcatgactttcatggagataccaacgtaaatatcaagagaaaacataaatacttaagtcaacaagtgrttattgctttatktcatatttgccatgtgccagacactgagcaatgtatgggagraacaaagttgattaagagacaattcctagtctctagatgctgctagtctgagaaccacacttggatgaccacggcatgtggcaatgcttctcgaagtgtgatctggaaaccactgggggtncctgggactctttccagtggggncccaanggnaaaactggtttccataacgctaagatattatt

SEQ ID NO: 386 - DNA, 320 bp, Homo sapiens
  SITE (3): n equals a,t,g, or c
  SITE (7): n equals a,t,g, or c
ggncacnaggttatggtctgttactaagcacaaggaatttgagcaaaggagggagaaaaataaataactatttttaaagggaaccattgtattcaatggactcctcctttttgagggtctgtcgtgggcaaaagattgtggtgcctcctgagagtgatacagaggcaagtgagtccccgactcttcctgcaggagtgtgtaggtcagcaatattgcagtttccaggtgaggagagaggtgctcgatggaggggacgtgatggggaactcaggaaggggttcctggaggtgcacttcagccgcgccttcagcaatctgcag

SEQ ID NO: 387 - DNA, 337 bp, Homo sapiens
  SITE (308): n equals a,t,g, or c
  SITE (323): n equals a,t,g, or c
ggcacgaggacagacagggtgcttgtgcctcaagccaacagctcagtcaccatagagaatgaggccctgccctgactctggagcttctctaacactgtgcgtgtctgtgctcccattcttgtctctaccagccgctccagagcatctgtggcttgcatactgttactgtaggagcgttgcttgtgccccaggcacagtgccattaattcccagatctcatagcaacagactctccacatgttctcatgtttcaggcctcagctccatggctgttccacaggtaccactcaaatamtggtactgtccanaatggcaaaacagcncataaaccagaccc

SEQ ID NO: 388 - DNA, 160 bp, Homo sapiens
cacgagatttcctcggtcatataaagttctattggatagtsctggtctgtagcttataggatggtatctwagtctgcttcagctgctaaaacagaataccataaattaggtagcttaaacagtagatattttgaccaagcgtggtggcttatgcctgtgt

SEQ ID NO: 389 - DNA, 419 bp, Homo sapiens
  SITE (390): n equals a,t,g, or c
  SITE (418): n equals a,t,g, or c
ggcacgagcgaccattaggctatgaacaatctttccatgtgcaatgtatatatatatctsctttatgttttaaatgtctatattatattactttataagcagggaatttagctagtcctttaatttttttattcattcattctttcaatattcattatgtaatgaacaagaccatcatggctctgttcataaagttaatttttgtcattcacacccagaatacaaaaaaagaaacttaaatattatttgcatcatttttaaagatgaggaaattggagtagaaagagagaaactcttcttgccaggacattttgttatttagtgrttggtaaccagtactctttttcccctatactgtctatgtttaacaataaatcttcctgaagtaancttttttttttttgagacagagcccgcnc

SEQ ID NO: 390 - DNA, 335 bp, Homo sapiens
  SITE (11): n equals a,t,g, or c
gggcacgaggnaaaaaaagaaatattcctgagacattaactggatcccttggttgaaacagcagaggaagcagatttttgaacctgaagaaaaggcacatagaaaccaaaaaagttctcaacattattttacccccttgcagaagctagaatctcccagtttcagctgttttctcttctcccagcttcctaatgtacttactccctgagccagatattctccaactttggaagttcctcaggaactcctggggaagcatgattacaaagtcagawttgtaagtagagggtggtcccagacagcaggctaccggaacccatcaggacctcactggg

SEQ ID NO: 391 - DNA, 463 bp, Homo sapiens
  SITE (458): n equals a,t,g, or c
gggcacgaggcgggtccggcctggaccgcgactctgcccttctttccaggtacgccttcgtcaggcccgtcatcctgcagggactcacggacaactcgaggttccgggccctgtgctcccgcgacaggttgctggcttcgtttggggacagagtggtccggctgagcaccgccaacacctactcctaccacaaagtggacttgcccttccaggagtatgtggagcagctgctgcacccccaggaccccacctccctgggcaatgacaccctgtacttcttcggggacaacaacttcaccgagtgggcctctctctttcggcactactccccacccccatttggcctgctgggaaccgctccagcttacagctttggattcgcaggagctggctcgggggtgcctttccaatggcatgggacccgggtactcagaagtgatctacggttcgtaaagcgntggtt

SEQ ID NO: 392 - DNA, 121 bp, Homo sapiens
gaacgcagcctgcttgccttttgtccaattgggtgctctttctttgcgactgatacaaagtgggaacaaactccgcttccggtgatgcccgggccccaggaggctgggggagaagtgcacg

SEQ ID NO: 393 - DNA, 333 bp, Homo sapiens
agggatttttctagcaaattaagaattaatatagatattactgttgccatgaagtgtcaatatgttggagcggatgtattggatttagcagaaacaatggttgcatctgcagatggtttagtttatgaaccaacagtatttgatctttcaccacagcagaaagagtggcagaggatgctgcagctgattcagagtaggctacaagaagagcattcacttcaagatgtgatatttaaaagtgcttttaaaagtacatcaacagctcttccaccaagggcaattccacatcctcgtggtcatgcacatttkggcagcacttgttcaaccctggat

SEQ ID NO: 394 - DNA, 496 bp, Homo sapiens
  SITE (69): n equals a,t,g, or c
  SITE (76): n equals a,t,g, or c
  SITE (213): n equals a,t,g, or c
  SITE (420): n equals a,t,g, or c
  SITE (461): n equals a,t,g, or c
  SITE (478): n equals a,t,g, or c
  SITE (493): n equals a,t,g, or c
atggggatcccacccggtgaggaccactctggaaactagtgggtcccccgggactgacaggaattcggncacgagnatttaaggaaccctatcttacttggagatcataaagatcctcaaattctctttttttttcgcctataatgtgttctatgatagcaaattctctcttaataaagttactttttacattgagtctttaattcccttggnaatttgtttttatttaggtctaaggtagcgatctgattatttttccatttgggtaactgtttgttatagctattgttattgtaagaactacagtaatttgtaatgcctctgtcatttgtgaattttgacaaatgcataggtctgtttctaggctctcaattctgtgcctttggtctatttccatattcttaccactcttttaacttncaatagtttcattacagatgtgattcccagagtgtcggctnctaacgggggcatcgtncgttgctagggattncct

SEQ ID NO: 395 - DNA, 429 bp, Homo sapiens
  SITE (381): n equals a,t,g, or c
  SITE (400): n equals a,t,g, or c
ggcacgaggggaagtcacccaacgctagtgtttaaaatggagaagactgggggcctctgcgtttagatccacctcctacatcccttccatgtcctcatcacagatgtagcctctccctttatgcctcatacacactgcactccaagtgtgcctttcaaaggcatccttgatatttgttatgcaaatatgctggcagtgggcagcatccagagccccgtcccttagggaaggtgctggatgccccaacccgccaggtcagtcctgtttgacctgagctttcaacctaaaatcttcacgrgctgcaaagattaaaaatagcaacartaacaacaaagccttgtggtgatataggttcgttttctcccagtctatggaatttgncttttgaccatgttacatngggggcattttaaaatcaaaggcagctct

SEQ ID NO: 396 - DNA, 499 bp, Homo sapiens
  SITE (447): n equals a,t,g, or c
  SITE (451): n equals a,t,g, or c
  SITE (454): n equals a,t,g, or c
  SITE (467): n equals a,t,g, or c
gacaactctcccctgcctctgcaaacccgcatacctttccctttcaggcagagtcgtgtgttggggatggttgacgctttttaaagaacatttaacatacaccaacagcaggtctcagatactgttatttatccatctattcctcaggcctcagctagactggagtgggtgcagagaagttagaaggctctggcagtaatttggtcataaggaaggaatgtgttatgtggagtagcagttaatcaactaagcggtaagcaggttttcagtgaaacaccaccgggagctaatcccacttaacataaactacagtgacttagagggaacaaactgtctaaccctgagctctcttgttyccaggaaataaatcaggatgaagtcaagagacatcaaggagttacattaaaaggcctaccaagtgattgaaatatccttaactggctgggnacancgntcatgcctttcancccaatactttgggagccgagcagcagaccac

SEQ ID NO: 397 - DNA, 416 bp, Homo sapiens
  SITE (28): n equals a,t,g, or c
  SITE (42): n equals a,t,g, or c
  SITE (407): n equals a,t,g, or c
acctgcttgggaagtcctgagaacaggnaagctcccttgtgncccaggagttcaagtacagcctagggcaatatagtgagccttcgtctctaaaaaaaatttgtttttagttttttaaaaaagaaaaaacaatagagctagagatcttcaacaagtaagacccagtgtcaaggcaggccactctaattagatatttggatcaaatataatttaaggttaacaataattactgcaccagaccctttatttgaattattacatttaatccatacaacaaacctatgaaaaggrtaatctgtaagaggcttattgcagccccagccactatcacctgatggatgcccaaataattgtgttttaataaatgaaggatgagtgaggaatttcacctttgcaggtaagaactnaggctagag

SEQ ID NO: 398 - DNA, 475 bp, Homo sapiens
  SITE (22): n equals a,t,g, or c
  SITE (424): n equals a,t,g, or c
  SITE (435): n equals a,t,g, or c
  SITE (437): n equals a,t,g, or c
ggcacgggtagggaaatcaagnaaattaaaagtgttctcaaagaccctggatttctctgacagcaggggtaaatgtgtccagtttctgcatatagggaagaaagcgaggatcagcatggggaatgaaaaaaatgtatataacaacacctctcctttcttccaagctaacgttccttctcttgttttctacctgcctggacttctagccctctctcttcccctgctgctagccctaagttctgcagagtactctgcccaggaaacaggacaggtaatgacattgcaggccggggaccaaccgrgcctytaggttyttctgcccattcgttgtcaagccagatgtcttgtgcgaggctgttggctaaggcacctgcttgtgtttgtggctctagtgactctgtgcacatggccatgcagtaagagntgttccctgcntntaaagccagggagaggtgagttgggttgcttttaatcc

SEQ ID NO: 399 - DNA, 222 bp, Homo sapiens
  SITE (215): n equals a,t,g, or c
tccagcgtgggcctacacggatatggggagcccactgagggatgttttccccccttgcttgtgccttaaaggcagagaagcgaggcggasccatgcagtagggcagaaggcagcggaggccaggtctgtcccggctggagaacagcgtccacgcagtcctgcctggggtcaggccctcactgaccctcaggggagcccccaaggtgctgtctgtntagaaag

SEQ ID NO: 400 - DNA, 80 bp, Homo sapiens
ttggacctctaggggtgactgttcctggtgggttggtgggttgtctgtgggcagggaagagtggggagtggttccagtga

SEQ ID NO: 401 - DNA, 488 bp, Homo sapiens
  SITE (427): n equals a,t,g, or c
  SITE (470): n equals a,t,g, or c
gggcackaggtttcttctctccggacctctctttctcttaaagggaaaaagtaaggctttacaaggaaaaaaaacaaggaattgcatttatgcaattcctttgtgatctgtgatcttattttctaccctgcagggctaggtagaacgtgcttcctctattaaataagttcagtttcagaaacatgaattagaatcttgctgttctacccagaagcctccacagaagtaactcttgggccttggctcttattctctgcctccagttttctcttcccttgggaaggcagcacacctaccaacattactacctaacataaacaaaccatgtcccgscttccatgactcttccatgagtgtgctcgttaagataagggtaaggaaatgaagcggggaagactcctacacagkgctgttgtgcccaaatagncataactgttaatacacatcacattagaagagccagctgtaancctcccagacccctctcc

SEQ ID NO: 402 - DNA, 330 bp, Homo sapiens
  SITE (232): n equals a,t,g, or c
  SITE (305): n equals a,t,g, or c
gcagagcacgtcacgacagtggttcctctggtgttggggggctctaggatccaggacttggaatgttctatttcttggtctgggggctagtcagagggatccgtacacttcttttttcttttgtgagacagtttcactagccaggcatggtggtacaaacctgtagtcccagctacctgagaggctgaggataggaggctcaactgagcccggggaggttgaggctgcagtnagccgtgatcgcaccactgcactccagcctgggcgacagagtgagaccctgtttccaaaaaaaaaagaaattngctgttttagcccaggtgcagtggg

SEQ ID NO: 403 - DNA, 416 bp, Homo sapiens
  SITE (122): n equals a,t,g, or c
  SITE (355): n equals a,t,g, or c
  SITE (363): n equals a,t,g, or c
  SITE (367): n equals a,t,g, or c
caggggcctttgatgaccatggcctgccctggatgagcgacacagaagagtccccattcctggaccccgcgctgcggaaagagggccagtgaaagtraagcatgtgaagcgtcgggagaagnaagtctgagaaggaagaaggaggagcgatacaagcggcatcggcagaagcagaagcacaaggwtaaatggaaacactcagatgactgtggcatgaagctggcagccaaccgcatctacgagatcctcccccagcgcatccagcagtggcagcagagcccttgcattgctgaagagcacggcaagaagctgctcgaacgcattcgccgagaaccagcagagttcccgcaatcgncttcaggnaatngaacgccgattcattagctttaggccatcatctacgttccaagcagcag

SEQ ID NO: 404 - DNA, 398 bp, Homo sapiens
  SITE (352): n equals a,t,g, or c
  SITE (395): n equals a,t,g, or c
ggcacgagctttggcagagaccttctgcatagtcttagagggtgagggccctcaaatttctgtgggtcccatcctgttacctactttcaacctaggctcctgtccaccgtggatcgcaccaatatcaaatgaggaggtgtcgttaagtgagggggattctgtttgggtattatagactcatagatggaaagtatctcattttgaggctagaaaggggacaaaggaagcactaattgtgtttttccagatgtcatacaactaaggcaatcggcaaaagagagatccatttaagagaccattgtccatttagtaagtttaagagagcattgaacaagccatatgcctctattangcctgcttcctgtgaacagtacaacagatgggccaagcactgntca

SEQ ID NO: 405 - DNA, 336 bp, Homo sapiens
  SITE (3): n equals a,t,g, or c
ggncacgaggtaaatatttcgtgaacgcctgttatgcaccaggcaccatgcttggggatacagtgataaacaagactgtatggtccctgccccagtagaatttatagttttgtggggaagacattaatcaaataataactcaaattattacaggttatgacacatggaggaaacagggtgagagagagaagagactttagaaccattgttagggaaggcctttctcaggaagttgcatttaaactgagcactcagcatgaagtggagctacccatgtaaaagggtgagggggagtctattccgtaagaggwgaaataatatgcaaaaggccgttag

SEQ ID NO: 406 - DNA, 315 bp, Homo sapiens
  SITE (3): n equals a,t,g, or c
  SITE (207): n equals a,t,g, or c
  SITE (314): n equals a,t,g, or c
ggncacgagctttgttgataaaactcctgaaaataactcacaaggccagtgctgcactctggcacatgtaggttgttttgagggtttgttggttggttggttggctggttgattggttggttggtttagaacactaatgtacktgttatgaaccaaactctggtcttacagtcttaaattccacctcatggggctgttttctctgtnagcaatgaaacctgggccaggtgtagtggctcacacctataatcctggcactttgggaggctgaggtgggaggattactggatcccaggagtttgagaccagcctgng

SEQ ID NO: 407 - DNA, 92 bp, Homo sapiens
ggcacgagtgactgagttctgcctgtcctttgtccacaaaaacttccttgtgggcaaattatgagagagatttgtggctttttttttttttt

SEQ ID NO: 408 - DNA, 522 bp, Homo sapiens
  SITE (267): n equals a,t,g, or c
ggcacgaggtgaacctgggaggcagagaggttgcttgactcctccgctgtgtagtgctaagcagcctctcttttcttggaataacaaagatatcaatctagagacttgctacttgaagttgaagctgcagttaagtttatagggtgccaagtgctcatttaatcctctcaatagccctacaagaaaggtgttgtagcattccagatgaggaacagttgcacagagcagttaagtaagtttcccaagatcagaccactwataagtggncagagttaggrtttgagcccaggaagtcyrgctccggagtccatgtctttaactgtcacactctgctggttgagcagctgagcaccaagctcctaaggaagaggccggctaagatgggcagagttcttatccatacctgcactcacaccctggcttcagactcccccaaaactgattcagcaaactaatctgaaagtagcttcctgtcacccacccatctgaacactcattacactaaacacctcttggaaaaaa

SEQ ID NO: 409 - DNA, 346 bp, Homo sapiens
  SITE (338): n equals a,t,g, or c
  SITE (342): n equals a,t,g, or c
ggcagagcggcagagtctaagcctcaagggcccatgggcagaaatgcccagaaccccatgaaagaaaatratgcttttccagcaagctgcaccccggccctgggcaaggggcagctgcttccaccctcctggtccctactgccttcatattcctgctccctagctcaccccctccctcctaagtgaagagaagtcagatcaggctactgttctgacatgcacaccttctcttctgttcctgggaacccttttgtttttgtgtttgttttaagaaggagtcttgctgtgtcgcccaggctggagtaacagtggcatgatcctgggctcattgcaacctntggnctcc

SEQ ID NO: 410 - DNA, 294 bp, Homo sapiens
  SITE (43): n equals a,t,g, or c
  SITE (272): n equals a,t,g, or c
  SITE (275): n equals a,t,g, or c
cccagagagagcccatttttcaatacaggggaattgcaatagngacagagattaattcatgcagaaccagccgaacaggaggccggagctttattcttacatcaatcaccccaaaaattcggaggctagactttttcaaggatactttggcaggccaggggattcgcttctggctggggccatggggtggggtggggtgaggtggtggggcggcaggggtggggaggtcatcggatccaggtggagctaatgatggtcagaaatgcaaaaanctnggccgggcacggtggcttg

SEQ ID NO: 411 - DNA, 379 bp, Homo sapiens
  SITE (285): n equals a,t,g, or c
ggcagagcttgtaggtgctcctgcggrcgcctgggctgctggcagggacagtgcccgggttcgtctcgcarccagaggccagaggcaggccaggtgaggccatgctcttccctgtctgcacaccacactgctggcaagtaacacaaaacagagactggctaccccaaggggccaggaggcagcggaaacctgaggctcagacactagtgaggcgttccagctcagggccaaaatcagagccagggcagctgtgggactctggctatggcgtctgtcgtacaagtnagaaacgaaaagaatgactgttcccgtgtcattcagcaaaacacatggtgttctttggaggtgaagagaggtgcccaagcaccacttcggtttt

SEQ ID NO: 412 - DNA, 163 bp, Homo sapiens
  SITE (76): n equals a,t,g, or c
aggtaaaacttgaaatattctagaaagtagagcaaaaatccagagagaaggaaaatagaagaagaaagacgcartnaatagagcacccatttagaaggtctgacatccaactaacgggttctacagagaacagagaatgttaaaaggaaggaaatcatcagtg

SEQ ID NO: 413 - DNA, 437 bp, Homo sapiens
  SITE (8): n equals a,t,g, or c
  SITE (365): n equals a,t,g, or c
  SITE (381): n equals a,t,g, or c
  SITE (409): n equals a,t,g, or c
  SITE (410): n equals a,t,g, or c
ggcagagnatattaatagatcttatggcttattggcagcagggtaaacatttttcctgtaataattgtcaacaagactgaggactagctgtaatggtgagccacaaggggtttggcttgtacagagagtaagcagagttttaatgggatgactatcttaaactgaaaccaaatataaaaatgactttaggctcacacctgtaatcccaacactttgggaggccaaggtggctggatcacgaggtcaggagatcaagaccatggtgaaccccgtctatactaaaaatacaaaaaaaattagccaggcgtggtggcgggcagcagtagtcccagctactcgggaggctgaggcaggagaatggcgtnaaccttggaggcggantttgcagtgagccgagattgggccactnnacttcagcgtgggtgccagagcgagct

SEQ ID NO: 414 - DNA, 384 bp, Homo sapiens
  SITE (113): n equals a,t,g, or c
ggcagagctctaatgtgaaattggtgcattttttcattcactcgttcactcattcactcactaatacattcaaatgctgggtgcttctsctgtgtcaggcccttcaggagtgnaatgagagcctcatggrgctctcgtgcctaacacaagagacagccgataaaacaatgaattcacaaggaattatttcatgacagttgtggttaggtgctaccagcgctaccaggtactagtgccaaaacagcaactaacagaagccctcgcgaggtcctggggataggggtgggtggtcaaagaaggctgctttaaggaaacgrcmtcccatctargactaaagaagtaggagttaggcaaaaggtgggactccccattaaattttccttc

SEQ ID NO: 415 - DNA, 378 bp, Homo sapiens
  SITE (341): n equals a,t,g, or c
  SITE (368): n equals a,t,g, or c
ggcagagtttcagatttaaagtatacataggcacagaaagggctgcagaaattatagctgaacaaagaaggagcagatggaacccaggagatggaacttaagaatccagctgtgtgagaccatccgctatacatgtcaccagcccaacattatagtactgtggatctttataatgctgggccgtaaagaatatattagattattatttgtatactctgcattaaacagaaatgttcaaaacaacactttggcatttgggccaattatctagaaaaggcatatggratattgcatttcccaatcatgctgcataactgaacagctaccttaggagaagtttnttgtgttcacagtggaattaaactttnatatggactt

SEQ ID NO: 416 - DNA, 436 bp, Homo sapiens
  SITE (373): n equals a,t,g, or c
  SITE (385): n equals a,t,g, or c
  SITE (399): n equals a,t,g, or c
  SITE (435): n equals a,t,g, or c
attatgtatctacaaccatagttcctgtagctaataaatggaccctgcagacattcttttaaggacaccagattctactgtcttcctttcctatctataaataaatacagtttccatcaaatctgaaaaagaatttatttggaacttgaacaaatcaactaaaattcatataaaagaggggaaagtgagtgaataagaaatatttgaaaaataagaatagcagcccaggcacggtgggctcatgcctgtaatcccagcactttggggaggccmaggcaggtgggatcacctgaggtccaggaattagagaccagccgggccaacatggtgaaaccctgtcttctactaaaatacaaaatgggccagtgtggtnggtggcacgccngttagttcccagcnaacttggtaaggcagagaccggagaattgcttgaanc

SEQ ID NO: 417 - DNA, 377 bp, Homo sapiens
  SITE (276): n equals a,t,g, or c
  SITE (341): n equals a,t,g, or c
  SITE (349): n equals a,t,g, or c
ggcacgagggaaaatgcccaagacttcatagctaatgggagttggtccttcaggcagaaagcctgkttccattcactggccccaaagtcctatgtccagcaggctacagaatgttctcagctgagtggtgcaattcctgttgccaaacaaacttgctttgcatttgaatggtttgggtaaacaatttgtgaccttttgaagctcacagattatagtcacagcttttgcttccctttgaaaggaatgacttaatatggccaatacagtagccactgnccatattaagcacttgaaatgtagctggttccaattggcatgcactggaggagtatagcctatgntgtatttnaaagacttaacacacacacacatgtcag

SEQ ID NO: 418 - DNA, 420 bp, Homo sapiens
  SITE (276): n equals a,t,g, or c
  SITE (277): n equals a,t,g, or c
  SITE (382): n equals a,t,g, or c
aatatatatactataatagaaaacatactatatatgtgtgtgtatatacatatatagagagagagtatgatttttgttaccttttaaaatagttctttttgattctctattcttaaaagcctttttatatttttttccagtattgttttgggtccagaccatttgagagtgacatatagaagtcatttgttacacgcatgagagtgttagaagtgacaagaaagaggcaataaagagggttttctggatggggtcagtttttaattccttaatttnngattttacagtagctcaaaagagatgcctgttgcaggccagttatgatggttcacatctgtagtcttagaactttggggagccaagatgggaggatcacttgagncctgaggagttttgacaccagcctgggacagcataggg

SEQ ID NO: 419 - DNA, 478 bp, Homo sapiens
  SITE (257): n equals a,t,g, or c
  SITE (381): n equals a,t,g, or c
  SITE (420): n equals a,t,g, or c
  SITE (460): n equals a,t,g, or c
ggcacgagcggcacgagcggcacgagcggcacgagcaacagatgaatgacctgattattkgcaaggtctccacagccctgaagggccactgggccaaccccgatctggcaagtagcctgcagtatgaaatgctgctgctgacggattctatctccaaggaggacagctgctgggagctccggttacgctgtgctctcagccttttcctcatggctgtgaacattaagactcctgtggtggttgaaaacattaccctnatgtgcctgaggatcttgcagaagctgataaaaccacctgctcccacttagcaagaaggaacaaggatgttccccgttggaggccctcaccacgggtggaaggccttattgcattgaggttccntgccccaggttcaactgttgggttcaagaggagaccccnaaggcattctattgatgccttggaaggagtgtctttcctntcagaggggttagttggg

SEQ ID NO: 420 - DNA, 329 bp, Homo sapiens
  SITE (126): n equals a,t,g, or c
  SITE (265): n equals a,t,g, or c
tctgtagctcatccaaataatatggtgaccagttcccaagaggaatctctacacgtttcctgctattragcgctatggrgcgtgaataaaaggaatctgggctgggtgtggtggctcacgcctgtnaatcccaccactttgggaggctgaggtgggtggatcacctgaggtcagggaattctagaccagcctggccaacatggcaaagccccttctctacttaaaaatacaaaaaattagccaggcatggtggcagatgcctgtnatcccagctatttgggaggctgaggccagtgccatcccagcccacatggcaccatcccagtcag

SEQ ID NO: 421 - DNA, 122 bp, Homo sapiens
  SITE (115): n equals a,t,g, or c
cttgcccttttccctttgttcttagttgcccccaccaaactatgagaattctgttggcacactggattagatgagacagaggccagctttttgggcagtgcgtggaaaggccagngaatgtt

SEQ ID NO: 422 - DNA, 130 bp, Homo sapiens
  SITE (7): n equals a,t,g, or c
gcgacgnggcgagagaattggattaggaagatagttatctgttgctaggtattatgagcttaaaccaaaccagttgtccagttataaaggrgccaaaattgagtacatacctttttttttttttttcccg

SEQ ID NO: 423 - DNA, 270 bp, Homo sapiens
  SITE (238): n equals a,t,g, or c
  SITE (266): n equals a,t,g, or c
agcagaggggcgacatgatctgtctcccgatttaaaagcattctctggctgctgagttgagaaagactgtgggaagatgtgggtagaagcatgggggccaagctttggcaacatccaggcgggagatgatggtgatcctgaccagggccatggtkgtgttgagagatggtcagaggggagaagtaggggaggaggccagggagttactstggggatctttagtacatgtcgagcagtncaacagggtttcctgacagactgggttntggg

SEQ ID NO: 424 - DNA, 254 bp, Homo sapiens
  SITE (240): n equals a,t,g, or c
  SITE (245): n equals a,t,g, or c
gatcagtggttccacttctagaaaatactaagaagccagagacatttgtatacaaggggcaggatattagggttgtttgtggcaacactgtttataatggtttaaaaaattggaaacagcctaaatgtccattactaggggaatgcttgtagagtgggtatgtatctttttataataaatcgattggaaagaaatgctaatttaggrtagtgatactttgccagtgtggggaggatgggntgggncagaaggga

SEQ ID NO: 425 - DNA, 403 bp, Homo sapiens
  SITE (369): n equals a,t,g, or c
  SITE (384): n equals a,t,g, or c
  SITE (395): n equals a,t,g, or c
cagattgcatttcggtcaaactagtatcttatatgttatgttggtggtagaaatagcaatttatagtaataaatagaattttctctttccaaatgtgccacctactttttaaaaatctttcccacttactagaagcctggcacagccctccttgtcctcgctcagtgccagggtgtggggtctgtgtacggctgaacaggcaccaggatacaaggagaacaaaagagaaggaggggtttgtcctctgagcacttccagacccatggaataaatccaggaggatgagggcatgcacagttctgttttacagattctttggagcaaaattttcctcgccatcagtgtctaggaggtctccattcaggmccngttagttaaacaatnagttgtttccnacccctgt

SEQ ID NO: 426 - DNA, 429 bp, Homo sapiens
  SITE (379): n equals a,t,g, or c
attatcatttatttccattatcatcattattagttttgactcatagctttaagaacttaaaagccccagggattgttccatcaaaaggcatagctttatcactcctcctctggcctgatggttgtctcatsttctagaaaaaaatccagtgactatagatgatgatttttttgaatataatcattttttgactgggttataatgcaacaaaaaaggtacagttaatgaaaagtatatgagaatgtatttctcactacagcactgtatttgtactacatattatactgtttctctacaaatttaaaaattagtttcttagattttaacctagcatcttcataaacatgatctaacttccaattccattgcaaagatttgnaacctttgccaaaatgcaagtaaggttctccggtggtttaatgaggtgtt

SEQ ID NO: 427 - DNA, 544 bp, Homo sapiens
  SITE (534): n equals a,t,g, or c
gagaaacatacgttgaaagaaaggcaaataaaattagctccttcagtttgaaagaattttttcaaatgcaataaacaagagactaaattatagcaccacattttcgggtgtgctggggttagctgatgcctgccatgagttcagagttggatggtgcttttctgttactatacctaaggaagacgataatagcgatgtgggctgtatttttagttccctataataagcatgggrttgtttgtctattttcttttcaaaagtgtgtcagatttccctcatgctctgtggtttgtttcctgcttaaattcctgacaatctgctttaaacaacattgctatatttgtgkccagaggatacaaaaaagttttaaaaatagaacaacatacattccacygkaagcyttgaaaaaacttcccggaattatggcyttgaagttcaccaagacatggaggccatattatggygtgkcatgttggcccttttgtgagtggaatcatwctgacaggcatgaggcttcctacaccgggtaatggnatatagagct

SEQ ID NO: 428 - DNA, 459 bp, Homo sapiens
  SITE (371): n equals a,t,g, or c
  SITE (409): n equals a,t,g, or c
  SITE (433): n equals a,t,g, or c
gggcacgagtgattttaatgttcgtctgccagtgtatagaacgagaaattataagtcctcgacacgaaaaaatgaagactgggctcattgacaaaacacaggaaccatttagcgtcagaaataagccgttttttgacatctgtacttcaagaaagctacttgaaggaaattttgccaaagaagtgagccatgaaatggatggacttatttttcagcctactggaaaatacaaacctggtcgatgtgatgatrttttgaaatggaagcctcccagtctgaattctgtggattttcgtctaaaaatamcaagatgggaggagaaggcctctcagagcctgtggacaatgmctaggggacaaaccatgcaagcnaccatatttttraaaggtactcccccagatggttgccnccggaatgttggaggtatgaaagncccttgcacaaaccaaggaaggttgg

SEQ ID NO: 429 - DNA, 315 bp, Homo sapiens
  SITE (293): n equals a,t,g, or c
  SITE (309): n equals a,t,g, or c
  SITE (314): n equals a,t,g, or c
ggcacgagccattttctgtggttgacttggggcaatttgaaggcattgtgtgtccatattttgcttggagtgttttagggggagctcctctttctgcatttaaacaaagagtagcatgggcctgttttctgaggtaggcatctaagaatgggctcatgctctagctgagggcccatgtgagcacttgaatgtactgagatgacaggtgtggaatgggtcatgatgaaagcttgctatagggttttagggcgaagaatgcttgtgctgttttaactttatttgtggggggatangaagtgacagcctgantgtana

SEQ ID NO: 430 - DNA, 316 bp, Homo sapiens
  SITE (240): n equals a,t,g, or c
agttaccgacacacgggaggcgtcatggttaccacatttcgggcaagtaaagcctttgctggtgcactcgaactcacyggtaaagccacactcgtagcactcatcaatcggtgtattggtgccgtaatacggtacatgctgatagctgtaaatcccagacatcttccagcgccttcaggttgtgctgaatgtttggatacttgccgtrgcaaatgaaaaccaccgttcgccacgggggtnaaggcgcttcaaagtcgatcttgtcgtacgggttcacttcttctccacatcgaggtggggcccggttacccattcg

SEQ ID NO: 431 - DNA, 337 bp, Homo sapiens
  SITE (101): n equals a,t,g, or c
  SITE (189): n equals a,t,g, or c
ggcagagcacagattcataaatatcttattttctagctctaaccaactcatcttgctatgatagttgtgatataaactaaaaaaaaaactaattgataggncaattagtacaattaattgtacaattaaccttcattacttaaattcttcttaaaaatatttctggaagataactcaattttgcatttngtttttcattttggtaagcatagttcagctttggcaacttaatacctacaatttccaacacccacttgtcccccttgcaccagttgattcgrgttggatgcacaagaatgtcccagatgtgtgggtttgactttaaaatccagggggt

SEQ ID NO: 432 - DNA, 322 bp, Homo sapiens
  SITE (63): n equals a,t,g, or c
  SITE (192): n equals a,t,g, or c
  SITE (320): n equals a,t,g, or c
ccttggtctcccaaagtgctgggattacagatgtaagccatcgtgcccagtatagtgagtttncttaaacttagttttcataccactgttctaagtcttgaggccttaaacttcaatcatctttaaatttgctgctgcttggttgttgttgcctactcttccatgcacagacatacttaatcagtgattatnatgcctttactatttaaggaactgtgaagagttaacaaagtttgtgaacctccaagtgtgcacaatcaatcaggtactcatatccacttcagttacaagggcaatccagtgataagtcggttttgccnat

SEQ ID NO: 433 - DNA, 228 bp, Homo sapiens
  SITE (165): n equals a,t,g, or c
ggcagaggttcacgtggttctggtgacaatctttctctccccctccagacctataggtggtaaatgcaccccactgtgctaaccctagggcacctcaccatcccttgtgggtttccttaacccttccctcgcctctgtaagcggtccctttattagactgtcttnaagaaacccttttagttgttatcagwttcctactgggactctgactttacttactctcttttt

SEQ ID NO: 434 - DNA, 247 bp, Homo sapiens
  SITE (5): n equals a,t,g, or c
  SITE (154): n equals a,t,g, or c
cggtnagcagaaggtggcgttaaatctcgcttcaggtgaagggaatttctttatccgtcctggcggcgtgttttatgtcgcgggagataaagtcggcatcgttcgtctggatgccttcaaaaccagtgaaagagattcagtttgcggtgcagtncagggccaatgttggatggaaaacggtgtgaattaatccgcgtattcatcccaacgtcgcctgaagcaaaattcgtgaacggtgttgggggtt

SEQ ID NO: 435 - DNA, 311 bp, Homo sapiens
ggcacgaggcgcttcggcagtttgcagctgcggcggggtcgggtccacccgcggtccccggaatgccggacggtgatcccgggtgctggtcactcgccgattcggggctgggaaggtttgccagaagcgggaaagatgggagatctgagcgctctcttggcatcgcacacccaggacttgctcgtgccgcaattccccacggaaacaaccgagttgaaacgagaagcttgctctctgggtgcagtagctagaaaggcttcaggttaactccaaagccaacactgggtgaggcaacacacgccgcttcagga

SEQ ID NO: 436 - DNA, 613 bp, Homo sapiens
  SITE (48): n equals a,t,g, or c
ggcgcgctgaggctgcttctggtcagggaaaccattctcctacacagnccccagcaggcagctgcgccccmagagytttaccctgtctctgcactgacyttggggaaggaatttagggaggggtaaaacaaggytagagytggtaccattactgccccgggagagtcccctctgccgccaccagagacagccaccaaagcgccccacgcactttcctgagcacctggaccactttacggagaacatggaggacttctccaatgacctgttcagcagcttctttgatgaccctgtgctggatgagaagagccctctattggacatggaactggactcccctacgccaggcatccaggcggagcacagctactccctgagcggcgactcagcgccccagagcccccttgtgcccatcaagatggaggacaccacccaagatgcagagcatggagcatgggcgctgggacacaaactgtgctccatcatggtgaagcaggagcagagcccggagctgcccgtggaccctctggctgccccytcggccatggctgccgcggccgscatggcaacaacccgctgctggggctcagcccttgtccaggctgccattccc

SEQ ID NO: 437 - DNA, 344 bp, Homo sapiens
  SITE (228): n equals a,t,g, or c
  SITE (309): n equals a,t,g, or c
cggcagagctgacacgcgtgcatccctctgtracctcagcccagatgtgcctgttttcattctcaaagacattagactgttttcctgccctatgacacagatagctcacatgraatattgtgctttatttagcaggtgtactcacagatactagctccttagcagctcacaacatcccagaatgggaggccagggggtgactcattatccccattttactgacagggnaaactgagggctcaacttaaagtaaattgaacctgcccagtatattcacccattccagtgggaagagctgagtccccgccncagtccatcttaccatatcccagccgggggcctgt

SEQ ID NO: 438 - DNA, 315 bp, Homo sapiens
ccttccacacgctcaacgtcagaaccacataccggacaatgcgtcgggaatacaacctcacgggtatcttccgggcgttcagaaagcacgacgttaaccacctgcgggatcacgtcgccagcgcggcgaatcaccactttatcgccaatgcgtaaaccaagacgttcgatttcatccgcattgtgtaaggttgcgttactcaccagcacgcctgcaacatggacaggttccagacgcgcaacaggcgtaatcgcgccagtacgcccaacctgaaactcgacgtcacgcacaaaggtcatctgctcctgcgccggg

SEQ ID NO: 439 - DNA, 390 bp, Homo sapiens
  SITE (377): n equals a,t,g, or c
  SITE (378): n equals a,t,g, or c
  SITE (390): n equals a,t,g, or c
gcagaggttgcagccaggattgtgccattgcactccagcctgggcaacagagggagactccgtctcaaaaaataaaataaaataagccaaggtcctaacacagtgcctggctatcttaggtgttcaatcagttttagtttcctggccctggttgttctccccttgtggttgactttagccagattgtggtcttcatgaattttcattcattcgttcattcattcagccagccacttcctattgagctcctggggatgtgccaggcackggagggagatttattctgacccatcataggtcacttgaagtcacttctaggtctagamtcgctgaaataaggtcattctaaacaaacagcaaataattctacaaaaaannaaaaaaaacccn

SEQ ID NO: 440 - DNA, 440 bp, Homo sapiens
ctggagttataaactgcatctgctggaaaaagttgaatactgagtctgtatcagctgctccaagtgcagcaagagagctcagcttaacctcacaacttaagaagctacaagagaccattgagcagaaaacaaagatagagatcggggacacgatccgagtcagaggcagtatccgcacatacagagaagagcgagagattcatgccaccgcttactataaagtggacgacccagtgtggaacattcaaattgcaaggatgcttgagctgcccactatctacaggaaagtttatgaccagccttttcacagctcagccctagagaaagaagaggcactaaggggagaaaacccaggaggaatgagaatgtgtgcatatttgctaatatatgctaaaagactctgagaggagacacagagaaccgcaatccaggcgcctgga

SEQ ID NO: 441 - DNA, 428 bp, Homo sapiens
tcgtcatgactgtctggtgaccaaagagcgcgatatgacccatggaatatgggagttggggaacggtcaggagaaaaaatcggtgaaggtaagcgggcatctttcctccaatagcggcgagattgtgctgcaatgggcgctggagggcaaagggattatgctgcgttccgagtgggatgtgttgccgtttctggagagtggcaaactggtgcaagtattgccagagtatgcacaaagcgccaatatctgggctgtttaccgggagccgctctatcgcagcatgaaattacgtgtctgcgtggaatttctggcggcatggtgccagcaamgctgggcaagcccgatgaaggctatcaggtcatgtagatccaccagaaatcactccgggatcttttcgcgctttcttttgaatttcgtccagattttgc

SEQ ID NO: 442 - DNA, 447 bp, Homo sapiens
  SITE (7): n equals a,t,g, or c
  SITE (9): n equals a,t,g, or c
  SITE (12): n equals a,t,g, or c
tacgtcncngtnccccacraarccctacgaccatactccaatcccaacatcactgggcttctaatcactgggacgatcttgtggacaatgaggccccggtaatggccacctctcctctcctgtagaatctataagcaataaaggaaggatgtttattgcttagggaacagaattttaaaaagagaaacacagctccatgtgccagcaagacagctccttacctgtggctgtgaaattgagaacctgctgaagtgaatcttccactaggaaacagaggctyttcccattgaagrtttaggrtatggtcttcctcagggcctgggtagtacccrggacaggtagacaaaatcacaggcagytttggcctcctaggaaggrctytcagkgggtactktgtytaggggcccctcagattctctggtgatgtccatctgaaaatggaagggg

SEQ ID NO: 443 - DNA, 381 bp, Homo sapiens
gacagcatacatgatgcagtacgagctggagatgtaaagcagctttcagaaatagtggtacgtggagccagcattaatgaacttgatgttctccataagtttacccctttacattgggcagcacattctggaagtttggagtgtcttcattggctgctctggcatggagctgatatcacacacgtaacaacgagaggttggacagcatctcacatagctgcaatcaggggtcaggatgcttgtgtacaggctcttataatgaatggagcaaatctgacagcccaggatgaccggggatgcactcctttacatcttgctgsaactcatggacattctttcactttacaaataatgctccgaagtggagtggatcccagtgtg

SEQ ID NO: 444 - DNA, 383 bp, Homo sapiens
gagaaaaagaaaaagaaaattattttctaatatatttcgtattttatttagtgtgtctgtttctcttccaccaggatttaagctccaccagggtaggggtttgtctgttttattcagtgttgtatctccagtgcctaggacaaaaccaaacatgcagcatatggtcaagacctattagttgagtggaggactgaatgaacttggcccctgcctgcctctctaccctcgtgtgtcatcagacttcttcatgtcctacatgcccacatcttttccatctttctgctctctctaaacacgccatgctttcctccactctctgtgcctttctacttgctgctgcatctatttagatggttcatcttcacctgtttgggctcttcagg

SEQ ID NO: 445 - DNA, 78 bp, Homo sapiens
gcaactgscacctgtctcctgaatattaagcttttaattttttgwttcggtcactcttgatagcagacattgactgaa

SEQ ID NO: 446 - DNA, 577 bp, Homo sapiens
  SITE (469): n equals a,t,g, or c
gtgttgatgacggatggtctcaccgacgttagtgtcccagacgccaaagtcgctggcataggcaccggtaaatatctcgcggataaacttagcgccggtagccatcgccaggtcgaatgaggcgaccggatcccacagaacattcacgccaaacgggatgcggatatcgctcattaattgcccgatgattcgtgccattgccgcagtggtttccggacgcaccttcgtgagatagggaagactaaactcgttggagaacatgactgcatccaccccaccattttggagcgccatcagatcgtcccaggctttgtcgataacccagttcatccccaactgcgcatcaaaactcgggtcgccgggcaatgcacgtagatggcacatgggcgatgaccgctttttccgtcccaataacctctttmagccaactcattkgaaagtactccttattccgataattcacgtttantaaagaacagcacgacgctgggcgacaataccgaccgccacgacaacgccaataatcccaagcgacattcaatttcagaaattcggaccaaccgaacatattggccca

SEQ ID NO: 447 - DNA, 660 bp, Homo sapiens
gggaatatggaaaccgatggatgagttcttacctcttttttcgtccagacaaactgtcctaagatggttttaagagataccgagtaatcagctgccagctcagtagcgcatcttcagattgactctccctccttccctgtctccttccccatattcttcatcttgttccctgggatctttctccctaataaaggaaaagctcatagacctctgccccagcttctgctttctggggaatgcaggccaatccagccacactactctccctccatgtaacctgaccatgccatccccctgcttaaaagctttcagtgcttctccattgcccataaagctcatactttctagctatgagcttcaaggccacttggaggtcatctggccaactttccttcctgctacaacagtctaagtcataggctttggaagacaactgattgggtttcatctttggctcttattgaaaatgtggaaaaaattatttcacctctataagcttcagtttcttcatctatctkatctcaggattgagggaaggcaatgtatataaagcatctggcacatgggttggggcactaaatacatggsarccagtgkttattattacaagccaggaaaccagawgcaaagggagctgctttaacttcctttcaatcagga

SEQ ID NO: 448 - DNA, 535 bp, Homo sapiens
  SITE (19): n equals a,t,g, or c
  SITE (441): n equals a,t,g, or c
  SITE (465): n equals a,t,g, or c
gctgagtgcgctgcactgnaccttcttccaagcctcagttcctgttctaggaattgaggctatgtagcctgaaaatgccctgcagtctgcagtgttctactgtgaactgcttgtgtgttggcaggctaccggtaagaatggttggtgtcagcagggacggggccctctgagacccatctcacaaagatgagtggtgaaaatctgatcacttgctgcagccctttagttttttattaagccgatgcctgagtagctttaatagctattagctatgttagtagactgagatcttctgttagaagtctttagttctgttttccttgggggactaagaaattatattgcaggcctgaattacaggaaggggagaaccaatgggctaagggaatgagagccaatacctggtaaaagcagagttgggctgggccgccggtgggctcnacgcctgtgatccccaggactttnggaagcctgagccgggcagatcacgaggtccaggagttggagaccagcctgaccaacatggtgaaccctg

SEQ ID NO: 449 - DNA, 437 bp, Homo sapiens
  SITE (375): n equals a,t,g, or c
ctgaagtctctcctgaccactccttctgcccgctcttcatccttcacaggtgtggtgtttcccacaatgcctctgcaggtctaatcttgtcttggcctctgcttcttaacaaatctggctgcccctagttgtccttccttcaattcatcctccacactgttagagtcctcctcctttctaaagtccagatctgatcttgtcacgctctgcttccattctttccaagatgtctgtttacttacaagataaattagaagcttatgtctcttgagactcagcctgtgctcaactgtccamtctcttattccctacccaaggccccatcttgacagccacatggaactatctacactctagtctaaacgtcaatgccgnttcacatcaaaggctgtggacatataactcctcctttttggaacatctttctccaatctcat

SEQ ID NO: 450 - DNA, 530 bp, Homo sapiens
  SITE (489): n equals a,t,g, or c
  SITE (498): n equals a,t,g, or c
  SITE (519): n equals a,t,g, or c
tcagcttgtctatttcctgcccagccctagaatcatctcccaggagccctgattccttttattgaataatagtattagcaaccaagatctaggcattaggtgtgctcttcttggtcagttttatttcttatctaacacagtgcctagcacataataggctctcattaaatattgctgaacagccagcagtaatggaatgttgagtaactgatggtacaaatgactcaataaaatattatgtatctatcaaaaatgatcattagatttatacaataacataagtgaaaaagtaacaaaaaatgaagattgtaataacactcatgcaaaacaagcagagactcgtgcaaaaaatgctaacatgggggagctagatttgaattttgggctcccccagtttattaacatatgaatttagatgggattaatcctcctaatgggccccaggctttcctccaacatttaattaataatggcaaccaggttaatggntaaaaaggntattaaccttaaatttcccantagggaaggta

SEQ ID NO: 451 - DNA, 502 bp, Homo sapiens
  SITE (465): n equals a,t,g, or c
  SITE (502): n equals a,t,g, or c
tctcttcctctccatctccctgatagcacaccttttatttcttttcttcttttttttaagcctcacgaaagattttacttgtagatcaactttcaaaatgtaggaagtcagaatgggtgacatcatcagaaaaatatgtggagctgatcacaagaagtgaagaacccagagcacgaaagcggttgtgactcctgggcccagggagttgacagcgtctgggcttcagaggagccagcgcctccgagttgtcttgaagtgaggctctgctgtagtcctgttcttctggctctaagatctgaatgttgtgaccactaatttgctctttcctggagggtaaccccagtttggtccacaaggcttgctgcccaatctttgccaacagttgaaccaagactctgaggytgatatgcaawgtcacttacaacattaatcagatacygcatttaaggttcacagtgtcttcanctggaatagattccacctcaagaaccagttctttgcn

SEQ ID NO: 452 - DNA, 326 bp, Homo sapiens
  SITE (283): n equals a,t,g, or c
acattcagttcactcaaaatgggtcactaaatatagctccccctcccagggagcagagtgaggcccatattttaaagggaggaatatcaaggaacttgtggacatgtcttaaaactaccattgctgctgagtttcagtagctcttcactggaaggaatgctttctcctccctccgtgaccacacagacacttgctgtttcaatactcaacacagtcatcaatcagtgcaatttttttttttttgagtttctatgttgcctttccccattagattatatttttngtcatggccatgacccagccttttctagcctaaatgggccttt

SEQ ID NO: 453 - DNA, 451 bp, Homo sapiens
  SITE (142): n equals a,t,g, or c
  SITE (418): n equals a,t,g, or c
gggggggcggacaagacgagcaggttgccgatggcatggccaggacctgcggcagaaccaggaacaaaatacgcttagcgagttgcccattttgagtgagttgtgcacagacgaaactaagggtcagaagcggagaggatgntcctaagtcacccacttctctgtggctgggtgcacactgggcatctgggagtttatgacatcactatggggctggtgacagagccagtgtgtggaggagtgcttaggagcccagcgagggtgcctacaagaggagtcaaagggcaaagggtgagacccttccaccggtccagctggactctagcctcagggatatcctgctcctgggggcaagtgtgtggccctggatgggcccccctgtggggctgttgggggtgcgaagctgatccgccagagnccttccacctggcgcctggcccaagtgctggct

SEQ ID NO: 454 - DNA, 304 bp, Homo sapiens
  SITE (62): n equals a,t,g, or c
  SITE (270): n equals a,t,g, or c
gagcttgcctcagctacttggaaggctgagatggggagaatcacctgagcctgggggttgangctgaggtgaactgagattgtgccactgcactccagcctgagcaacagaatgagaccctgtctcaaaaaaaagaaaaaaaaaattcagccaaagtgagattgatcagtatgtaaagcagaaatttgctcctgtggagtttagtgtgtccttaaaaatttactaggaaaatgttgagaggtctttattaggttataaaaaactaatttnagttgagtgttttatattggataagcctacacag

SEQ ID NO: 455 - DNA, 366 bp, Homo sapiens
  SITE (302): n equals a,t,g, or c
  SITE (310): n equals a,t,g, or c
  SITE (313): n equals a,t,g, or c
ggcacaggttaaagcaggcaggggcagacagtggggaactgtggagtctgtgcggaatcagagcacatgcctcatttacaggagacactttcttctcaccttcagataattattggcgggcaagattaggggcctaggcagctgccatggttcacacctgtcatcccagcactctgggaggccaaggcaggagaactgcttgagcgcgagagtttgagaccagcctgggcaacatagtgagactctatctctacaaaaaattttaaaaaacattagctacacatgacggcgcatacctgtantgcccagntangggggaaggtgagcagaaaggatcgcttgagcccaggattttaaggctggcat

SEQ ID NO: 456 - DNA, 390 bp, Homo sapiens
  SITE (28): n equals a,t,g, or c
  SITE (372): n equals a,t,g, or c
  SITE (389): n equals a,t,g, or c
aactagtggatcccacgggctgacaggnaattggcgcacgaggtgtcatactgatgattaactccatactcctagtggtgatgtggtccagatactggaatggaagtggcaggatgtggagtccagacatagtctaccactcatgctacttattagtaatattaaggtgttaaacttaggaatttgtcacatgtaggttcctgaggagatctaaaagttaatacaaaaccaagctgtttactgattttcatgagaacatttaagttagtttaggtctacctgatttattttaaaagaaggcagagggctggacgcagggcttacgcctgtaatcccagcactttggggaggccgaggcgggcggatcacgangtcaggagatcgagacna

SEQ ID NO: 457 - DNA, 347 bp, Homo sapiens
tgcaggaattcggcacaggtctcaatgccgttagccgtcaatgtcagaatggagctagactcattacacacggcgagtcacttttaaagtgtctgtgtttgtgaacggagctcacagttccacgagtgccctctagactcaggccaagtccctggcccccggaggagtcagaccctcttgttccaatctggacttgcctgggtgaccctcttgctgtggatttgttccttaaagggtcactacatctggcaactgaggctggaattcgccgcgcacacttttgtccccgcgttcagaaacagctgcgacaggatgccagagtccatcgagagctgggaacaattcgg

SEQ ID NO: 458 - DNA, 433 bp, Homo sapiens
  SITE (396): n equals a,t,g, or c
ggagatggagctctctttaagtatggcctgtgcatagtgacttcctacaaaagagtatagtatggaaagtggggaaaagtaactttacagtggagaaatctgacaaatgttatctcagtcaagtggtcaatgtcaacatcatcagtaataagttgtattgatggcatggtatctttgacatgatgtgacaaaaagggctcatgatctttcttctgaagacccatagtcccaattcaatcatgagcaattcatcagtcaaagctcagtcgagggacatcctaaaaaacacctgtccagtactgctcaaaacactcaaggcccttaaaattttggccctgaaactgtacctacgaagaggagtcttaggaaacttgatatcaatatgaaatgtgattntgggatgggttcctggaacagagaaatggcattaggt

SEQ ID NO: 459 - DNA, 360 bp, Homo sapiens
  SITE (277): n equals a,t,g, or c
  SITE (323): n equals a,t,g, or c
  SITE (339): n equals a,t,g, or c
ggaatcagagctgaaaggaagtgagtgattgtttaaatcagcatcatgtaaaggcattgggcatttcttgccagggaaccagttaaagcgtgagtcctaaagggagattcttcactgtccagccttagctggacttaacttactgtgttgtcattttgggaaaaagtcactaacctcagttgttgttggggacatacgtatagaagaccatgtgagactaattagaagtaaaaagactttaagccccctgttagaaaaaggttcttcttgacctccngcctatggtgatccagacttctagtccattcaacattggttatttnggaaccatcctggatntccttgtcacacagatggaaa

SEQ ID NO: 460 - DNA, 118 bp, Homo sapiens
  SITE (115): n equals a,t,g, or c
cgaggaggagatgcaatatgccagatgctatattaaatgcttagcaggttgtctcatttaatcttcacaactacctaagaggtagactcttccatattgtcttttttttttttgncag

SEQ ID NO: 461 - DNA, 287 bp, Homo sapiens
gggattataggcatgaaccaccacacctgacttcccccatactttcttattaattaccatactgtatatttttattttgtttaaacattttttcttcccacttttatcgtttttacttgagtgcttaattcatcttcctaaattaatttaaaaactcatctttaagactgtgaattttcttccraatatacctttggccacagttcagagactttgatgtgttactcttttggcattggttctaaaatgtcaatcattcttttttttttttttttgagatggagtct

SEQ ID NO: 462 - DNA, 315 bp, Homo sapiens
  SITE (89): n equals a,t,g, or c
  SITE (305): n equals a,t,g, or c
aggaaagagatgtttttsctctcttacctacattagttactatgaaaattacttttggtatatgcagratattaatattaaataatttnctaattggtcatgcagtgaaggcagctaatgaaaaaacagattttttttcattttaattggttatttcacatggtgtttgtgctacacctgtgcttataatgagaatggagaattaatctamccttctgcttcacwtgrttccaattttcatggtttatacaagataatggataacccgatttggcaacacaatttgttggtagacctgtgttttnaaatgttttt

SEQ ID NO: 463 - DNA, 212 bp, Homo sapiens
  SITE (130): n equals a,t,g, or c
  SITE (175): n equals a,t,g, or c
gtagaccaccaccacaccgagtacattcggcacaatgtggcgaataacaatgcccgatgtcgatacaccgccaacttgtgccgcctcaataaactctttgsgccttcaaactcagggtttggcccacggnacaattacggggccattatccagccagggaaaccatggccttatncgccacggaaaattcaggcagggatgtttttgaccgg

SEQ ID NO: 464 - DNA, 226 bp, Homo sapiens
ccttcacagaaaaagtttttccgagttctgatctggggcttttgggtgactttcttaaggtcactgtgtttaatggcgtcgggaccctaacttcatgttttgattcctgaattcttttatttattcatttcaaaaatttttaccaggtgcctactctgattggtactatgtcagggtccgaggaccctggcaaacaaagrcattcctagtccctgtcagtgggggc

SEQ ID NO: 465 - DNA, 271 bp, Homo sapiens
  SITE (2): n equals a,t,g, or c
  SITE (270): n equals a,t,g, or c
  SITE (271): n equals a,t,g, or c
gnccagggactgtacattgcagcaccccagagttcatgggcagatcctcactgttacagacgagtacaccgaggccccaagagggggaggtgctcgccaagttgcagacagagtgagactcccgccctgccgtggatcccgtcgcaatgagacgttgctgcccctggcgctgtgcccctctctcagctcctgcctggcttcctactccctgccctgcgtcccgcggctcccccatattctaggtggtgggcctagtcccctctcagcccnn

SEQ ID NO: 466 - DNA, 436 bp, Homo sapiens
  SITE (404): n equals a,t,g, or c
  SITE (432): n equals a,t,g, or c
ggcacgagtaaagattatgtgtgacttgtgtaacaataagagtccattagcgagtaaaacctcataggtctttaagaaggtatataccacagaaactttcctacattattgaaacatttcttggccctgatgatgtaatgtagtgatagagcagttgagggtattattgcagatacactgaaattcttgaaggacaatggtgattctgggctaatggtaaaagatccaggatttaagacaagagaaatcagatttaatgaaaaaaaaatggataattatctaaattgcaaaacaaaagctagaataatatatgagtacccatttagtggtatgtctaggccaagtttgggtaaaatgatggccagaagccaaagggccacaacttccaagagggaatctattgnccttgaccatgagctcaatgcagagggngtgt

SEQ ID NO: 467 - DNA, 295 bp, Homo sapiens
  SITE (190): n equals a,t,g, or c
  SITE (282): n equals a,t,g, or c
ataaagcataccgcctgggcggcgatgaattcgctatggtgctctatgatgtacagtcggaatctgaagtgcagcagatatgttcagcactgacacaaatctttaatctcccgtttgatcttcataatggccatcagaccaccatgacattaagcattggttacgcgatgaccattgagcacgcctctgngaaaaaattacaagagcttgccgatcacaatatgtatcaggccaaacaccagcgtgccgaaaagctggtgaagataacaaggatatatccgntatgataaagcac

SEQ ID NO: 468 - DNA, 633 bp, Homo sapiens
  SITE (565): n equals a,t,g, or c
  SITE (579): n equals a,t,g, or c
  SITE (584): n equals a,t,g, or c
ggtagtttaaaaataatcatcctctgctatctaagactgctttccggacccccaccctcctcccgaaccccgcctcagtcttaaagatagtttggaaataatctgctttctcactctttgtctgatgggaaaaacgaactgacttgcatgcactgtggagagggggtgaactaggggaaacaaaaggtgggaaactttccatatccgaaaccctaaaggaggaaagctacgtgtgtcagtctctggcgctggtcggcccaccaagcgctcgccccacccccaccgtcccctcccgtttccagtttatctgcagggctgttgtttccagcaagacccaaagctagaaaaggaggaggaagaaactgacccgatcagtgccagaagtcattgtattcaaagaagaataagcaagaaagaaaagaaggaaggaagagaggtagacagatacaagatgaaatcctgtcaaaaatggaaggaaaaccagaaaatgagagttgaaccaaagcatgaggaagagccaaagcctgaggaaaagccagagaggaggagagttagaggaggaggnccaaagcaaagganttttnggggaaggttgtttcattttttccaggttttaaggagtttttccccacc

SEQ ID NO: 469 - DNA, 279 bp, Homo sapiens
cccgtgcccttccatttttggctcatttattacctatttccatgattaactattatgaccccctagttaatttagccccccaggaagacatagtagatccccacacacctaacttaacttcttgtattgctgagcagatgtctccttacaatatgccctctcatatgcttgctcatcattctcattttggktgtctctctccctccgccagattgggcacacgtgtcagcagagagctttgtctctgctttgctgatgtgtcccaagaggcccagaact

SEQ ID NO: 470 - DNA, 366 bp, Homo sapiens
agtgagtgcaaaaagtcctgatgaatagtgagaggcctgatgagaaccacagtgagccctctcaccaggacgtcatcaaggtgaaggaagaatttacagaccccacttacgacatgttttacatgagccagtatggactgtacaatggtgggggtgccagcatggccgccttgcatgagagctttacatcgtctctgaattatggcagccctcaaaagttctccccagaaggtgacctatgtttagcccagaccccaaaatctgttatgtgtgcaagaagagtttcaaaagctcctacagtgtgaaacttcactacaggaacgttcacttgaaagagatgcacgtttcacaagtggctggttcaat

SEQ ID NO: 471 - DNA, 246 bp, Homo sapiens
  SITE (124): n equals a,t,g, or c
  SITE (237): n equals a,t,g, or c
cgggtgcagtagaatctatctactccatcctggcgctgcggatcaggctgttccgccaaccatcaacctggataacccggatgaaggttgcgatctggatttcgtaccgcacgagggcgttcangttagcggaatggaatacactctgttaactcccttcggcttcggtggcactaatggttctttgatctttaaaaagatctaagttgtcattttccacccttataaaaggtccgnttgggggct

SEQ ID NO: 472 - DNA, 354 bp, Homo sapiens
  SITE (197): n equals a,t,g, or c
agggagcagccactttatcggcttcggtgatttcacgkcaataacaattttttgcggattaaataagttgatagcaatggcgatggttttacccagatgacgaccgacatactcaattacttccgacgccaractatcgcctttgttcgcggctttgcagattagttttgaatggtgcagtcgtccagcggcagganctgctggtagccctgcttttaacaggttcaacacccgttgttccaatggcagcgttggcagcgatatttttccaggcagccaagttgccgcaatggcagcgtttcacccagcggtttcgacctgaattatgggccattttcaccgacgttgcccttg

SEQ ID NO: 473 - DNA, 329 bp, Homo sapiens
  SITE (302): n equals a,t,g, or c
  SITE (306): n equals a,t,g, or c
  SITE (321): n equals a,t,g, or c
ggcagaggttttttagatgtctctgattaattgccctttggagtaaagatatagtgtggttagagtgtgccttcagagaatccagcccacaggaagcaactttgagtttatgattttcccctaccaagaatgtgcatatatggggatatatgcacatatataggggacacttaagtctggtttaaaatacagaacacttatgaattttacatttttaatggtaatcatgtttttaagtattttggggattttgttttgttttagattatttttattagaagtaagcccctaacattttgggntccnttgtctttctcccantttttatt

SEQ ID NO: 474 - DNA, 384 bp, Homo sapiens
  SITE (377): n equals a,t,g, or c
agcggtgaagaagatcgctacagccacaccgatctgtgggatttccaggctaacgttgaaggctcgcagaaaattgtcgatttgctgcgtccacaactgcaaaaagccaacccggaactgctggcaaaagtcgatgccaactttaaaaaggtcgataccattctggcgaaataccgtactaaagacggttttgaaacctacgacaaattgaccgatgccgaccggaatgcactgaaaggmccgattactgcgctggcggaagatctggcgcaacttcgcggtgtgctgggactggattaagcgtttatgcagtataaagrtgaaaacggcgtgaatgaaccgtcacgccgacgtttattgaaagtgattaggtgcantggcgtt

SEQ ID NO: 475 - DNA, 438 bp, Homo sapiens
  SITE (38): n equals a,t,g, or c
  SITE (388): n equals a,t,g, or c
  SITE (415): n equals a,t,g, or c
aggtgaaaccccacacatcatagtcttgttcctgttgnaaaatgcaggaatataaagcccagtaccagagcttcccattattcaggcctaggctcctggttcctgggctgtctagtgggtgagggcccagggcctggaggtgtttcaggatcctcaggcctgatttggtggacaggaccatgttcaggggaaaatgtggggatagggctgcatgcttgctctcaggagactgggctcttttttctgagtgtccctgagaaaccatccttaggtattggtactactcacagggttgtgcctagcttcctggctttggaacttcattcacttcctcccacccttcccagcccttccattccccctcccaaaaggctgacamccactyctnctagaaccctaccataacttaccatcntacaaagaggttccttcctgttt

SEQ ID NO: 476 - DNA, 273 bp, Homo sapiens
  SITE (16): n equals a,t,g, or c
  SITE (232): n equals a,t,g, or c
  SITE (236): n equals a,t,g, or c
cctcccctgagcccgngctggggaaggtgctcagggcctgtcctgtgaacacccgatgttcttgcctgccctcctccaccccctggaaaatgcgctcctccaggatgcaggcgtcttaccccaaaccgtcctgtgaatgtgtgggccaaagggatcgagggacagagagagcagtagaaaacctgagacaggaaggaatgaggcaaaccaataaacagatggcaaagtagangatngttagagattttcagagacagtaagagttgaagaaga

SEQ ID NO: 477 - DNA, 339 bp, Homo sapiens
  SITE (261): n equals a,t,g, or c
  SITE (310): n equals a,t,g, or c
  SITE (326): n equals a,t,g, or c
aattaacaaatggtagcgtcacacctgccgtaacaaagcctgccagactggcaaaaaaacgcggataaggaaccagttgttcgcgctcacgtttatcgagcgtgatggttggaaccagcgaccagaagggaatatccataatggtgtaagtcatgccccagaggatgtaggtcacgcaaacaaagmcaatctgagtagtaccttcaaacagatgcgcactaaagaggagaaataagattacagagtttgccaacgtaccgntcaggattccagggtttgaacttaccccatcgggatcggttagattttnacaattccatcccctnattcgggttcgtt

SEQ ID NO: 478 - DNA, 216 bp, Homo sapiens
  SITE (1): n equals a,t,g, or c
  SITE (124): n equals a,t,g, or c
  SITE (140): n equals a,t,g, or c
ntaagaactaacacctgtgaaataaaaataggtacaatagatagtaccaaaaaagtccaaagatgatttcaaagaactaacagaacagataaaccctggttagattaagagaaaaaggacacanttaaataatataatgnccaaaaaaagcagtacagctatagataaggcagatttaaaaaggtaataaggcggggcacggtggttcacacctgt

SEQ ID NO: 479 - DNA, 363 bp, Homo sapiens
  SITE (296): n equals a,t,g, or c
  SITE (332): n equals a,t,g, or c
  SITE (342): n equals a,t,g, or c
tcttatgaccttgtggcgggatttgaagatttaccgcaactgtcagcggaaaataactgccctgatttctgtttttatctcgctgaaacgctgatggtgattgaccatcagaaaaaaagcacccgtattcaggccagcctgtttgctccgaatgaagaagaaaaacaacgtctcactgctcgcctgaacgaactacgtcagcaactgaccgaagccgcgccgccgctgccagtggtttccgtgccgcatatgcgttgtggaatgtaatcagagcgatggaagagttcggtggcgtnatgcgtttgtttgcaaaaagcggtttcgggcttggnggaaattttnccagtggtggccaatttggcc

SEQ ID NO: 480 - DNA, 461 bp, Homo sapiens
ggcacgagctggagcccccgggctctactgttgctgtgacttttctattcagggaaatttccagcttatttgagccatattagcaaagtgacaggaaaccagccctatgtacccatccctggagcaagcgtgtccatcttatgtgtcctccacacctccaaatccccacgctggtgttgtggcactcattctagcctaatttcatccattattgtttccctatctcaaggagataaaaactgttaaaaggaccataaaaccaccatcccaccacagaattccaaatatcccatcgatgttcaaatcttcctaattgccttataaattgcttcatgttttaagtttgcttgctggaacccggcagcgtccgtgtgacctttacgacatgacctttctgtctccctgacgycgacgytyttttyttagttcagytgargatgggttgtgtatcctgcaatttg

SEQ ID NO: 481 - DNA, 535 bp, Homo sapiens
  SITE (478): n equals a,t,g, or c
  SITE (509): n equals a,t,g, or c
  SITE (529): n equals a,t,g, or c
  SITE (533): n equals a,t,g, or c
atcagcgcgttatcgccaccaccgagcatgacatttttctgctgttcaacgggccagctgttatccacaaaagacagttttgtgctaatgctgtcctgcacttgcccattttsttgcagttctgcacttaacaagccagattgctgaatattctgcgtcagcgaaatataattcgcccctttgtgcagcgtcagcgtctggcgcatctcagcgcctgcaaatttagtcaccagcgccaccggttcgttatcctgctgactgaagataaacagtcctgccgccggtttgtcgcccacgcgatacaccgttgggcatactccacttcatgttawagatttttttccgaacgcagataagcacgcccctgcccgaccagcccgtcgccgttcatcccacgcgcgggtgatacgccagcgggttaacgaatcaggatcaggaacttgaaatacctttggcttgtttatcggttgttaattanggatccatcgcgggtatccactcttcccccngggaatttcaacattttacncccncc

SEQ ID NO: 482 - DNA, 313 bp, Homo sapiens
  SITE (278): n equals a,t,g, or c
tgtcagatggttgccaataaagccattcaccccgaggatgagtacccgggtacggcgtcgggcggtgcaggcaggctggctattcaagcgtgaaccttgcaccaggcccagcgtctgcgctaattgcgagccctgcatagtaatgcctcgcccgcctgtccggtgacratttccagcgcgccatcgccacaggcaatcagcagtggcgcaacagaaatcacgctccccggctgtgctttgctggcatgaggatgaacacgcgacgaccagacggtganttctgattgccaacatagctgaaggcacccggcca

SEQ ID NO: 483 - DNA, 349 bp, Homo sapiens
aacctgtaactgtggaagcgaagaatgaaacctttgccccgcagcatcccgatcaatatctctcctggaaagccacctcggaacagtcagagcgtgttgacgccctggcggaagatccacggctggtgatcctgtgggcggggtatcccttctcgcgcgattacaacaagccgcgtggacagcttttgctgtgaccstgtgcgtgaaaccctgcgtaccggtgcgccgaaaaacgctgaagatggtccgytaccgatggcatgctggagttgtaaaagcccggatgtggcgcgtctgatccagaaagacggcgaagatggytacttycacggtaaatgggcgcgcggcg

SEQ ID NO: 484 - DNA, 447 bp, Homo sapiens
  SITE (350): n equals a,t,g, or c
  SITE (354): n equals a,t,g, or c
  SITE (394): n equals a,t,g, or c
gggtgcactggctaaaaccggtaaatacgacgcggtgattgcsctgggtacggttattcgtggtggcactgcccactttraatatgtcgctggtggtgcaagcaacggcctggcgcatgttgcccaggacagcgaaattccggttgcttttggggttctraccactgaaagcattgaacaagcgatcgaacgtgctggcaccaaagctggcaacaaaggtgcagaagctgcactgaccgcgcttgaaatgattaatgtattgaaagccatcaaggcctgaaattagttaaggggaaatccgtggaaacctgctgctcgtcgccgagctcgtgagtgtggccgttccaggngctnttattcctgggcagttgttcccaggaacggacatcgttgntgttggattaccatttcctggttggaacaggttgttaaaagaagtttgaggtc

SEQ ID NO: 485 - DNA, 430 bp, Homo sapiens
caatgataacattacacataccatcaaaatccaaacctaactcatctgcatttaacagggcactacgtgttgtacgaacttgcccggcattgacaagttttttaacctgactcaaacgtgtatgtggtgtgcgtttttccataacccccgcctcctgttactttagttataacctaaaaggttaattacagcaatgaaaaagcacctaaaaggttagttagatgtacggagtagtgaccacacaaaacgtattctttaaggaaagtgrttgaccatataagaaagtggcgcattagtagcgccagtttgaagcaggaatttataagggragctggagttcaggcacgcattcctgaggcacaaaccwttcttttcacgttatccgcatcaactctctggcgggatgcgccacgagtggtggttgcgatgg

SEQ ID NO: 486 - DNA, 403 bp, Homo sapiens
  SITE (247): n equals a,t,g, or c
  SITE (392): n equals a,t,g, or c
aagcggtttggcggcaatccagaaaatcgccagtcattgattgatgcggggatgttggtcactaacgatcagggacgcattacgatcgtttccgcgagcgggtgatgttccccattcgcgataaacgcgtcgggtgattggttttggcgggcgcgtgctgggcaacgatacccccaaatacctgaactcgccggaaacagacattttccataaaggccgccagctttacggtctttatgaagcgcanaggataacgctgaacccaatcgtctgcttgtggtcgaaggctatatggacgtggtggcgctggcgcaatacggcattaattacgccgttgcgtcgttaggtacgtcaaccaccgccgatcacatacaactgttgttccgcgcgancaacaatgtca

SEQ ID NO: 487 - DNA, 414 bp, Homo sapiens
  SITE (234): n equals a,t,g, or c
  SITE (332): n equals a,t,g, or c
  SITE (349): n equals a,t,g, or c
  SITE (365): n equals a,t,g, or c
gcgttcggccaccctgggtgaaatttccgatgcgctggaagtcgctttcgaccgttatctggtgccaagccagtgtgttaccggcgtgattgcgcaaagctatcatcagtctgagaaatcggcctccgagttcgatgccattgttgcgcaaacggagcagttccttgccgacaatggtcgtcgcccgcgcattctgatcgctaagatgggccaggatggacacgatcgcggcgnaaaagtgatcgccagcgcctattccgatctcggtttcgacgtagatttaaagcccgatgttctctaacamctgaaagagatcgcccgcctggccgtangaaaacgacgtttcaantaaggggcggcatccntcaatggctggccggttcataaaaagttgatcccgggaaatggttcgaa

SEQ ID NO: 488 - DNA, 379 bp, Homo sapiens
  SITE (321): n equals a,t,g, or c
  SITE (348): n equals a,t,g, or c
  SITE (369): n equals a,t,g, or c
ggcacagccttctctcactcaggcagggaaactgaggccgggaaggtgtctggatactcctgcattgctgggtattctggggcaccgccggtcatacgtgggcttctgggtgagccagatgctggtacacgtgcaggtactcacatcctctgtcctcctccagtagagaagcagtgctccagccttgtctggtcccatctctgcccacatgcccccttcccttccagcgtgtcccccataccctctgatgtagcttctggctgctcacccatttttcctcactaggactccagaccactcactcctggaccagagctatantgaagctgggacccctgcctaaggcantgccaacaggcatcaaagaanccaatttcac

SEQ ID NO: 489 - DNA, 520 bp, Homo sapiens
ctaaaatatgaatgcgcatacgtcactatccttttttaatctgccgctcattttacgcatatgtcgggcaagtgagaaacgcatttcaggataatccgtaatttgctggcgcgattcacctgagcgcaacattgagattatttgttaagattgttgcggtcgctttactccataaacattgcagggaaagttttatgaaaacgttaggtgaatttattgtcgaaaagcagcacgagttttctcatgctaccggtgagctcactgctttgctgtcggcaataaaactgggcgccaagattatccatcgcgatatcaacaaagcaggactggttgatatcctgggtgccagcggtgctgagaacgtgcagggcgaggttcagcagaaactcgacttgttcgctaatgaaaaactgaaasccgcactgaaascacgcgatatcgttgcgggcattgcctctgaagaagaagatgagatgtcgtctttgaagctgtgaacacgcaaaatacgtggtgctgatgg

SEQ ID NO: 490 - DNA, 389 bp, Homo sapiens
  SITE (259): n equals a,t,g, or c
  SITE (313): n equals a,t,g, or c
  SITE (327): n equals a,t,g, or c
aacgctggcaaaaatcagactgtgcttcacggtgtagcggaacagttcagattctcggcccaccatgcccgtcgcggcgcaggccacggcgatagattgcggggagatcatcttgccagttacgccgccgctggtgtttgctgccaccagcasggtgtcagagacgttgatttgctgcgccgtggtcgattgcagtgaaccaaacagggcgttagaggaggtgtccgagccggtaaggaatacgcccagccagccgagnaacggtgagaagaacgggaacatcacgcctgtacctgccagtaccagcgccaanttggttggacatgnccagatagttggtgacgaaggcgaacgccagcaacatggcaatcgacattatcgggcatttc

SEQ ID NO: 491 - DNA, 336 bp, Homo sapiens
  SITE (124): n equals a,t,g, or c
  SITE (278): n equals a,t,g, or c
  SITE (307): n equals a,t,g, or c
gactggacccgtactgacctcgaatacgtgctgccagacggctccaaagctctgcgcttcgaccagatcgaattcgctgcattcgaaatgcatatcctgaaacgcccaggcgcggaagggattnacaccgaggaagaaattgctcaggcagctgaacgcttcgccactatgagcgatgaagacaaagcgcgtctgacccgtaacatcattgctggtcttccgggcgcccaggcattacgccgcacgccatgttggatgcacaagaatgtcggcgtganttcagggccagcagcgggttagagagatntttgttcgataaccggttccacgtttggt

SEQ ID NO: 492 - DNA, 360 bp, Homo sapiens
gcggtggctggtgtgaactggtcgttctgaccatcaacgattaaactgcgcttcggcgattktcsttttacaggatgttgaaagggaaaattctggggcaaaaaaagcccgccagttacggcgggaaaacctcatcctatgggagaacaatgaataatgaaattgcggggttatcatctcccagtatatccatactaacaatraggttatttactcaaccaggcataaacattttgttttgtgcgtgggaacagccttaaggtgtaaagggggaggtggaaatagcaatgaggrgtwttcagcaagawtactcgccgctttaccacaacgtggatggggagggatggaaaaacttcaagg

SEQ ID NO: 493 - DNA, 399 bp, Homo sapiens
  SITE (262): n equals a,t,g, or c
  SITE (319): n equals a,t,g, or c
tggcggttacaactatcatggtaagctgggtatcgtcttccagcagatcgcgcaggttaacgccgccttcaccaaacaggcagagatggagtttaccaatggaggaaacgcgcagggttgcaagtggcgcagaagtctttttcatacggcatgataaggccaatctctccggcgtaatctggatggcaaaagacttgcgcgggaccgtcgctgcgttgacgtaattggtggatccagccgcgacgcatagcttcgtcacgcngaacctgaccagagatgtgatgcttacggaagagctcgctgccctcgcccgtttccntcattcgatgaaacgcactggatagggcgttgttggatccattcagaaaggtgtcgagctggtgatgattaacatcaggg

SEQ ID NO: 494 - DNA, 144 bp, Homo sapiens
  SITE (19): n equals a,t,g, or c
gccctcagccccaaccccnggctccccatggaagccagctgtgccccagaaggagtatgtggagtgtctagaaaagaaggtggagacatttacatctgagaacaatgaactgtgggaagaaggtggagaccctggagaatgcca

SEQ ID NO: 495 - DNA, 318 bp, Homo sapiens
  SITE (256): n equals a,t,g, or c
  SITE (307): n equals a,t,g, or c
  SITE (310): n equals a,t,g, or c
ggcacgagctggccttcagtgtgtgccagcagaatagaaatgtgatggcacagtctgaggaaaagccacgaaaggccaggagactgggagctcagccttgggtgggggagaaggggtgggtgactgttcctcctgtggggatgtggtgatagaggttgggaggagtgggaattcggaggactggtgtggatttcactggttcagagcttggagtcagcttagctggttttgtcacttgccarctatttgaccckgncaagtcacctggctcaatttcttcatctgtgaaatggtggtattagttgtnccnatttgtca

SEQ ID NO: 496 - DNA, 289 bp, Homo sapiens
  SITE (2): n equals a,t,g, or c
  SITE (3): n equals a,t,g, or c
  SITE (270): n equals a,t,g, or c
annattttcctggacaggagaccggaaatgccttttaaacctttagtgacggcaggaattgaaagtctgctcaacaccttcctgtatcgctcacccgcgctgaaaacggcccgctcgcgtctgctgggtaaagtattgcgcgtggaggtaaaaggcttttcgacgtcattgattctggtgttcagcgaacgccaggttgatgtactgggcgaatgggcaggcgatgctgactgcaccgttatcgcctacgccakttgttgccgaaacttncgcgattcgccagcagctt

SEQ ID NO: 497 - DNA, 368 bp, Homo sapiens
  SITE (361): n equals a,t,g, or c
ggcacgagagctgacgcctagacacttgtattagctttaatagaagagaaatggaggagccatagaatattaaggatgaattcaggaaggcctgagaccatggaaaacttgcctgctctctacactattttccaaggagaggttgctatggtgacagactatggggcctttatcaaaatcccaggctgtcggaagcaagatgaaaaatgatagataaaagtatccctctccatgaaggttgtcaatcaagggactggggaaagaccttgatcccaacaatgttgatgcattgagscaagargagaggcggaggcgatccttccaggttacatggggcagargwtcamccttgaggctgttnttgaaca

SEQ ID NO: 498 - DNA, 410 bp, Homo sapiens
  SITE (373): n equals a,t,g, or c
ctgccgctggcgattgccagtacgccgatcccgctgggacaaagtcaggatattcagccgttggtggaagtggaaaaagaggtgattctggcggcgctggagaaaacgggcggcaacaaaaccgaagccgcccgtcagttagggatcacgcgcaaaacgctattggcaaaactgtcgcgttagttctgctcgcgttcgatagcgcgccaccgatatctttccggcagaagcagtcgtcccagtggatatcggtcattaaggcataggcgcgtttctgcgcttctgccacggtatgacccagcgcggtgacgcacagtacgcgcccgccgttggtcactacctgctcgtcatccgccagttttgtgcccgcgtngaacatttgccgctgccaattcttccagcggcaggcc

SEQ ID NO: 499 - DNA, 427 bp, Homo sapiens
  SITE (332): n equals a,t,g, or c
  SITE (415): n equals a,t,g, or c
  SITE (422): n equals a,t,g, or c
cagcagtgaagggcagggctggtgggcagtggctgggggtgtcctgggtggggctggccaccctcgctgcctctgacttgggccagacctgcgttaagtggagtggctcctccattctttacaccccaggcccctggcaggtgccctgcctttcctctgcccctctctctgccaacccatcctctccctcccagcccctgcccgcccagatataaatataagagcattttccatgggctgagacagaagggaaaacatgctttattttcggsttgtgaaattcctgtcctkcattcccaacaggtgcaatcgcctcatttagatattggganccagaaatagaagacaatttacaatatagcttcctttagggatctggatgctaaccaaacaaaaaaaaaaaaaaaaaccccgnggggggncccgg

SEQ ID NO: 500 - DNA, 441 bp, Homo sapiens
  SITE (223): n equals a,t,g, or c
  SITE (224): n equals a,t,g, or c
  SITE (365): n equals a,t,g, or c
  SITE (401): n equals a,t,g, or c
ctttaattccgttcatggtttcatggtttttaaactgcgagggagcgataaaacggaaaggacggggcagggccagttcttgcaggaaaggatagtaggcgcttttcagggtaatttgcagctctgttttactgagtgctttaacatcaacaatctggtttgccagctccagccaggcgtgacgttgacggttatcgagcactgcgcggaagttttctgccgnngcctcggcatcgaacggttcaccgttggagaatttcacgtcatcacgcaggtgaaggtccaggttttaccatcttctgaatgagtccagctttttgccagccacgggatcaccgaaccgtctgcctgatatttcaccaatngttcataaaccatgctctgggcgaacatctggttangcgtgtaaaggtgcgggtttagtggcccgacattcaacgg

SEQ ID NO: 501 - DNA, 301 bp, Homo sapiens
tacactcacagtgtggccggataaccgcatcgcgaggatgcgcactatgtctaccgccacgatgaatacggcaggctgacggagaagacggaccgcatcccggcgggtgtgatacggacggacgacgagcggacccaccactaccactacgacagccagcaccgcctggtgttctacacgcggatacagcatggcgagccactggtcgagagccgctacctctacgacccgctgggacggcgaatggcaaaacgggtctggcggcgggagcgtgacctgacggggtggatgtcgctgtcgc

SEQ ID NO: 502 - DNA, 374 bp, Homo sapiens
  SITE (109): n equals a,t,g, or c
  SITE (110): n equals a,t,g, or c
aagaaacaaaacaaaacgaaaaattactgaagtcgggtggagctcagacatcggtagttttccaaagctcccagacattctaatagtgccactacagttgagaattcanngttggagaactaactttcttatgtactgaattgtgttcatactttccataagtgaggctgaagatgcaaaaattcaatttgacaaacctcttttgagcgtgtccggcagtggtgctaattgctagagagagaaatgggcagattacagccttgttgtgaggacagtgtaagagttaagaaggaagacttttagaagagaaagtgggacttgaactaagcctagatgaataaaaaaattttaattatcatttgcatgaaaacgtt

SEQ ID NO: 503 - DNA, 396 bp, Homo sapiens
taccgggcaaccactggcgcggcgcaacgccaggctgcgccactggctcgatttaccgtcgaacagtcggagttctcccgcaggtgtctctataccgcttaataacttaatggcttccagtgcctgcaaagtgcccataaccccgaccaccgggccaaccacgcccgccgtgcggcagttgcgttctggctcctggttatctggccacaggcagcggtaacacccctgctcccagggcggcgtcagtaccatcaactgaccgccaaatccgaccgcgctggcgtgataagcggcgtgttgagtgccacgcaggcggcattaatctcctggcgagtcgccatattgtcggtacagtcgagcaccacatcggcccgtgcaaacgcatcttttaagcct

SEQ ID NO: 504 - DNA, 392 bp, Homo sapiens
  SITE (260): n equals a,t,g, or c
tctgcgctggtcaacggcgctggcgactgcgtgcacaccaacagccgctgccaccacgccaagcgcggttaaaccgacggtatcggcggtggaatgagtacccatttgcggaatatcgaccacgcggctgtagaacgaaccgcgatcccagaaaccattttccgcacagcccaggcagccgtgaccattgcttcattggagagggcattttcgctattcaggccagcagccagacgcactttgcgttttattcgcgtcangtctggatgcttccagccacctcgcgcacaaccagcatatgaaaactattcgaaccgagatcaatggctgcatacagcgacgaggtggaacccatactcttcatcttcaatctgtctctgtgttggctgcat

SEQ ID NO: 505 - DNA, 418 bp, Homo sapiens
  SITE (375): n equals a,t,g, or c
tttattgaccgagcgtaagggttttcagcatcatgcttttcaccgtgttgagcacttcaacattggcctgatagctgcgtgacgccgacatggtgttaaccatctctccgacaacatcaacgttcggcatttttacgtagccctttgcatctgccagcggattacccggttcataaaccagtttgtccggggcctgactttctataacatcggcaacctttacgccgcctktcgcagcacctkgtgcagcgttaacctgggaataccacctgttttgcccgatatggctgtccatcgggaccggtcacgctatcagcattcgccagattactggccgccacgttcaagcgctgggactgggcagttaacgccganccggcgattatcaaaaatattcagcagtgccatccgttaattc

SEQ ID NO: 506 - DNA, 450 bp, Homo sapiens
  SITE (396): n equals a,t,g, or c
  SITE (410): n equals a,t,g, or c
  SITE (448): n equals a,t,g, or c
cgggtttgtatgcgtccagccacgcctgtggtagttccagtaccagcgcgggttcatcaatctgtacccactcgatgccgcgtttcgccagttctgccagcacttgctgataaaccggcagaatgtcgttcagcaggctcaggcggtcaaattgttcacctttcactttccccagccacagccaggtaaccggccccagcagcacaggtttcaccttgtggcccagcgccagcgcctcgtccamttcgtccagcagctgcgtccaggtcagtttgaamtgtkggcytttaamgaactycggcamcatgtartkatarttggtgttaaamcatttggtcatttccgstgcsgcsgmagttcgccartyggcgcaagtccacgaccaatacggaacanggtgtcgatattancgaaccatctttgttctgatgacgcgccggaacgttancc

SEQ ID NO: 507 - DNA, 440 bp, Homo sapiens
caacaaaagctatcttaacctcatacttttatttttctgtcccagaagaaatgaccctgtatgccttttaaacttaaggaaaaattccatttaaacattcttttaacatttatcagggaaaccacagtattctgcagatgttcctattttaaccactaagtggaggagtattttcaactatgttttgcaacttcagaatttcatgagattaggaattcaaattgtcaatcaaatatactagttaattctaatccattccataacaagatattaaatatcaaagaattgagatacaataaatgtagggagtactaaaattgcattgtgcataacttaatatttgataacatctcctaaaactgtgaactaggaagggctgcatgattgactgagagggctycttttgtcatacagatccttgactgctggctttttaatca

SEQ ID NO: 508 - DNA, 391 bp, Homo sapiens
gggagttggagggctcagcccagggagctccatggcacccacccgcttcgcgcagacagctcggaggcaacgtcacgtgctactttgacctttttttttctccccttttcatttgttttcttttcctttttgttttctctctttttcccctctcccctttctgctctcgggatgcagccaaacgcaaagcatggaaactaaaccgtgttggtagcctgcgaaatatatacagcagcagcaccaacactgaaggtaacgcctccgcacctccacccgcccacacctccacctgcctcttcccctctcatcccctgcccgccccttcctttccaacacaggcatggaaatgcaatttgcccaaagccgcatgctcccttattgtgtttgcaga

SEQ ID NO: 509 - DNA, 442 bp, Homo sapiens
caagcgtacctgccgcccttcgtgcgctgcatctccggcgcatccatgatattggcatcgcagacactacccggttcgtcatactccagtcgctgctgacaacgctgaatggcgatttcacaagactgtaaatactcttgtgccagttcaggtggcaatgcccggtgttcccgcgccagygggtcatggcattaatatgctcaacaataaactggctgtgcgttacccacagtttcatatctgccagataatggctgttaaacgccggttcctgcatcgcctgattcaatgagttatacagagtgttatgtgcctgatttacccgcattcgctgccaggccagtggcgtaggttgcggatcctcgctaagaatcaagcgaatcgcttcctgataggcttctaaagcatcatgggcgtttttacgcaataacccgctctgcca

SEQ ID NO: 510 - DNA, 438 bp, Homo sapiens
  SITE (433): n equals a,t,g, or c
tatgcaatgacttagctataaggaagatgatcttggcattccatataaaagcaaaaagtttaaaacaacctaaatgtctgtgcattaaataaaggtttatttaataaaagttaggtaaatttattggcccccccccacaatgtgagaaactcaacaataaagcactccttccctgtggctttaattaccttagaaattacctttaattaccatagaaagctgaccgatacacttattttgggaataacctggaggtgaaattcagagaatattcatatgttttcaagaaaaagagtttcgattcaattttaattctgtgttgctttcatcagaagtttaccacaagtgaaagtggatagatgaccaattagggacccttatgtgatcaatcactggctctctggtgacacttgtgcatcatatgatttcaggnccatg

SEQ ID NO: 511 - DNA, 406 bp, Homo sapiens
  SITE (243): n equals a,t,g, or c
  SITE (301): n equals a,t,g, or c
  SITE (347): n equals a,t,g, or c
ccggcgagtagaggcaacaccaacactcctccttagcgakgggtctccccgccgcggtggctgcccggccccaaggacaggagggatttgtgcactgactcctgaccccgtcctccagcgctgctctgaaaggarartctgtgcagtggcacctgcgcgaaactggccaaagcctgcccagamggctcacctgtgcsggatggaacaaaaaaatttcgctcttgtttgcccactgttgtccangctggagtgcaatggcacgatctcagctcaccacaacctccgcctcctgggtttcaantgattctcctactcaacctcctaattacttggaatacaggttcggntttaagtttgcgaattcccacttcccattgcccctgccaactgctttcccttctccgga

SEQ ID NO: 512 - DNA, 454 bp, Homo sapiens
  SITE (369): n equals a,t,g, or c
  SITE (376): n equals a,t,g, or c
  SITE (418): n equals a,t,g, or c
ggcactttagtgtagaaacaatcccaaggcagaagcagtagactacaattatgttaaattatttttaggtccataaatggatacatttgcgggttctattgttacaaagagtgataagataaaaccttgttttcaactgcagattccatgtctatgaagcaggagctatcagaacatgatagtagcatgttccttccttccttggtgctgggtgarggaatggtggtgttggtgaaagatgaagattaagaatagggaaatattaggaataacaatwaaatcmatgttttttcaartctgcactaaactgaaatwatttgcttgtwtactcmacttgtwtggagattaaatwaatatttttccacagtncagggantaaaatgggctattcaaccccctctgttttattaaatgtggntcttcaaaatctagggcttagtatggtttatttaat

SEQ ID NO: 513 - DNA, 432 bp, Homo sapiens
  SITE (374): n equals a,t,g, or c
ttccagcgcctcctgcagcgttgccccctgaagcagtttcaccagcagtaaaccgctcgtcacatcaccaacacctaccggctggcgcataccaaaatccaccagcggacggctgatatgccaggcttcatcggcggtgaccagcagcatttcaaaacggtcacggctgtarccagctcgcgccaggtgtttaaccaacacaatttgtggcccttgcgcaatgagttcgcgcgctgccagaaccgcttcttcgacgttatttaccgcatgctcacagagtatttccagctcaaccagatttggcgcaatgatatcgctggcaggcaaaccgtgccgcacatgaaactctgcgacaccccgtgcaacgatacagnctttttccggatgaccattaccggatcgcaaaaatatttcgcctgcggattcgcggct

SEQ ID NO: 514 - DNA, 402 bp, Homo sapiens
  SITE (310): n equals a,t,g, or c
  SITE (315): n equals a,t,g, or c
  SITE (351): n equals a,t,g, or c
  SITE (399): n equals a,t,g, or c
ggcaggcatttttccaggaccgccagctcagctttcgcgtctttatcgccactcgccacccttttcaacgacaacctggccattactgcccgcctgatagcctaaaatggcgacgattgaactcgtgacgtaacccttatccgtaatatttaatgaacctgtgccatagctacctatttcgaataattcggtcgtcagaacagaatcctctccctcaacattgacgtccgacgcctcctgtcgaaaaaaacctaatcttaaatagcctccatcgaactttraccttctkttttaatattcaacgtccccnttccngattgaaccacatttaaaggccttgcattatttccnctatcatacaatcgccaggtgccaccaaaaatttacggtgcctctgantcc

SEQ ID NO: 515 - DNA, 396 bp, Homo sapiens
tctacaacgcgaattcgagcgcgctcgtcaacagggtgcgctagcacaatggattgcggcttttgaaggtggtttcactggtatcgtcgccaccctggataccggtcgccccggtccggtgaggctttccgtgtcgatatggacgcgctggatctcagtgaagagcaggatgtcagccatcgcccctaccgcgacggttttgcgtcatgtaacgccggaatgatgcatgcctgtggtcatgatggacataccgccattgggcttgggctggcgcatacccttaaacattcgartccggactacatggcgtcatcaaactggatttttcarcckgcagargaagtacgctggccccgggcgatggtcsatgcagtgtctaaaagaagtggatatttt

SEQ ID NO: 516 - DNA, 472 bp, Homo sapiens
agagtgcataacagtgacaccacataggccatagttttgtagttccagagacaatgccaaacacctatgtgtacttagtgctttgtaaagagtggtaataacagtgacaccacataggccgtaattttgtttttgcttttgttagggtgttcagcatcttgactccttaaataaggttttcagtcagatttataaagcagcattgaagaagttgtattatatttgagtacagttggaatccatggcagttttatggaggccaaatatatcagatgaataggctaatttccctgagttgctggccttattagtccctactctgttgccccctggttacctaatgcatgttcaaaaggtatagttttcatcacctgcttgatcttgattttcagacagcatcaaatcagttgcaaaacaaatccaagctaaaattttgagtgtatgattaatttactatagcatgtaattatgc

SEQ ID NO: 517 - DNA, 391 bp, Homo sapiens
  SITE (356): n equals a,t,g, or c
  SITE (387): n equals a,t,g, or c
atattgcctggtggggcaataactactatgacgttaacgagctgggccacattagcgtgtgcccggacccggacgtcccggaagctcgcgtcgatctcgcgcagttagtgaaaactcgtgaagcacagggccagcgtctgcctgcactgttctgtttcccacagatcctgcagcaccgtttgcrttccattaacgccgcgttcaaacgtgcgagggaatcctacggctataacggcgattacttccttgtttatccgatcaaagttaaccagcaccgccgcgtgattgagtccctgattcattcgggcgaaccgctgggtctggaagccggttccaaagccgagttgatggcagtnctggccacatgctggcatgaacccgtagcgnacaa

SEQ ID NO: 518 - DNA, 145 bp, Homo sapiens
gcagactggaagtgctgggacccaggaggaggtggtgtacctgcccctgagccttctcctctggaggctggggaagggccgctgtccagargaacggggcagcctgtgacaccctggcgtccggcccacaggaggcatgtgagcg

SEQ ID NO: 519 - DNA, 343 bp, Homo sapiens
taccagggtctgatcgcgatcgcgttgctccaaatcgccgtgtaatgacaatgcactttgccctacttcattcagcgcgtcgcagcagcctggcaatcttttttggtattgcaaaacaccacgcaagargatggctgatgcaagcttaataaccgttgcaacagargmattttgcctttgctggatgtctcataaaattgttgttcaatgggtggcaaarcatctgttgagtcaatttcaatcgccaaaggatcgcgttgcacttcgtccgctgattgcarcgatggcttccggccargttgccgaaaacaraarctctgtcgagatgcaggcgcaaaacggg

SEQ ID NO: 520 - DNA, 309 bp, Homo sapiens
  SITE (219): n equals a,t,g, or c
  SITE (230): n equals a,t,g, or c
  SITE (288): n equals a,t,g, or c
gcttcctggaggagaagatatctgagctgaaatctgaagaacttagccggtcaaagggtatggagaatggatgggatcagtgaagatcaggaatgtacatggtagagggaacagaggaggcaaaggccaagaggttgaggaaaaaaaaaacagaataatttggggaaataaatttggccacgtgcattggctcacacctgttaatcccagcactttganaagccaagatnggaagatacttgagttcagaatttccattttttccccctgggccacacggaaaccctntctcccccccaaaattacaaa

SEQ ID NO: 521 - DNA, 217 bp, Homo sapiens
  SITE (115): n equals a,t,g, or c
  SITE (193): n equals a,t,g, or c
ggtgagtatataaacaacttttatgcttttggaaatgctatgtgtttttcctaccaaaaaaagcatgttttattttaggaaatgaaaaataatcctgtgcatttaatcactgaanaagatctgaaacaaatctccactttagaaagcgttagtacaagtaaaaaggataaaaaagatgagcgaagaaggaaancaacagagggcagtggaagcatga

SEQ ID NO: 522 - DNA, 351 bp, Homo sapiens
  SITE (18): n equals a,t,g, or c
  SITE (269): n equals a,t,g, or c
  SITE (318): n equals a,t,g, or c
  SITE (338): n equals a,t,g, or c
aactcggcgagttcacgnttcagcgtatagttgctcatcatacgggtttsgacgtcatcactatcaagcgaaacagcaaagccatgtgcacggcggaggtaactcagtttttcgagtgtgttgagatcctggcgaatggtaacttcagagactccagtggcttttgccagatcggttacgctaacctgaccctggtcaatggaccatgctgtgagaatagtttgttgtcgggaattcatcgctgtaattcttgataacgttataatacntaatgaaaaaaatactgacgcgccggggcatcctccaaataaggaaaanctggaagggcacgattgttnaatcttcccacgg

SEQ ID NO: 523 - DNA, 462 bp, Homo sapiens
  SITE (433): n equals a,t,g, or c
  SITE (456): n equals a,t,g, or c
gtcacgaatattaaggaactggaccttgatgacgttaccgatcagcaggtttttcgcaccgcccatcaggtcggatacatagaacaggcccatcgctggcagcatcaccagcagacatccggcaataattcccggcatcgtcagtggaataatgatacggataaaagtctgtaacttgctggcaccgagatcgcgcgccgcctcaagcaacggcttatccagtttttcgataytggagtacagcgggcatcaccataaacggcascagaatgtaaaccagaccgataatcaccgcactgggcgtgaacatgatacggattggtgtgtcgataacgcccagccagagcaaaaactcgttgagatagcctttggtgctgaggaaaatttcagcccgtagatacgaattaatgagttggtcccagaacgggaacantcagcagaaacagcagcagcggnacgcac

SEQ ID NO: 524 - DNA, 499 bp, Homo sapiens
  SITE (378): n equals a,t,g, or c
  SITE (450): n equals a,t,g, or c
  SITE (483): n equals a,t,g, or c
gatttagcacaggtaaagatcttataaaatgaaataatgcatgtaatgatgcattttccaagtagatgattttaacaaactgtaagcttttatgcctgtccttcattgtgtcttttctgcctctgtcaggcgaactgtgatgaagagccttatacttaggaagacacaactacctttgaacagtcctttgtgaaatctaatgatcgcaacgaacgaaataaaccagaacatcgttcttcaagccaaggacccttgtcatccattagagcggtaatcaagagatcttctcggacttctattcagagtgaacttcatcgagatagaargcgcccagagatcaccattgtggcaactgaaccacttgagggcaagcctcgngggtttcaaggaaccccaaccccaagactggggaattcctacaatcaatctgcaacaagctctttggaaggnctaatgagcttgggttcctgcttgaacttccancattttatgaaccaag

SEQ ID NO: 525 - DNA, 349 bp, Homo sapiens
  SITE (333): n equals a,t,g, or c
  SITE (335): n equals a,t,g, or c
  SITE (343): n equals a,t,g, or c
aagaccggcttctgacgtctctcatgtcatcacagcgtcagaataagtaagttttactcgcctctgaatgagcagaggcgagtgagtattttaatgaacaaaacgtccggcacgagacataaattcttcttcgctcatctcctgtccgttaaaaacaactttacccggtgtataacgcagctgcagcgargcggtattgttgtcaatcgtgattaactgaaacwtctgacctaatgtcwtcatcccgctgatttgtttatcagcctgcttttgcgctttttcccgcatccatccttccagaataaattaaactgttttgcggttcctgtgaananattaagcnggtaac

SEQ ID NO: 526 - DNA, 441 bp, Homo sapiens
  SITE (386): n equals a,t,g, or c
  SITE (388): n equals a,t,g, or c
  SITE (431): n equals a,t,g, or c
ggaagaaaggaaagaaaaaaaagataaaatggaataaaagtgcagaatgctgactccctcgaggcttttcctaaccattctattctatggtggatgctacggtcagcatgtttctttaattgttgttttttgttggtggggggtgtttagatcattaaagaaatggtttcatcatccactttctctcatgtcccttttctcatcagctgcatattccaggccatgtgtctcctgatctgtgcccagatgtaccaagtgccagactgcagcacatcttgtgagctggtcatcattacccagctgcagagcatgccaagcagggaactggcatccatgaaccttgawatagttgacctgcttaaaaaggccaaggtaattgactctgngnatctgatagcctaagttttttataaaatatttttcaaattatnctattttaaa

SEQ ID NO: 527 - DNA, 254 bp, Homo sapiens
  SITE (251): n equals a,t,g, or c
gcccgccttggcctcccaaagtgctgggattgcaggagtgagccaccacacctggcctagtgctagtaattttttgtcagttgtttctggtgtgtgattactaatacaatgctcttgagaagaacagattgcaraagtttataggcttctgagctcagggaaggcactgaccgagtcccaggcaggcaaatgcagtgagtgaatttgttcagtccaatgtgttgtcagtttccttcgtacagttccatganata

SEQ ID NO: 528 - DNA, 424 bp, Homo sapiens
  SITE (53): n equals a,t,g, or c
  SITE (226): n equals a,t,g, or c
  SITE (356): n equals a,t,g, or c
  SITE (404): n equals a,t,g, or c
accaggataattagcgaatatctcaatgcctggggcgtggcgaagtgcaagantgtgtattacatttaaatcacattatcttgcaaagggattggttatgaacacactacgttattttgattttggaagctgcccgccccgttttgttattaattgcccgtatcgccgtggtcttaattttcattatttttggttttcccaaaatgatgggctttgacggtacggnccaatatatggcctcgttgggcgcgccaatgccgatgctggcagcgattattgcggtagttatggaagtgcccgccgcgatattaatcgtgcttggctttttcacccgtccgctggcggtgctgtttatnttctacacgctgggtacggcggtgattggtcaccattactgggatatnaccggcgatgccggttgggc

SEQ ID NO: 529 - DNA, 325 bp, Homo sapiens
  SITE (318): n equals a,t,g, or c
aattcggcacgaggaaaaaaatcaaaatgtcaataatcacaatatatgtaagtggtttaaatgtataagttaagactaagattcacattagggtcagtacatagtaacaacaaggaaaggctcccacaggccttaatgtttgtagttattggggtggaggagacacaggagacagcatggagaggaagaactagattagatgcacgtccgacagttggaaagatcctaaaggtagtgttcaaagaaaaaactcaagagaatgtgrttcacagcccaaacaatctattacatagggttctggtagccagatggccagcngcttcac

SEQ ID NO: 530 - DNA, 355 bp, Homo sapiens
cggaaagccaagaaaccaaaaaagaaaactaagaagagaagacacaagtcggtgagtgaaggaacttctacctaagcccctgctattttgtgagttctgttctacctgcctcccaggctgatccacaggaactgaggaggtgggctctggactcttacagaatagtcctgagagtgagacagaccctgaggagaaagctggcaaggagagcgatgagaaagaacaagaacaggacaaggacagggagctccaacaggcagagcttcccttaaccgttccccagggctttgggattcaagaaaggagaaggtgagggggcaggggccctaggccagttcagcacggtgggttcaag

SEQ ID NO: 531 - DNA, 222 bp, Homo sapiens
  SITE (205): n equals a,t,g, or c
aattcggcacaggtgacccgcagcaccgtgagatccagaagtgaacacaggctctctggaggccaggagatggtgtgatttgtccagagaatctttcctaagaggaaatcccagagaagcaggagaaagagaaagaaatggctggtgctcagactctgttgacgtttcagggatgtggccatagaattctccctggaggagtggnaaatgcctgggacctgg

SEQ ID NO: 532 - DNA, 395 bp, Homo sapiens
  SITE (296): n equals a,t,g, or c
  SITE (303): n equals a,t,g, or c
  SITE (337): n equals a,t,g, or c
aattcggcacagctcaaagagtggtcccaggactgcctcagtcagaccacagactcctaagttcctcctcagacttcatggatccaagctctgtgaggtaattctaagcacattaaacttgtagaacagccatctggatttaatattacataatagctataatattctgctattctctaatcttcaatgtcagtttcttaaactgtgcaggcctgtctttagatgcccttcaactgtgctgggggactatcttgatgggcagccagcaaagaaaatcagcaaaaaccccagtgggngtttctngggttttacttttgtttaagggaaggkkgatggntttyttggmcatggccaggtwttctaggtgggaaaggggcaaagtggtttaatggcca

SEQ ID NO: 533 - DNA, 258 bp, Homo sapiens
  SITE (233): n equals a,t,g, or c
  SITE (246): n equals a,t,g, or c
accttgaattaggggtttcacaagaatgcaggtgctggtgcatggaagaacagtgagcacttttgatgattgaggtctagcttaacattctgtgaccaataatattttagttaacagagattctggttcttggatcgaggatattatgtttaacaggaaaaggctctgaagatgtaatctctctttttttcaagttgcatagattgcacatgaggattttgcccacttagcancttcattctactnttgcaggaatag

SEQ ID NO: 534 - DNA, 223 bp, Homo sapiens
  SITE (19): n equals a,t,g, or c
caattcggaagtggaggtnaaatcagtggtagatttcatccaaaaacatgggaatttcaagggcttcatcgacctgcacagctactcgcagctgctgatgtatccatatgggtactcagkcaaaaaggccccaaatgccgaggaactcascaaggtggcgaggcttgcggccaaagctctggcttctgtgtcggggcactgagtaccaagtgggtcccacctg

SEQ ID NO: 535 - DNA, 275 bp, Homo sapiens
  SITE (244): n equals a,t,g, or c
  SITE (254): n equals a,t,g, or c
gtgataatgcaaataacagaaggagagagagaatgaaccctttctgggtgtttcagggcaagctttacgttcctttgtaggaaggggagtaataatgtaaaacaactgacccagagaagctaaaagccactggcaggcacaggtctggacaaaatgggaagcaaagcaagaggtgggcaacaattttgaaagaccaaaagttgtgagtaacttttccagtttgatagtttattaaagtggttangttaaatgtnagtattgggctagtttactgt

SEQ ID NO: 536 - DNA, 150 bp, Homo sapiens
  SITE (141): n equals a,t,g, or c
aattcggcacagctgagatccatccagaatttaaggctcagatsagggctgctccttgaggggagccctgttctggggctagagctatgcctggatgcttgtaattggctctgctgttttgtgactgaacatgccatggtntttttcaca

SEQ ID NO: 537 - DNA, 214 bp, Homo sapiens
  SITE (4): n equals a,t,g, or c
ctgntgttcatgagtctccccactggatgctttccataaagtgagggtgggtgcttgtatgtgtgggtgtgtacctgtatgtgtcttagaacttgggacttagaatctccccttctccctggaatgagatgcataggaaagagaacttagaggatctggaaggaaggtccccacccaagccaggcgtatcaacaggaatgaaactgcaatctgg

SEQ ID NO: 538 - DNA, 192 bp, Homo sapiens
  SITE (49): n equals a,t,g, or c
  SITE (185): n equals a,t,g, or c
agtgaactgaatgtaaagagctgctgtacccctgctgctgtgggctggnaaggctgtttaagcactgcaggagacatgtwtggagaaaaracttcmgtataattgcaatcacaacccacgcactgaccactttcccataacacacattaggagtgacatggtgccaggccgggcgcggtggctcnagactgt

SEQ ID NO: 539 - DNA, 244 bp, Homo sapiens
  SITE (232): n equals a,t,g, or c
acagtcgagtcggggacacgtgagagtctgtggtggtgtgcgtggaaggcaggcaaaagttcttcattttgttttaattccatagtcatattttaataggaaatatattgacttggtttaaaattgatacaaaagcatatatagtgaaaagtttccctctcatcactttgtaggacacaaattctcctcccagaagtcatcacttttttgaatttcttaggaaagttcaggnggtcatttagga

SEQ ID NO: 540 - DNA, 286 bp, Homo sapiens
aggaaaatataaactgtaggccacattgccagaacacagaccaaaatgagcaaaaacagttgctaggaaacaggcccaaatgcagaactttagcttataggaggaagtcagaaagagctgggaaatgagaacattgaggaatataacagaggaggaacaaccagagggtgtgatttttagaatgcaaacagtgaccacttaggatcagtgtctgaaatttggtgttccttgagctwgctggsacttggwctctttgacmgtatgtggaacaaactgcctaattcgt

SEQ ID NO: 541 - DNA, 310 bp, Homo sapiens
  SITE (275): n equals a,t,g, or c
  SITE (283): n equals a,t,g, or c
  SITE (286): n equals a,t,g, or c
agactcccatggcttcaactactgtctgtagactcgtgacccctaaaatcctgacctctagccccagcctctcctaagcctggggccatatatgtatctgtaccctcgacgtttgccccaagatggcatctcaggctcagtgtgttctttatcttctccgaggacttactcccctctaggggctcctgcctgcagaaaggggcaccatgtcccacttcctccccatcccaaagcccacaggggcattcctttcaccccttctttcttcccttggncaccatanttntttaaagtgtttcctcttgtaaat

SEQ ID NO: 542 - DNA, 341 bp, Homo sapiens
  SITE (332): n equals a,t,g, or c
  SITE (339): n equals a,t,g, or c
aattcggcacaggaaaagaagttatgattggggtggaggggggaataaaactgaatttggtggaagagattgactttttattaactatttgtgtatctgttagatataaaacactgaactgggtacaacagggccttcataaaagatgaccaaatgctaagggtagagaaataatctcgggtattttgttatgagaagtcttacaaagatgtaactgtaatatgaaagattggcttctgttttaactcatttatacaattttcctttctctcctttgtactcctaggctagttccaggggatacggttaaaagatcttcccaaatgtgtccngttaccncc

SEQ ID NO: 543 - DNA, 361 bp, Homo sapiens
  SITE (291): n equals a,t,g, or c
  SITE (313): n equals a,t,g, or c
  SITE (339): n equals a,t,g, or c
aggaaattgctttaaatgaatgcttttaagcccctgaacgggtatttctattttgggcccaagcacctagtgttgccatagccacttgagaatcgtgtcagacctagcccctgcttgtcagtkacttctgggctactctgggggacaaagtataactattcaaatggcaagttgaattagtacagtctaggggccttggagatggcttcttgaaagaggtagaacctggaaattctccttccttgaggggacggccaggatttggccagatgggaaaggcaagtggaaggntttgcaggggacaaggaatgtnaagcagaacctagaaatggggaaggnacaaaagtgaaagggggattga

SEQ ID NO: 544 - DNA, 548 bp, Homo sapiens
  SITE (126): n equals a,t,g, or c
aattcggcagaggttaaaacacaatttatttctctgaaacctaaaatccctctcagcccagaagtgacacacaccaaacctgccccagaacctcagactctactgccatcacagtcaacaataggncctgaaacaccaggaaccaaaccttcaacaacattagcaccacgaaagaccaaaagaccaggtcgtcgcccccgcccccgtccccgccctaaaaccacacctagtccagaagtgcccaagtccaaacccgctctggaacctgccacgatacaaccggagcccttggtgcccacaactgcctcaaaaccatctgagagacctaaaaccacacacagaccagatgcacctcaaattcagcctggttcaaaaccaccaaaacaattacttcctaaaccccaaaccacagcagaaccagacatgccaccaactaaatccgtctctgagcctgttccatttgaaactgaagctccctcaatgaccatagttcccaccacagacattgagctgtaactgtgagaactgaggctacagtgacaacatta

SEQ ID NO: 545 - DNA, 220 bp, Homo sapiens
  SITE (30): n equals a,t,g, or c
  SITE (214): n equals a,t,g, or c
aggaataactccacagcccataccttgggnacaactgagctaactcattcagttttgtccattacatcgaagggtgttttttgtaaactcatatgtctagaatgtgtttgccatgttttaatcacaagtagatattttctcagagtccagtgcagtgaagtatggtaagatcctgattgtgttctggaacacagagggaagaccaccttctgtnatagca

SEQ ID NO: 546 - DNA, 293 bp, Homo sapiens
  SITE (202): n equals a,t,g, or c
  SITE (252): n equals a,t,g, or c
gaattcggcacagaaaagaaaatgtaccatgtgtacacaatggagtactatttggctataaaaacaatgcgatccagtcatttgcaacaatatggatgaaactggagataatttgttaagtgaaataagcaaggcacagaaagataagcagtgcatgttctcacttatttgtgggatctaagaataaaaacaattgaactcntgggcatagaggaatagaaggatggttaccagagtctgggaagggtagtnaggagctggcagggaggtgttggtggttaatgggtacaaaa

SEQ ID NO: 547 - DNA, 153 bp, Homo sapiens
aattcggcasaggcagagcttgcagtgagccgagtttgcgccactgsastccagcctaggtgacagagtgagactccatctcaaaaaaataaaaataaaaataaaaaaaatgaaaaaaaaaaggaaagtgaggtatagagtatctcatagttt

SEQ ID NO: 548 - DNA, 442 bp, Homo sapiens
  SITE (211): n equals a,t,g, or c
  SITE (404): n equals a,t,g, or c
agcttcagaggaaggcactaactaccacctacccctctattcctggctccttagtgcaagcwttttctggatcagtgtttacattctgcatttatttcacagttaggccctctacacattccttttctgcccttgtccctctgggctttaaagctacaataattgctagtggcagcagctgcttatgaaatatgcaagtyttgctctagtnaaatggtggccttagttgctccaataaagagatggctcaaacctatcarggctcctgcttcccctctcctctcagctaggcagcaccaatcttccctatctatggtgggagaactttctgcctgggtctcatggtcamtagtagattagrggacagwtaytttyttgytggtggtaggtaaaacagttaaaangagtccygggtaactgctccttgggacttccaggggtt

SEQ ID NO: 549 - DNA, 348 bp, Homo sapiens
  SITE (33): n equals a,t,g, or c
  SITE (48): n equals a,t,g, or c
  SITE (251): n equals a,t,g, or c
aatgtgtgacttgaaggtttctccacgtctttncactgcttgatattncgtttctttttatcactgaaaaagtttctgttgtctggttgtactacagttgatttatccatttacatactgaaggacatcttggttgcttctaagttttggcaattgtaaataaagctgttgtaaaataaatccatgtacaggtctttgtgtagatacaagtttcaactcctttggttaaataccaaggaggcatgattgcnggattgcgtgrtaagagtacgtttagttttgtatgaaactgccaaactatcttcaagggtggctgtaccctttgggcaatcctaccggcaatggatg

SEQ ID NO: 550 - DNA, 144 bp, Homo sapiens
  SITE (84): n equals a,t,g, or c
aaaaagatgatttgtgttacattgaaagataacaaggaagctcttctgctgaggcttgtgttgaaatgagaattttctataatnctattaaattgttgttggagttcaacatttttcctggaagcgaattctgtatcttccttg

SEQ ID NO: 551 - DNA, 300 bp, Homo sapiens
  SITE (119): n equals a,t,g, or c
  SITE (184): n equals a,t,g, or c
  SITE (198): n equals a,t,g, or c
agccttggccagggtcaccataaactggaaatggccaagccagggtttgaatccagatggtcaaacttgaaggcagctgtactaagcatgttcccatctgcatatgcacatgcgttcangacagtcgctccacacacacgtgctcgctcaggcctcctttctgaggtgctgccactgcccggcngcagcccagacgcngcagcgatggcccggtccatcagacagcctgtctttccagagatgagtcagctgggccaggacctaggacagagctagggatggtgggtgcacccccaccca

SEQ ID NO: 552 - DNA, 243 bp, Homo sapiens
  SITE (72): n equals a,t,g, or c
  SITE (234): n equals a,t,g, or c
ctttttttccctagattaggattagatggttcccctccccaaragttaagccagctcactgataaccttgtnatctcttactgtgtccctctttctttaaattcctaaagatacctcacctttccctcagaaggcggaaattcacaggggcttctaccctctctagaacagaattgtgaggggaaatggagaagggtctatattgtgtttaagggaatggaaaaacagggtcantggtatgca

SEQ ID NO: 553 - DNA, 318 bp, Homo sapiens
  SITE (311): n equals a,t,g, or c
ggcagagtkagtattccattttatggatatatcacattttgtttatctattcattagttgatggatatttgtgtcatttccacattttgactgtcatgaacaatgctgctgtgaaacattcatgtacaagtttttgtatagacagatgttttcatatctcttgggtctgtctatacataggagtggaattattgggtcatatggtaactctatatttaactttctaagaaactgccaaactgctttccatggatggctgcaccattttttcatttttaccagcagtgtatgaaggttcagattttttcaanttttttg

SEQ ID NO: 554 - DNA, 320 bp, Homo sapiens
  SITE (202): n equals a,t,g, or c
  SITE (296): n equals a,t,g, or c
ccaagaggcagaagttgtagtgagcgaagatcaggccattgcactccagcctgggcaacgagcaaaattccatctcaaaagaaaaaaatgttcattttctaaatatataatttcttctacagttattaactagcattcttttgtaaagattttctattactttactattactataacctcatggatttttttaaagaatcantatgttgtaatcaattatagctactgttcttggtttttctttttgatgctccaatttgtctcaaattgataaagggagctccttcaagatgacnttgttccgttgacatgatcccatt

SEQ ID NO: 555 - DNA, 427 bp, Homo sapiens
  SITE (236): n equals a,t,g, or c
  SITE (290): n equals a,t,g, or c
  SITE (357): n equals a,t,g, or c
  SITE (425): n equals a,t,g, or c
  SITE (427): n equals a,t,g, or c
ggcagaggttaactagcatgatgatagactttaactctatcaataatkgcattaaatatacataatctaaacacatcaattaagagaccaagattgtcacattgaataaaaaagcgagacacaactagcagaaaacctacatgtatgtgtgtgtgtgtatatatataaagacatagacaatattttatatatagatagatagatagatagacatagacaagttaaaaataaaaggntggaaaagatattaccatgtaaacactaaccaaaagaacccgtgaaagggctgngttaatttggacaaagtaaacttcagaacaagcactattactggggaataaaggggggatattaccnaaaatatagagggggtaatttagattccccaaaattaccactttgaaatatggcatgcttttaccatngn

SEQ ID NO: 556 - DNA, 341 bp, Homo sapiens
  SITE (194): n equals a,t,g, or c
  SITE (292): n equals a,t,g, or c
ggcagaggtatcagagctggcttctgtcctccacaagtttgcagcccagtcagtgacctgccaggtcatgaaaaacaccatggacaggatggaaaggagacagactgtgggctgtgaagggcacttaagcaaagagaggtcactcttaatcaaagatggcaaggagggcttcttgaagatagtagcatctgggncaactgcttacatgagggcataaaggatcagtgggcagttttttcctatacatacagcatttcctatatatrcagagcccatttttagacactgttcnttagaggagcagacccctytgaggakagaaagccagctggacattttgg

SEQ ID NO: 557 - DNA, 183 bp, Homo sapiens
atttcgtttctttttatcactgaaaaagtttctgttgtctggttgtactacagttgatttatccatttacatactgaaggacatcttggttgcttctaagttttggcaattgtaaataaagctgttgtaaaatagatccatgtacaggtctttgtgtagatacaagtttcaactcctttggtt

SEQ ID NO: 558 - DNA, 124 bp, Homo sapiens
  SITE (120): n equals a,t,g, or c
ggcagagtgcaagctcctgacctcaagtaacctacccacccttggcctcccacagtgctggaagccactgcacctggctcagaatacttttttttttgagatgcagtcttgctctgcatnacgc

SEQ ID NO: 559 - DNA, 421 bp, Homo sapiens
  SITE (413): n equals a,t,g, or c
agtgctctggggccwgrgcccttgaacacactcaatgtttctyccccttttctcacttatctgaatcttctgctacttctttctcctttgtccgcccctgctctctggtttctcttgtacactctgtttatttaattttgaatcatttgtttgtttgttcctttcttcctcctttaacaaattcaaataggatacaagccactctgtcccatctcctgcccttgccttctcttctttcattcttttattaactgatttttctcttgagaaatcaccactgggtcaggtgtggtggtggsttcatgcctgcaattccagcagtttgagaggctgagggcaggaggatcaattgaggggccagaagttcggggaccagctggggcaacaaggggggacccgtttttataaaaacntaaaaatt

SEQ ID NO: 560 - DNA, 313 bp, Homo sapiens
  SITE (209): n equals a,t,g, or c
  SITE (288): n equals a,t,g, or c
  SITE (313): n equals a,t,g, or c
gcatgaaaaatcactttatatttgtttatattttyctatttagrtaaactcagcttttttractggaacggttttctcataacttgccttgtgtttatagctcattcaaacaataaggtagtcaagccatatttatcaggtttcagatcagtcatgcacattaattccattatttgtgctgaacttttcaatttataaattgaatatgnacttttttaaaattcttggaataatgtacccttttaaacatcagccaacaacaacaaaaaggcttactggaacttgagnggcttttggtttaaaacttgggggn

SEQ ID NO: 561 - DNA, 370 bp, Homo sapiens
  SITE (92): n equals a,t,g, or c
  SITE (320): n equals a,t,g, or c
  SITE (331): n equals a,t,g, or c
ggcacgagggcattaaaccctaattggaagtagtttaagagagaattgaaattttatagaactggtctaacaatatttttattaggcctgtnctaatatttttcctaacttattagtaaatgagagagaatggaaggagagttggagaagggaactatacaactctttagaggaggtttgtttggagaggaacagaaaaatgaagtagtggctctagagttatatggacttcagaggatttataagattcataagagaaattatatctattttatatgcagatggaaacgrtccactwaaatgrgggaaaaatawtaacnggtgcttattngtgtgctaggcaacgccaaggcactaggggattacagcc

SEQ ID NO: 562 - DNA, 310 bp, Homo sapiens
  SITE (8): n equals a,t,g, or c
  SITE (142): n equals a,t,g, or c
agattctnttctgcacagttatgasctacacataatgcactgaatctgttcccttgatagtttctgcataggctttggttgtgccacaagtgtgcctgcagtgaatgacctggtctaactctggcattggtcctaggactgnactgtccaggaatatgcctaatcctgagggaaagcatcaatatgggctgttggttatagagagaaagatggcttagacttcaagatcttcaaatccttgtcccagctgcatcttgctgccgtgggttttcaagatccacatacagggggggtaacttggacaattacc

SEQ ID NO: 563 - DNA, 362 bp, Homo sapiens
gcttccccctgtgtaaccagggaagctaagcatgtttytttcacttcacccatcttcctacatttttyccttcctagtttcagaaacaactctccaagttccatttccaaggaaagtcttaaccatttgtcccttctggcgtaccctctttcattgaaatccatgcagaatataccaggtactctgtctttgtgtgtgtgtgaagccataaaatctaatgttacgtgtgcggtggtgctgtgaggtatgcttctggtgcaagcgggctccctcagccctgctgtggtaaagaccaagtattaaattgtcgsttaacagggttttctycattagagtcgtgtgcctgagtgtccctgtgaaat

SEQ ID NO: 564 - DNA, 405 bp, Homo sapiens
  SITE (353): n equals a,t,g, or c
  SITE (371): n equals a,t,g, or c
gctcctcagctcaagtgattgcctgcctcggcctcccaaagtgctaggattacatgtgtaagccaccgaccttggcctacatacctctttgactcaataagctcctctggaagccttctctggccaaccagtttgcccctcactcctttcacctctgcctacagtacctaaactctattaaaagcatggcttatactgttgcatgtgtttgattaacaaattttctttcctcccaaagactgctaactatctgagagtagcagtgtcttatttttttttgtacttctagcatctggcatagtgctcaatggaatgaagtgagtctgtcaggggaacatttgccatctaattangggaagaactaaacgggnattctaaatactggtctattaaaacatatacctt

SEQ ID NO: 565 - DNA, 351 bp, Homo sapiens
  SITE (339): n equals a,t,g, or c
  SITE (341): n equals a,t,g, or c
aaacgtgaaaaaaatgtggttattgctgtgataaggcrctgtgtttagaagacaccatgaacactttgtgtcccgagaaactagaagtcagtattggacataccatctttagaaaatcctaaagaaaagctgttaactgtttagtaatgtgtattgagtacctactatgtgtcaagctgttctaggcactagatatatagacgtaacaccaggaacctgcctacatggaacttgcactttaatggggatggaggatgggtaaatgttaaattwaccaaatgcacacaaatatatgwttatgaattgtgtcaaatgtcatgaagttataataggtttttncntttatttttg

SEQ ID NO: 566 - DNA, 355 bp, Homo sapiens
aattcggcacgaggtgacccccattacacactctctcagtattacccctctttcagctctgtagctgttgcagtcgcatgattagtcagtgttggtctcctcatggagaatataacttgaacactagctgggaccatgtttatcttatttcccactggagtccctggccttcacctagagggtgggatgtggtcagtgtgcaatgagcaagctgcttgggtgcacctaaaaacagaggctttggccatggggcagcatagccagatgtgtgttctagagagaatgttttggcggctctgtggaggatggrtgacagaacctcttgcctgttgagggaggctggttaggcattttt

SEQ ID NO: 567 - DNA, 253 bp, Homo sapiens
aattcggcacgagggtgcttgtttcttctttgccttctgccatgattgccatgtgaatcgcacccctggaactgtgcagggcccacctgtgtggccacagcatacmcctgagcaaaggagtgaccacagaagtgcatggcaaagcagaaaggtgtgacgtcttggaggacgcgggaggaaagcacgcccagcggacaggagccatcacgcggctgcgggctgctkctgagaacctggcgtgggccaccgtcgt

SEQ ID NO: 568 - DNA, 388 bp, Homo sapiens
  SITE (3): n equals a,t,g, or c
  SITE (12): n equals a,t,g, or c
ttntttttcctnaaaagaaggatcggaaaagagcaaatgttttaagctattgtattatgtaaacagagatcccaccaagaaagtgtaaatcagagccgggtgtccatgacagttgacagacctgtttggtgtgcctgttttgctaggagaccagagaacttgatgtactgcagacagctgagttacgcatttggttttgaaaaattatcttgtgtgaggaatatgattataacgtgaatttttccacatcttcgtgtctgctagcttgaagtacaagaaaatatttagtattctactattttatcttgcattaaaacactttaaccattgaaaaacgtggggtctaatcaaaccaatacagtttcttccttggttgctggctgacttg

SEQ ID NO: 569 - DNA, 200 bp, Homo sapiens
  SITE (2): n equals a,t,g, or c
gncttttagactccattgccactgtgttataggaaactgaggctcagagaagtgaggtaacatgtccaagtcacaccgtaatttgctgagctaggcgtcatacagatttgatggattctggaaccatggtccaatcgccccatacctgctgcccagcaatcacattccggaaaacaagggtacaaggaagcacacatttt

SEQ ID NO: 570 - DNA, 389 bp, Homo sapiens
  SITE (327): n equals a,t,g, or c
  SITE (344): n equals a,t,g, or c
  SITE (368): n equals a,t,g, or c
ggagactgaggtcttctgagacagaaaaccaaccccatagcaggcctggtgtgtgccctagaatggcagaggccccacacgttgccccggctcctctggaagaccctccagcctgtytgctggrttccttgtacttatgaggattgttaaaccatctcataggattcctttccagactcagcccttcacttgtggcagcatttcttactctgaggttctgggcctagaaacccagtgtccataggcaaggtctagggacagagagagtttgtagaaagtgggaatgcatcaagtggaaggcttaaatccaaacaggactgagctggnctgggtggctttgtccnttttgccattttcgtaaacccttnaaaggttttaggaaattcttt

SEQ ID NO: 571 - DNA, 371 bp, Homo sapiens
  SITE (254): n equals a,t,g, or c
  SITE (304): n equals a,t,g, or c
  SITE (315): n equals a,t,g, or c
ggcggcgttgccgaatcttatcgccctgacgtctgaagccgcgggtccacgttttcgtgggacggcagtaagcctgatgtattgcggtgttcccattggcgcggcgctggcggcracactgggtttcgcgggggcaaacttagcatggcaaacggtgttttgggtaggtggtgtggtgccgttgattctggtgccgctattaatgcgctggctgccggagtcggcggttttcgctggcgaaaaacagtctgcgncaccactgcgtgccttatttgcgccagaaacggcaaccgcgacgttgctncttgttggttngttaattcttcaatctgcttggtggtctacaatgttgatcaaattggtaaccgtaa

SEQ ID NO: 572 - DNA, 410 bp, Homo sapiens
  SITE (333): n equals a,t,g, or c
  SITE (347): n equals a,t,g, or c
  SITE (378): n equals a,t,g, or c
aattcggcacgagcttggcctgtggctcaagaattttgtccagaaatctcttaggccctcaggcccttgcgaaatggtaaacatttgctaatacgaaaaaccaccaggcttagcaggagatagaatcttggagactaagggttgttcagagccccagagccaggtagaagcccagggaaacctgcagccatgatgaaacagtagttktggtcargcacggtggctcacacctgtaatcccagcactttgggaggctgaggcgggcagatcacgaggtcaagagatcgagaccatcctgaccaacatggtgaaaccccgtctctactaaaaatnccaaaatttactgnacgtggtggcatgtgctgtagtcccagtacnttggagctgaagcagaagaatccttgaacccg

SEQ ID NO: 573 - DNA, 133 bp, Homo sapiens
  SITE (116): n equals a,t,g, or c
aattcggcacagttgctgataaactttgcactctatattatttgaggtaggccaaagggctcaacaaaaaattacagagtaatttttcttttttgttttttctttttttttttgtnagacaggttctggctgt

SEQ ID NO: 574 - DNA, 362 bp, Homo sapiens
  SITE (293): n equals a,t,g, or c
  SITE (345): n equals a,t,g, or c
  SITE (355): n equals a,t,g, or c
ggcacgagggaattttgccatgttgcccagactggtcttgagctgctgggctcaagcgaatcttcccatcacagcttcccaatgtgctgggattacaggtgtgagccactgtacctggccagctttacttcttttaccagcactcctggattttataaatagtgaggcttatcaaccccatttctacccaaatcttctggtagacttgagtatagtagggcttcataggtagcagccctgtccctgtcctattatgaatggtagctgttgtgaatgtggcgatctctggactntgcagcctttggtttgggacttgactggccatttcaccgaaggggcccaggnaaatgggcancttcaca

SEQ ID NO: 575 - DNA, 173 bp, Homo sapiens
cgcttctagaactagtggatcccccgggcctgcaggaattcggcacgaggttcagacaggccatggaggcagcactgagccagcaccacacgtccatcctgggacaracgggcctrgacttcacggcaaggaggtggacacaatcctgtttgcagagttccaggcctggaggg

SEQ ID NO: 576 - DNA, 299 bp, Homo sapiens
  SITE (91): n equals a,t,g, or c
  SITE (99): n equals a,t,g, or c
  SITE (211): n equals a,t,g, or c
ccgctctagaactagtggatcccccgggctgcaggaattcggcacagggacagtggaccacggcgtgattgtccgcctccttcctcccgtnaccatggnaggccctgttcactgaccccagcactgtttctaactgagattggacgctgcctcggaatccttcttaacacggcgtccctggcagccagtactgagaaatttgctttggctnacaataaaagaaggcctcaagttataagctacacatccctgggccttttttttcttttcttttctttttttttaaataatgagaaaag

SEQ ID NO: 577 - DNA, 227 bp, Homo sapiens
  SITE (115): n equals a,t,g, or c
  SITE (116): n equals a,t,g, or c
agccctggctgcactggggtggtgagagcagccaggacctgctaccctataggaaaaagtcaatttccccagggaatcgaggcaaagggaaaggatgccgagagcccaccagtgnngagaggatgccggtggcttgccaggccccggtctgctccctgccccccggggagcaccagcaccccagtttgctatccatcggcccagacacaccctgccccatgtccgtt

SEQ ID NO: 578 - DNA, 127 bp, Homo sapiens
  SITE (112): n equals a,t,g, or c
tcgaattagctcataaaggacaaagtggagtcacgcgtgcgcgtctagactatggtcccgggtgagattcgacagggtaagactggtttctttcgcatggttgtgcatgttngttctcgaaagggag

SEQ ID NO: 579 - DNA, 372 bp, Homo sapiens
  SITE (140): n equals a,t,g, or c
ctactacagccagtatgtattgtactcactaatgtgttcatgaagtggggagttgggtacctgcttcctgttgcggtgtttcatcttattgttaaagtcttccttgtattttcaggaacgctgtcatagtagccggcatntggcttgtccacggagttcagggtacttagcttcctattaggagaaaacgttttctgtctatctttctttctgtctatctttcaaagtagcctcattgttcttcagtgatgtcccaatttgtcccgggtgtggctggcgagggcgcgtggccccggaggtgctggtggtcctgtgggtccatgcctcctccctgtgtgtgagggaagagctgccccgctctgctttttattg

SEQ ID NO: 580 - DNA, 403 bp, Homo sapiens
  SITE (291): n equals a,t,g, or c
  SITE (361): n equals a,t,g, or c
ggcacgagcgggaggcccttttgggaagggggtggagatggagaagaggaagaaagaaagggcttccctgaggaagtaatattgcagctgtgacctgacagatgaggccgaaccagctagactcgtgtttcaggcctcgggaatagcataaggactccagctggctccttccgggttgagtccttatgctgaaattggtatttggcacacaccagtagtagaacgccactcaatgccttattctcttccccttctctcagctctgtcccctccacatagtaggacaatganactggtaactatttttggtccgaatagtccttccattattatctgttatagtccaccatgcaggttcttnctaactccttttgatcaaaatagatattttgaaaatgtgaag

SEQ ID NO: 581 - DNA, 180 bp, Homo sapiens
  SITE (175): n equals a,t,g, or c
agggtcttcataacaaccctacaagttacgtggtgttagtctcattttacatttaagaaatctgcagtgaagtratttggtcaagaatacacaacaatcagtgccagatatgggcacacacctttgactccaaagtcttctgctcctmtctgtttccattaaactttgaccatgnctagg

SEQ ID NO: 582 - DNA, 177 bp, Homo sapiens
ggcagagtgaaaaacagaatggttgtatgtataagtactcaaaaatatgatttctactgaatgcattgcttttgcaccatcgtaaagtcatcagtcgaaccaaggtaagtcagtgaccatttataattgctttaagttctttattgtttttcttttttttttctttttgagacggat

SEQ ID NO: 583 - DNA, 372 bp, Homo sapiens
ggcacgagcggcatcccaagcctcttggtgtcctcttctgaccccagcttccttttgtccccacagaggagaagtacacagtcatctacccgtacacagctcgggaccaggatgaaatgaacctggagagaggggctgtggtggaggtcatccagaaaaacctggaaggctggtggaagatcaggtaccagggcaaagaaggctgggcccccgytcctacctaaagaagaacagtggggagcccttgcccccgaagccaggccctggttcaccctcccacccgggtgccttgattggatggtgttttccggcagcagaacgcggtggggcagggagaaggagttgttcagcaccagagggacggggcgtttt

SEQ ID NO: 584 - DNA, 310 bp, Homo sapiens
  SITE (15): n equals a,t,g, or c
  SITE (23): n equals a,t,g, or c
  SITE (55): n equals a,t,g, or c
ccctggcttcagagncaacgagncagggccaggtctgctaccaggagctggtggnacctgatcagcagcaagcgctccagcagtttcaagcgggccattgctaacggacagcgggcactgccccggggacgcacgctgggatgagccaggcctaggtgtctacaagcggtttgtgcgttacgtggcctacgagatcctgccttgtgaggtggaccgccgctggtacttctaccgtcaccgcagctgcccaccccccgtgttcatggcctggtcactcttgcccagatcatcgtgttctgtgttacggggc

SEQ ID NO: 585 - DNA, 299 bp, Homo sapiens
  SITE (2): n equals a,t,g, or c
  SITE (45): n equals a,t,g, or c
gnctcccactgcaaaaaggcctgggtaagtcgcggccccgcgggnctcggtttgcccatccgcaaaatggcgcctcgtggtaccgggtttcccgggaggagctcggcgagttctcagcgctctcgagggatccttccatttggcgttcgcaagattgtgagaaagtgactgctgttattctctttaagataaggaacctaattcgagctacccttctctgtgaagctcgacggctgagaacgtcagggytcgttcccaagtytytttccagaggccaggstttatgggagcatgggtta

SEQ ID NO: 586 - DNA, 419 bp, Homo sapiens
  SITE (289): n equals a,t,g, or c
  SITE (303): n equals a,t,g, or c
  SITE (355): n equals a,t,g, or c
  SITE (403): n equals a,t,g, or c
caaagtttgcctcagccacataaagaaggggcctaaaaccgtagcagaccattctgtggcccagcaccttctggcttgaaactcgctgggagattgtggttcagttacttgtgattttcgtcttactctaggcctttagaaaatgctcctctaattagtgtctgtgcagtgtttccaggtaatagacagtgrtagagcgctrtgatagagcactttctctttattcatcacaagggccatagattatagcagatctaatagagaaccaaacatgatatgttatccatgnactgtcaccgtganaaatgaatatacagtccttggggtttagggactccgtgtgaagtgtcaatgnaatgagccatcaaaaacttgcgaaggggtaaaagggaatattaggccngcctagcccggtcaag

SEQ ID NO: 587 - DNA, 360 bp, Homo sapiens
  SITE (356): n equals a,t,g, or c
ggcacgaggccgggagcaggagcgaaggcgttccatccaggctttgcttggctcctggggtcagcgggggctgaaggaacagaagcgtggttgagtgctcaggaaccgctcccatgcggcgggcgccaccacccgctgggatctggaattgcccctgcgtcacccctgctgtggccgggaggctctgtggtcaggcaggtggcactgactcccacccccgytgcctgmattggctragggagggccgagtgtttgaggctgaggtccttggggctggccccctgcaaggtgtggcccaggctgtctctcccttcgtgcaagtgaacgctgagaagaagctgacaggcagtaacgtnggca

SEQ ID NO: 588 - DNA, 443 bp, Homo sapiens
  SITE (399): n equals a,t,g, or c
  SITE (414): n equals a,t,g, or c
ggcacgagctactagtgcccaggggtctgctgcccggcccacatgtcccttttgtaaaccctgacccagtgtatgcccatgtctatcatacctcacctctgatgtctgtgacatgtctgggaaggccttctccagcttcctggagcccaccctttaagccttgggcactccctgtgtttcatccatggggaagttccaagaagcccagcatggccatcagtgaggacttcagggtagactttgtcctgtagcccccacttctgccctaagttccccagcatcctgactacctgtctgcagagtttgcctttgttttttcctgcagggaagaaggcccacctttgtgtcactcamcttccccaggstcagagtccccaaggccctgggggtttccaattnaattgttgcgttttncttccacaaaaggaccagcagggtttttc

SEQ ID NO: 589 - DNA, 405 bp, Homo sapiens
ggcacgagctcctccttgggcagggagaccatcggggtgcaacctggctggggcggggaggaggtgcagggcctggccagagcgggcctggccacgggcaagggacagcgacctcctgggccaggacagtgcaggcagagcccccrgagmcrtggccagcccttccggcagctcygaagccactggcaagccccgaggcagggatggcgggcccaggagggaggaggasgacgtcyctcccgaagaraagaggctgcggctcttgctggaggggggaagcgcacagcccgaggactgcgaggacggggaggacgcgccgmggccgggcagggaggagaccggcacccagacaagtkgcgacggcagargagcagaattctccacgakttttagcagctccgtttt

SEQ ID NO: 590 - DNA, 245 bp, Homo sapiens
  SITE (207): n equals a,t,g, or c
  SITE (227): n equals a,t,g, or c
gtaaacatgcggtgggcctgaggttccgcctttctaacaagctcccaggtgatgtccacactgctggtccacagatcacattttaagtagccagccagcccttagaaatcatttagttcagtgrttctcaatcttggatgaccattacaatcatctggggagttttttgttttttttttttaaaggttcacaagcagattgcactcnccaataattagcattatttnccaattccctaagtgtcc

SEQ ID NO: 591 - DNA, 155 bp, Homo sapiens
aattgttttactgattatgtttagaaaaatccccaacgtgttcaatttcatattaaaatgcctagtawwtatggtttataattatcatttttagtgcaatcktgcgcaacaggaatttcattttttataaagttatttgtcacagtgggaggatt

SEQ ID NO: 592 - DNA, 322 bp, Homo sapiens
ggcacgagggctgagtgcctactatgcgccagcgcacggccacagaggcctggtctcatttcctcttccccaagccctagcaagcaagctcaaatgttgcttcacggatgctaaggctgggagatttggagtgacgtattccaggtcacccaacagcttgtaagtagcaaagctagagtttgaatttragtccaccgggctccaaagcccacattcttaacccaccattcagtctcccatgaaggaaagtcttccctgagtctagctcaaatctctctgtgagccaargcccccagacaccaaacttccctgcctgctgcca

SEQ ID NO: 593 - DNA, 369 bp, Homo sapiens
ggcacgaggcagattttggtatctgtaggggttcctggaactaatttcccaaggatactgagtgacaacagcatacatctcaggaaaaatgtccacttgttctaagtttccaaagttccaatgttttgctatcttctgtccttcccacccaacctgacccagctgcttcttgggacagtggtttcatatggcgtccttcagcgctagtgattccacaaagattcctgaaccctgtggcctggttcctggtcaaaatatttcagtcttccctttgttgtacatttactttaagtgtaatttggtcaaaccaagtactgaccacttgtctagtawtatgtatacatgaaaaagaatgaaaaggaatgacag

SEQ ID NO: 594 - DNA, 342 bp, Homo sapiens
  SITE (306): n equals a,t,g, or c
  SITE (318): n equals a,t,g, or c
  SITE (336): n equals a,t,g, or c
ggccaagattgtgcccaaggacttcccagcctcatctcctccatcacagtcagcctgcagcccctcattcagccccacctttagcttagagtgtttacagtgctctccagtaaaaaacaaatatatctgcccggacttgcagtgcctttcagcctagagctacccaccgtcatctctgggtggctaagtacagaagagccgaggaggcactccaggtcaaagttagmttccttagcagcaccacgtctcattcctgtctccatagcctgcagatagagaaggtascatttaaaaaagaacgcatgnccttttccaggnttgaagcaagctggcatnaaagca

SEQ ID NO: 595 - DNA, 347 bp, Homo sapiens
  SITE (330): n equals a,t,g, or c
  SITE (345): n equals a,t,g, or c
ggcacgaggaaatcagcatataagaagggcacaagcaaaaggagagcccaccaagaaaatgatacggaacaagcagargggtagaaaagacagcagggacagcatgggattcagaaggccagaaggataaagctgcagaaggaaggagtagtcagctgagttagggcctgtgatgtcactgagagacacagtgacgcagggcctggctttagcactaaggagactattggtggcaccagggcctggagcagtggattaaaactagactttagtcttcttctcagttactaaatagacacatggtatcatgtaaatctttttttttttttngccccgttytttccncc

SEQ ID NO: 596 - DNA, 352 bp, Homo sapiens
  SITE (317): n equals a,t,g, or c
  SITE (344): n equals a,t,g, or c
ggcacgagaaaataaatttggctcttctgattttaaaattgactggggctccctatgacctaaaggaccaagatcaaactccctctcttgacattcaaagctcttcacagccttcccccaaactctttccacgtctcctccctaccttttgttatagttatagccacttggatgacttcctgttcttcaagcaggccagtcaccctttttgtccagacttctccctctgcctgcaatgttcttttccccttcttccttgggcaaattccccctatcttccaagaacccaatgcagaggacaggtttaactagaaagncccctttcaggggtaatccccagtggnctaagaat

SEQ ID NO: 597 - DNA, 392 bp, Homo sapiens
  SITE (391): n equals a,t,g, or c
ggcacgagctttcctcttatgatttcacactgccataagccagcaagggcatgtcaggtccttcagtttaaagagcactttgtattgtaagtttctgggcttgtggaaatgaatattccaatgatcacttactgtgtgtctggcgacatgtccctgagagggccttattgttgcacaagtcctgggtccctgggcaggaggcagggtctgttagacacatggtgttcctgtccctgaggcagcctctttgggcacaagaggagggtcttagtccattcatactgctataacaaaccactctgaatgggtgactgaaacatcagacatttcgcacagttctggaggctgcaaagtccaacctccagataccggcagatcgggtctgctgagna

SEQ ID NO: 598 - DNA, 613 bp, Homo sapiens
  SITE (13): n equals a,t,g, or c
  SITE (20): n equals a,t,g, or c
  SITE (73): n equals a,t,g, or c
  SITE (198): n equals a,t,g, or c
  SITE (587): n equals a,t,g, or c
  SITE (589): n equals a,t,g, or c
  SITE (605): n equals a,t,g, or c
ccaattaggttcntaaacanaaggtcaactctcggcgtggggccggttaacaacaggcagcggctgacaaggntttcagctctccggtggtggggccgggatcaccagcaccagacctcgcaagggccccttccctcctccagaccctccttggccggtgacggctgtgacagtgatggcaggttcagtgccttcagncagagcgtggatgctctggaatcacccggacccctggccttggagggaccctccagccccaggaatctgctttggagggaaatgtctatttttctaccgggaatattttagagattggggcatgctggctcctcccgccagctgcaaaactgcaccttccgcctgattcccgatccccctgcgtgggccgcattcctggtcccctgcctgcgtccatcgaggggcctggctgtggcctgttttcctttgaccccacacagcgtcattgcgggtcatggggagcccctggtgggagcttgtggagtcggatcacgtacctgtgcagaaaccgcctctgtggctgcatttgaaataaaacccgacccagcagcaaaaaaaaaaaaaaaaancncgagggggggcccggnacccaatt

SEQ ID NO: 599 - DNA, 390 bp, Homo sapiens
  SITE (198): n equals a,t,g, or c
  SITE (310): n equals a,t,g, or c
ggcacgagagatagctgtcaggggctagaaaagcagagtaaggctgtgaggtagtgatcaatagcaagaaaggtggctcagagaaattaagaaactagggaattaggcccggcgtggtggctcacgcctataatcccagcactgtgggaggccaaggtgagtggatcacttgaggccaggagtttgagaccagcctancaaacatggtgaaaccctgtctctatcaaaaatataaaaattagccaggcatggtggcgcatgcctttagtcccagctactcgggaggctgaggcaggggaatcacttgaanctgggaggcagaggttgaagttagccaagatcatgtcactgcactccagcctgggtgacagagtgaggccccgtctcaaa

SEQ ID NO: 600 - DNA, 411 bp, Homo sapiens
  SITE (395): n equals a,t,g, or c
atctggaaatccaggttaccaacttggcaagcctgtccgagctctaaatatcaacaggatgaataatgtcacgactttacatctttggcaatcggctggaaggggtctgtgtacatcagcaactttcaaacccattttatttggagaaaatgtactctctggatgcctgttagaagtcgggattaatgaaaattgtactcagctcagggagaatgctgttgaaagacttgattcattaatacaagcgactcacgttgcaatgagaggcaactccgattacgctgatcttagtgatggctggctcgaaataatacgtgtagatgcccctgatccaggtgcagaccgctggctagcatgtgaaggcmtgtgcctggatattcckgytcacctgagcntcggatccccattcgg

SEQ ID NO: 601 - DNA, 338 bp, Homo sapiens
  SITE (311): n equals a,t,g, or c
  SITE (315): n equals a,t,g, or c
  SITE (335): n equals a,t,g, or c
ggcacgagccaggacctgggacccccaggcgtggaggacagtcaagccgtggaggccgtggaggcaggggccgcggccgaggtggtgggctcccctttgtgatcaagtttgtttcaagggccaaaaaagtaaagatgggacaattgtccttgggactcgaatcaggtcaaggtcaaggtcaacatgaggaaagttggcaggatgtcccccaaagaagagttggatctggacagggagggagcccttgctggaaaaagcaggaacagaagctggatgacgaggaagaagagaagaaaaaaaaaaaaaaaaanctcnagggggggcccgtaacccanttc

SEQ ID NO: 602 - DNA, 410 bp, Homo sapiens
ggcacgagaagaaataagacctactgttcaataaatcagcagggtgactgtagtttacagtaatctattgtacatttcaaaatagctaaagataagaatttaaatgtttctagcttaacgaaaaggcaaatatgtagggtgatgaatatcttgatcacaatgatgtgatctttacaaattgtgagtgtatttagtaatcacatgtacccccaacatatgtgcatcaattatgtatcaaaaaaattaaaactaaaaaatagacaaggaggtcgggaggaaaactgtgtaacagtcaagctgagggaaacgtgaaggctgtcttagtcaacagatttgcctttttccctttaatctgctaattatcaattgatatggtttggctctgtgctccacccagatctcaccttgaa

SEQ ID NO: 603 - DNA, 442 bp, Homo sapiens
  SITE (389): n equals a,t,g, or c
  SITE (420): n equals a,t,g, or c
  SITE (430): n equals a,t,g, or c
  SITE (437): n equals a,t,g, or c
aatttatataatagtgttaaacasgaaaattttatgttgtgagtattatgtatcatctaattaagagatagaatttgaatacaggctctgtaatttattagcttggtgatcttagtagactgacttaactatcgctcagtatcttcacttgtaaatttgagataataaaacccacctcataggttttgttgtgtgggttaaatgaattatgtttttaaagtacataaaaaggttactgctcatgatggctcagtatacgagagagagatagataaataacatataaaacattctaatacattgttaatttgaaataagtcatgatattaaaactaatagtttaaattctgggtattttacagtgggattttaattaaaaaactgggggncccgttattaaaaacccggcggccaggcacngtggacctcntgggctnttaat

SEQ ID NO: 604 - DNA, 345 bp, Homo sapiens
  SITE (293): n equals a,t,g, or c
  SITE (310): n equals a,t,g, or c
  SITE (311): n equals a,t,g, or c
caaacctgctccaaaaccatggctttaatgctcaggcccaaatccctaatcacccttgactttcacaccccacgtctatcagcaaaacataatggagttaccatcagaatatatccagcatctggctactgccatctggaccccccaccatctctcacctggattatccctgccttttcctttgtcccatagcttattctcaacacagcagccagagggatcttagtaaaacccgagacaaatcatgtacccctctggtcgggaaccaggcagtgtcttccccatcccatggnaaagttaaaagttaacnnctttagaatgggctcagaaagcccctggcatttt

SEQ ID NO: 605 - DNA, 262 bp, Homo sapiens
  SITE (49): n equals a,t,g, or c
  SITE (156): n equals a,t,g, or c
ggagcacgcgggcagagtcacccgtcgtgcatcagaggcgttcaccaanagcaggtcagtcgtcacaragccactgctgagaaacagccagaggtagtcgcgggtccmgaaagggcaccaagccaactcagaaaaggagcgtttggtgacatgatnaacgcgaatcgcgtcggcctaaagatgcagaggcaggagagcagccagtgagatgagcttgtgtggcttcgttaccctcgtgaaattagtgcaaaccacggtgggc

SEQ ID NO: 606 - DNA, 431 bp, Homo sapiens
catttcacagctttcatttattgaattttgaagacattgattttttcttcatagcagaaattatggatcagataattggccaaataagaaaaattcagacagcattgtttttctaaacatactgaaaataacgcatgtacctggtgaaaagtgaagacgtcatgacagagggtccagccctgctgtccaggccacccccaggatgggagccctgaatcctcakgggatgtgcgctgagatacaaggaggtccctgcacacacctgcctttccccgctgctggacyctkgcaaaycatttcctgtgagtgtcagccagcccactgcatgttccgaaagctctgcagagtgcgccaatattccagagtttcaaagtagtgccctttgaaaagatttaaacctgcaaataaaattaaatttgcatttggggatt

SEQ ID NO: 607 - DNA, 572 bp, Homo sapiens
  SITE (489): n equals a,t,g, or c
  SITE (536): n equals a,t,g, or c
gcgcaacagcctggctgagtagaggtggatgccgaggcgtgtgccctgcagcgtgggcaggggctgaggctctcccacacccgggactccctggaccaccccagccaggccacttccttcttctggcctccaattcccgttctgtaaaaaggacaatgaaaccagcaacacggggttgttgcagagatcccatcagacccgggccacaggctgcttcatcagcttaagcctgttcctccagagctgggcggcacagtgcagagccacagcctgctcagtgcaccccccttcttggggctggaggcaaatgcagcgtgcacatccctgacccccacagtgaatctccactgagsttcacacacacacatcgcacgstgaggccgggcttytwtcccagttagtyttaacactccttcttgacttagcagggctcaaagtggttggttggttggttggttggttggttggttggttggttggttggttttngttgctttgagaaagtcttactctgacacccaagctggagtgcagtngtgcaatcacggtcactgcagcctcaacctcctaag

SEQ ID NO: 608 - DNA, 495 bp, Homo sapiens
  SITE (421): n equals a,t,g, or c
  SITE (426): n equals a,t,g, or c
  SITE (432): n equals a,t,g, or c
  SITE (494): n equals a,t,g, or c
cagtgagccgtgatcacaccactgcgctccagccttggtgacagagcaagaccctgggtcaaaaacaacaaaacacgagaaagcacacaaggcagctcttggaagtagatgcctcacactgacaggggccacagctgggcagagggtcccagagaaggagcgtctctctcatgggctcagcactttctgcagctgccctaagacctcatggtcttcgggttctttataggaaagacgcctcttttcagcatctggtcccagagaagtgtcccctcagtccctgggaagtgtccctgggcagtgggcgggccgttagcctgaagctgcctccgggggccctccaggggatgactttgtctctagaactgtggtcctggttctagagtggcggagagctccagtgtgacttcttccaggcctnctgtngggctnagccctgcttggataagagaaagttttgttttctaagctcaaatggtggggcttagcctctnt

SEQ ID NO: 609 - DNA, 328 bp, Homo sapiens
  SITE (150): n equals a,t,g, or c
  SITE (261): n equals a,t,g, or c
  SITE (326): n equals a,t,g, or c
ctttagttgcctttaatgtaaaataatctccctaacttgtgacttgtatcgcactgaaatttttaaagaatccaggccagttgtcttgcagaatgtgttttttgatttgtgtgmttgtttcctgcatgattagctttatgttaaatgttnagggggtgggggcaataaaactacataattgcatgttttgtgtttctcactgcactgtattgggaggcatgtgttatccacttaattattaagtggatattaaattttganttcttggtgtcttaacagatctctcctttataaaggggtaccttttcccttttggaaattaggtnga

SEQ ID NO: 610 - DNA, 208 bp, Homo sapiens
  SITE (31): n equals a,t,g, or c
ttacaggtgttagccactgtgccaggccagntgtctgactttttagcccttggtccattgctttattcttcacaccataccacttccttagaagtgcacctggggaatgcctgggrattgaattttatctttccccatgatggcagatatgctatgggaacctttcagggatgtcggtggaaactggaaaagggaagtttgaatctca

SEQ ID NO: 611 - DNA, 240 bp, Homo sapiens
  SITE (5): n equals a,t,g, or c
  SITE (119): n equals a,t,g, or c
ggcanagggagaagcaggcggatatctccatttcaatgggctgacagcacgcaagatgcccgtggtcccacccctcaragaaccgtaaggtggctgaacgagtagataacggagggcanaaacgtgtcaggcagcacaggcacggtggctcacgcctgtaaatcccagcactttgggaggccgaggcaggtggatcacaaggtcaggagttcaataccagcctggccaagatggtgaaag

SEQ ID NO: 612 - DNA, 355 bp, Homo sapiens
  SITE (285): n equals a,t,g, or c
  SITE (325): n equals a,t,g, or c
  SITE (335): n equals a,t,g, or c
ggtagagcttgtatccagcaacctagctaaattcacttatttctaatagcttgcttgtagatttttttggatattttacacataatgataatctaaataatttccattctgtttctcttttccaatcataatacattttatttttcttacattgtagcactagtacaggccagtacattgttgaatagaaatgataagtatatttctctatttaatattatgttagctttctttccaggctgggcatggtggctcacacctgtaatcccagcactttggggaggnccaagacaagaggattgcttgagcccaggaaggagttggngaccagcctnggcaacaccaccaccaaatt

SEQ ID NO: 613 - DNA, 298 bp, Homo sapiens
  SITE (201): n equals a,t,g, or c
agacttgagtgttgtgacaggtcaatggtacccttccatagtttctagtaccaatgctggggttaaaccattcttgaatttcaataggaagatgttaattgaggttttagacagctgtgttcatgctgccatcctaaccaggaaatgctctttgaattgtgctatatatagtattgatagcagtgtgatgattatagcagnagtgtggatgactatagcagcaatgtggataacagacaagagggatgtccaggtcttaagacagagggccttatttttgggggtattaaaaaatgtt

SEQ ID NO: 614 - DNA, 321 bp, Homo sapiens
  SITE (123): n equals a,t,g, or c
  SITE (274): n equals a,t,g, or c
ggcacgattaatgtgtaaacaggattgggggagtatggtagggcagggcaccaggcagatttggtgaatgaagcttgtggtaatttgaatatatgcaagtggccagtaagagaacgtgagtgnttagcactgaggcgtgtctggatgctttaagttattctgtagattataagggaactccactcaattgctgataaccgatgttttaattattgtgaagggtatctaaagmctgcatgacgtttacctatcaattgctttgatttctctgccngtaagatagcaatatacccagaagtgctgccttagatggcctacttg

SEQ ID NO: 615 - DNA, 354 bp, Homo sapiens
  SITE (278): n equals a,t,g, or c
  SITE (317): n equals a,t,g, or c
  SITE (343): n equals a,t,g, or c
agtcggcagaggaagaaaccaaatctctcactaggcaaaaaagatttttawgaaagaaactggtagtttttccccttgtttcctcttgataccaaagttatttctgttctttcacaaaagtgcccagtagagagattttgtgtgctgctcagattacccttgtaccttgttaacacataaaaatattagttcaaatcttggatcttcattataacatgagaggcgaatataatttatcttggataagtctcaagaattggaagcagttaagggatctnaactcacagcatgagcttggcagagttccccataccctntttctgtacattggctacctgtggangtacatatgat

SEQ ID NO: 616 - DNA, 242 bp, Homo sapiens
  SITE (26): n equals a,t,g, or c
  SITE (44): n equals a,t,g, or c
ctgagccaaggaagagtctgcctganagagacgcttggcctgtnctttgctgccatccgtgcggccttggccacatgcctattaacagaggcagytccacttcagacagggacaaggsttcctgctgtgcctttctggcagggttttgtggggtcacatgggaagcaatgtgttacgcaagcagtctccatgtgtgtgtaaaattgctgtcctggtgacttgtccctcttcttagtggaaat

SEQ ID NO: 617 - DNA, 246 bp, Homo sapiens
taggcacagggcagctggtatatggtggctttttttattttgctcctttgaatgccagcgcaccctgacccctgaacgggcagcactcccttattttccccgcagatatggtgcccatgccagcttccgctataacccccgagaacgccagctctatgcctgggaatgatggctaccagattgtttataagctggagatgaggaagaaagaggaggaggtttgaggagctagccttgttttttgca

SEQ ID NO: 618 - DNA, 609 bp, Homo sapiens
  SITE (560): n equals a,t,g, or c
  SITE (591): n equals a,t,g, or c
  SITE (605): n equals a,t,g, or c
  SITE (607): n equals a,t,g, or c
tcgaggggacacagctggcagtgtgcttggagggtatggggacacggcagccccccacaggcctgccctcttcccctcagggaggggcactgcggccagagcctgccccttcacagagcaaatctaggcacaaaagggggagagggtagggtgcggtggctcatgcctgtaatcccagcactttgggaggctgaggcaggcggataacttgaggtcaggagttcgagaccagcctggccaacatgttgatacccccgtgtctactaaaaataaaaaaattagctgggcgtgatggcaggcgcctgtaatcccagctactcggtgggctgaggcaagagaattgcttgaacccggaaggcggargttgcagtgagccgagatcataccactgcacttcatcatcctgggcagcacagcgagactcagtctcmaaaaaaaaaaagaggggrcaggaacgaccamttgcytgccagytctacytggcagacytcactgtwaatgcgtcgcccstgcccattargggaccgtgtccagcctagaggaagctccgggtgatgaanctggcgccaccagccagggccggaacctctnctttcaggaaattngnct

SEQ ID NO: 619 - DNA, 74 bp, Homo sapiens
ggcacgaggtggaaggatggtcccctgcccttggctgaatcgtgaaatacccagctctttcctggcgtgttagg

SEQ ID NO: 620 - DNA, 440 bp, Homo sapiens
  SITE (434): n equals a,t,g, or c
ccatatcttgttcatgtaggctctttcatgactgtttttttcttgtgtgttttattatttcaacaataggttcatctttagtaacagtgattttctctagtattcctacatagggtctttaaggcaaccttatgcagtcatctatattttctttgctgggcctttcatggatgctgggcatttttaagttaattcctcactccatggaggaatatctttgggaccccactcttacaagcttcatgtttctttttgtttcttgtccccaggccagtgagcagagatactctgagcctgttttcaagatatgtgtcttctgggctgctggttttatgcagggagctctgtgagagtttccttgaccagggcttgtggcatagtggtactctctcaaggscttgtcacagtggtctcaggacaggtgtacatggaanaaatgg

SEQ ID NO: 621 - DNA, 337 bp, Homo sapiens
aactcatcagtcatcattaatgttagtgtattttatgtgtggtgcaatacagttgttcagtgtggcccagggaagccaaaagcttggacacccctgctgtagatggtgactgtttttcacatgggtccaggccagcagttctgaaatgtatgtacacacgaggwttgaccacacaggtaaatctaatctgcatcggacagtgagagccagagggaggccaaggaaagcccttggtgttgggttggctccaaggtatctgtgtaaacccatggtttttaccatgtatatatgcaggtagatacaggaataaagtcagaagcctgcctatgcttgggct

SEQ ID NO: 622 - DNA, 606 bp, Homo sapiens
  SITE (5): n equals a,t,g, or c
  SITE (10): n equals a,t,g, or c
  SITE (46): n equals a,t,g, or c
taagnttgcncccccccaattcccccagcttgcgctataccaattncccctratcyttcccttttcccgkccccaaaccccarkgtcatggtttcaacarccccggaawtaacgtctcawtkttgtkagtcctggggaataaggttcggggtwatgattacarccttggaaatgcctgatttcccattatggctccctccttgcccagaggtaaaacgggtctggtccccagaacaggaggaggacatgtgatgactggagtaacgatgaggggctctggggaaggacagggctgagagcaagtgctgggacctttgggaccgagtcatattctaaaaagagcacaggctttgggggagaggagctgtgaggccaaggcagcattcccctggggagcttgtcaggagtaacaggagccactggcagtgtttgggcttttggtccctttttttctctcccaggggaagggagaaggaggcattgcaggaagccagccaccctgagcacagacccagctacagaacagacttgagctgcgtgtccttggcaaatccccaagtgtttctgtgccttggtttcctgatattaaaaaaaaaaaaaaaaaaa

SEQ ID NO: 623 - DNA, 477 bp, Homo sapiens
  SITE (335): n equals a,t,g, or c
  SITE (373): n equals a,t,g, or c
  SITE (418): n equals a,t,g, or c
  SITE (440): n equals a,t,g, or c
  SITE (458): n equals a,t,g, or c
cccctgattgattacatttggtttctttattctgaaaggaaaataacaaaaacttcagaaattcctaagggtgtaataagaaagtgggttttgagtttcctttcctggaattattttacagttctttggtgggtctcgtcagctattaattgataatgaacatttttcactatttttttttctatctgaagcttagagatctagagctttggatctttcgggtatatgtcaatggaggtattattttataatactttgcattgacatgaagtgggttcatgggggaaaaccatgagctgtgaacattggtagcaaacaagcatatattcatttcnaaaactttccttggcttttagcagagagaagccctgtnwawggttacaagkgtggactttycakkagtttaaaggggtgtttncaaaaaattgttgcctgttttntgatgccatttggggaantgtttacttcacaatgtag

SEQ ID NO: 624 - DNA, 663 bp, Homo sapiens
  SITE (29): n equals a,t,g, or c
  SITE (212): n equals a,t,g, or c
  SITE (569): n equals a,t,g, or c
  SITE (628): n equals a,t,g, or c
  SITE (636): n equals a,t,g, or c
ccaactccaaagtcatcttcttaaacacnagtgctaacttcttccatgaagcttcttgtgattacaccagcccaacatgcgatatggtcacagcatgggatggtggtcaggaccctttgatggttgaggagatgaagacccagaaaggcaaggggtttggcctagggagcctggcaagtgagtgacagagcctggtctaaagtccaggatanctctgttgttgctgttttccttttttcgttaattgcaaaagaatttacatgttcatagttaaaaacagagaagtgtatcaagtagaaaacagtagcaaactctcacccttattctgacactccagagttgcattcactctcaggcatccagatcctttccccatatacaaacatccatccatccatatatctatccatctctctatctaaacacacatgcattcattcgttcactcattgaatcgtgcattgagaacccattatgtgccaagccattgctagaattaaggatgcaatagttaaataaagcagatgtggttccttctcagggaggttctcatatatgcatgaagaaancagactgggtgcaatggaatgacagggtccctttttagagtggcagatcttcttaaccngggttttntgtcaagggtggacccccagaatatgg

SEQ ID NO: 625 - DNA, 360 bp, Homo sapiens
gggtaaagaaattaccaggaaagaaaaaatggaaatagtaatttgggaagatgggccaagactgggcatgaggtttctgggtacccagcatggctccagcaagagagggagcggggggtgctggagactgtggacagagcaatccggcctttgagtcagcaaagtcctgggtggggagggctagagagcctgatgtggctaaaaacaagcttctgccaacaggtgaaatgggcactaaaggagaaataaatttcagttattgaatatcaaaagggttccagttattgtccacacagatttgaggtccgaaatacaaaactcctacgtgatggtaacagtttctttttagaacctccttct

SEQ ID NO: 626 - DNA, 415 bp, Homo sapiens
  SITE (45): n equals a,t,g, or c
tttcactatttcagattgatcatcttcccttaaatcaggtctctntggggcttcagaagagcttattttaagagtgtgtgtgtgtgtgtgtgtgtgtgtgtgtgtgtgtgtgtgtgtttgagacagagtctcgctctgtcacccaggctggcgtgcagtggcatgatctcagctcactgcaacctctgccttccaggcacaagcagttctcctgcctcagcctcctgagtagctgggattacagcacccaccaacacacctggctaattttctatttttagtaaagacagggttttgccatgttggcgaggctagtctcgaactcctggacctcaagtggatttcgcctgccttggcctcccaaagtgctgggatttagaggtgcggagcccctgtgcccggtcgagttgttttt

SEQ ID NO: 627 - DNA, 320 bp, Homo sapiens
aaagatggggtttcaccatgttggccaggctggtctcgaactacggacgtcaagtggtccacccgcttcggcctcccaaagtgctaggattacaggtgcgagccactgtacccggcctgtttattcagttgtctggagttgacaggacagtcctgagtccagcaggctgtggctgtggcccctggggtgagtaggcasaatgaggtaggtggtaggaggggcagcctcactgtctcctgagaggccctggggtctccgctccagccccggccttgaggcttcggggtctacctgaaggtgtgttcctggggggacggttc

SEQ ID NO: 628 - DNA, 313 bp, Homo sapiens
gtctcgctctgtcgcccaggctggagtgcagtggcgtgatctcggctcactgcaacctctgccttccgggttcaagcaattctcccacctcagcctcctgagtagctgggattacaggcgcccaccaccacagccggctactttttgtatttttaggagagacggggtttcaccatgttggtcaggctggtcttgaactcctgacctcatgatccacctgccttagcctcccaaagtgctgggattacaggcgtgagcaccatgcccagccctatagtagttcttcttttgccccttgaatatcctcacccac

SEQ ID NO: 629 - DNA, 298 bp, Homo sapiens
agcaaagttttaaatgagtagaagtgtacaatccccattttgcagaagagaaaactgaggtgcacagaggttaagtaacttgccagacgtggcaggtctgataagagatgagattcacatcccttccacccacccccaaattaagcactattttagatttttttttttaaccttactcattcttgagcatatgatcatgaaaaaaggtacaatgtgacataagtagacagctgttgctactagcttctttcctaatctctctctttggaaagtgggggagctgaggrtttttaatttt

SEQ ID NO: 630 - DNA, 374 bp, Homo sapiens
  SITE (351): n equals a,t,g, or c
ggccaactgctatggactgaattgtgtcttcccctcattaatatgttgaaaccctatcctccctccaatgtgatggtatttgcagatggggcttttgggaagtaatgaagtttagatgaggcatgagggctggatggatatgatcagatgagtgcccaaagaagagacaccagagagctagcttcttctttctctttccacctttacacactgagaaaaggccaagtgagcacacaccaagaaggcagccatctgcaaacccaaggagagagtcctcactagacaccctgctggtaccttgatcttgggacttctagccttccagaactgtgagaaattaaattcctgttntttcaagctagtatttaatacct

SEQ ID NO: 631 - DNA, 566 bp, Homo sapiens
  SITE (476): n equals a,t,g, or c
  SITE (507): n equals a,t,g, or c
  SITE (530): n equals a,t,g, or c
  SITE (546): n equals a,t,g, or c
  SITE (560): n equals a,t,g, or c
agcgcatcttcgtggtgggatttgggctgtatggatccatccacgggcccaccgactaccaagtgaacatccagattattcacaccgatagcaacaccgtcttgggccagaacgacacgggcttcagctgcgacggctcagccagcaccttccgcgtcatgttcaaggagccggtggaggtgctgcccaacgwcaactacacggcctgtgccacgctcaagggcccagactcccactacggcaccaaaggcctgcgcaaggtgacacacgagtcgcccaccaagacctgcttcaccttttgctacgcggccgggaacaacaatggcacatccgtggaggayggccagatccccgaggtcatcttctacacctaggctgcccgacaaccgacacsgccctccctccgcggggattagccgaagccccaggccatcatctgctgctggggtcccccaacaaggcggtgcaaggcccantgtcccaaggcggtttgtcattcatgcaacntttttaagaataagaacgggttncctgtgttacaagaantttgttgttgatangggaac

SEQ ID NO: 632 - DNA, 206 bp, Homo sapiens
  SITE (177): n equals a,t,g, or c
  SITE (182): n equals a,t,g, or c
ggtgaaatagacaggagcctcactggctatgctagggaacctgctctttgcactgtaggcaatggggagacatccttggttttaggcaagggtcggaggtggtcagatttccattttagaatatcactctggcagcagtgtggarattgagttggagaaacccagaaagggttcccngaganctaaatagggaaccccttccggaa

SEQ ID NO: 633 - DNA, 555 bp, Homo sapiens
  SITE (7): n equals a,t,g, or c
tgttctnaggaacaaagctgtcatggccatcacacacaacgtacctgaggcagcgctcggatggacgtgacaccagcctggtcttgtgctgtctggacagtgtagctactggggctgcccctggggagctggaggcaagcccagaccactaatttcctctgaaagctgcctacacccatagccgtattggccaggaccagtcccaggggccagargcggattattgcctccaggagcctggtctgcagcggcgaggtgctcagggaacagggagcttgagagaagtgtttttcttccacaccatccagctctttagcagcaaggaggccattctgatcttaaaaagcaaatatccctttatagctttagatttatctagccctcttagcagaaaatggaaatcaaaactatctttaacaaatcatcttaacaaggtgaactgaaggcacctggttgcaaacagctggctgccctgaaccaaactggttccatatgccacaagtctatacaccccaggcaactgtgcttaggccttacatatgctacttgaaaaca

SEQ ID NO: 634 - DNA, 1274 bp, Homo sapiens
  SITE (1020): n equals a,t,g, or c
  SITE (1172): n equals a,t,g, or c
  SITE (1176): n equals a,t,g, or c
  SITE (1194): n equals a,t,g, or c
gaattcggcacgarctcgtgccgaatcggcacgaggaaccactcaatacatgcatattagtcagcttttcctgagataacactgcaaaacaaacaattccaaaaatccaacaccttccaacaagtggctatttttcttgaccatgggtttatgtctgtgggtcaataggggtggccctgtttcatcctaagagttgggtcatggtctcctcctgtttctcatgctggagccagtggttacccagtgcaagttcctctcatggcagaagcacaagaggccaagacaaattggcagggatctgtaaagcctctgcttgcatcatgtccactagaatgttccagtggccaacacaagtcatgtkgacaaattcaacatccataagacagagacatatactctgcctacctttgtgggcaktgttgaaaagtaacatggcaaaaggcataattctattaaagggaggggatgaagaattgggaaccatagatgtttatccaatggccagacctgcccccaatgtggcaggagcaggcagtgggcyctggacccactwtgrgccacagcctcactaattttcttctctgttcctcggcaggagctcagtgagtacaacgccacagccataaaaagccccaccaacacggtcaccgtgcagggcctcaaagccggcgccatctatgtcttccaggtgcgggcacgcaccgtggcaggctacgggcgctacagcggcaagatgtacttccagaccatgacagaaggtgagcagagtccagcgggcaagaagraggcacagactccacaaacagaacaaactcaagggtcaccattctcatgaagcacctttgtgcagattagaaaaggcactcccttctagatgtcagccctccctccctcctaatttcgaacctttgtgcacaaccatatataaaagccctgtttctgttcccgttgtgtcagccaggccacttcctttcccaggactctggggagctcagccctaacttccagagccactctgancaagtcatgcattccttggtccaattttttctcatctataaaatgaaagcatcacattcaatctgagaaagtaagcatattttatccatacacaactccagtgacttacaactggactgagaaggatctgaagctgcatccgagttcagcangaanaattctgggatagattantactgtctgctccaggcaagggaatgggaratcgtaacctgtgtgctacgtttcccactctggaactacatggtctctaa

SEQ ID NO: 635 - DNA, 756 bp, Homo sapiens
  SITE (618): n equals a,t,g, or c
  SITE (756): n equals a,t,g, or c
ccacagaaagtaaagcaaatccaggcttagaattagacctgtttgtggggagcagaaaggattgggatggggaggcatagtggagcaacacatctgagacaggaagtacggcccctgttctgttggcagtggacctcttcagtcagtagcmaaggtcacagccctgagccgatgatgctccatgctgctgcctggatggaaagcattcgaggggaccttttggccaccagcattatgctgacagtcccagctcagacagaaggccttcttgtggcctcttttctgaggtaggaaggaaggttccgggtcaggaagtacatggtttgttgtaggtctgatgtgaacagtttgttgtcactaaccagccctggctagcaagaattccagaagagggatttggcagggacccatgtggtattgcaacctgtcaatacatcttgacaagtttgtaaatcagtcttcctggcagccagcttcacatagtatctaacacagacaggatttgctcaccaaaaacagagatgagtttgtttttggaggcctctgctgttacttctggccatttacctcttgcataatgtaaggtagccttttctcatctttgcccctccaatgccncatctggttctcagacaatccccaaaccccacaaaaatgggctgtttagaagaggaaggataaacagttggcccttggtatctgcaggttccacattcatggagtcaacaaaccataaatcaaaacatttttggggan

SEQ ID NO: 636 - DNA, 385 bp, Homo sapiens
  SITE (5): n equals a,t,g, or c
gagtntctaccttctggctacacctacgtatacctgtatgaggtataggccctggaagcagcaaacacttacagaaatggtgaaatcttactaaaggtaatctaaagttatggtggaacatcccaaatgaacaacactgcactttaggaagtacatataaaaatgaagtctcccaatttagtattattcagggatggctgttgaagttcagaagcttctaaaaagattccaataattttacagrttcttttaaaagattctttgtaaaaggcaaataaaaagcttaagtgactaatcagcaaaaattaggctcttctaaccttttgtcattgttactgtcttgccctgaaaggaaaaggaaagctggataaagctatttatagca

SEQ ID NO: 637 - DNA, 573 bp, Homo sapiens
attttggatttttaaactccttaaagamctaagtcmatwaragaaacwtcaagaagtaatacagacattgtaatttcttgggatatatgtagtacatgaatacaaatattttaaaacatttttagccttttcaagtacttctaaaacttaaaaattatagaagtacagatacaaaaggatgaatacatgactccacttaattgaggtacctagagtagtcaaattcttagagacaaaatagaatggttgttgccaaaggctggagagaggagagaatggggagttactgtgtagtgggtacagagttttagtttggaaagatgaaaacgtactggtgatggatggtggtgattccacaacagtgtgaatgtagttcatgccactgaattgtacagctacaaatgtttaaaatggtaaattttatgttatgtatatttttaaaaaatcaacatatacgcccctccttatgcctgcagaatcatcccttatttttttccctcagctcagagatggcagctgacctcactcttttagagtgagaccccaawataatagtttatgtgatataaattt

SEQ ID NO: 638 - DNA, 421 bp, Homo sapiens
  SITE (354): n equals a,t,g, or c
  SITE (362): n equals a,t,g, or c
  SITE (397): n equals a,t,g, or c
ggcacgagtggccattgcttgtgcagagagtttccaaaagcatggtgcaggcatagttgaaggagagttacttccacttggggtaggtgaggttgaggggaagcactagagctgggctttgaagactaggcagcagtttgtgagggtccaaatagcagggaattccaggcaaaaacagcaccttggaaaaggcatggaggcatgatcctgcaggagctgtttgaggcacccatgacctgtggatgtggataaagctgagagtttcaccggaaaccaggcctgcaaggggtttggcatctgcctccagagacataaggacttaaggttggaatcgcaggtcctcctctttctaanctgtgaanagcctggataattggcccccaaagacatcctcagncctaatccatgcactagaacctgt

SEQ ID NO: 639 - DNA, 506 bp, Homo sapiens
  SITE (474): n equals a,t,g, or c
  SITE (497): n equals a,t,g, or c
  SITE (503): n equals a,t,g, or c
ggcacgagaaatcccattatatgaggagcacaaggacttggcactagagtatttccttgaagaacagtagaatgggtggggggttgaactgcaggagcacttccaacagctgtatctcctgggatcagtatascctctagcttctcactggaaacagtttggctgcacatttctagcagcttcttgtgtttgtgtcttctatcatgcctgcacctaggagcccgtgtagcaaatgaagcataaacctcctcaagtgttaatgggagggatggcactccctacatcttccctgggattgctctagtgattaatccaggtctatagtttcccttgaaagagatttgaggcctcagtgagcaaaaatggaagggtcaaaacccaccatgccttttcccagctttctccagatatgtataaccttgtaaatctctcccgggaagggagactggggagacagacctttcttatgctatnatgtgagggaactgttatttcanctggcnttc

SEQ ID NO: 640 - DNA, 112 bp, Homo sapiens
  SITE (102): n equals a,t,g, or c
ggcacgagcaaaaacataaaaacaaaactacaaacctctcataatagtttttatttctgtaggatctttggcgatgccccttgtttcattcttaatattgtnatttgtacct

SEQ ID NO: 641 - DNA, 572 bp, Homo sapiens
  SITE (96): n equals a,t,g, or c
  SITE (482): n equals a,t,g, or c
  SITE (550): n equals a,t,g, or c
gatctcacaacagaaggaataaacaagccaggattttacaagggcccagccggctcccaggtgaccctgagcagcctggggaaccagacacgagtnctgctggaggagcaggctcggcacctgctgaacgagcaggaacacaccaccatggcctactacctggatgagtaccgtggcggcaggtctctgtggaggccctcgtcatggccctgttcaagctgctcaacacccacgccaagttctcactcctctctgaggtgagaggcaccatttccccgcaagacctagaacgcttcgaccacctggtgctgaggcgtgagattgagtccatgaaggcgcggcagcccccaggccccggggctggggacacctastccatggtstcctacagtgacacgggttcatccacaggcagccacggcacctccaccaccgtcagcttcggccaggaacactctggacctggaggaaactggcgaagntgtccaaggcaatatcaacggcctcgcagatgtgtccgtggatgatgtcagatccaacttccaagggntgtcaagttcaagccaatggct

SEQ ID NO: 642 - DNA, 515 bp, Homo sapiens
ggcacgagtctgtctctacaaaaaacaaaaacaaaaaattagctagatgtggtagcacatgactgtagtcccagctacttgggaggctgaggcaggagaatggcgtgaggcaacagtgcagcctgggcaacagtgcaagactctgtctcaaaaaaaaaagatgaagatggatcccggcttggcctctggctagaacatggcaccttgaaggagcaaaacaacttggggtagaacagattgtttcacggtgagacagttagagccttataaggagttaatgatgggattggggttctgtcctctgttctcaactctgaacctagcacattgctgctgtgaggtctgctgctgtgaggtccaccactgtttattttccatgtaatttgcaacaactctagtctggagtggcaagacttctgatttctctcttctcttccccagaaagtcacactgcactccagcctgggcaacagcgtgagatcctgtcccccacaaaaaaaaaaaaaaaaaaaaaa

SEQ ID NO: 643 - DNA, 637 bp, Homo sapiens
  SITE (596): n equals a,t,g, or c
  SITE (614): n equals a,t,g, or c
  SITE (633): n equals a,t,g, or c
cttcccacatctggaggatgacgaccctcccctgaccacatctggagggcgtccagctgcgagccagcggggcacagctctcttctcctggcctggatccccacccccccaacccaggaagactgagaatcccatcatcgcgtgcacatctcatcccaggagggagagaggagctgccgagtagaaagcagactggctgcagggacagaagacaccaagggcaccctcccccacagctgcgcctggacctcctgcgagaagaggaagccttaggggtctttattgtaccctcaagaccccagagagaaacagaagtgctgaggggtcgcaggcaggtctcttaccctctytgggcctcgaatatttatccataggaggctgacggtaactgcctcgcaactcattcatgagggtcaatgggacgacatkgcaagaggggttggcacaytgcccagamtkttccaaagccagggytggggytgccaaaaaggccacctktgcttcaccatgctccatcctccctctcttccacctccccaagctgggctccattgtgccagctctctgattcctgggcaagttgcatgggctccagnaaggaagggccagtgacntgttgggccggagcattantccc

SEQ ID NO: 644 - DNA, 402 bp, Homo sapiens
  SITE (356): n equals a,t,g, or c
  SITE (377): n equals a,t,g, or c
ggcacgagaaactgccccgggacagcagacagacaaacagacacattgccctggacagcagagagacaaacagacacactgccccggacagcagacagacagacacgttgccccggacagcagacagaaaaactgccccggacagcagacagacagacaaactgccccagacagcagacagacaaactgccccggaaagcagacagcaaactgccccagacagcagacagacagacacacttccccagacagcagwtagacagacaccctgccccagacagcagacaagctgcctggacagctgctcacttgcctgccacagtgcatgccccacagggagaagctttcttttttanccagggggtccagccattttnacttccctgggccatgctcaggaag

SEQ ID NO: 645 - DNA, 543 bp, Homo sapiens
  SITE (437): n equals a,t,g, or c
atcatagaaactgtctagcacttccttgccagtctttagtgatcaggaaccatagttgacagttccaatcagtagcttaagaaaaaaccgtgtttgtctcttctggaatggttagaagtgagggagtttgccccgttctgtttgtagagtctcatagttggactttctagcatatatgtgtccatttccttatgctgtaaaagcaagtcctgcaaccaaactcccatcagcccaatccctgatccctgatcccttccacctgstctgckgatgacccccccagyttcayttctgactcttccccaggaagggaaggggggtcagaagagagggtgagtcctccagaactcttcctccaaggacagaaggctcctgcccccatagtggcctcgaactcctggcactaccaaaggacacttatccacgagagcgcagantccgaccaggttgtcactgagaagatgtttattttggtcagttgggtttttatgtattatacttagtcaaatgtaatgtggcttctggaatcattgtccagagctg

SEQ ID NO: 646 - DNA, 548 bp, Homo sapiens
  SITE (486): n equals a,t,g, or c
  SITE (531): n equals a,t,g, or c
  SITE (535): n equals a,t,g, or c
tcgagttttttttttttttttttttttatacgttttatttcttttcttctaattgaaatgtaatttaatatttaagaaatattttaaccaaaatttcaaaaatggaacagaaacgaagacttcttaagcaaacactattttatgaatctacgaacttctataacagcaatggagacactgcaataggtcacttcttcctgtccaaggaaaaagcggcgctttggaggggataggccctcctcgagtttttctcccccgagtaaagagctcttggcggtcaaaggtccaatacactggattcgaaacaaacaaaaaaaaaagggtgacaaagattttagttaacaggggtcggaggagcagaaagggycttttcgcacttmaaacatctwgggggagggatgggaaggcaggatgcgaagtaacctaaattcccaaccatttcgcgtggttgcacccgcccaggaaggcagtggatgcgcgggggangcggggtaggtccccctccactccttttgcccaaatttcgatttncctncacttcgctcggt

SEQ ID NO: 647 - DNA, 336 bp, Homo sapiens
  SITE (212): n equals a,t,g, or c
  SITE (317): n equals a,t,g, or c
  SITE (334): n equals a,t,g, or c
aaatggcaagaggctatcttccaaagccaagggaaacttccctggccatgtcctcaggagatgagaaaggaaagcaggcctctgctgccttttcaaccttgtgcagctcatctagggtaatcagcatgcggttctaccaccagaaagcaccctgtgccatcttgcacattaagaagctccatgaagggtcccaaaggctctgtcccctcctnctctcataaggcagggtggccacaagatcaccaacaagtacaaaattactcaatctggctaactgtgtacagggtattgacttttttttttttttttttttgggnggggttttcgttttttncc

SEQ ID NO: 648 - DNA, 366 bp, Homo sapiens
tttgagccccagttctcttatttacagtgatacttaggtcaagacgttaatttgatagtcttggtgtcatgcctggcataagtagctgctcaataaataatcactgttagtatggcactatgataactgcagaccacacaggcctcgagcagtgagcagcagcccaatatttactattgctctggtagtctatacagccatagagtccacgaattctaaagaggagctctggaaaktgtgaaagcctctggactccaatgaagctatttgctgggctccccaggcaacaagaaggcataataattgtcaatatcatcattctcacattatgaaggtgccacctcccagactctacaacctcgtata

SEQ ID NO: 649 - DNA, 370 bp, Homo sapiens
gcacagggtagtatgctctcaacatataaatgaataaaatagggcaccttggtgatgactacaaaatcacctgctatgatggcctgggtgcatggaggatgtaccaccagatgtytcaaactatctccattccttttgttttttttgtttttgtttttgtttttgtttttgcttttgttggagacacagtttcaatctgttgcccaagctggagtgcagtggtgtggatcctggctcattgcagcttcaacttcctgggmtcaagtgatcctctcacttcagcctactgagtagctgggactacaggcatgtaccatcatgcckggytaatttcaaaaatgttttgtaggagttggggggtctcactata

SEQ ID NO: 650 - DNA, 387 bp, Homo sapiens
  SITE (315): n equals a,t,g, or c
  SITE (339): n equals a,t,g, or c
  SITE (369): n equals a,t,g, or c
gccctccatctacacagagtttccagatgaaaccttgaggagcggagagctgctgaacatgatcgtggctgttattgactctgcacagctccaggagctggtctgccacgtgatgatgggtaacctggttatgtttcgaaaagactcagttctcaacatactcattcagagcctagactgggagacctttgagcagtattgtgcctggcagctctttctggcccacaatattcccctggagaccataatccccatcctgcagcacctcaaattacaaggagcacccagaggccctgttcctggcctactggcttncaacttccggaaggaggaaaaagncccaggcgaggggagatgggtggaaggtgngtagctgaaggccgggcc

SEQ ID NO: 651 - DNA, 504 bp, Homo sapiens
  SITE (33): n equals a,t,g, or c
acccccagaaaggtgaaaggaccccaggttgtntgaccagtcacctgatccagccccttyttgtcctggttctcccatcacagaggggccagggcagggcaggagtgggcctgagagccatggctggtttccacatgcgccatgattaagctcctgcactcggcatttcagtaaagccatcttgtggtacagacagtgctgacatcagaaccttccgtggatccagcctcctactccgggtacctgctgtgtgggagtcactcccctcccccagccctggatgctcctccagtcatcccagtagctcagggccagcccctgggatgtgtctaagaacatgagtggacaaatagatggactgcccagagcagggtttctgagacttcgctgcaggatatgtcatcgccctgcagaaaactacccccaccctaggaccccccgagttttggggtttgtaagaaattacatgtctcatttattttgaacaggtgaattttgcagtca

SEQ ID NO: 652 - DNA, 544 bp, Homo sapiens
  SITE (23): n equals a,t,g, or c
  SITE (466): n equals a,t,g, or c
  SITE (487): n equals a,t,g, or c
ggcacgagttctggagacgtgtnaagaattggaggccgcgctggctgtgtgttttggcggtgctactctggttagccatgtgtgccggagctctggggacttctggggggtgagccacgtggyagctccttagggctccttcttagcgagtctcccagcagatctgccagagcagcaggtcggcagcaggagcccaggtccagcgttgcaggggtggggaaaaccatttcctggctggagaaggctgctgctgggctgggtgggcaatcctgacacattagcgatcagccaactgttttattaccaggtctcccatggagaaaacacttcgtaaatcgaggagctgttacaaaaktcgratkggcagcatcattagtgcccrgytttytkggaaatgtggatttcctgacagttttctcaccttctcatcttatagatttcctgttcagcctggatcatagccatngacagcctccccgtttccctngtcctctgtgtggcatgcacctgtgcatgtgtgtataaagacagaattatttagaca

SEQ ID NO: 653 - DNA, 268 bp, Homo sapiens
  SITE (245): n equals a,t,g, or c
  SITE (247): n equals a,t,g, or c
accacggccaccaccctgctggctgacatggccaccaccatcatggagactaccaccaccatggccactaccaccacgcgccggggccgctcccccacactgaggggcagcaccacccagaacacagatgacctgctggtggcctctgctgagtgtccaagcgatgatgaggacctggaggagtgtgagcccagtactggaggagagttaatattgcccattatcacggaggacttcttagagcncncttccgtggccaaccgattcc

SEQ ID NO: 654 - DNA, 506 bp, Homo sapiens
  SITE (436): n equals a,t,g, or c
ggcacgagccatggtgcgcaatctggctgccttctcggaggcagtgacgggggccgactcgtcctcactggtggaggtgaggggccagtgcgtgcggcactcagaggagcgggacacacccaagatgtactgcagcgcggagggcgagtggctcgtgcccatcggcaaatgcgtgtgcagtgccggctacgaggagcggcgggatgcctgtgtggcctgtgagctgggcttctacaagtcagcccctggggaccagctgtgtgcccgctgccctcccccamagccaactccgcaagytccagccgccccaaagccttgccaattgtgaccttcagctaactaaccgttgcaagccccttggaacccgccgttcctcaagcctgcaacccgggccaacccttcggcaaccagttgaaacctgatctcccagttgtgnaattgggacatcaagtgaactcttgaagttgggccccttccccttggaacccaaggttggccgcaagtta

SEQ ID NO: 655 - DNA, 403 bp, Homo sapiens
  SITE (323): n equals a,t,g, or c
gtcgaccaaagggccagcctgatgggaataagcaggaggaagagtgaaaggagtagaagggatgggaggaaggcttggtggcagggcagacagcactcgggattgagtgaagagtaatggaagttccctgagagaaggtgagtgctccaatctgataacaaccmcagtacagcatcgtgtatgttcaagatattgtgctaggcccttgggggamtgcaaaggggtgagacatggagcctgctctacagctgagtcgggcaacagaactggcatacttaagaggtgagcaagaagcctgtaatcccagcacgttgggaggccgntacaggaggatctcccaaggccaggagttggagaccagcctgggcaacaaagagacctggttttccacaaaaattacaaa

SEQ ID NO: 656 - DNA, 270 bp, Homo sapiens
  SITE (164): n equals a,t,g, or c
  SITE (211): n equals a,t,g, or c
ctggcttgacatggtgaaatcccatctatactaaaaatacaaaaattagccgggmacagtgggtcactctggtaatcccagcactttgggaggctgaggcaagtggatcacctgaggtcaggagtccgagaccagcctgcctggccaacgtggtgaaacctgtntctactaaaaatacaaaaattagccgggcacgtaggcatgcgccttntagtcccagctactcaggaggctgtggtgggaggactgcttgaacctgggaggcggagg

SEQ ID NO: 657 - DNA, 258 bp, Homo sapiens
  SITE (127): n equals a,t,g, or c
agaatgaattggaaagccagcaagaatgtggctcttaactcctctgtaaaatatttccaggaacgaccctggagaccagcaggttcaggaatgggaaagctgggaaaaaattctttcctaaaacttnaagttttagagaaaaataggcagccagtcccaaccacccaaaggsgtccaaagccatgtttgttctgggaaggccaaggcatgggaggatgttaamttgggctatcagcaggattgaagggcagggtgacc

SEQ ID NO: 658 - DNA, 912 bp, Homo sapiens
  SITE (480): n equals a,t,g, or c
  SITE (494): n equals a,t,g, or c
ctcgagttttttttttttttttttgatcaaaatgggcatgaaatttctcatgggaatgtaaaaagaagaacaatgtatagatttctatatgagctaaatactgtataaaacttcctctattaattcttgcacacttcctatgagaaaaagctctttggagatgagaaatctgaggctcaggaattaactctcttgtccaaggtcaaatagagtggtgaaaactagaagcaaacctgtctgattcatcctatggctcatttattttaatacataaaatacgaattactgcttttataagaagtaagatggcagtaccgttatcctgaaacttctaaggccgggcgtggtggctcatgcctgtaatcccagcactttgggaggacgagacaggcggatcatgaggtcaggagatcgaggccatcctggctaacacggtgaaaccctgtctctaytagaaatmcaaaaaaaattagccaggantggtgscggscgcntktagtcccagctactcgggaggctgaggcaggagaatggcatgamcccaggaggcagagcttgcagtgagccaagattgcgccaccgtactccagcctgggcgacacagcgagactccgtctcaaaaaacmaacaaacmaacaaaaaaacttctagtgactctgtccttcaagtcctgcacaagtagaaataactgttctgggggtctcttttataatttggcaaatgcaacacagtaaaaagggaaagtaatttagagacagcctggataaagtcctaagcatttaatatctgataagttatctaccttttctgagcttcaattctgtcacctctaaaatggagaagattttaaaaatggcttcttggtgagctcgtgtgaagatcaaagcaggtaacatgaaagtgtgtaaactc

SEQ ID NO: 659 - DNA, 461 bp, Homo sapiens
ttttttttttttgagacagagcgagactcagtctcaaaaaaaaaaaaggagaattagttaaggggaccatattacaaaagatagttgaatattcttcacactcacttctcaccctccccaccccaatttactctcactttctgaatggctttaatgagatacctgattattaatgaagaaaagtagaccaccaccccttttgttatccagactttagaacagccattgttgaaagcaagaagttagctacccacaataatacctttctgagcatactcttctctaacatacatttctgtggaagtagttgaattaaattgagtaactacacaaaggaaaatggcagggctatgaatttctttcccagcttttatatagatgtgccacatatgacactctttagggttccttttattttttctttttttttttttttttgaggtagttgaattaaactgggt

SEQ ID NO: 660 - DNA, 413 bp, Homo sapiens
  SITE (382): n equals a,t,g, or c
tgccaaggagagtagaattaggaagtacccatatacatccagccaggatccacatggaggacctttctgatggctgcaatgactaggccattcctctgagtaactcacagtgtccttttgtaggcccttcttttccctgaaagactggttggtacttaccttgcagagcacatcctgggataagatccccagtgtctcccctgggaggctccccctctgtgtagcaccagccctgggaatgatggagcctagtgatcggggtttctcctgctgtcctttctgcaaaagttcacttgtttacccaccgcatgctagagaggagctcattggccaatgcttwaccttgtccccaaagggktggggttgtggagctcayttaggncagggcttttggcttgggggccagggttatg

SEQ ID NO: 661 - DNA, 1151 bp, Homo sapiens
  SITE (514): n equals a,t,g, or c
  SITE (517): n equals a,t,g, or c
tacgagtttttttttttttttttttttttttttttgagactgagtttcactcttgtcacccaggctggaatgcagtggtatgatctcgactcactgcaacctccgcctcccgggttcaagtgattctcctgcctcagcctcctgagtacctgggattacaggtgtgcaccaccatgcccggctaatttttgtttgtttagtagagatggggtttcaccatattagccaggctggtcttgaactcctcacctcaggtgatctgcccacttcggcctcccaaagtgctgaaattacaggcgtgagccaccacacctggccaacgaatgcattttgaragatgaaaagtacytcgactttaaggatcacacctggtgcattccctgrwtaccttcgttaggtgggcagatacctacctatgtgaccgtggctgtgtgaccacaggccagcccctgtccctctctgaaggggactagacagaagagctgctgsttcctccaaccccaggtgtaataanganccaaccatgctctaarcgtccctaagaatgcagatgggtccaagctctgctgtmatggggmamagcctcccctctcctggggaaggggaccccataactgaggtgggggtttasccaagtscccakgttttgggtgatgctgccccttyaagccmattccccagaaatgaagactacstgtcaagtcttacagggktgggaactwacacaacaaaaaaaamctttcatcttaaaagtaaccactggccgggcgcggtggctcacacctgtaatgccagtactttgggaggccgaggcgggtggatcactgagctcaggagttttgagaccagcctgaccaacatggcaaaaccccgtctctactaaaaatacaaaaactagctgggtgtggtggcgggtgcctgtaatcccagctactcgggaagctgaggcaggaaatcatttgaacccgggaggcagagtttgcagtgagccgagatcacaccaaaaaaaaaaaaaaaaagagagagaaaagaaaactcatgacccaaagttgtaactcatgggttaacaggatgaaatgcagagtagggaagkgcatggtaagcagccggaatagcatgtgcaaatgtgcagaggccctcgtgccgaattc

SEQ ID NO: 662 - DNA, 316 bp, Homo sapiens
  SITE (243): n equals a,t,g, or c
ttccccgtcaaaattgagattccccttttccacgtgctcaatgcccgcatcaccttcagcaacctgtgtggctgtgatgagcccctgagctccgtgtgggtgccggcccccagctctgctgtcgccgcatcaggtaccccaacggaggaagagggagcctgcacagctttctggtcaccaagccccgcgggttgagcgtggcccctctgccamctgcctagggaaccctttcccgtgcgaaancttaccccaccgtcgtttgaagtgcccaacgggtacagcgtgctgggcatggagcgcaacgagcccctccgga

SEQ ID NO: 663 - DNA, 181 bp, Homo sapiens
catctataaaaaatcataaatggtgtttacaattcagtattaatgcatagcatattttgcatgtatatttatattgtttgtcaaattctttacatattaatgaattgtctttatctttcattattaaatatcttgtgtcaaggtagtatgaaaaacaagttatgtttaaaaaaattaagaa

SEQ ID NO: 664 - DNA, 810 bp, Homo sapiens
  SITE (651): n equals a,t,g, or c
  SITE (668): n equals a,t,g, or c
  SITE (715): n equals a,t,g, or c
  SITE (725): n equals a,t,g, or c
  SITE (771): n equals a,t,g, or c
  SITE (792): n equals a,t,g, or c
ggcacgaggggaagatggggcaaggaggggtgggaaaataggtaattcatggctgcttctctaagatgtgcctgcctagccccagtaaacctacctccctccatccctgccaggccatggtggcgtgttacccaggcaacgggctcgggtacgtaaggcacgttgacaatccccacggcgatgggcgctgcatcacctgtatctattacctgaatcagaactgggacgttaaggtgcatggcggcctgctgcagatcttccctgagggccggcccgtggtagccaacatcgagccactctttgaccggttgctcattttctggtctgaccggcggaacccccacgaggtgaagccagcctatgccaccaggtacgccatcactgtctggtattttgatgccaaggagcgggcagcagccaaagacaagtatcagctagcatcaggacagaaaggtgtccaagtacctgtatcacagccgcctacgcccacctagtggccagtcccagagccgcatggcagacagcttaaatgacttcaggagagccctgggcctgtgctggctgctccttccctgccaccgctgctgcttctgactttgcctctgtcctgcctggtgtggagggctctgtctggtgctgaggaccaaggangagaagaagacctttgntgccccatcatggggggcttgggttggcacctgggacaggggggcangccgtggganggcaaccggtaccaacttgaacttggggggcctgggtcctaacctngctggcatgaacccaataggnattggagaagttggagga

SEQ ID NO: 665 - DNA, 745 bp, Homo sapiens
  SITE (617): n equals a,t,g, or c
tatatttcataagcttttttagggtgaaaatgtggaatctctttaatgtttttattctctcattcaaaagtaatcattgattctagacactgcttccatgacaatgcctgtgattgtcacagaaggcagagcatgatctcctcaaacaatacttgctgtaggagggagggaaccaatgtgtgtttggaatctggtttcaccacttatcacctatgtgactttggccaagtcaccgcaaactgagtgcccaacaggtgctgagtccctttctatatattggtcaaaatcaatttaaagggccatcccaagtgtaatgtaaaggttcatctgaagattcagagattcatgttctctctctgttctatgttattattcaataggaatatatgattcttgataatgaactgtcagtgcagaaagaaccttcttttcattaaagaataactttttgttgacttctcattctaatttttttttcattgtgtatatgattagggcctggcaccttgattgtaaagctgcttatggaaagtatcactctccctggaattcccagatcttaaaacataacacaacaaaatctttatgtatcctagaaatgtggtgtttataactgnctataattcttctcatcaataagactgatgtgttaatgcaggaactaaattacagtaggactgaggaagggaacaattgttttgggtattcttttgtggggtattgcagttgctcataataaggggtg

SEQ ID NO: 666 - DNA, 273 bp, Homo sapiens
  SITE (225): n equals a,t,g, or c
  SITE (241): n equals a,t,g, or c
tatggagattgtaagttttaattgtagggttaaaaaatgttttgaggtataatatacacacaaaaaaatacacaaaacagaaatgtgcaattctttgaatgtttatacatgtctatacatttgtatattacatgtgtatatacaccaccacttattcccagcccacctaatcctcatgcccattgctggtcagtaacctatgtcttcaataaccactattttggnttctggttgccatagnttattttgtcaagttacaatttatgggaaagg

SEQ ID NO: 667 - DNA, 407 bp, Homo sapiens
  SITE (281): n equals a,t,g, or c
  SITE (286): n equals a,t,g, or c
  SITE (348): n equals a,t,g, or c
  SITE (407): n equals a,t,g, or c
aattcggcagagcaagtttatacaatgacaaaaagcagaacagattattgatataactcagtaagcccattagaaacaagtaaatgttttattcagcacacttttagcaagttttaaaatttggacatttttaaaggtggtaccaagaatactgttcactgacttattttcctttacaggttatgtsgcttaaaaaagaaagcacaggcagaagcaaatgctacagctatcagtaatctcttgccatttatggaatatgaagtgcatactcagcttaatgnataanctaaaacctcaaaggaatgaatgctttgtttgggctaaggattccagatcacagtggggtgnaaatatgttgatgggcttagcgggtaagttttaggtggtttttggttttggttttatgn

SEQ ID NO: 668 - DNA, 310 bp, Homo sapiens
  SITE (79): n equals a,t,g, or c
aattcggcacgagctgacctcaagtgatccgcgcgccccaacctcccaaagtgctgggattacaggcgtgacagcacgnccggcatagatttttagttctattctgagtcagtgagtctttttaggagactggtatagtccatattttttcttttttataagttgttttctctagtgtagttgccactcaggtgtttcccaccccttctccatttttaatgacttgaaatcctggccagtattttacatatggtatttagaaatgtggacataaatgaaaattataggtaaagggatttagcatattctg

SEQ ID NO: 669 - DNA, 448 bp, Homo sapiens
  SITE (75): n equals a,t,g, or c
  SITE (387): n equals a,t,g, or c
  SITE (398): n equals a,t,g, or c
  SITE (431): n equals a,t,g, or c
aattcggcacgaggtggatcttctcatcctgtgttttcctctttacggtcagtgtcctactgtccgtggcagagntgtactggcgatcttcctcccctaccatcgcgctgcccatgctcctgcaggctctggccctctccaaggagtaccggttacagtacttggcctctgaaacagtgctgaacttggcttttgcgcaggtaagccgatctctgtttttatagcacatatttgtgctcaaragctggtgagtctgtgactacgtttagtattgaaaggataataatgagttttcatttgttcatattgacgtctggaaaggtagtcttcctgtgcaagccctccaaggaggcctgtggaggtgtgaacctggtgacaaactgacantttccagtggnaatgggtttcctgagctgtgtattcagtaaggnggctcgctttttcagtg

SEQ ID NO: 670 - DNA, 253 bp, Homo sapiens
  SITE (233): n equals a,t,g, or c
  SITE (241): n equals a,t,g, or c
aattcggcacgagacaaatgggaaacaggttatcgggggattcatgaagtcagtgagagtaattgcttcttttttgcgggtgaactgaatgtatttcttcaccaaatcttgatgttaacaattaaaaagaagaaatgacatgcaagtaggtcttagcagaaaaatgcaggctggggcatggagtcatgttgttaccctcccacatgctcctacaatccacagagatgcctgtntgcagttncttgaagttatt

SEQ ID NO: 671 - DNA, 335 bp, Homo sapiens
  SITE (327): n equals a,t,g, or c
aattcggcacgagcatccgtaggcgtggaggagagcggtcccaagccctggggccctaggcttctccgaaaggccgtccgttcccatcacccgagggctgtaatccctcccgcgggtgcggaagcttcctcatctccctacctcccactgcactgccggtttccctgggttaccaaggagaagccagcgcctctacaccccaggtaggatgggggagggacttctgggctttggagcttgagcttctctgcttggggtgtytgagcttgaaggtagggaggaggggttggagactccaragccsttggrgtcaatttttggaggacnaacaaacc

SEQ ID NO: 672 - DNA, 391 bp, Homo sapiens
  SITE (366): n equals a,t,g, or c
  SITE (382): n equals a,t,g, or c
  SITE (385): n equals a,t,g, or c
aattcggcacgaggaaatgcacctgatgatgtgagaaagttttcacgtaacttccagataggtgaccgtgaggacatgtgtaaagaagttcctatatgttaatgggggtgtttgtcgcctcctcttatagacaaaacaagccttgaaacaatttttcactggttatatttagtaagtgcatgtgcgtgcctgtgtagattttttacttaacgtrgaatgaattactgtccctttttctttactctggrgcacatttacgtaaagcacttgccagttcagacttatttagtggttcagccacaatggaaaggatgcctcttgagtttatcttaccagccttcctttccttgtacccctggtgaaagnccagtcttgtttcaanctncagagg

SEQ ID NO: 673 - DNA, 249 bp, Homo sapiens
  SITE (185): n equals a,t,g, or c
  SITE (208): n equals a,t,g, or c
atatataagaacttaaatatattggcatattttgaaatatgcaagagatcaatggacattttgtgctttatctaaattctagatgtttcatatgttatagccacagtttgctactgttcatcttttaaatgatagcactgttttcagaatggtcagaaattttttcctaaaagaatactaaccanatggaaccaaaatcataatcatnaacaaacgtttttcagtatgtacctttcactatattccttt

SEQ ID NO: 674 - DNA, 478 bp, Homo sapiens
  SITE (469): n equals a,t,g, or c
tgaaggaattgagggaaggagagctttgtgttgaaattgagccttgggctcaacaggcggtgtgggaggaagagccgggtgtgggtcccagctcgacccttcccctgtgcgctccacatctccgagccttggtttcggaggctcccgaagcccaattcgcaggagagttggaaacaaktsggcrcgwgctgttaagggaggtcttggcatgacagawtttgcttggaatgattagcgttgcccaagggctgtcgctgtcagaaaaacaaaacaaaacaaaaaacaaacggggtccgaagcagctcctggagaaaataggtgttggagagtcgccatgaagtggactctaggtgcatggcasgcagagacctgtgacgggggagggtggccatggcagagtcagataacaggggtgtgggagacacctcttgggaattctcgggtttgaatttcctttcttgggaatttnctaggaatt

SEQ ID NO: 675 - DNA, 317 bp, Homo sapiens
  SITE (97): n equals a,t,g, or c
  SITE (115): n equals a,t,g, or c
  SITE (315): n equals a,t,g, or c
ttcggcacgagcctcactatcttaaactgatacccgatttgaaactttcctaaataggaggaagaaacagtgtggtgaacacatggtatcgtctgtnccgccatccacccctctnttgacctgccaaagtccacccagtcactacaccctctccagacccagcatctccgatggatgagcacatcagcaccctccttcacagagcctgcttctgtattagtcaggacaggccaggctgtattgtggtagcagtcggaacccccaaacccagctgctgccaagagagcaggcaccgggggcccgagtgatgggggntt

SEQ ID NO: 676 - DNA, 339 bp, Homo sapiens
  SITE (302): n equals a,t,g, or c
  SITE (324): n equals a,t,g, or c
  SITE (334): n equals a,t,g, or c
aattcggcacgagggtacacacccacctcacagatgaggaggcggaagacagagggctcggtcaaatgctcatgacctcaagaagtagcagggccgcagctggacgtggtggctcaaggctgtaatcccagcactttgggaggccgaggcgggtagatcatgaggtcaggggtttgagaccagcctggccaacatggtgaaccctgtctctacaaaaaatacaaaaatagccaggtgtggcagtgtgtgcctgtaatcccagctactagggaggctgaggcaggagaatcactttgaacctnggaagcagaggttgcagttagnctagactttnccatt

SEQ ID NO: 677 - DNA, 402 bp, Homo sapiens
  SITE (315): n equals a,t,g, or c
  SITE (330): n equals a,t,g, or c
  SITE (332): n equals a,t,g, or c
  SITE (361): n equals a,t,g, or c
aattcggcacgagaaaaaaagagaattttgtcacatgctataacatgaataaaccttgtggatgacattatgctgaatgaaataagccaggcacaaaggactgcatggttctacttatgtgatatgtctagagtagtcaaaatcatgggaaacaaaagaatactggttgtcagagacttggggaaggaggaaaagaggaattgcttgatagatataaagtttcagttttgcaagatgaagaagttctagagatctgttacacaacaatgtaatacgggttaacattactggactgtacactgtacattactgacntgtaaaaatggttgngngggtaattttttaataaggggtttttttncccccatttaaaaatttttaagggttaacccttaacccccg

SEQ ID NO: 678 - DNA, 407 bp, Homo sapiens
  SITE (400): n equals a,t,g, or c
  SITE (402): n equals a,t,g, or c
aattcggcacgaggcacctactgtttcaggattctgttattaaataaattcttgttcactccctttgtgattttataacatttgaacatttctcttcttgccccccattttgtgggataaaaacaactctacttcaaatcctatggtatttaattatttccgagcgttattttgaggttttactttgtactagtaaattcctttacttcagtgattctcagccttggctatccattgaatttaaatgtgaagtattttttaaaatgctgaagctgggacttactcctccttcatgtttttaatacagccactttgactgtaaacaattaaatgtatgtggtcactgttactggattactgtctcaacacttagggtaatgtgggttattttggggcccgnanttcag

SEQ ID NO: 679 - DNA, 390 bp, Homo sapiens
  SITE (324): n equals a,t,g, or c
  SITE (336): n equals a,t,g, or c
aattcggcacgaggttcctattctgccatcttggaacctgaccagtatcccctttttaaaaaaaaaaacaggtttattgagagataattcatgtattatacaattcacacatttaaagtctaaagcctctctttttaaactttatttttcaagacaaatggcctgacagtatctaaaattggggactgttcttatgaatcaagatatctggccaccctatgcacttaaataagaaagtccaaccttaagattccatggatatatgttcttctattagggcacgcaggaagacacagatgccttctttattcctcctgttatggntccacagractncagaaacctaggagggtwttgratwtgtagcaaacaggttcaacaagaacttca

SEQ ID NO: 680 - DNA, 413 bp, Homo sapiens
  SITE (141): n equals a,t,g, or c
  SITE (358): n equals a,t,g, or c
  SITE (365): n equals a,t,g, or c
aattcggcagagaaaatttaaaaaaaagaaaaaagaacatkcacaccctgtttggatttttctttgtattggtgtggttgtcatttataccaaatagccagaaagagcttggatatataaatataatgtatttaagtatantgtgttaactcattctacttaccttgccatgcttctaaggaactgtagttaatgttaaccaaataaaatctataacctttccaaaggagagggaagctatctaatcataccttaccatcacagattaaccagaccacaatgtgtaacaaactaaggtagtctcctgtttgctatgtatactgcatgggcttttatgtacactcactatttacatagngcttagntcttcaggttggtttccttaaccggactttggcccttccgttttacag

SEQ ID NO: 681 - DNA, 148 bp, Homo sapiens
aattcggcacgagaaaaaactaactcttcttgaactggttattaagtttttaatgcctcttttcctaggcataaaagctgttagtaggttctctgtttttaagcccagcaccagagagctgatgttggttggtcagatgactgtttag

SEQ ID NO: 682 - DNA, 429 bp, Homo sapiens
  SITE (391): n equals a,t,g, or c
  SITE (400): n equals a,t,g, or c
  SITE (422): n equals a,t,g, or c
aattcggcacgagcttcctacagcttttggggtggaggaaaacggggtgagggagctgctgcatgtcaggtgatggcttcctttctttcctcattcatcagtccccttcttacatgaaattcattccaagacttccatgttgaaggaatattcctttatacatatatcgaaaagaattgcccctaacctcagtcttctcttgtagtgtttaagagttcaacattcaattgtggttgatacacttagaaacaagaaggacttagagcatcttaaatcttatgattattttaaactataatttcctacattttcttactgaccttatcacatatgcaaaaaagtgaaggattggggaagtaatcttcagagtacctcatccgggtatcaggsntagtttcanggtatattagttgwttccacangcccatt

SEQ ID NO: 683 - DNA, 460 bp, Homo sapiens
  SITE (397): n equals a,t,g, or c
  SITE (429): n equals a,t,g, or c
  SITE (431): n equals a,t,g, or c
aattcggcacgagaaaaaattaaatgactgttaccaaattttgaaccgctgtgttacagaggctggattacgcattgctcaggataaaattcaacagaccactcctgttcaatatttaggaatggtggtcgataaacaatgtattcaacctcaaaaagttcaaattaggagagattctttaaaaactttaaatgacttccaaaaacttttgggtaacattaattatttaagacctactttaggcattccgacctataccctgtctaacttgttctctatgctgcggggagattctgatctccgcagccctagggcttttgacccctgaggktttactggrtctgggatttgtaggggaaaatccagatgcccagttatctaggtacaggcattcagncttttcagttctggttttgttcatacatctcnanggctaatagtcacaaatgattaggggtgg

SEQ ID NO: 684 - DNA, 329 bp, Homo sapiens
  SITE (177): n equals a,t,g, or c
  SITE (299): n equals a,t,g, or c
  SITE (304): n equals a,t,g, or c
aattcggcacgagctaaagtattggtccaggacacgttggaaatttaaaaagaaagaaaaaactgtagcatgactcgcgatagtttgcaaagtgccgagagagaacacatgacattctgctcactagaactgactccctgtactgcccatgagtaagcattctgatctacgcatgtntcatgggtttgtgttaggatcactttgtcaccamgagtctgaccatctttgagtgtgctgatggtttcgtacctacaggacttgtccattaccaaggatgtggcaccgtgtaaaggcctttnagganccattttttggcctttcctgccaga

SEQ ID NO: 685 - DNA, 328 bp, Homo sapiens
  SITE (323): n equals a,t,g, or c
aattcggcacgagcctcccggcgcccggcccgcgtgccgcagtccgcagtccgaacggccgccgttgccggccgcgggctggttccgttagtggtcgtggttccggggttccgttcctaggcagcgcgcggctattagcgtctgactccagcgaccgcgcgcgggttcgagggttggcggcgaggcgctcggtttctcttcttccgtccacccgcgcttcccgttccccgtcaccgccgctgggttttgtagatttctttccgccagtgaagytgggttttctggagttggctctggcgctctggcccctggagtgtaatttnctaca

SEQ ID NO: 686 - DNA, 420 bp, Homo sapiens
  SITE (407): n equals a,t,g, or c
aattcggcacgaggcaacgtttgttggcctgactttccaggactaagaccctctgggaatcaatggggctcggtgacatggcgtaacctgctactggggtgtggtcctggaaagttaggccaacaagcaacgtttgcatcatgttatctcttaagtattaaaagttttattttctaaagtttaaatcatgtttttcaaaatatttttcaaggtggctggttccatttaaaaatcatctttttatatgkgtcttcggttctagacttcagcttttggaaattgctaaatagaattcaaaaatctctgcatcctgaggtgatatacttcatatttgtaatcaactgaaagagctgtgcattatwaaatcagttaggwtagttagaccattcttatttatgccacaaccnttgctatatttgt

SEQ ID NO: 687 - DNA, 458 bp, Homo sapiens
  SITE (400): n equals a,t,g, or c
  SITE (446): n equals a,t,g, or c
aattcggcacgaggaatgctcaacctgagtaaggaggcctatggtgacaaattctaagaggaggcatgtttcctccatccctatgacagccaaaatccctagttatcgtcgtgcttgtctacacctttaatgaggatgtagccctctragacttctggttttatgtgggtgtttgttttagctcttctgcatacctagggccttgtcttctgtacccatgtagaggataatgctaaagccctagcttaccaggattaaccttcccctaagagacagctagaatattctttcacagttttaccttctgtttttcatttgtctcctgggaaagtatcttactgtttgtaaagttagctagtaattgaaaggtatttctgaaaaaaaatgtcttcaytccagngtatttcagggtttcagatatctatttatcatatatggacagaatncaggggttatct

SEQ ID NO: 688 - DNA, 479 bp, Homo sapiens
  SITE (464): n equals a,t,g, or c
aattcggcacgaggaaaacctccctacccaatacagcctcagctccccagctttccaggccagccccagccctcagtgcccctgcagcccccttatccccccgggcccgcccctccctatgggttcccaccaccgccggggcctgcctggcctgggtattagacacactcctggccctcggcccctccctagtcccacccacgctcaacctttggcccagccatcgccgagattcgagggtcaactggaagtggcgttggtgctccctgtggacttgcgtcggcamccagaggccttggagggacaaggcactgkgcggtgtgactggtcatggcacttgctggccttytggcaagagrtcctcctggaagcccctcctttcagtgcctggctgcagcggtgctagccagctggagtccagcacctctcgccggtgtctgtgtgagtgagcgcatgtgcatttnatgagcatctacttg

SEQ ID NO: 689 - DNA, 420 bp, Homo sapiens
  SITE (400): n equals a,t,g, or c
aattcggcacgagcctccgcctcccgggttcaagggatcctaccacctcagcctcccgaggctgtagctgggactacaggcatgcgacccaccatgcccagataatttttgtattttttgtagaaacggggtttcaccatgttggccaggctggtctcgaattcctgacctcaggtaatccgtcctcctcggctttccaaagtgctgggattataggcgtaacacgggcactcggcccgagaagatgtttttaatgagccccctatgctcaacamcgtggtagatgtaaaagaaaaacaaaacaaaatccacatgacctagtccctaattttgaaagcagttaccattccgtatttgytaggggacggtacaaargtgaacagttgcttaattttttaanatgtaatgccccccttttcc

SEQ ID NO: 690 - DNA, 1741 bp, Homo sapiens
  SITE (830): n equals a,t,g, or c
tcccgctgcgtttgaccatcggtactgatatcgataccgcagaagtgctggaagagatgggcgcggagcatgtgccgtgtcctgtcgatgatatcgtggttgatgaagacaataagattgtcaccaccccagcatatatgctggcgcagaacattgcagaagcggcgagcggcattgataagctggtttcccgcgtgctggttctggctgaatgagtaaaagccgcttaacggtgtttagtttcgttcgccgttttcttttgcggttaatggttgtcctcgccgttttctggggcgggggcatcgcgttgtttagcgttgcgcctgttcccttctcagcggtaatggtcgagcgacaggtcagcgcctggctgcatggcaattttcgttacgtggcacattctgactgggtcagtatggatcaaatctcgccgtggatgggactggcggtgattgccgcagaagatcagaaatttcctgagcactggggctttgatgtcgcttccattgagaaagccctggcgcacaacgagcgcaatgaaaaccgtattcgcggtgcttcaacgatttctcaacagacagccaaaaatctctttttatgggatgggcgtagctgggttcgaaaagggctggaagccggattaacgctggggatagaaacggtctggagcaaaaagcgtatcctgacggtttacctgaatatcgccgaatttggcgacggtgtgtttggcgtcgaagctgcggcacaacgttatttccacaaacccgcgagcaaacttacccggtcggaagctgcattactggcagctgtattacctaatccacttcgtntcaaagtctcctcgccatcgggctacgtgcgtagccgtcaggcgtggattttacggcagatgtatcagttaggcggtgagccgtttatgcaacaacaccagctggattaagcttcgcgcgaagtgagggccagcgttttgctctcacgaggttgcagatctttctgcagggcaatagccagcgccggttgggccgataaatcgtttccataaccgctcttgcttacgcagacaacaccacttcgaccaggtcgccagtggaatcaatgtgctttcaccaatgttgtcgcagacgccgggataacctctgactcactgatgcggtgacagaggatattctgcggcttcagcgacatcgtcacgatacggttatcctgcaaataacgcttcagctgtttcagtagctggcgcagttgtgcaatgtcttcttcgtaacggcattgttcagcaaattcggtcagcgtaatggaaggcttgccgtcaaaatctgcaatcacatcgtagacataaccggttccgcaatccgtctcaacggtaccgtgatagcgcggtattccactccagtcttttaaccggcgaccaagatgcgcgtagtactttaactcacggcggatctctttatcgccaccatcgccacgatggtagacaatcttgatacagcgttgggcatcttccggatgcgcataacatttccgatgtcttccggtgcccaggggactttgttcagataagcgaatcatgccatctcctggaaatattttctgacgatctccagtatggtcgattaacttaaacaaaacctaaacaatgcctcttaaggttttcttaaggttcttctgaaagtgaaaagcgcacaaaatgtacaaatgacgttgattgagaacgatttcagtacgtgattttcttattgtc

SEQ ID NO: 691 - DNA, 701 bp, Homo sapiens
  SITE (696): n equals a,t,g, or c
tttaatatttaaatgraggtacacatycccayccgkggaagaaattgcmgccmgctttaagattttaaatgtttttgtgtaaaaamcctttttattttgtaattaatatttattttaaaaacttgaaaatacagacaagtaaataaatataagacaaaaatcattcataatcttattcaggttcatcccaggtytttttctgtgtatttttgcttatagtatatgcttacaaaaaagttgaatcgttttcgcttatattttttstttgcttttgraamttacacagcatcttttgygwgtcaataaattgtgtttctgctgtatttttaatagatacttrgtctgtaatacaaaacatgagattcaacaaactgtaaatttaattaagcaaccctttgtggttgaagggcctagtttggtgtctggcatttagtatacactgctagcatctgtgtaaaagtgtgtgaacattttggaagcttcaagaaatacattgtgtgaaattgtcctctaraacttacactgtattagctgtatgtgagattgctcataactctatattttgttaggtacactgtgttacccttaaaaaaatctttgctattctttctagtaaaaaaaatattaaaatgtttgaatgaatttctttgaattactggtaaggttggttattttaaagttttttttgaaaatatncatgt

SEQ ID NO: 692 - DNA, 852 bp, Homo sapiens
  SITE (327): n equals a,t,g, or c
gatcaaccactggtgagacaccaaaacccagagaaactgaggaagtggttatatttgcatatgcatagaaatacacatacatgtttgcagataaatagaattttgtctaatatggtatgtactaaattgttaacaatagcttcctctggagagtggaacttagtgtcagaaggaacatctatcttgtttttaacactatacaacaaacatgttttattattttaatatttttaaagtggttattaaagagaccaatgactagtttgtgcaaaataaaaagaagccaggaagattctataatattaatagatcagatttgaggtgacncaagcctcaaacagaattaattcatccatgatgattgatgaagaaacttccctatggaaagaaaatatggattccattcaaagcactttattttggttatttagaatattaaaatatacatatcctctagctgtcttagaattctgattgattacttatgaaaacattttctccttctatggtacaatgttaacaataatacttatgaactaggctgctgtttgaagatagacagatgtgtgtatgtatctagaaagttatagttacatatagagtgtgtgtgtgtgtgtgtgtgtgtgtgtgtgtgtgtattcctttaatcctgtcatcagctctagaaagtataagttatcatctccagtttatagttgaggcacaaaaaggttaaatgagtagcccaaatcaaaaaagactatagccaggattcaagtccaaagagccccagcccaaagcttgtactcttggccactcttgtatatacttcttgagaaaaataaatgtattaaaaaggacaccaaccataaa

SEQ ID NO: 693 - DNA, 437 bp, Homo sapiens
  SITE (7): n equals a,t,g, or c
  SITE (51): n equals a,t,g, or c
tccaganttccctactttcctaaagccccaggggggtccccaaaacaccangtaactaaacttggcccaacttcatgggkttttttttttcccatattccacagagtacattaactttttgctacagttaatttttttaactcgactttttaaaatcaaaaaagtattgtaaaagaaaattttgtatcactaccttaaaccatggctgtacatatataaatacagattgcaaaaacatcctattacaaaaaaatcctcatccacgtaccgcctagagtcaagtcacatgccactagcggaaagtgtaccaattttgggacacaatgattccagcccaactttctcattttctgtattagaacactggaacccaraaagcctcggaaatcaccgaaacaacttgaatcaaactgaatgggggtgcaaatgtttatgtt

SEQ ID NO: 694 - DNA, 556 bp, Homo sapiens
  SITE (540): n equals a,t,g, or c
  SITE (549): n equals a,t,g, or c
  SITE (551): n equals a,t,g, or c
acgtctttgtctggctgatgttgttcagctatttctctgttccggcggcattacaacgccgcgtgctggtgtatggcgtgctcggggcgattgttctgcgtaccatcatgatcttcactggcagctggctaatttcgcagttcgactggatcctgtatatcttcggtgccttcctgctgtttaccggcgtgaagatggcgctcgcccatgaagatgaatcaggcattggcgacaagccgctggtgcgctggctacgcggtcatttgcgcatgamcgacaccatcgacaacgagcatttctttgtgcgtaagaatggattgctgtacgccacaccgctgatgctggtactgattctggtggaattgagcgacgtgattttcgccgtggatagcattccggctatcttcgccgtgaccactggacccgttcattgtgctgacctcaaacctgtttgcgatcctcggcctgcgtgcgatgtatttcctgctggcgggcgtaaagagcgtttctcgatgctcaaatagggctggcggtgattcngggggttancnggaac

SEQ ID NO: 695 - DNA, 956 bp, Homo sapiens
aacaaaagctggagctccaccgcggtggcggccgctctagaactagtggatcccctgggcattatggaacacggcgcataacgtcggcggcgcactcattcccattgtgatggcagcggctgcgctgcattacggctggcgtgccgggatgatgattgctggttgtatggcgatagtcgtggggatttttctctgctggcggctacgcgatcgcccgcaggcgttaggtttaccggcggtcggtgaatggcgacacgacgcgctggaaattgctcaacaacaagaaggggcagggttgacgcgtaaagagatcctcaccaaatatgtgttgctgaatccgtatatctggctgctttcgttttgctatgtgctggtctatgtggtccgggcggcgatcaacgactggggcaatttgtatatgtccgagacactgggcgtcgatctggtcacggcgaatacggcagtgacgatgtttgaactgggcggatttatcggtgcgctggtagccggttggggctcggacaaattgtttaacggcaaccgagggccgatgaatttgattttcgccgccggaattttgctttcagtcggctccctgtggctgatgccatttgccagctacgtgatgcaggcaacctgcttcttcaccattggtttttttgtctttggcccacagatgttaatcggtatggcggcggcagagtgttcccacaaagaggcggcaggggcggcgacggggtttgtcggcttgtttgcttatctgggggcgtcgcttgctggttggccgctggcgaaagtactcgatacctggcactggagcggattttttgtggttatctctatcgccgccgggatttccgcactgctgttactgccctttttgaacgcccagacaccgcgcgaagcgtgatgcatctcaccttttcacttcatatccggcaaaactaagaaatttt

SEQ ID NO: 696 - DNA, 930 bp, Homo sapiens
  SITE (210): n equals a,t,g, or c
aaaacctaggagtttctcatctatgagaaagacctaccatgctgggtagggcttatgggctgagtttctgatgttcctcagtasaactgggaagagaargtaaccttccaaggtttaactatctatctatctatctatcttcaggaaaccctttctaaaatctttgtgttttcactgcagtttaractgacttcttgtgctttgcacccntgtgtagccgatggccagcaccaggagaggagtcaggccgcgactgtgcaggagatgactttcccagctttgctgcwttcagaagcctttgtacataagagatgctgctacccaagcaccaaagacctgttaagcatgtgcactactgaccacgactctggtctttcctgttgttggcccctctggtcttacagaaacaggctgggttccaggagcccatctccccgctgtctccccctgccccgagtctggaagagggcaaggacacttccattcctctgtaccatggagtcctgcagccccttaacccctgcgtggcaactgtgtacagcttacccctgcctccagttgcaccacttctagatgtgcctttaaaagatctaactatgggatgggagaacttgagggtgatcgggaacctcccctgctgagggtggtgtcagggttccgtgactccagtgggccagtggtagcctgtcccagacaactccgtcaccccagctctgcctgtgcctttatccctgacagctgctgcactagccttcctgcttccctaaggacttagtggagggggaaagttgtttttggtactacttggtgggaagtaaggggaaggttggatcttgggtttggtctacccacccaagagaaaagactgttaactggaagaaaaaatatatatataaaattttaaaaaaaaaaaaaaaaaaaaaaaaaaaa

SEQ ID NO: 697 - DNA, 780 bp, Homo sapiens
tttgttttggatgaggggagaatttttttaaacactaaacttctgaaatgtagtactgtaaggggaacattatttcctgcaggaggtacaaaggctgtgtgttcatttgccagacgctttttttttaaataggttccagaaaacatggttgtttctaactagggttaaagtttagctttctatatgaattcattgttggaccacagatctgcttaagtaaagagctataatcccaacctaaacttttctgagattttacaataattagatctttttccaagttaattgggttttcccttctcccagtcataggtggtttttatcatcaagacagactgatattttgtcaggatattttcttttacagtgtttgatgtgcataatgccagagttatttttttattattcattttctctctttttgttcaatatgagattcaggatcatatttgtttaaaaggtaacacatagagatgtatgtatatattttgttataagacatacaaaataattttaagagggataaaggtgaaaatatcagattctggaaattttaagtatctaaactttatacttgtatgatttaccataaacataccaaaacatttttctgaaaatttactgtcggtctctgacatgaaaccgtattttgtcagtagttgaccaagcagttttatgagaactcttctatgcaatgatgcatttaatttctaaagtaaatgttgaattattaaaaaaaaagtttgaaggtaaaaaaaaaaaaaaaaaaaaaaaaaaaaa

SEQ ID NO: 698 - DNA, 650 bp, Homo sapiens
  SITE (1): n equals a,t,g, or c
  SITE (14): n equals a,t,g, or c
  SITE (94): n equals a,t,g, or c
  SITE (580): n equals a,t,g, or c
  SITE (621): n equals a,t,g, or c
  SITE (636): n equals a,t,g, or c
ngcggttcaccagngaaatgaacacagctgtctacacagaaactagcacaggaatgttcatggcagcaccagccaattcacagtagccaaaaanggaaagagctcaaatgtccactatctgggaaatggaaaaataaagtgtctatctattcaacggaatgatattgggcaatagaaaggaataaagtactggtgcccactccaacatgggtgaagcctgggaagagtgtacttagcgggaacagcccaggcaccaagccgcacgggttaagattcyactcakatgacmgtccaggagaggcagaccctagagacaggaagtagatgagtggtttcctaggctggggggtgagagaggtgggaactgagtgcagacaggtctggagctgcttttgggtgattaaaatctttaaaacccaccgatggtacacaactctgtgaatatcctaaaaaccattgaattgtacactttaaatgggcaaatcatatggaatgtgaattatatctccaaaaactgttattcttaaatgaacactgctaratatacgtycctttccctaaaacccctctttcmtcctcnaagctttaaatttgctcccccaaccaaataaggccctcccnttgttttaaaaaaangggggtggatccgg

SEQ ID NO: 699 - DNA, 513 bp, Homo sapiens
  SITE (2): n equals a,t,g, or c
  SITE (450): n equals a,t,g, or c
  SITE (470): n equals a,t,g, or c
anttcggcacaggcggctactcccaagattgcatgtgtttgtttaaaagtgacctgctactacctcaccattagcccactgggacttgcttcctctttaaaattttatgtaacactgatgctcctgttttgatgtgtatgaaccttaatctatgtgatatgtgactttgtgaacattgaattttttaattgagacctggggcaaggcatagttgtagctatttttatcctctttcctgggcacttcttccctgtttggcacttccagcccctgcttcttatcccaagactggtatggcattgctgtgtgttaattctgccccacwragtttcatagcaagcactaaagactgttacctggaaataagaaatcttggcctgttgggggcctcagtgcargactcargacatccagtttgcyagaatgcactgtttgttccagccacctgtncttctcaagctctatctganatatcatcctttctttccactgttggctccttatatctacttc

SEQ ID NO: 700 - DNA, 526 bp, Homo sapiens
  SITE (372): n equals a,t,g, or c
  SITE (393): n equals a,t,g, or c
  SITE (485): n equals a,t,g, or c
  SITE (508): n equals a,t,g, or c
  SITE (521): n equals a,t,g, or c
gagaatctcactgaaaaaataaattccaagaggcttagttaggtatggcagggcaaagatattttataaatattttggcaagtagagacaagagaaaatgatgcgtgaggtattttcaatagaagccaattgagcttcctcatttgcatgaagcatctgagctgttttcctaagttccagttcctcctcctcaggtgggcagccttacagcctctgcatttgactctgtcaagatragactgtagtaaagtgagctctttgtatcattgatgaaagaaagaaaggatttaaattaaccattgggactgagttaaaataaaataaagctataaaaagatcatggctgcttgaccatgaggaaaaacctagganaatagtcatttgcatgagtcntttgttccccgaggaacagccttctgttgaatggtgttcctggagggaaattgctcaaataggttaccttggttttttaaaaattatttctncgttagcatggcatttgggtacngccgatctgcggnacgtc

SEQ ID NO: 701 - DNA, 308 bp, Homo sapiens
  SITE (1): n equals a,t,g, or c
  SITE (252): n equals a,t,g, or c
  SITE (302): n equals a,t,g, or c
naaactacgccgggctcatgcaggtggcggtccagagccctgagcgcccgctgaatgagacgccggtcctgtggcgtcatctcgccgggtaaaaaggaaagctgtttcatctgttgctcttcggtcagtcgataatacgcagaatggcgtgagcctctggatgttgcatggcatactcccaggcggtaatagtgtgcggtcatcgcgtcacattctgtacggcaggcatggtggctatacgcaatcaggcanacagcaatacctgctgcttctgcactcatttgggcatcgttaccgttcangcagtt

SEQ ID NO: 702 - DNA, 1013 bp, Homo sapiens
cgggcccccccacgttcttatatgcccaggggcaatcccacaatccttaactcaacgcataccatcaacagtgccagcaccacgaccgcaccgatgctcatggatgccacataccagcgcagatagccgttctcacttaacagcagacctttacctgcaaagcgggaaaggacasccgggatgttcatcattgagttcagcggatcgcgtttcagcaaccaggcaatacccaggaacggcttgacgaacactttgtcatacagccagtcaaatccccaggcgttgtaccaccaggtgcccagcagacggcccggcgcactgttggcgatggaggtcaccagagtacgtttacccagccacagccaggctgccagcagaatgccgaccaccgcgaccacgccagaggtaatttccagggtcaacatgctgccgtgcgccagttccgtcgtttgcggaagcacgccctgcagcggcggtacaatcagtgcgccaacgaaggtggaaaggatcagcagcacaatcagcggcaggctgtgagttacccctttcacggcgtgagcgtgaatttgttcttttccgtggaagacgatgaaaatcatacggaaggtgtagagcgaggtcataaacgcaccgaccagacctgccaccatcagattgatatgaccattcgccatcgcacccgcgaggatctcatccttactgaagaagcccgcagtgaccagcggtagtgccgacagtgctgcgccgcccaccaggaagcagagataaaccagcggaatagatttacgcagaccgcccatcttgaagatgttctgttcgtgatggcaggccagaatgacggaaccggatgccaggaacagcagcgctttaaagaacgcgtgggtcatcaagtggaaaatcgccgcatcccatgcctgcagcccgggggatccactagttctagagcggccgccaccgcggtggagctccagcttttgttccctttagtgaggggtaatttcgagagggcgttc

SEQ ID NO: 703 - DNA, 469 bp, Homo sapiens
  SITE (371): n equals a,t,g, or c
  SITE (446): n equals a,t,g, or c
  SITE (453): n equals a,t,g, or c
  SITE (465): n equals a,t,g, or c
cagagatctgtcaggtgtgccacacaacaggaagcacttgtaaactaattaagcacggtcactgaatccttttttcaccagccttctaaagatgttgtcttaaaaacataagaaagaaaatccatttttttaaagcaatgaaatgttctaattaggtttgaggacatttgaaggagcgattgttttttccccaaaattttggagcagaggggacgttttacatcatcctaacttcatgttcctctgtcattttattttatttatttatttttaattccaaaggagaaagttgaatcmggaaaatttgtcttaaaatatactgcttagtttagagacggacaaactaatgtatttttgtaaatcatggggtngcgggatgtccaaaatctctcattaattaccctgtttttttctttaagggaaattggattcctggattattgggnaaagggnattcctaggttnaagg

SEQ ID NO: 704 - DNA, 400 bp, Homo sapiens
  SITE (7): n equals a,t,g, or c
  SITE (250): n equals a,t,g, or c
  SITE (336): n equals a,t,g, or c
gtccttnggctggcaggaaaagtccatttggtgtgtaatcctaaaattctgcattgctatagagcaagagcacttatgctgaaatccatgagctctttgaaattgtgtaaaatttggagagcttttacatctctcatttcactgtgtatctgattttcaaagagaaaaagtgttaaaaaggatagaaaacacaagcttagaacagtcactttaaagaacaaagttttaggkcaaaaacactgagaatttncaactcggcttgttgggagttggccctcatttatatccagcccttggctatgaccatcaacaacttgagggagggggctacatcanaactgagggcttttctctagaaagatctagattgaaggacaccaccagagagaagaagccaaaa

SEQ ID NO: 705 - DNA, 473 bp, Homo sapiens
  SITE (384): n equals a,t,g, or c
  SITE (453): n equals a,t,g, or c
ctcatctgccataaatgaaagtcaatgcataatgtctcaaattgataagccatgaaatatccataacgcttactgtttagaaacacgaaagtagatcccagaagaaaacaattaaaaacaataaaaaaaaagtttgcttctggggagtagatctcaaaggtggtagggaattttttttttcattataagcactgtagcaccaacttacatttaaattcatgcatactattttaataggaaaaaaatgtcaaggacaattggggaaggtaaggaagtaggccatcgtgaatctaaacagctttctcaaggaattttgacaatacagggaaaaggaaataatatctggatacatatggtaggccttaacattaggctagggtaccnttctggaacgctttagggtattatttaactgtttaatcctcgtcttcaaaccttggagtaggggtactntttactggggccccttttta

SEQ ID NO: 706 - DNA, 464 bp, Homo sapiens
  SITE (423): n equals a,t,g, or c
  SITE (453): n equals a,t,g, or c
cctctactcgctgaagcagaatcctctgaagagttgctgaggcagaactgaaatcatggctcacctcaaagaagcagcagtattggccgttaatgatgcctcacacagaaagacgatgctcctttaactcggggttttaatgggaagtttctaagcctgaaacaacagctttagacctggggtgtgccatcagctgccttgcakacscactgtctactgctttcacacagcgtggtcgggaagaatggaaactaaagaggcttgtaactacctgtaactgttccaccagggaaatgggatcaagtgtttgtttcagccagagccagtatttaaaattaggactcttattttcctggaggcaccccacaaatgggaccttgacaaagggggaaggacacaggtgttacttgcgttgatgagggnaagccttattcggggtttaaaattttggcnttttaacttcg

SEQ ID NO: 707 - DNA, 444 bp, Homo sapiens
  SITE (418): n equals a,t,g, or c
  SITE (439): n equals a,t,g, or c
aatttattcttgcaagccgttagatttagttttcctccaacgtgggcacttcagcataggtttcgggtgctactgtgacatacagctcaaagcatcctaatacccctgagtctgagtaacatgttctcagaataggggctccatcaatcaatcatatcaacccattaacagcaagaggaaaatgatgaagtatatagccaagagaaaaactggattctgatgacagttgaaatgtgatgaagattctgtgaagcaggataatgtaagaaagatgcctgtgtggaaattaaatgtaaaaatgccaatgggatggaaattttcyccmaatgtactarggcctcccctattaattttaaaatgggagctaaaccactttatggatggggaattatttactagggcatccatggcagggagnaagtctttcccaaaaacagantactg

SEQ ID NO: 708 - DNA, 544 bp, Homo sapiens
  SITE (41): n equals a,t,g, or c
  SITE (54): n equals a,t,g, or c
  SITE (120): n equals a,t,g, or c
  SITE (495): n equals a,t,g, or c
  SITE (517): n equals a,t,g, or c
gccccttgcaccgggccggttaggcccggattgcctcgccntcgcctgtccaanggaccctccagcctgaaaccgaggccccggacacttgcctggtatgttgagagaagttgagagcanaaattgaagagccttagtgtgttgctgaaggcgcagcaagttgaatcagaaagagcgcagagtgatattgagcatctctttcaacataataggaagttagagtctgtggctgaagaacatgaaatactgacaaaatcctacatggaacttcttcagagaaatgaaagtactgaaaagaagaataaagatttacagatcacatgtgattctctgaataaacaaattgagacagtgaaaaagttgaatgagtcactcaaggaacaaaatgaaaaaagtattgcccaattaatagagamagaagaacagagaaaagaagtacagaatcagctagtagacagagaacataagctagcaaatttgcatcaaaaaaacaanagttaccaagaggacaagtttnaaaaccttaccaaaaggaaaagggaag

SEQ ID NO: 709 - DNA, 359 bp, Homo sapiens
tctttatccaagttactctgccccatggcccaagttagtatatttggtttaagactcataattcttgctttggctttaaaaatcaaaccaagtgtaacctttcctgctaaaactcttcttgggtctggcagcattggtaccttgcttgcaacatcctagaagtgaggccttcacttgtgctatctttagatcataagtgatttgcttaaatttatatatttctcatgctttttataaaaccttgtttctctcttaaaagaacatattaaataagtggcttccacatttaaccatttcttttttccaactatagagttctargtatattttaatgctcaactttgaaaaaaaaaaaaaaa

SEQ ID NO: 710 - DNA, 282 bp, Homo sapiens
  SITE (252): n equals a,t,g, or c
cagttccttccacatggtattttctgattgtgctccctgtcttgctagtgattgtcatttttgcggccgtgggggtgaccaggcacaaatcgaaggagctgagtcgcaaacagagtcaacaactagaattgctggaaagcgagctccggaaagagatacgtgacggctttgctgagctgcagatggataaattggatgtggttgatagttttggaactgttcccttccttgrctacaaacattttgctctgnagaactttcttccctgagtcagtggcttca

SEQ ID NO: 711 - DNA, 493 bp, Homo sapiens
  SITE (491): n equals a,t,g, or c
cctgcgaaagatggcagatccccagtctatccaagagtcgcagaacctttccatgttcctggccaaccacaacaggatcacccagtrtctccaccagcaacttgaagtgatcccaggctatgaggagctgctggctgacattgtcaacatctgtgtggattactacgagaacaagatgtacctgactcccagtgagaaacatatgctcctcaaggtaaaactcccctgaggccgcacccatggagcctgggcttaccctctcaccttcttcttattaaaaatccgttttaaaaaacaatgtttcttttttcttaaacattgatacagatcttacggcacataatggtttgtaacctgttcctttcctgtaatataatataccgtagtcacctttccagatgtcattaaggctatttctacaatggtatgtgtaatgactgccaagtaatctggttggattgggacatgtcatggtaacatatcccctgggntg

SEQ ID NO: 712 - DNA, 608 bp, Homo sapiens
  SITE (594): n equals a,t,g, or c
  SITE (606): n equals a,t,g, or c
aacaaacagcagttcagaaacctcaaagagagatgttttctaactcaactggccggcttcctggccaaccgacagaagaaatacagtaagatctataggctcaccrtcatgaaagtgatgaatgatgtcctgtcttctctctgagacactaaatgctctctccatcaaaaataatttcatccttcctgtacttctaggaaaacagaaatgggtattttaacattttgttaaagttggaagacagaggtrccaaagtatttagcaactttccatgtttgcaatcagatgggggtggractagagttaaactcacagttattgatttctaacacaggcacagaaygacctgttttctccaagrggctcaatcatgttttyaagaatcctctctgtaccatataaggatcctgcagacaaataacatctagtctgttgttctaaakgtctarggactagtggaacttttatttcagttcaagtttctgttgagggcccaacagggcaaagctctgttctagtggactctgagggggaacttggtgatagttacccagtaacctgctctgagggggcttcaagaggagtcttgctccnaataggaacccngg

SEQ ID NO: 713 - DNA, 461 bp, Homo sapiens
cgcacatggtaaaatcagtttctttccatgatctgtttcacagtctctgtgaagctacctaccacaaagaagtagtgagtgatgactttctagaatctaagtatatggcatgtatttattataagtaaaacattaagtttgctgattgtttacttgtgataaacaattattgtgaactttatttgtgctggacataagtgtctgttttacagtgaaattccattatagagggttacttggtagagaaatgcaaattgtagttggtcatatactaaaatttgaactttttacatatcaatacttacaaataggtgtttactttcccacaaaactccagaacatttaagagtctcgggtgtttaaatttgatgagatttacccaaacaaatagtgracaaaaggtttatgaaaataagttatgaaactaaaatacttaataaacatccagtgacaataaaaaa

SEQ ID NO: 714 - DNA, 452 bp, Homo sapiens
  SITE (429): n equals a,t,g, or c
  SITE (435): n equals a,t,g, or c
  SITE (444): n equals a,t,g, or c
tttcttttgtttctgaatgtacaaagaaaacacttaaaaatttgcttgtaatttaaaaacttgtcaggatatttctggatttgagtgtttcttggttacttttacctggaacctggtgaactgagtccattcctctgtttgccctttctgtacttttttggaaagttttctttaattatatcttcaattattgtttctcttttgattgttctagattcttcttcagaaacataactcttaggctcaatctctattcctgggtcttccatagctatcgtcttctttttaaagtactgtattttattgaatctaaggctagtatttgttgtaaggaaggcactattattatatgtacaactaaggggaggaaaaaatgctgcccaattaaactgtggaccataatgccctggattacagtccccgtggaantggggnaaggtggcntcacaccc

SEQ ID NO: 715 - DNA, 657 bp, Homo sapiens
  SITE (618): n equals a,t,g, or c
  SITE (655): n equals a,t,g, or c
gctgttcagagtgctatagttaaggtggtgtcagcactttcaatataaagccctactttcataactctacttacactatgagttttcaaaaaggtgtaaatggaatataaattctttttcctgtagcccaaaattgctacatggggtcgcagcctagtgtttggcttgtttctttttctttttcatttcttgcttttcaaaacttatatcatctgagaataggtagatagttcagctgctgcattgaaggcttgcaaactgctgaaatgcacttgaatttaaaattgtaatgcatctgttttctcaaacatagtatgataagaggattttcagatagcaaatgcccaataccagttcttcccctctgacatgctgtaacaaggaattaggagtgttgtatgctgcttcttccttcaacaagtgttctccaaaggcctatttaataatttgattgtaactaggaactacatattattcacattactttctacttataatgtttcttcctatattttttctttttatgttttatatttgagtccaatacccagttgtttttagggcagtttcacataaattatcctatttgaatgatccccgctgaaaccattaaaaacnaacctgggtaacagagtaagttggctatcccccttgnca

SEQ ID NO: 716 - DNA, 695 bp, Homo sapiens
  SITE (6): n equals a,t,g, or c
  SITE (142): n equals a,t,g, or c
  SITE (693): n equals a,t,g, or c
tacctncccggtgtaataattaaaagagggtaaaggccycccctaaaaagcccccyagtcccccagaggtaggaaaaataaactcaacccgccttggacytgtgtatttaccttgggttggtttcccagaatcctcccttantccctgaaacagtatgatcatgtagttaaactactccctttatatcctgtaagtactgtgcagcccaacatgttcttttttgtccccaacttctgccatctttccaacctctgaggcatgctattttatagtggtttgctctttgaaaaattgtttttgtgccctctcttaatagtcacagatactgacacaaaacttaaaaatgaccagaaaacaatgtataaattatttaaaataaaacattctttttatatcacattatcaaatttgtactctttattcacttttccattaagtgtgatatcaatatagctaggctgttttgagcttgcacagtctgtctaccaagctccttcctaagtactttgagggtaaaatgaagaaggcagtctaggaaggracacaattacagagccctgtaggaaggcagactgcttacaggagctgtataagggaaattaagcccaacattatgtgctgtgttggccatcatgcaaagctggattgcaaagccctgggttacctccttccattcatcttccctgggaggntt

SEQ ID NO: 717 - DNA, 627 bp, Homo sapiens
  SITE (575): n equals a,t,g, or c
  SITE (590): n equals a,t,g, or c
  SITE (602): n equals a,t,g, or c
  SITE (609): n equals a,t,g, or c
tctatttgttttctacagcttgaggaaagagctggcaaactgtgaatctaacttgatcttgttgccagcagatatattttggcttcctggtaagagtctgtgttaccagggacaatatattgccctctgatcagtattgcaccctaaatccacaaattcctccagcccagtcttacatttttttaaacaaatcccctagcttgtttgctattatttataaagagcattagaaaatgtatttatagacctggatgttatatgtttaatattaatttagcctttaataatgttataggtttgtaactattcttcagaaattataaagaactcagtgtagactgaattaatctatttagtatctgtaattttgcagacatattttcttacagtattttctatgtaaccacacatgtagaattataactaattagagcacaagaagtttcttcagcaatttagagctaccaattgkttcytgactatatagtcacatttgacaaatttaagaacccagtctttagtgatgcmataacaaatgraccattargamcarggaatgcytaaatcccytagcnggtgaggatattacntccaaataattncaccttnccaactcaggaatggtgg

SEQ ID NO: 718 - DNA, 587 bp, Homo sapiens
  SITE (39): n equals a,t,g, or c
  SITE (50): n equals a,t,g, or c
  SITE (584): n equals a,t,g, or c
  SITE (586): n equals a,t,g, or c
ccggggtttggctggttgaacttcctgaacttggtaaanttccctccccnggggagtctttccatctccccgaggctgcccacttccttccttaaaacctgccccagtgaactgtgcctggattttttcctcactcactgtgtcagatgttaacaacctgtcccagaagtttctctacaacctgccccagtcagtcagcctctagaactgtggggccagaaacttctaaactgtaaaacaatccaacgtactttgtttttctagtttctaggtcttcctgcatttaaatttatttctttcaggaattagtgtttttcttccattcaattccggtatagtataatcaatgaaattgttctcaacgctaaatataactctgcctaaagcaataagagaggaaacaaaatatatcaaaattagaactatttaacggatgatctttagaaagccagcatgcaatatagattatgactaataaaattaaatctaaaagattgaattaaaaattcaaaatatatgcattctttcataatatgtattcacacttaataaaattctaatgatctcttgtctttctttttctngnt

SEQ ID NO: 719 - DNA, 483 bp, Homo sapiens
  SITE (467): n equals a,t,g, or c
gatgaagaaggccatgaagaaaggactgcaaaagactacagggaaactwttgggagtgatctatatattcatcatcttgattgtggtgattgttttgtgagtcaaaatgtatcaaattatatgttttaaatatgtgcagtttagtacacttcagttatacctcagcaaagctgaaaaatccattcaactctgatttgaaatgccatcttgtctgatgctgtttacatgtctctgagtgtgtttctaggctctcttcaagtctactaaacaaatatatttgactttatgtttctatattgacataaatagttagacagtatcttttcagtaaaagtgttgggagaactgggaagccacctgaaaaaaaatattgatagattcgtattcatacaccaggataaattccaagtggracagtcatgagctccaaaccactcaagcccctgccttggcattacacttaatgncctatacttaaagcga

SEQ ID NO: 720 - DNA, 501 bp, Homo sapiens
  SITE (458): n equals a,t,g, or c
  SITE (459): n equals a,t,g, or c
  SITE (478): n equals a,t,g, or c
ggaatgtgcagtagcagaaggaatcacgtatataacatgttttcaggtagctcacagacaaatgaaaaaagctacctttctgtgtatacacagaaaaaccaacatcataccacttttgaagacctttttaaatagcgcagaatatacgcagtagcagctgaatgtgtatgtgggagaaaacgcgagaaaaaatggtctgtgccagtgtaccaaatacccgcagtttgctgaagatctttaaattttctgtccatctttctgcagccttatcctgaacatatgttctctccataaactcatttggccaaggaactatatagctacttgaaaaatatttgtcccacaggtgataagtgatgtattctcctttcaattaataagcaaatagaacatcataatcctcttttaacctcccatccctaatcctggtccctttcctccttcccagttgtaaccannattcctttcattatcgtcnttccagaccttttctcttccctt

SEQ ID NO: 721 - DNA, 212 bp, Homo sapiens
gggaaattcctaattgtgtgtgtgcatgtttgtacgtttggaagggagtggagaacttttaaaagtttttcttctggagttttgcaaatgtttccaaattgaggaattttttttttttaacccttgggtccccgcctccccactgctctctccaccccagtgactgctccttggccttcttgtgggtccccacaccttctttaacacagcca

SEQ ID NO: 722 - DNA, 807 bp, Homo sapiens
agcagacgcgccaccgtgacgcgatcggagtagtccagacgctgattgccaacaatctggtaatcttcatggcctttgcccgcgaccagtaccacatcattctctttagcctgcataacggcgcaagtcaccgcttcagcacggccttccatcactttggcatgtccggcatctaacattcccgccagaatatcgttgatgatggcacgcggttcttcggtacgcgggttatcgtccgtcaccaccgccacgtcagcaaactcttcggcaattgcgcccatcagtggacgcttacctttatcgcgatcgccaccacagccaaagacacaccacagcttgcccgcacagtgcagacgcgccgcctgtaaggtttttccagtgcatccggcgtatgcgcgtaatccaccaccaccgtcggtttgcctggcgcagtgaacacttccatacgtccgcaaaccggttgcagacgcgcggcggttttcagcagatcagccagtggatagccgagtgccaacagtgtcgccagcgcgagcagcaggttgctgacgttaaaagcgcccatcagatggctttcaatttcgccatcgccccaacttgagctaaagcgaatcgtcgcaccgctgtcgtgatagttcacttcggtcgctttcaaccagcgtccgtgacagttcggattaatatgatcttccattgataccgcaaccgcgtccggcagttttgccagccagcggcggcccacttcatcgtcggcgttaataatcgcctgaccgcaattgatgcccagaattaaagcagcccgggggttca

SEQ ID NO: 723 - DNA, 989 bp, Homo sapiens
  SITE (5): n equals a,t,g, or c
  SITE (32): n equals a,t,g, or c
  SITE (952): n equals a,t,g, or c
ctgtncccactcctcatccagcgggttggcangaaagcaaataaggggaaacatttttaacattccaagcaagagaaggaagaacgactattgggaggaggtacacccagagattgctcagtgtgcagcctgctacctcacttttggctctggattgcctggtggtagaagggaagagtattatgtcagttagcaccttacatatttgatgctcaggaagaaagtgcaagaagatccctaatagaacattaaagattcttaaaagtttttgaagtaggctgcttggggtgaccagccccacccttacatctccatagttggtacagttagcttgtagcagctgaagctgatgcctggagatcactgtctgttggtctgatctcagtatcatactgagacacctcccctgagccttacctacttaaattggtaaccgtcctaccaaaatttgtcaattttaatcaagtgaggcaagttgcaagggagccagagatacgtgaaaaaagaaaagcagaaatactgatactttctaagaaagaagttgtaataatttctttggcacattgacttactgatatcttttgaaatgcatagaygactcttgtgaaccaaagagagcagtagtggttattccccggcgcaataaaaatgcctttgtgtatcacttgcgattgccagtcatttctgtgccagttgctttcattccagagaatggcctcattctccaaaaaaagatgatgattttagaagtaggatttcctaacaaattatgtggtggggagggacggcggggattttattcatcccgtctgagctcttcatacagtattaccattaggttttaagaacmaagatgggggakgarggagtagaaagctgagagtacgtagaacagctacaagacattagtgggtattcagawtttgagcygtgtaaatatcmaacatcggcnttccagcccttaagaggtattttgagcccaagaggtt

SEQ ID NO: 724 - DNA, 462 bp, Homo sapiens
  SITE (424): n equals a,t,g, or c
  SITE (435): n equals a,t,g, or c
gaataccgccgtggttacaagttctccacttacgcaacctggtggatccgtcaggcgatcacccgctctatcgcggatcaggcgcgcaccatccgtattccggtgcatatgattgagaccatcaacaagctcaaccgtatttctcgccagatgctgcaagagatgggccgtgaaccgacgccggaagaactggctgaacgtatgctgatgccggaagacaagatccgcaaagtgctgaagatcgccaaagagccaatctccatggaaacgccgatcggtgatgatgaagattcgcatctgggggatttcatcgaggataccaccctcgagctgccgctggattctgcgaccaccgaaagcctgcgtgcggcaacgcacgacgtgctggctggccttgaccgcgcgttgaagcaaaattcctgcntatgcttttcnaagggggggggcccgggtacccaattc

SEQ ID NO: 725 - DNA, 281 bp, Homo sapiens
  SITE (262): n equals a,t,g, or c
  SITE (269): n equals a,t,g, or c
tggtgaaaatacagcggctacaaggtttaaccacatcaaacaccacatcaccaatgcgaatcactttccagcgatcttcttcccaggctgacgcgccggaaaccaccagattggggcggaattgctccatttttamamtggccggracaacgttgttggagatcacgtaacgaggcttcgttagcaagaaggtaaggatagccatcagcaaatgacagaggtacagtgttgtggcgtttcaccgccgggtgcatttgtggcnccacccngcgttaattgca

SEQ ID NO: 726 - DNA, 472 bp, Homo sapiens
gttctgaattatttccaagagccctcttctccagtccctgtctcttatttctcaatccaaacctcaccctctgacactagacccaaggctgctggaatttgggaatggacctgaatgcccttgaatttcagcagcctggtgcagtgggactgtgggactcgtgggacatgggactgtgtgttaaagcagcccagaggagcctggccctctctcatccccctgcacttttcccccttccctgaatcttcagttagggaattagcaaatttaccatctgcttctcttgtttccaggaggaaattccccgccagctccagtatatttgcctgtacctggtgcatatagctggagcatacctcttaaagtgagtgagaccatggagccagccagatttccttgcccttttatgtccatgcatctgtccacamaytcatataattatcaggsattgttgamawccctkgtgtgccta

SEQ ID NO: 727 - DNA, 515 bp, Homo sapiens
ctcgctcttaaataaatccttgcctgagcagcaaagttaacatgtccagatcaaaactccacatctttccccaaaacctgatttcccttctgtgtttccaaaggtgttaccactttccttactaatccaggtttaaaatcttggagtcacctttgattctgtttactaattgctcctaattaatatgattatatagtttattgtccaagagcctatcttcagtgcttcagtactgccagcaagggtgcatccagctatatgtcagaaggacctgtggcagattccagaaaaggtctccctataagaagctgctgtcctccctataacttatggcactgcgatttttgctcttgagcattgggcccgtacccagcctgggtaatatagctgctgctggaagtgacgagaagtgcaagctggcgatgcagaggggtgcgcagtccagcgtgaactacagtcagggcagcctgaaggatgcacctggcatgggagggcaggattgtggtggtgggatt

SEQ ID NO: 728 - DNA, 436 bp, Homo sapiens
  SITE (278): n equals a,t,g, or c
  SITE (302): n equals a,t,g, or c
  SITE (377): n equals a,t,g, or c
  SITE (432): n equals a,t,g, or c
tgagataattattcagggtttctccccacctttagtccattaataggttgaattaccttaatacaatttctaatgttgacttaactttgcattcttagaatacacccccacctggtcatgattcattttctctttttacattgagcaatcagtttttctaatgtttttgttgaggatatttttactttattttcaccggtcagatcaccatgtaatttttctttcttgtactgttctgtgtcatgttggtattaaggctttactcacctcacaaaagntttaggagagtgagaccatttgcngacgcgcggaaaagctggtgagaagaggggccgcagccgtgaatcccagcacttgggaagccgaagtgggcgganccaggagtccagagatcaggaccagccggccggcacgtggaaccccatctcgacnaaaa

SEQ ID NO: 729 - DNA, 456 bp, Homo sapiens
  SITE (393): n equals a,t,g, or c
  SITE (394): n equals a,t,g, or c
aacaaaaaatgaaaatttagtaagatgaatagccttgctttatgtttatacatctcttaatgtttggcttaatagaagactgctggattcttacatatgcttctgcattcattctgttgcaatatgttgttctgactgaagtgtatgaagaaaatgggcattcacacagacacgtattggaaaaggaagacttaaatggctttttcaaataactgtggacatttttctttgatactacaccaaaacttaacaagtggtagttttttaaaggttaactataacatagactcaagccatactaatgaactttttgtggcattatattaacattcactggtttatcatgcatgtagaatggactttcagccatgcataattttgtaatatcacatnnaagtcatttgaaaaatgccagttcactgagttatgcagaacttctaaacattggctcgtgcc

SEQ ID NO: 730 - DNA, 1545 bp, Homo sapiens
  SITE (364): n equals a,t,g, or c
  SITE (424): n equals a,t,g, or c
  SITE (435): n equals a,t,g, or c
gtttcgcctgtctgaatgaagtcgcgcagccgggcgttcacgaaacgctggatgagctgacaacacgtctggcaaaaggtctgctggaagcggcagaagaagccggaattccgctggtcgttaaccacgttggcggcatgttcggtattttctttaccgacgccgagtccgtgacgtgctatcaggatgtgatggcctgtgacgtggaacgctttaarcgtttcttccatatgatgctggacgaaggtgtttacctggcaccgtcagcgtttgaagcgggctttatgtccgtggcgcacagcatggaagatatcaataacaccatcgatgctgcacgtcgggtgtttgcgaagttgtgatccancatggtttgtcggatgcggcgtgaacgccttatccgacctacaattcggggccgtttgtnggcccgataanacgcgccagcgtcgcatcgggcatccgttgtcgcgtaaacgctttatccgtccaggcgtacagggccgttatatggaraaattaacggctctgctttctcaacaaatagataaaatatggcgcgccgataaaggttgacagcagccccgccgggatctggaatggaaacagcaccatccgcccacaccagtcagcgaacaccagcagtaaaccacccaccagcgccgaaattacgatgtgtggcatcgtccgtcgaaagcccatcatccgcgcaatatgcggtgccattaaaccaacaaaactcaacggtccaatagtcatcgtcgcggtcgccgtcaggcaagccgctaacagcagcagcgcaattcgcgtcggcgtcagcgccattcctacggctcgggcggtatcaccacccagcggtaaaatggtcagccagcgcggsacagcggggtaatcgcagcaaaataccatacaattccggtgcgccagacctgcgcatcggtcgcgttgtaggtcgaaccggaaatccaggtcagcacttgcgccattcgcgggtcaccacttgcctgcaacatcatcaaaagcatggtgaacgcggtgcttaacgccatccccgccagtaacatacggtgtggggaaaatccaccgcggccggcggcgatcataatgatcaacagcgtcaccgscgcgccgagactgcctgcaggtaacagccagccaaaggcattacccggcaccagaaacagcatcaacaccacgccaaacgccgcgccggagctaatccccagcacttccgggcttgccatygggtttccggtcagtygstgaataatacagcccgcmaccgccagcatgasgcccgcaaacagcgccgccataattcgcggccagcgccagggcattaaatcctcgagcaacgccccgctcgcccacgtccagccgtgcgcatcacgaccaaacgacagcgccaccaccacagccatcaacagcagcacgccgcccgcgagggcaaacgccagcacatgttggcgttcagccgcgacacgatcgttgaccttcatatccggcgcgctaatgctggtaaacgcggcaacagccacagtagcagcg

SEQ ID NO: 731 - DNA, 385 bp, Homo sapiens
  SITE (338): n equals a,t,g, or c
  SITE (360): n equals a,t,g, or c
taacgcgccaatgcggcggacgaagcggctgttaaagatggtcatcacgaacagaaaaacaatgtttagcgcaaagtaatagccaaagttttccggcgcgacgtggttaatttcaatataaacaaacggtccggcgcttaagaatgagaacatcccggcaaagctgaaaccactggcaagcatgtagctcaggacacgtttatggcggaacagcgccgcaaagttaccaatagtggtacgaatgtgaaatggctgacgacgctccggtggtaaggttyctttaatcaggaagaaatcattgccgaagccagatcgccgytaatgccagrtccagaagntgtaatgccagttcagccacancagcacccagccgccaattttcgtg

SEQ ID NO: 732 - DNA, 234 bp, Homo sapiens
  SITE (209): n equals a,t,g, or c
  SITE (221): n equals a,t,g, or c
tgctgaccatctggctgggttacgcgctgttttacttcacgcggaaaagttttaacgccgccgtaccagaaatccttgctaacggcgtgctcagcctagcgatatcggcctgttagcgaccctgttttacattacctatggcgtgtcgaagtttgtctccggcattgtcagcgatcgctcaaatgcccgttattttatggggatagggnttatcgccacgnggcattatcaaca

SEQ ID NO: 733 - DNA, 403 bp, Homo sapiens
  SITE (280): n equals a,t,g, or c
  SITE (354): n equals a,t,g, or c
  SITE (364): n equals a,t,g, or c
  SITE (394): n equals a,t,g, or c
ggcacgagcccattttcccctcccagccactaaactgttttctgtcaatatggatacgtctatacttctatatggatattctggacacttcatggacttttctgtctagtttctttcacttagcataaagttttcagagttcatctgtgttctagcatgtgtactacatgccatttttggttgamtaatattccattgtgtggatataccacatttggtttaaacattcatcagttggtggacatttgggttgtttccactttttgactattaataatantactgctggccaggcgtggtggctcatgcctgtaatcccagcactttgggagggcccaggcgggcagatcacgnggtcaggagntcgagacccatcctgggttaacatggtganacccccgtc

SEQ ID NO: 734 - DNA, 317 bp, Homo sapiens
  SITE (194): n equals a,t,g, or c
  SITE (195): n equals a,t,g, or c
  SITE (293): n equals a,t,g, or c
ggcacgaggtttgaggctgtagttagctatgattggaccactgcaccccagccttggtgacagagcaagaccctgtctgtaaaaataaaataatgaaaaaaaaaatttttttttaatttgcagactggatgtggagagtaagagtaagaggggagtcaaggattactaaggtttttggcctgatcaactgaagnnttggagttgctctaactgagatagggaggacctgggaggagcagggttgagagggaattaggagtttggctttgagcatgtttacggttttagaggtntagtttccaggaaggaagtcgtgg

SEQ ID NO: 735 - DNA, 547 bp, Homo sapiens
  SITE (409): n equals a,t,g, or c
  SITE (546): n equals a,t,g, or c
cgttcgacgacaccctcggctcgctcaccgcgcgcccgggcttcttacggctctatggcaacgactcgctcaattcgaccttcacccaatcgaccgtggcgcgccgctggcagcacttcgccttccgggcagaaacgcggatggagttctcgccggtgcacttccagcagagcgcggggctgacctgctactacaacagcaaaaactggagctactgctttgtggactacgaggagggacagggtagaaccatcaaagttatccagctcgaccacaacgtgccgtcgtggccgctgcacgagcagcccattccggtgccggaacatgcggagagcgtctggctgcgggtggacgtggatacgctggtcttaccgttacagttattcgttttgatggcgagacgtggcanaacgtgccggtggacgtattgaggcgtggaagttgtcgggacgattacatcggcggggcgcggttttttcaaccggcgggttttttgggcctgcaattcggaggacattaagcggcgacggttgttaaggggatttng

SEQ ID NO: 736 - DNA, 555 bp, Homo sapiens
  SITE (518): n equals a,t,g, or c
tcgagttttttttttttttttttcctttatcatcttccagaactttctgccagcagcctgcgtgcatttcttttgcaagcagaaggcagcccttttttttttaatgttagaatcaaagagccggtttctttctgtctttgtcaggaggatgcggtacggtgaccgggccccagggctgcaccgaccccgttttgtggggacagacgtgggcagagtggctgagataggaggggaacaggtgccctcgggctggggcagggagagggcactgccacgcaacgccctgatcattctattctgtcgcagagccgtgggcaggaccccctcgggcaggtgagagccccaggtgagcccccccccgcctcacctggcatgtaggccggggaggtgaccccacccgcaggtcacagacacgggtgttcttacgggaagcccggagcgtcctgcgtggcgaggtgcccggggaaggcggcggtggggggtggatcggcagaaacaagttgtgttctgaggcgcancgcctgtgatgtgggagccgggcgcccggggtttgca

SEQ ID NO: 737 - DNA, 550 bp, Homo sapiens
  SITE (407): n equals a,t,g, or c
  SITE (520): n equals a,t,g, or c
  SITE (537): n equals a,t,g, or c
ggcacgagccagaggcacaagctgtgtcatagggtgatgcacttctgaagcagtcactcggaatgggaaatcagaaaggaaaccagcctggagcggctgaggcttcacttttgtgcagtggacacaagcgcagaggtgatgaccggggaggacctgagatgcctgagcgcacgcagggctcttggccsggaggtgatcagtcagcaagagcaatgttctcagccacgttgtaaaagtagattttaagtaagtttattatgataaacactacgaaggattaggtaacattttggactctggagtgtactgatggttctcatcctaaactccactttatttttctttcaaaatttatcctcctactgtcattcccaaactaaactccactctaaaggggaggtggcgangtttctccctcccaccgcgccctaagccctcctcctctcgtctgcttgacacctccgttcacccacagcataagggaagctgttggccattgaaccgaggggcagccctcgancaagcccatagggatgntagcagaccaatg

SEQ ID NO: 738 - DNA, 552 bp, Homo sapiens
tgtgtctttaatactttattgaattttattttatccattcctcagcaggtctgaattattgtggtaaccttcaacatgcagaaacatttgtctgtggcaataggatcctttaggaataggatcctttaggaataggatcctgtggcaataggatcctttaggaatatgtagacacgttgctttagtctgctaccagtcattagccacatatactatatcactccttttctctaatgtgctcttgtaatctcctatctttccttctttaaaatgtttttaaaattttgtaatgcatgggtttgcagtttcaggaattagtgacattcagggatgtggccatagacttctctcggcaggagtgggaatacctgggaccctaatcagagggacttatacagggatgtgatgttggagaactatagaaacctggtattcactggggaggacattccatttctaaaaccagttgtggttggatttactgggagcgaggaaaagagcccgggatgattttgagggaagaaacacagtttcacagagatgggggtcttt

SEQ ID NO: 739 - DNA, 1589 bp, Homo sapiens
gatttccagcttaatcatcacctgatgaacaaaaataatgactaaacctaatcatgagcttagcccggcgctgatcgtgctgatgtctatcgccaccggtctggcggtagccagtaactattacgcccagccattgctcgacaccatcgcgcgtaacttttccctttccgccagttcggcaggctttattgttaccgccgcgcagttgggctatgccgcagtctactgtttcttgttcccctcggtgatatgtttgaacgccgccgcctgattgtctcgatgaccttactggcggcatgttgattaccgccagcagtcagtcgctggcgatgatgatcctcggtacggcattaaccggtttattctcagtcgtggcacaaattctggttccgctggcagcgacgctggcttcaaccggataaacgcggcaaagtggttggcactattatgagcggtctgctgttggggatcttgctggcacggacagttgccggattgctggcgaatctcggcggctggcgcaccgtcttttgggttgcttcggtgttaatggcactgatggcgctggcattatggcgtggtctgccacaaatgaaatcagaaacccacctcaactacccacagttgttgggttccgttttcagtatgtttatcagcgataaaattctgcgtacccgcgcgttgctgggctgcctgacctttgccaatttcagcattctctggacctcaatggcctttttgcttgccgctccaccttttaactacagcgatggtgtcattggtctgtttggacttgcgggagctgccggagcgttgggcgctcgtccggcgggcggttttgccgataagggcaaatcgcaccacaccacaactttcggtctgctgctgctattactttcatggctggcgatctggtttggtcacacttccgtactggcgttgattatcggaatcctggtgctggatctcaccgtgcagggcgtgcatatcactaaccagacggtaatttatcggatacatcctgatgcgcgcaatcgcctgaccgcaggttacatgactagctactttattggcggtgccgccggttcgctaatttcagcctcagcctggcaacatggcggttgggctggcgttgtctggttggcgcgacgattgccctgcttaacttactggtctggtggcgaggttttcatcgtcaggaagccgcaaattaagcaatcagcaaccgttttcgtggctttacacttataagggtgttaagaagcccatcagtctgataaggttaagatattcattcagtctatttataatattaacaatcgttaagcgtacactctatggaaagccctactccacagcctgctcctggttcggcgaccttcatggaaggatgcaaagacagtttaccgattgttattagttatattccggtggcctttgcgttcggtctgaatgcgacccgtctgggattctctcctctcgaaagcgtttttttctcctgcatcatttatgcaggcgcgagccagttcgtcattaccgcgatgctggcagccgggagtagtttgtggattgctgcactgaccgtcatg

SEQ ID NO: 740 - DNA, 433 bp, Homo sapiens
  SITE (397): n equals a,t,g, or c
  SITE (411): n equals a,t,g, or c
gcagatataaaagagagcatggagaatcctcaagccaaatggctaaagtctccaactacacctattgatcctgagaagcagtggaacctggcaagcccctcagaagaaactttaaatgaaggagagattttagaatataccaaatccattgaaaagttaaattcatccctgcattttctacaacaagaaatgcaacgcttgtcacttcagcaggagatgttaatgcagatgagagagcaacaatcttgggtgatttcacctccacaaccctctccacagaaacagattcgagattttaagccttctaagcaggcaggcctgtcatcagccattgcaccattctcctcagacttcccctcggtcctactcacccatcttccacaagtcttcttaacanggaaaagtgcatcnttttcctggttaaagtcaaagg

SEQ ID NO: 741 - DNA, 545 bp, Homo sapiens
gttctctcattcattaaagttgcattaaataaagtataattaggtcactatggaaacagagttttcagtaatgagtggacagtaagtggtggctctgcagatggcccctttctaataagtttaataaacccgaaattactggttatctcgtctccaatcagttctttcaaatgttttatttttccagtaattacgtttgggtcataggsccctctgaccattgtcaggtaattttcagtcactttcagrtaataagrcttwgtcctgagtccacttctccacttaaaaattcctatttcatatttgactcaacccttacctgctgtctccagtactagctgggattaggacacagggcgggtggtaggatgcacaggtaaagttctgtcacaggccttccttcccactctcccattttgatgaggtgcattggccttccccttgttggaacttgttactttgccagcaaacaccccactagaaaaattaactctaggccgagcgcagtggctcacgcctataatcccagcactttgggagtccga

SEQ ID NO: 742 - DNA, 308 bp, Homo sapiens
  SITE (92): n equals a,t,g, or c
  SITE (95): n equals a,t,g, or c
ctgcaggaattcggcacagaagaaatggtaattccagattgtgcagggggaaacaaatctattttgttttgttttgttttttgagacggatntgnccctgtggctgggctggagtgcaatggcgcgatcttggctcactgcaacctccgcctcccgggttcaggggattctcctgcctcagcctcctgagtagctgggactacaagcatgcaccaccacgcccagctaatttttgtagttttagtagagatggggtttcaccatgttggccagatgatctgaatctcttgacctcgtgatccgcccac

SEQ ID NO: 743 - DNA, 484 bp, Homo sapiens
  SITE (15): n equals a,t,g, or c
  SITE (26): n equals a,t,g, or c
  SITE (103): n equals a,t,g, or c
ccccctgtcctacancagcaggtggnaaactggcccccctgttttattgggagaacacatgcccccatttggtttacatattgccctgtggttgctttgggcncttagagtggttgcaacagaaactcctatgyccccagaaggcctgaaatatttaatatatggcctttaagaaaaagtttgcagaatcttcatctatgtaaatagcatttaaaagtacaacattcttgatagacatacagggccgagaagacatacagggtcaagaagctctgtcagacaggcctgaaatccacgtggggcaagtcatttaacctttctgccacagttttttcaactgtaaagtagagattgatagtatctgttttttaggattcctgtgggattattaagagataaggtatattcaagatctggcaatagaatataatstatttttttcawtcaacagttagaaataaatgtaacagacttttmgtttcct

SEQ ID NO: 744 - DNA, 245 bp, Homo sapiens
tgaatattgatgtgtcagcaacagcggttttacaaggcacagccagtaatcgagtttgtttgtgaagttttggattttaaaagtattgaagaacaacaaaaacctctgacagattccaaagggtaaagtttaccaaagaaattaaaggtctaaaggtggagataacgcactgtgggcagatgaagaggaagtaccgygtctgcaatgtgacccggcggcccgccagtcaccaaacattcccgctg

SEQ ID NO: 745 - DNA, 408 bp, Homo sapiens
  SITE (21): n equals a,t,g, or c
caggcgcaagcattgatgacnttatacagtctgtggagcaccacaacataagctttagaagtggatgcatttggaactagaaatggcacaagatgacccatcttataatggagccatcacagtgtgttgtaatgaaaagaattacagcttttcgttagcatgcaatgccaaaagattgaattgcttcccagttcttatggacattgttagtaatgggctacttggaatggttaaaccatcagtacatatccgaactgaaagaagtacatttttggaggtaaatatatataatcttacaattcctgactctcctctatcaggaatctcccagatcacccttttaagtgctggaatcttgtttttattgagtaaaccactgcataataaattaacatttggactcattct

SEQ ID NO: 746 - DNA, 557 bp, Homo sapiens
  SITE (471): n equals a,t,g, or c
  SITE (483): n equals a,t,g, or c
agttgcaaattaattgccaggctgttttccttaagtaaattcatgtgccgtgtagaaatatgcagatatgcattacacaggcacacacagagagatatttaatatgtggaatatcactctttcatgagctttattccttgattaatttgataaagcctcacagaggattttaagcaatatttaaatgtgttgaggttatgtttggatattcctgctgcctcttttcattcatttcaagtcattcttcagctagctatgggctgccttattgctattcgctcactgcttccatcttctgcccaagtgagaagaatagatgaagaacagaaatttctctgtgaaatgtggatacccgaataatttcataaatcattgattctatgtggtggtttttgtcttcttctgtggtgaatcttcaaaactgtattcaggactcatatttctagagttttaattggggtcctctattgncaattgtagtantgaccagagtatcgtggtttttgccatcagataattaaggctctggtgcataatttaaactttctaagcttctg

SEQ ID NO: 747 - DNA, 642 bp, Homo sapiens
gtttaaattccaagtgtgggatggaaggtttggggtattaggcaattgataagctgtgtgtttttgcatttaagctttaataatggaaagcgcccaaaaccttttctttttcagaacaggaaaagctaagacttagtctcacccctcttctgactttttcaaaacagttttctaattccagagaagagcctgagctctgagaatcattctcctcatcttattttccataactttgtcctggaaaatgcagtctgggggaaagcattttaaatagtaatcatctgagtctagtccagaatttggaatccaagggcaggcggatactttgtcataaacaggagcaataatacgtagataatgcagtcagtggaggaaaagtctggcgctgctgtggctctgactgctcctggattagttactagaccaaatgctgcaaactggtccattgctttgctttgagcaagcaccttattttatttaacccctgcatatacacttaagacattgtatccacatgtttctaattcatttacacttcactcatcagcatctgttgggtaagcaccctgtcacctccaagttttatgagctgtgtttactaggctgcaattcttgaacagggatatcgtatcacccacaaaa

SEQ ID NO: 748 - DNA, 637 bp, Homo sapiens
  SITE (3): n equals a,t,g, or c
  SITE (498): n equals a,t,g, or c
  SITE (546): n equals a,t,g, or c
  SITE (592): n equals a,t,g, or c
  SITE (630): n equals a,t,g, or c
cgngcaggaattcggcacgaggggatgggtagtctcaccagagaatgtggagctttcagactctccttatatatgataaaaaggatttttcattgtagtggggaaaaggtggtttgatcaaatggcattgggaaacttagctcactggaaaaacagatctgtacctttcacactaatgaaatgcctgagatattaaaggtctaaatgtaaaattaaagtacatgaaaaacagaataatatatatgtaccctcggtttgaaatagactttaagcactaatgcataaccccaaagctgacattaggcttttatatggtggaaaacatcatagtcaatagataaatgagagactgacacaaagtgtttgcaacagatataataaaggactgtaattccgtgatattcaaagtactattacaaaccaataataatctgcaacttagaaaaatggactaatgtcccattcacaaaagatgcaataaaagcagttaatgaaaanttatcccatatccctagaaatccagaaatgccaaattaaggtgattancaccttttcccccaaagactgaccaatccgagtgataccattccgnaattgggtgaatgttgtggaaccaaggggattcccttngttgatt

SEQ ID NO: 749 - DNA, 451 bp, Homo sapiens
  SITE (24): n equals a,t,g, or c
  SITE (27): n equals a,t,g, or c
  SITE (422): n equals a,t,g, or c
  SITE (449): n equals a,t,g, or c
gcggtgcggccgctctagagctgnggntgcagccgggctgcaggaattcggcacgagcacggcagcaaggacggactcgttstgaaggcgccymcaccttttatgaccacctctttcccagattattcgttttgatgaagctaaaattttaatctaaaaagaaatgcacctcatggagaattcttgtgaagaactgtgcttcatctgtggatttctacacccttgatcatttgcaaacctgtaattatttcgtaaagagttgtttgcacggakacaggttgaagtattgtattttgcaaaaagtgctgaaataacaggagttcgttcagagaccatttctgtggcctcaagaaataaaagcgttgcagctgtggaaggagatagaaactcggacatccggggattgggcggatgttaagaanccaggtaaaaattggccgttcgtccanga

SEQ ID NO: 750 - DNA, 330 bp, Homo sapiens
aaacacatataaactaaaataaatatctaaaatgctgaattgccaagacctgcaggtacctcaatgttagagcgcttccaaaagtcaaaatactgtgaattttaaggaattttacaaatactgacatttaagtagttgactggcatttttgtccacctttatttctaccctgagtggggttattttcaaagggaagtgtctttcaataagcctttctttgtattgtcagtcttaggcaaatgagagccctttagataaaaattatgtaaaatatgtgccatataaaggaataaaatggcacctctccagggaaagtgtcagtgaaacctc

SEQ ID NO: 751 - DNA, 335 bp, Homo sapiens
cgggggtgcagtcgcggcccattatctgtgcccgggaagtcctgaaggctctaggagctgtcagattaaacccccagacccacaagaaaatccctgaagcttcgttgacttttgctgatggagcctctctgaagggcaaattcaaagtacagctgggtgctgcagcactgsgagtcgagacttgtggctgtggttatgaaggagcctcgtcagctatgcctttagcccctggtgaagcagtgccagtcacactttgccagtcaaacggagaggcagcagtagtaagaccagaccaaatcaaaccaaaccaagcaaaccacggggaatggagacac

SEQ ID NO: 752 - DNA, 966 bp, Homo sapiens
ggcacgagggattatcaaaattgtgcacaaaaacagagcacaaatgctaacaagggacagagcctttgagagcactctgaaatcttgggaagataagcagaagtgtgattctggtaaaccagttctccgaacccatttgtacatccatcacgccattgacttggcaacagaagaggtgtcgcagatgcagctatgctcccaggctgcagaggagctcattactaggatatgtgacgcagccacaattcactgtcttttggagcaagaactggcccatgctgtgaatgcctgctcccatgccctgaataaagccaacccaaggtgcccggagagtcttacaagagacactgccactgaaatagccatcaatgtgaaggcgctgtataatgaaacagaatctttgctagttggcagggttcctttgcagctggaatcgccacatgaagagcgagtatccaatgccttacactctgtggaggtggaattacagaaactgacagagattccttggctttattatatcttacacccaaatgaggatgaggaacctcctatggattgcaccaaaaggaacaacagaagcaccgtatttcgaatagtgccaaagtttaaaaaggaaaaggttcagaagcagaagacaagttcacagcctggatctggggataccgaaagtgggtcatgtgaagcgaattctccagggaattaaagagcttggaaggagcactccacagtcggaggtgtaatcatattggtgctatttcttggaagagaagttattgccacttaatacaaagtccttggaagcaagtggctgttcttgtagttttctgcatagataagtaagcaccactgaagcacctctgtggcttgatattttgctgtgggtgaaattttgatttgaggtattagaaaatatttttgtgccgaacaatacattccacaaagccaaaaaaaaaaaaaaaaaaa

SEQ ID NO: 753 - DNA, 332 bp, Homo sapiens
  SITE (282): n equals a,t,g, or c
  SITE (332): n equals a,t,g, or c
ataattcatgatagaatatcactatgtgctttggaagacactgaggaaagacaaaaggtcattgggcagaaccaccctagattgamtgttaagccatcttctagtttgcaggacttgtggtagacagacagaataatatcctggacctcttgggtgtatacaggacaaactgaaataaactctcatttttagatcataatgtcatcatgaaacatatcaattcggtctattttctgaagaaaacaagcacaatgataaagtttggaatgkttgtctcctccnaatctcaagccggacattttgatcccccatgtttggaagttgggggcccn

SEQ ID NO: 754 - DNA, 757 bp, Homo sapiens
  SITE (646): n equals a,t,g, or c
ggcacgaggaaccttgggctgaacccgcccctccatcgcctctaatggaagactggttagggctgcggagttaggggtggcgtagattggagatgcttggctagtggaaagaatggattgccttccggcattagagaaattagattggcaccttgttttcttgctcggttggatccgtgatgttatgtcctcacagctcatcgactatgggaagctgggagacactaacgaacgagccatgcgcatggctgacttctggctcacagagaaggatttgatcccaaagctgtttcaagtactggcccctcggtacaaagrtcaaactgggggctacacaagaatgctgcagwtcccaaatcggagtttkgatcgggccaaratggsaktgatcgagtwtaaagggawttkcctyccamccctgcctctgcctcgcagagacagccaccttacactcctaaaccagctgctgcagggtttgcggcaggacctcaggcaaagccaggaagcaagcaaccacagctcccacacagctcaaacaccagggatttaactggatctgaagagtctgcagcccttaatcagtacccatgatcacaggcctttggagcacttttactctctgagaagaactggagctagagatgtnaaatggacagtcttgatggggttgagaaccttctgggagcagatgacctctctttgcacatagataaagctttatatgaatatatataatttattaattttcctcctgtgg

SEQ ID NO: 755 - DNA, 506 bp, Homo sapiens
aattaaccagctattggatcgtagctttaaagtttatatcaaaactgttgtttgcactcctgaaaaggttaccaaaagaatgtatgatagcttctggaggcagttcaagcactctgagaaggtatgtgcctattgtggcttatttactttgtaacttagcaatgattcgtagtctccttcacctaacctaatggtgctgaaaccctttccatcacccctaccaacccaaagaaaaacattccaggacagctgtctcaggtaccccttcagaagggaacctgattatgttgatagagtaaaagaataaagacagggaacacaggtgggctggcccgtcttcagaagtgctggcatggctgtcagcacatagaagactgttttataaaagctgtgtwtaggtagragtgtctgttctctttggaaacatctttataggaattactgaataatgrtttgggcagggggaagttrctattctgrtaaaaccakgtyttgggttttttttg

SEQ ID NO: 756 - DNA, 365 bp, Homo sapiens
  SITE (169): n equals a,t,g, or c
gagcagctgactaagatcgagccgggtgagctgtataacggcaccaaagtgaccaagatggaagatgacatcaaaaagcttctcggtcgctatggttatgcctatccgcgcgtacagtcgatgcccgaaattaacgatgccgacaaaaccgttaaattacgtgtgaaanttggatgcgggtaaccttttctacgtgcgtaagatcccgttttgaaaggtaacgatacctcgaaagatgccgtcctgcgtcgcgaaatgcgtccaratggaaggtgcatggctggggagcgatctggtcgatcagggtaaggagcgtctgattcgtctgggcttctttgaaactgttcgttaccgttacccaacgt

SEQ ID NO: 757 - DNA, 330 bp, Homo sapiens
agtgttttcaagggtatgatgaggtttgctacctcatgagtacaccattacaccattcttgggactgggcattgttataatccctttgaaaagcaatttggcagtaagtataaagagtcataaaatgtccatctcctgcaacgttttatgttttgaaaattctgaagtgcaattctragaagataatctaaaatgtgggaaagaaggccgggtatggtggcttatgcctgtaatcccagcactttgggaggctgaggcaggaggtttgcctgagcctgggagttcgggaccagcctagggcaacatggtgagactctgtccctataaaat

SEQ ID NO: 758 - DNA, 142 bp, Homo sapiens
  SITE (106): n equals a,t,g, or c
agcctatccgcagacgagcccgcgcccggccgctcagttttctgaagaaaaggatcagtaagatcagttatgggctatgatgaaaccattttaagtctctgttctntgccaagctccaaggtccatgtaaatctgatggtgt

SEQ ID NO: 759 - DNA, 259 bp, Homo sapiens
  SITE (241): n equals a,t,g, or c
  SITE (255): n equals a,t,g, or c
ggcacgagtgatgtattatccatgaaagaatatcgttggggcatagttcttaaaaratccaattgctttattactgagctactttctratttctactaattttraatattcactcgcttttttggtgtgagttaaattataatcacaactccttttccactttcaatttggattggaactttttgtttcattttctcagtttggtggagggttcatcaacctccagtatggatgtctgtgnaactttggatgttncaat

SEQ ID NO: 760 - DNA, 694 bp, Homo sapiens
gcttgtagatggataactgagttctacaggtagggatttgtctaggtcttaagcttgaggtaaccaaaagaggattagacttggattttcaagcctgtgtaaagcatgcactcataccctgtcctcagtgggatttggacatctttsctactggttgctggggggaagatgctgtgggtggaaaatggtatattagccaagtgactctcaatggaccattcatatattttctactccctagtaaatttatcttaacatattaagaaaacaaaatggttcgtaagtggttgtgcttttaaaatttatggatttagcaacattttacagatttcacttgtatgactgagttttcgctagttagatgaattgttaaaaatcttaaagaaacgaatgtatccwawagtmmyatmatttgaaaacaaattgtttttagtgttttgaatgaagcactgccaactcctcagcatagatcctcagacatacttttgagtaaggatgcgttattagaccctattactgaaaatatagttgaggctttaatatgtatattaatataaagcagaatgaaaattttcctcttttttttttttgtattccattgtataaatataccacaatttatttcttctcctggtgacagtcatttcagttattttcagtttgggactcttatgaataaagctacgatgaatag

SEQ ID NO: 761 - DNA, 376 bp, Homo sapiens
  SITE (308): n equals a,t,g, or c
  SITE (317): n equals a,t,g, or c
  SITE (375): n equals a,t,g, or c
ggcagagccaggctctgcgctcggtctcctctgctccacctcctccccgcgggcgtgcagctccgaagctctttggacctagcaggttcggcggccgggtttgctaaagctgccataacaaaatattatagagtggtggcttaaacaacagaaatttatttctcactattctggaggctgtgaagtacaagatcaagattctggctgattcagtttctggtgagaggtgccattcacatcaaatgtagccattttagaggtgtcaaaataaatcagccatatttaataaattccagttctactcttcntaccctgtnggcccaggaggcagcaacgttgggggtcaagggttcaaggcagtattttttcaggggna

SEQ ID NO: 762 - DNA, 464 bp, Homo sapiens
taagtctgaaaactccaaggctggctgataggctggaaattcaagcaggcattgatgtggcaatcttgagactaacggtggtctgggtgcagaattgcttcctctttgggaaacctccatcttttctctaaggtcttcaactaattggatgaagcccatccacattatggagggtcactagctttactcaaagcctactgatttcattgtaagtcacatctaaaaaataccttcacagcaacatctatgcttttatctgccaaacaactgggcaccgtatgctagccaagttgacacataaaattaactgtcactccatgggactagatgaaattacccaggagttaatgtatttagagaaataaagatggcccaggacagagccctggcacgctcaaactgcaaaaggggaaaagaatccagcaatggatgctaagaaggagctggcaggaggtaggaggaaa

SEQ ID NO: 763 - DNA, 315 bp, Homo sapiens
  SITE (236): n equals a,t,g, or c
  SITE (300): n equals a,t,g, or c
  SITE (305): n equals a,t,g, or c
cactttaaaaatgaactagtggatttaaaaccagggacccttgtttaagcgtgcatttttagcaccaaaatcggggccaggcacatgaaatccctcagttaagttgtttaatgaatgagtaaatgaatttccctttaaagaggcccccaccccaattaacggccaactgcagtaacacttcagggtttcaaccctgcttccttcctgctaggaggtgccatgtcattttattcaangaaaacaaaacggaaaccaaacaaaacagggcaaacacattttttaattaagtgccatttgttnaaatncatgtttaaa

SEQ ID NO: 764 - DNA, 339 bp, Homo sapiens
  SITE (265): n equals a,t,g, or c
  SITE (298): n equals a,t,g, or c
ttgaccactaataaaagaggtsccttaattgtgagtttraggttttwagagatctgtatttractaattagggagaacattcatccatggaagagccctacagccaaggtgaggtcagcactgtgggctgtggtgagatagtctgtacattctaacagtgagatacacaagatcctgaggaatagatgataatctgagttaaaactgaggaaagcctaaaccggggaacaatgcgagcactgggtctttgggtgcccactggggnaaaacaattggggtgcttttaaggacatggccncctgatgggtgtgttttccctgttttttccccttgctcagt

SEQ ID NO: 765 - DNA, 1589 bp, Homo sapiens
ggcacgagatcatatttaggaattaaatttgatgttgtcaaaggaatcataagaaactcttctcacgtgactattaaccttcatagcagtatggaaatggtatcagaattgaaatttttgaggaccagtgttggtatttgtggtaatagagatctagagaccccatctggccaaaaatagtttcttatgtcatgttttttgttgttgttgtgtttttttgttttttttttgttttttttttttgagatggagtcttgctctgtcaccactgcactccagcctgggcaacagagtgagactcctgtctcaaaaaataaataaataaataaatcaaaagacaagcgctttggtcacagtttattaaataaatgtatagatatattactgcagcccccaaaagttgtaaataactgttgtgttacatgagtggatttattttaaaattgtcttctccttgagttaaagctgcaaaactttctgttgttgttggctgggcacagtggcttatgcctataatcccagcactttgggaggctgaggcaagttcaccaggcgtagtggcacatgcctgtagtcccagctacttggaaggctgaggtgggagggtcacttgagcctagaaggtcgaggctgcagtgaactgtgtatatgtatgtgtgtgtgcatatatatatttatattttcatcattaccatatttgtgaaattcattagtatcaatggagaactaggaaaactaaggaaatttgataggaatttgtcatcagtgattgtgctgcacaatctatttcctttctgctttgcgaatttgtcatcagtgatggtactgcacaatctatttcctttctgttttgcactgtgtttagtgagccttaatatatatgttactggttacattctggtcatattgttaaaaagtagacaactaatgagcaccatatttttcacaaactgtattacaatgagagttcatataacactttctttactacagacttcacagataaggcaacacatagaatttcactgttcattagtacctaaacattttttataatagacattaatttttagagcagttttgggttcattacaaaattgaggggaaagttcagagaaaaaaattgctgattattttattaatagtgtgttgtagaacacagtatggagctttttataagttcctctatggggatatacatttataggtttatctatatggtacattaggcatcatttagaatatattagtatttaggccactaaatttgtacttttcagagctgagctctggtttgtaaataacttgtcacaagcaggattttatgcatatttatgtaattcttggatttacagatcttatccattttctcttaacattttaaggtatagggaaaaggtttcctaagtattgacatgcccaaatttggccatatatcagaatcatgtggagaagttattaaaaagaatcctggaaatttttatttaattggatttggatggggtgtaggctagataattcttcattttatcttttagaatccccattctagagtccaataacttccttattaaaaaaaaaaaaaaaaa

SEQ ID NO: 766 - DNA, 578 bp, Homo sapiens
  SITE (1): n equals a,t,g, or c
  SITE (521): n equals a,t,g, or c
  SITE (529): n equals a,t,g, or c
nctgccagcatgaaagctcagtgcccaggaatggtcctcccggtwcttagccytgggtcagggcatcttgccctggaccagcagccccagtttctaccaccttcctatgtggtttccttctcccaccctccactctccctctcctcttcatggccccctcaggtgtcaggtgggaggcttaaaggagaggggttatcacagccccaccctccatcatattgcatacccaaggggtcctttgcccccacacctggtcacaaggagataaatatggccagtcttgggtcaagctaaatgatttttttggataagactatccaaacccttctcaaggtaaagtcaggttctcaggcagctctctagcaaagctgacagataagcattgatgagggtattgctaagaaaaaaatgcaaaccctataaaacctgtcatatttatgggccttttatgtccaactctgctgttctctgttttctgcaatttttgccacttacattacacgaaaaacctccttagaaangcaggganctgcactgattttgttctgcattacttattatattttgtgcattgaaac

SEQ ID NO: 767 - DNA, 503 bp, Homo sapiens
gaattcggcacgagaaacattccacagatttttggatggttatatgctaatggtagagatgatagctcttaaatttgtggggctgctattttcttgttttctctagtttctcaagtcctcagaacagtttcaaatcaagaaaactatgtgtctctgtttactgaacatgaatatttggacaaaatttctggcataatatttgaagtgcacatttttgtgatttttaaagattatttagtgctaacttttaatggtttcttaaattttttgcaattattagctgctggatattatggaagtattttttttaatcatcagtggaaattttattcytcttagtctcatcctctccttcttcttcctagcccttcttacaaacaagtttgaggaccagtagcctttaagaaggaataagagtacactgataatgcaactgtttcttawcctaagatcaatattacgttatacaaatttttaaaattgaaattaggaattgaatttac

SEQ ID NO: 768 - DNA, 457 bp, Homo sapiens
  SITE (400): n equals a,t,g, or c
  SITE (434): n equals a,t,g, or c
gaattcggcacgagcagcgctgtgctagcaggaaggtctgtgaagtttgcaataaagccattatgaagtcaagaatggaggttccatttttaaagaactcagagggggtagatcttgattgacatctcatctggggtcacctggtcttcaactgagagatctttcggttcgccacggatgccccttgcagttatggaagttcactctctgagagagagataaataaacattaaaatgtaaagaaaaaaaaaatcagcaatggaaggaaaaakgaacaaaaagcaatccattggcgtcaagctttgactgggaccactccactggctctgctggccgtttagtggaacctggaccctggcagccaggagttccacagacttcaccatttcaccttcaagtnccttcaattccctggggacccttcaatttaacanatcactttggccttttaatttcc

SEQ ID NO: 769 - DNA, 393 bp, Homo sapiens
  SITE (361): n equals a,t,g, or c
  SITE (378): n equals a,t,g, or c
  SITE (388): n equals a,t,g, or c
gtacaataattttgtcagttgtgcattgcttatgatgaatgccatgaagaatacatattttttggctatcccacatcatatataactgtcaatcatacctgttcaaattctgattgtccattctgtataagatccttgcagattaaaggaagctttccaactactggaaagagagctgtggagctcatttctaccaatatattactatattaactgggaacattatgttactgtattaaattagaaccattcatagctgtctatttagtgacagagttccttcctttttttttcttttttttttttaaggaattaggtgaaggtaatggatttgtttctcttggctaggattgtaagggtnccatgatgggcaaaggnctatggtctngccct

SEQ ID NO: 770 - DNA, 386 bp, Homo sapiens
  SITE (364): n equals a,t,g, or c
  SITE (385): n equals a,t,g, or c
ggcagaaattggatgtagctatatagatccctatttctggcacagctgatagcaataaaggaagtcagaacacaaccccactctcacccacatcccactttgcaaaaaccatgacccaaatgcctctgtagatactgggctgtggactgctggcaaagcctcaggagcctttgctctactgagtgatctacctttagattgacagcagcggctgtggagtaacatctgaatgttgattgacagtgcagtttgtgggaattaaagcagggagggaaaccctttaaccagtttccatttcttggtgtcttaaagttttcatcttacttaargattcaaaccgttgtgtaattccagaggaagagcntcctcatcctgggaggcctgnt

SEQ ID NO: 771 - DNA, 366 bp, Homo sapiens
aatgagaggattttagggaatgtgtctaacctgcagcagtggaaccagggggaactgtgtcgttctataacagatcccttggtgtctttgttatagccagaattcagggttggatgaaccatattttcggacccattgtgatattttatttttcttgttctgttaatctggaatgttaggtgttaaaaggaagatggtagttgtaaaactagcaagacattttctaggactcctgactggtggcatgtggcatggcaaaaggagatagctcccttttctggctgtagggagacaactctcaaggcccagaaagccagcakggccccaggagccaccttgarggatkggaggcccmcatgagctacc

SEQ ID NO: 772 - DNA, 537 bp, Homo sapiens
  SITE (10): n equals a,t,g, or c
  SITE (34): n equals a,t,g, or c
  SITE (57): n equals a,t,g, or c
  SITE (72): n equals a,t,g, or c
  SITE (91): n equals a,t,g, or c
gcacttaggngttaatgtactagggatctttttngactttccgatcaactgttaatngccagtgataacttngctttttaattttccaatngcttctttcctctaaactttttatttcaacacataaagttgaaagaatagtacaacacccgtaaaccctccacctgcttcatctctttctatatgtctacatattttgttgttaaactaattgaaagtaacttttagtcattatgacattttatctctaagtactttagcacacatctccgaaaacaagacattgttttaccaatcagtggtaccattattacaaccaaaaagacaaaatagtagttatgtactatccaatattaaacgtttattcacattttgtcaattgtacccaaaatagctttttaactattttccccaaaccagaatccaaggcaaaatttaacatgttgtgttttgttaagtcctcttagtctctctaatggcttttgaagtttaatttctttagtcatcttayctgacttagaaaacttcatatgacct

SEQ ID NO: 773 - DNA, 251 bp, Homo sapiens
cgcgggatctcgagctgggatcgccctcytgggctwcggtgcgatcggcggcgggaggttccctgggaaccaggtggtcgaagggctgagctgtgtggccagacaagaggtccctgccctcccccagtgaagccctgctgttcccgtgggagccatgaagctgaacgagaggagtgtagcccactatgcactcagcgactccccagcggaccacatgggcttcctgcgcacctgggggggcccaggraccc

SEQ ID NO: 774 - DNA, 115 bp, Homo sapiens
  SITE (26): n equals a,t,g, or c
ataaaaaaaaaaaaaaaaaacccganttttttttttttgctatattggacagttaataggatccttagactgatatacttcatatttaatatttttagaaacaaggtaatcggaa

SEQ ID NO: 775 - DNA, 461 bp, Homo sapiens
ggccacgagtggacagtgacataaaaggcaatggaattttctataaacattttctcatgtaaacatgctgccaccttttcttctttctcagagaactcaaatttgctatagtttgtcatttttgcttacaaataatataacttttcaaccttctagttatacttatccaataaagacataatcgggattccatttgtgtaaaaactagggtggtaaccggaaaaaaatattgtcagtatttcaagctgtgttcctttcttagtttgatatggttacttctatgttgaaataaaatttaaaatcacatgcaaaaaaaaaatcagcaaaataataaaatgaacgaaaaaaaatgacacccagggagttcccaaccccagtgtaaatgatatttaccagtgatctagcatatgtaatcttttttaaaggtattgttaataaatattctgtcatttgtaaagata

SEQ ID NO: 776 - DNA, 988 bp, Homo sapiens
gtggacatcttttgttagagttatctttttgttttttgagggagtgtcactctgtcacccaggctggagtacagtggtgctcagtgcaacctccgcctcctgggttcgagcgattctcctgcctcagcctcccaggtagctgggattacaggcgcccaccatgatgcccagttaatttttgtatttttagtagagacgaggttttaccatgttgacgggggtggtctctaactcctgacctcaactgatccacctgcctcggcctcccaaagtgctgggattacaggcatgagccactgtgcctggctgatttttttgtgtgtgtgtgagacagagtcttgctctgtcacccaggctggagtgcagtggcacgatcttggctcactgtagcctcagccttctaagtaggtgggattacagaccagtgccaccacacccagctaatctttatactcttagtaaagatggcttttcaccatgttggccaggatagtctcgaactcctggcctcaagtggtctgcccaccttggcctcccaaagtgctgggattacaggcatgagccacagtacccggccctgtttgatttttttagtgctattataaatggaattttataaaaatttcagtatttgattttccttgctaatttatagaaatacatttcatgggctggatscggtggctcgtgcctgtaatcccagcactttgggaggctgaaggaggatcacctgaggtcgggagttcaagaccagcctggccaagatggtttagtagaaaccccgtctctgctaaaaaaatacaagaattggctgtgtgcggtggcacacacctgtagtccaagctacttgggaggctgaggcaggaggattccttgaacctgggaggtggaggttgcagtgagccgagattgcgccattgcactccagcctgggcgacaaggtgagtctctgtctcaaaaaaaaaaaaaaaaaaaaaaaaaactcgag

SEQ ID NO: 777 - DNA, 385 bp, Homo sapiens
  SITE (236): n equals a,t,g, or c
  SITE (377): n equals a,t,g, or c
tcttctgtgaactttcttgatgggggcagatgagatctttgtactgcattaagtggatagcgctcaggtcctttgggcttggcgctttggcaatctccaggcagctcactttggcctctgttcctggatcccctttgctcttttctgcgcctgcattcatagtccactgtgtgcagaggcatgggagttgtcatgttgggaacatgctagacctcagtatccttgagggatgctgncttgggtctggaaactgttagaggaaaccccaagaggtgcaggcactgagcctctcaggacaatgacctggggtccagttccctggaggggctcctcatgattgttttggggttgatcacagaccaagagtacgagtgtgnaacctgta

SEQ ID NO: 778 - DNA, 764 bp, Homo sapiens
  SITE (18): n equals a,t,g, or c
gttaaagtttgatgtttncagactctaaagcctatgtttttgtaacttaattggactttcagagtgttaaattatggcttcagagtttggctctacctaaaatttagttagatgccaaccagggagaaattaaacctaatccttcaccccaaatatcagaggttagacaaacccatgttaattggagccttatggttattcatattggaggcaatagctttatttagaggaagcccaggacagggccgtctgggatgctagttctggaaatgcagaagcagccactgtatccctgcccaccccctccatcmagcccttttggtactactcagtattgttgacaacatttgggaatcataagtaacataggacagtaagtattagagaatgattctccgttagaattggacctcagccgatttgagccaaaatttaggaactattcagaagacagtttctttcttttgagtgcttaagacagtgtaaatggttcgaatcacacacattttaagattccattgtatacataagcattttaagaatattgttttaacataattattaggcatactaagttatcatgaatgaaaatgtacatgtgacctgtagtatgttatatattattatggctaaatgttaaatgccatttttttgctttttagttttatgtatttttgtatgtatatacccacatttttacattgatttatgttctaaataataattaaaacaaagtattataaaaaaaaaaaaaaaaaaaaaaa

SEQ ID NO: 779 - DNA, 428 bp, Homo sapiens
aacaccaagcggacagtgaagtgtggatggatgaatacaagcaatactattacgctgcccggccattcgccctggagaggcccttcgggaatgttgagagcagattggacctgaggaagaatctgcgctgccagagcttcaagtggtacctggrgaatatctaccctgaactcagcatccccaaggagtcctccatccagaagggcaatatccgacagagacagaagtgcctggaatctcaaaggcagaacaaccaagaaaccccaaacctaaagttgagcccctgtgccaaggtcaaaggcgaagatgcaaagtcccaggtatgggccttcacatacacccaggcagatcctccagggaggagctgtgcctgtcagtcatcaccttgttccctggscgccccagtggtttcttgttcctttgcaaga

SEQ ID NO: 780 - DNA, 461 bp, Homo sapiens
  SITE (362): n equals a,t,g, or c
  SITE (373): n equals a,t,g, or c
  SITE (392): n equals a,t,g, or c
  SITE (401): n equals a,t,g, or c
agagtaagagatttccagtgaacatgtattctatgttttctttaataatataacatggattttaattcagtttatcagccatgccaatttatcagtctgctgaaaaatacttgaggttcatggtctgttgtaaattcaaagtgttcattgtcatattkgggaagtttggctcatcgtttagggcccattatgcttgcgtatggtatctttatcacctgctagacaattatactctgatatatttatataaacttgaagacaaattctagtcaacttataaagacaaaagccaatatcagacggtacatttaaaacctgtgaatcaaggtttgactttagtggccttttcaccaaataatagncccttttcctnccccctcagtttagcacancggtaatanaccttagagaggaccttcttcaacaccttcctccttggtgattggaaggcatatttctga

SEQ ID NO: 781 - DNA, 892 bp, Homo sapiens
  SITE (9): n equals a,t,g, or c
  SITE (29): n equals a,t,g, or c
  SITE (76): n equals a,t,g, or c
  SITE (529): n equals a,t,g, or c
  SITE (726): n equals a,t,g, or c
  SITE (805): n equals a,t,g, or c
  SITE (833): n equals a,t,g, or c
  SITE (842): n equals a,t,g, or c
  SITE (855): n equals a,t,g, or c
ggcggcganactagccaggcctctgccgnggcagcgactggcgctacctggggccagcgggggcggctggcactcnaacccggcctcgctgcctcccggcgacccgcagctcatcgctctcatcgtggagcagctcaagagccggggcctttttgacagcttccgccgggactgcctggccgacgtggacaccaagccagcttaccaaaacctgaggcagaaagtggataattttgtgtcacacatctggacaagcaggaatggaatcctacgatgaacaaaaaccagttgcgaaatggtctgaggcagagtgtggttcaaatacgccagacaccttttgaaagctaatttttggtgaagaaatggattcggttacataagagtgcaacttcagactgaagataggccaaggtcgtcactgatctcaagatttcaaccttgaccatgggcagtgaccagattgaaaggggagcaagttcggcagtkggagagttgaccgtgtcaccccctgcattgtgctgccatttgncagcctgtccaagggcatgacaccaagtagacactacagagagagaaacactacagcaacccagggttgtcctgaaacagacttttatacttgaacatgggagactgcacatggactttagggtttgtgctgtgggataaacgggagctacagtgagaacatagccagtcccaaagacaatttccaaaggaaaatgncagtaaagattagctgggagtagtctttgacagtgcttatttgatactggctctcagagttgcaaccagattgtccagncattagcgccgatagctttaaagttgtncctccttgnacatgaacctccnaccagttcccttccttggacgaacctggaccctgaat

SEQ ID NO: 782 - DNA, 289 bp, Homo sapiens
  SITE (200): n equals a,t,g, or c
ttgcctcagttattctctctgtaagatgggaagaatcctcctggccttatcccaactytccagctggactgggggaagaactataaaagctgagcaagaggtttttatgattttkgktttttctgctgctaccacccaccatgggcatgagacggtttggtttcctggcagcagagctgtgtaggaggttcagtctgttnccctaccacaactaaaacttttttcaaccaaacctgcctcggctggggaaggtacaggtttttcaacagagcggggaggtttactcggg

SEQ ID NO: 783 - DNA, 124 bp, Homo sapiens
  SITE (110): n equals a,t,g, or c
aatgggctagtaacctagtctttggagtcagataagcctgggtttgaatccaggatccacctcgagtggcacacggcaagttacccacttaccagcaccgccgtttcctngcctacctcgtagg

SEQ ID NO: 784 - DNA, 452 bp, Homo sapiens
  SITE (410): n equals a,t,g, or c
gaattcggcacgagaatccctgcagtatctaagattatgtccccactttttaaaaaattcttaacatttcttactcttccctctcccattttttttcttaattattcttgtcggacatttatattattgtctcttcatataatacattttggctttgctgtttctcacgaatttgtgttctgttttcactaatttctgttctttatcattttcttctttttagtttttaaggatttattctgctgtttttcttaatttcaagtcttcaagtattttctaatttcaaaacatataaatgataccaatttaaaatkgatcttgctctgtcatgcaggctagagtgcagggaagtgatcacagctcactgkagccttgacttcytgggctgagcggatcctcccaccttkgcntcccgagtagtkgagaatacaggkgcatgccatcatgcccaa

SEQ ID NO: 785 - DNA, 390 bp, Homo sapiens
ttttttttttttttwktsccatatwttatatacatttattacatyttaaaaacaattgkgacagtttccaattgttcaaaacaaatacaaatctgatcctcacattttcttggctgcaaacaaaggattttttaagttttctttctctattattttatagcctctgaaatattactgkgtttagaagtagttgttcttaaatgggtgctatgctaatgaaccaatgagacaaaatgagatagccgcaattgttagagtagycccagtcattaaacttaaatgtgtttggacctggagaatcattttctgtaacatgattccagatgagttcactagaactaaaaagatacatacaatgtaaagtgcatatacctaacgtcatagcctttt

SEQ ID NO: 786 - DNA, 311 bp, Homo sapiens
ggcacgaggaagcttctagattctaacagcagtttacaggacatatggaggtagaggaacatgtgaaactacaccatgaggatacagtcagccatattcattatgtggggaattacagagctgtgcttttcagtatggtagccactaatgtgtggcacttcaataaaatgaaaaatcaggctaggtgcagtagctcatgcctgwaatctcagcactttgggaggccaaggtgggtggatcacttgagggtcaggagttcaagaccagcctgggcaacatggtgaaaccctgtctctactaaaaatgcaaaa

SEQ ID NO: 787 - DNA, 224 bp, Homo sapiens
ttgggctggtgcgtctactttaagtctgagggtgccttgatgctggctcatcacacattgagtatcttgggcattatcatggcccttgtgcttggggagtctggcacagaggtcaatgcagtcctctttggaagtgagcttaccaaccccttgctacagatgcgctggtttctccgggaaacagggcactatcacagtttcactggagatgtagtggacttcct

SEQ ID NO: 788 - DNA, 612 bp, Homo sapiens
  SITE (547): n equals a,t,g, or c
  SITE (567): n equals a,t,g, or c
  SITE (598): n equals a,t,g, or c
  SITE (601): n equals a,t,g, or c
tcgagttttttttttttttttttggaaatggagttttgctcttgttgcccaggctggagtgcaatggtgcgatctcgactcaccacaacctccacctcccaggttcaagtgattcttctgcctcagcctcccgagtagctgggattacaggcatacgccactacgcccggctcattttgtatttttattaaagatggggtttctccatgttggtcaggctgatcccgaactctcgacctcaggtgatctgcctgcctcgacctcccaaagtgctgggattacaggtgtgagccactgcgcccagcctgcctatttcttttaaaaactcagaatcacatctcagaagttcaacttttgccaagttttgctgctctcagctttttttctgcttgagaaggcctgagatgatctttccttcagcttttttgccagctcctgtaactttctttcattcctctaattctaactattatgacctgatgctaaaatggaatwatcytgaaggkctagaaaagcmatgttttcctgtaggcataaacctggaatnccggacctttttgggctttnccttggaaaatggccaaaaaattttccaaanggnaatcccggaaa

SEQ ID NO: 789 - DNA, 572 bp, Homo sapiens
  SITE (5): n equals a,t,g, or c
  SITE (14): n equals a,t,g, or c
  SITE (70): n equals a,t,g, or c
  SITE (101): n equals a,t,g, or c
  SITE (143): n equals a,t,g, or c
atggnttccttggnaatggattcttaaatggaatccattcaccagggtttagattgtcctgggtactggnaagatttgtattaaaaaaaaaaaaacttttnccaaagaattctaccaagcaattaggagggaggcaaggttgnaataagttggacacagaaaaaaggaggcaaaataaaataacttacaaattatattagtgttaaatggaaacccaaaaagaattagctgaaagtacctgtctagtaagagttttataagagcctaattatcaaattattaaagagawrtaattttaatatatgccaagacaaatttgttagaraacaatggaaaaaaataaaaccatttactacaataacaaagaataaacttggccagaaatatatgtcatctatatgaggaaagctacaaaattctgagtgacttaaaaatcattaagaagtgaatacatttctgaaatgattaaaatctagtttacgagatatcaagtctcccagattagatttgcatcaattttattatccttgtgagacatgggtgggggtggggaggttgttcctgatcaacat

SEQ ID NO: 790 - DNA, 573 bp, Homo sapiens
  SITE (155): n equals a,t,g, or c
ctaattaaagattaatgtgttgtaattagcattaaaaatgcaattaaattgtgagtaaatggaccaggaatagaaaattgttagacgtctcactgcctggttttcatattctgccttttgtttttgcagcaaatagaggaagcggggcagccggncagctcccagactggagatgctctggggaaagcacttgcttcggtgaggaaatattgactttggactccatatgtaccattgtaaagggtgaactttaatcagaagtggacatttggrattttagaaatgratggcaawtagctttgatttttggaaaatgctagctttcttgcataacagtcactggaaaatttgagaaggctctgaagcttccagtatatagtctctttctctcatcctcaaaatggtactaagctgcactcaattatggatgtgggaatattcycctggtctttgggtttataggttttttatactgatgtcttatttttctctaaagtaatatgggtgcacattgaccagctaagactgtcttagcaaggaatagttctaaaacactttgaaagaggcatttga

SEQ ID NO: 791 - DNA, 429 bp, Homo sapiens
  SITE (264): n equals a,t,g, or c
  SITE (268): n equals a,t,g, or c
  SITE (417): n equals a,t,g, or c
cggcacgagctgggacttagctgagaggaatgagatgcccagggcaaaatgtaaggaggcgctgatgctcagggtcctgcggtgccacctgaagatgagcgcctcctgcattttccttccctaggtgcctcacctgactcaccctcatcctggccccacctccactctgaaccaggcactattctcaattctggggaagtaacagtgaaccaaacaggtagagctccctggcctacacggaccttccattatagaaggggaggnaggncagagctagtacccactgaggctcccacgggagcatgcactgccccagggcatagcagcagccaatgcttcaaggctttgaccctcctgtcccgtggtctttctcctaagtcatatgtatggaacccatgggtgcccagcagagtcagngttgtaattggg

SEQ ID NO: 792 - DNA, 486 bp, Homo sapiens
  SITE (453): n equals a,t,g, or c
  SITE (460): n equals a,t,g, or c
  SITE (478): n equals a,t,g, or c
  SITE (481): n equals a,t,g, or c
ggagtgaggctgcattgagccatgttcatgccactgcattccagcctgggcaacagagcaagacccagtctcaatgtttttttaaaaattttattttatctgtatttgtattttattaattttttttctagactaggtactgataattatagttaactcttcttactaggtaacttgtttttaatactctaaatttcatactatattactcaaaattcagaatgtaagccaaagrgagataaagtatattaataaatgttagggtttaaacttgtatgatacatttccaaataggtattatatatttttaaaatatataatgtccatcttttctgtattgrtgccyatacaaccataaccccagaagtactctcatactgtgaaagtcattgctaaattaggtattcactttcttaaacacatttctgagaaaagggtgtctttttagggcanatgactnagaagttcttttacgtanccnaggca

SEQ ID NO: 793 - DNA, 615 bp, Homo sapiens
  SITE (426): n equals a,t,g, or c
  SITE (532): n equals a,t,g, or c
  SITE (580): n equals a,t,g, or c
  SITE (586): n equals a,t,g, or c
  SITE (612): n equals a,t,g, or c
gttcttctccttggctagatcaaaagcttccagaggtcaaaaatagtgccttacgtttctcttctagccatctaagcatcaaccacaagtaattcagtaagtgtccattataaacaaatacaccatatggccaatagtgttcagcactgttgacagctataaagcagaccaggggatatagtagtgatggggcgaggtgaggggttagggctgccatctacatgtggtggcttctctgatatggtggcatgggagcagagacctgcaggaagtgtcagagtaggtgagtcatgaatatatatgtaaagttgctgcgttaaagaaaagatggcccaaacgctttgaatactcctcctgktgagaagyggtgctatgyccctgaccttgratctgggagagctatgtaactggtttgagtaatagagnaaggtggaattaatggtttgcagtctctgggcccaggcattaagagaatagcatcttccacttcttttctatcggagcttgctcttggacccagctggcatgttgnaaggaagctcaagcagcccttggagaaggctaagtgaagagaactgangaagcngacaatggcccagttgagcttccaantga

SEQ ID NO: 794 - DNA, 605 bp, Homo sapiens
  SITE (565): n equals a,t,g, or c
  SITE (572): n equals a,t,g, or c
  SITE (577): n equals a,t,g, or c
  SITE (580): n equals a,t,g, or c
  SITE (588): n equals a,t,g, or c
agaattcagcaggccataagccatccagcaacagagagtcatctaagcagagtgctgcaaaagaaaaggatttgttgccttctcccgctgggcctgttccttcaaaagatccaaaaacagagcatggctctcggaagakgactattagtcagtcttcttccttaaagtcaagcagtaacagcaacaaggagacgagtggcagcagcaaaaacagttcctccacatcaaagcagaagaagaccgaaggaagacttccagtagctccaaggaggttaaggtaaagtgttgggggcctggggcttttgaaaatcattcaacttgccatgtgacttttccagggtgacactgtgctttgaaattattgtaacatctcagtaaatatataggcctatgtcttttaccctctatatgtaataaycctgataaatgaatacagtgatataagactgtgaaggtggtaagtcagctggtcacatacatattgaaagaaaaacccttgggtacagtggctcatacctgtagtcccagctttttgggaagctaaagatggaaaggatcatttgangaaattngagtncancctgggcnatgtggtgagaacctgt

SEQ ID NO: 795 - DNA, 434 bp, Homo sapiens
ctgattttgaaggctatatctgaagctcaagaatccgtaacaaaaacaactaactactctacagttccacagaaacagacacttccagttgctcccagaactcgaacttctcaagaagaattgctagcagaagtggtccagggacaaagtaggacccccagaataagtccccccattaaagaagaggaaacaaaaggagattctgtagaaaaaaatcaaggaactcaacagaggcaattattatcccgactgcaaatcgacccagtaatggcagaaactctgcagatgagtcaagctgagatgagtgaactgagtgtggcacagaaaccagaaaaacttttggagcgctgcaagtactggcctgcttgtaaaaatggggatgagtgtgcctaccatcaccccatctcaccctgcaaagccttccccaattgtaa

SEQ ID NO: 796 - DNA, 659 bp, Homo sapiens
  SITE (409): n equals a,t,g, or c
  SITE (426): n equals a,t,g, or c
ttttttttttattttcaaaattttatttttatggaattttcagcatgtttaaacttaatttttagaacaaaatccaaaagcttaaaatcagatatcttataatgtgtcacaattaagtatggagagttctgtcatttttgaggaaaatctttcataattcttaaaatgcagatatttacaacatttttaaatacagacatatacaacatggcatatttaaatgtacaaaatagttgaaattatattttatcacagaacattccaaaattcaaactaatttttaaaagtccacaaacactgatagcatttggaaaaaaatagcaacaagtttatcaataaccatgccatatgtttagtaactaacttacttatacacaacacataatttacatgtcaaatccmcaaatcntaaaagrtatatgactnatctatttaactcacgckagaatctaaatactaytttataattcataggtttaaatacatgtttcacagtcatctatgaaacaggaatatcaactatgaaaacatatttaactgacttcttaagagacgaggaaatgtcaaaaatagcaaatcaggcatttttttcccctgaaattaaagttcttatgaataccttcataaacacctcggccgcgaccacgctaagccgaatt

SEQ ID NO: 797 - DNA, 438 bp, Homo sapiens
  SITE (420): n equals a,t,g, or c
acatcctattctggggttagccagaaaaacctttgcctgcagttagctacatgaggatgccaaggacccagacggatagcaagggaggggtaaaaactgaaggcttaccgaaataaaggatatttgaggaagggagttgggatcctagaatattacgagttggaaagaaccataactctggtccaagttcatctcaatgctggaacctttccagaaaaagtattgtgtttttctaacatctgtctttacccattataaggatggttagtgccacatgttccatcaccaagtcccccggccatcaaatcttgactcatttcctggagtttctcactctcagatgagcctctgctattagcacacaagcacagttaaccggagtgcttgtaggatgctcagtaggatacccaggttacctgnctgcgtggctcaggggct

SEQ ID NO: 798 - DNA, 365 bp, Homo sapiens
  SITE (243): n equals a,t,g, or c
  SITE (346): n equals a,t,g, or c
  SITE (360): n equals a,t,g, or c
agctgagtagagattattttaaattatcctatattttcttttatgtttaaatctcttaatatataacacattgatttttgtatggggatccattctcattttaaagcatatggataactaattttcccaacacaacctagttcattaatttttggccatttagtatctgctctctgtcagttccagggcttttgtactacgaactccctatggcatttctgtttttttaaatgaggggatccnggaatactaggggagcctttgggggaaatttgaaaataaaagttacatggatccagtgtattttaggggggactaatatgggccaactaaagctactttgggnaggaggaaagagtngggag

SEQ ID NO: 799 - DNA, 691 bp, Homo sapiens
actttatgctgggtgatatagtcaaaatttgcttatttactctgcccctcgtcaaccacagtatcatttcaaggacatgaataaaatacttgacagtatccaaaggagctataccaaaatctaacaagtaaattttggatkttgcctctttgtgcttkaaagtaccaggatttctgtctctatggataggtcttggagaatgttaagtaatggatgaaactttttaaaataatttgtaaattttacctaagtaggacagtagtccttactgcaatcaaaataatttactgagcacaactcctgtaaattaatctacagtcaggctagtatgattttaatatgatttgagtaaaaagataattttcaaggaaagagtaatcatccatcaatttattataaagccagatagtattcaatttatgtcaagaacaaagaaattgcccttttaaaagcatgtacgtgaatgctttttgaggcacagaagtatgctagctttacattttgtatttatttacaacccttttctaagggaaggttacttctcagtgcagatggagaaactgaagcactaaggataaatgattagtttccaatcacatcatttttttycacagacttkctgggactagctttcaggtattgacagcccagccccatatattagggtaaccaggttgaatctccccatttg

SEQ ID NO: 800 - DNA, 580 bp, Homo sapiens
  SITE (10): n equals a,t,g, or c
  SITE (16): n equals a,t,g, or c
  SITE (85): n equals a,t,g, or c
  SITE (550): n equals a,t,g, or c
  SITE (574): n equals a,t,g, or c
atgaaacccnaaatgncccagcctggtgctggtggatgttagcagttcttcccttggaaagccgagctcagctccccctttcctnagcaatggaggtccttaaaaggacagactgaatggtattcgacgagtcctggccttcatatcccgaaaccaaaactagtgagtggattgccgaagaggagctcccacctttccccactgccgtcggggggagtcttcttgtaaatatatctaattgcaataatatcttaacagaagggggtgtcaaacagaggcatcagcctgctgttgatcacagagagaaattgagtagaaagaccaaaagaatgtgacctatttgaaactttctgtcttaagatgcttcttgacatgctgcataactacataaacagcagaggtgtttaagagcccagaaaaacataatttgattttaacattaaaatttccaaaagtttaaagtggttttgctttaatattctttctttccatagatcaatgactgtgtggttgaaatgtgaaaacaaagrtactaataatgttggctgtnataatttccactggacttgagggnctcaat

SEQ ID NO: 801 - DNA, 311 bp, Homo sapiens
  SITE (266): n equals a,t,g, or c
  SITE (275): n equals a,t,g, or c
  SITE (276): n equals a,t,g, or c
ggccttcagaggcaggcagcagtagaaactttccaaaaagtaacaatttctctggatttaacatggaaatagaaaaatttaaagaataattaaattaaaaaaccatggtaaatgaaatgtggtgatgatatacagtttcggatgttaatgctagttgaaagagagaaaaaatatcaagtagaagcagaggacaggatcattggaagggacctgagaaattgccgcttcatccattttagcacacttattagcatggcatgtaccantattagggnnttggagtggacatgtgtggagttttagctctgcct

SEQ ID NO: 802 - DNA, 685 bp, Homo sapiens
atgagtaaacggatcacttggtaatctagcacagtatctattgatgtgtccaatggccgtgttgattgtgactcgtggaccaccatcgtcaggcctcaacacatatggtgggaaaacgtcatcatcatccatgacaggatcaatgtcagtctcaccagtatcaaccgactkggaacactkgtttctcaagatcttttcaatagctttgtaggttttaaggtcttcttcaaaactttttattttgtctgtatccgctaacattatataattagagatgggtgcccttgctcttcctttagattgaacataggrtcgatattctgtgggcaaatcaaaacgaaccaccaagttgcatttkggkatatcaacacccycttctacaatactkgttgcaawaagcaggktggkctcakgkgctcgaaatttcctaagtacctcttcctgttttctgaattctgcttccatcgtgtttgttgcgaggctgattcttcccaatgccatgtccagttatgaaattgctactgatataagccagctctggatcttgtttgccagcttcctttatcaatctgtttaagacaactgctgtgtatcttctttccacaaaaataattccgcacaaaatgttggtaaaaggagaaggaaaatttgtctctggcttctctttttcttcaatttcttcatc

SEQ ID NO: 803 - DNA, 426 bp, Homo sapiens
  SITE (420): n equals a,t,g, or c
cctgatacttcctacactagataatggaacttcaacattagcctattgattgcccaagaacaaacatttttttctaaatgtcaggtgttatggggaggattgatgctgacagcagaggtctagttaaaaactgatgcagaggttcaaatacgttgtgcagtaatcactagaactcaccttctaaagtgtcatgagagctctgattctgcaattagagattttttaatgtgtttttgaaattaccttgtaaaccacaaatctgtgtctctgcattgccccttattgtttcctaccacaaattctacatcaaggaaggaaagttttaaagttagactgggatttatttgtggattttatgggaggcacaataagggtacattggggatagccttactaaggggggcccaatacagggaggcntcatct

SEQ ID NO: 804 - DNA, 461 bp, Homo sapiens
  SITE (352): n equals a,t,g, or c
  SITE (379): n equals a,t,g, or c
  SITE (430): n equals a,t,g, or c
  SITE (447): n equals a,t,g, or c
ggcacgagcgctctgtcacccaggctggagtgcaggcgtgctatcttggctcactgcaacttctgcttcccgagttcaagagatcctcatacctcagcctcctgagtagccgggactacaggcatgcgccaccacacccagatatgacttagaatatgattgaatatgaatacatgattgaagatatattataaaattgagatacttgttgcaacacaacagggaaatgaatacagaagggctcaaagtattttatagagggtatacgagcaatttgacgtcgcagaaaacctgttcagaaagaagcaccatggaatagaggaaagaggcccggattccagccccggggaantgtggacagcctttgggggtgggggantttcgtgggaaaggttagatggttggattcacgtgttccttccccttcatnagttgttgttggccaangttcctgccagttt

SEQ ID NO: 805 - DNA, 502 bp, Homo sapiens
  SITE (182): n equals a,t,g, or c
ggcacgagcratgaaactgttccacctcagatcatgaggcattagattctcataggaacatgctcgcatgcacacttcacaatagggtttgcgcttctatgagaatctaataccgccactgatctgacaggtggagctcaggcggtaatggtcacttgcccgctgttcacctactgtgcggncgggttcctaacaggtcatggactggtaccatctgtggccccagagttggggacccctgccttaatggaacctgcttttcactgaagttgaaaatagrtgtggcattctagtttgaaaaaagcagaaatcttgccctttaatccttggrgtaaatgtaagtgtcatgagrtatttgtccattgtgaaaacctgatccatggacccmgytgtggsatttagtrgggtaagccctttgtgaaagtcagrgagttytgggagtctttgagacaaatctttttaaacttgtcagtggtcatccttagtatctgcacatacatac

SEQ ID NO: 806 - DNA, 514 bp, Homo sapiens
  SITE (16): n equals a,t,g, or c
  SITE (139): n equals a,t,g, or c
  SITE (183): n equals a,t,g, or c
ataacaaactcccacngacagaacggctaaaaccaggaaattattcttacattccaggagggccagaagtctgacatcaaagttgaccagcagggttaagtccttttggggggctggaaagagaatctgttcccatgcntctctcctagcttctgatggttactggcaagagtgttctttggnttgcagctgtatcatttcaatctctgccgctgtcttcacatgtctttcttctctgtgtgtatccttgtctccaaatttccctctccttatgaagacaccacttattggttaatccaggatatgtgcccagataacaagggtttggttattctgaaaggagaaaatagattttgtgggacaatagcagtctctgtcacaagtaccatctctcttattgttattttctattttatttgttggcaggatttaggaggatgtaatgtggcttgctcttagcttccggcattgtaattgaatatatcatactctgcttcttgaactaatagttaca

SEQ ID NO: 807 - DNA, 927 bp, Homo sapiens
  SITE (56): n equals a,t,g, or c
  SITE (152): n equals a,t,g, or c
  SITE (155): n equals a,t,g, or c
  SITE (892): n equals a,t,g, or c
gacatactgggcttgataatcctgaacaaaaatcatctcagagaacaggcaaaaanttactgaagactttaacagcatctgaaatgctacctttattggatcattggaatactcaaactaaaaaagtatcactcagagaaataatgtcaganganattgccttacaggaaaaacataatttgaaaagggagacccttatgtttgaaaaagattgtgccactaaactaaaggagaagcagctctttaagatatttccagccattaaccaaaattttctggtggacattttcaaggaccacaactattcattagaacacacagtgcaatttcttaactgtgttcttgaaggggaccctgtaaaaacagttgtagcccaagagtttgttcaccaaaatgagaatgtcacatctcatactggccagaagtctaaagagaaaaagccaaagaaattaaaagagactkaagaaacaccaagtgaactgtctttccaggactttgagtacccagaytatgrtgactacagagcagaggctttccttcaccaacagargaggatggagtgctacagaaggccaargaagcttatcggwtagggraaaaaaatktsgccaccttttwtggcccagcagggtaytyttcatgagcagaagatgaaagaagccaatcaccttgctgccatagagatctttgagaaagtcaatgcttcgctgctgccacagaatgttttagacctccatgagctgcatgtgggatgaagctctagaacatttgatgagagttttagagaagaagactgaagaatttaagcagaacggtgggaagccctatttgtctggtgattacgtggagaggaaccacagccagagaggagttgctcgcatcaaccagctgncattaagtcctccataagccatagcttcagggttt

SEQ ID NO: 808 - DNA, 539 bp, Homo sapiens
  SITE (503): n equals a,t,g, or c
  SITE (514): n equals a,t,g, or c
  SITE (525): n equals a,t,g, or c
  SITE (534): n equals a,t,g, or c
  SITE (538): n equals a,t,g, or c
tttttttttttttagatgagaatttaagcttttattaataaatcatgattttctattgaatacataataaagtacaattaacaataacataacattacaacattaaaaattaaaactttcagaatcaccttgatcaatatataaagctttagttccttatttcaacagtgttcttctcatatgcaaaacagcttcccaaaataagagattcgtgaatgaaattttataaagcttctgtgtaccaaagagattgactccacatcaactgtcccctactgaaaatccaaaccatacaggcttgaaggaccagaactgagccacattctattaaagttatcaaagataaaatcttaaagrtctacaaatggaacatggaactaccttctaccaccaattcaatacactggggcmaacgtgggtaaatcytggccycmagrcmacatwagatagratgattcttaaatatgtagcaaccggatatatcaataataatccctattacngagacccatgntaccaattatnacggctttnggana

SEQ ID NO: 809 - DNA, 360 bp, Homo sapiens
tatacggctgcgagaagacgacagaaggggagtgtaccttcagtatcacctccaatgagaagcacttggagagcctcaagaatgcaggcagcctcctgcgggctctggagcggctggcccctgggagtggttcatttgccgacagtgcggtggctcccttggccctggaaatcctccaagccgttgggcactaggcaagaargtgcttagcacaagcccgccctgtggccccagccctcggatgcataagcaaggtcagctcccagacacctttgccacatcccctcacagctgtctttggacctaataaagtcagcttaacccaaaaaaaaaaaaaaaaaaaaaaaaaagtcgtatcga

SEQ ID NO: 810 - DNA, 463 bp, Homo sapiens
  SITE (43): n equals a,t,g, or c
  SITE (451): n equals a,t,g, or c
  SITE (463): n equals a,t,g, or c
tccgggccatgtaaattatacctgttaagaagttaaaccctanccagagaaaaacgtttaaactatcccctccccatcacccatcacccattcattcctatttggacaaacaggaggcatcccaaatatttgcctaggggaaagtcatccctgatcatcccataaatcacactgtaacaatctcttctcaacaaagcctgcagtaactaaacctcagaagttcactgttataaacttttyctttcaactttacaggggctgtttagaaatatatggccaaatctgtaacccggaaacagcaaaaaacttcttagcaaaggwtcactaagtaccctttggatgtactcttccaaccagacaagagtgccagaaacttggcaagcaattcatcctgtggaagttgcaaatacctggctgacctgcttaaaaagattctagagttggccggacncgtgccgaaatn

SEQ ID NO: 811 - DNA, 519 bp, Homo sapiens
  SITE (3): n equals a,t,g, or c
  SITE (10): n equals a,t,g, or c
  SITE (37): n equals a,t,g, or c
  SITE (459): n equals a,t,g, or c
  SITE (470): n equals a,t,g, or c
  SITE (503): n equals a,t,g, or c
canggtgtantgaaaaaaaaaaaaccaaaaaaccaancaaaccaaaaagaagatgtaatggtgaggtaaaaattatttatttggaaagagaggtgactaattctggggatcttaaaataaaaatcattaggaacaaaataattcagtcgatatctagtttaaaaatggacatataaaaatcaacaggtttgctatagacaaggggtctgaaaactatggcctgtggttcaaatccaaccccttgtctgtttctgcaaagatttactggaacacaacaacgctcattcatttatgtattgtctatggctgctttcatgctataacggtgaagttgagtagctgcgacagaagccataaagtccacaaaacctaaaatatttactatttgaccccttacagaaaaagtttgccaacccctgctatwgattaaaaagaaaatcagttagaaataaaatgganaaaataaaagncccattttgggttttgggaaggggttcctgcgnacccaggttgtgtgca

SEQ ID NO: 812 - DNA, 319 bp, Homo sapiens
  SITE (273): n equals a,t,g, or c
  SITE (303): n equals a,t,g, or c
tgaaatccatcttcaactacagcttcagagcatgccattgagtcacttcaccttaattaaatctcaactcccactcctccattggaaccacaaactgaccttccaatctgtaggactcttcttgtcaaaattctgtttcttaatacagttcaatcattgtgagtagctggatcaatctttgcagaattgtatatcaagaagcggtagtaatatatgttcacatccgggacagcattaatagttcataaaaggcaaattagaataggaaattcntccttttatctttaatttggaaggccaggncattgttacaatgtcc

SEQ ID NO: 813 - DNA, 443 bp, Homo sapiens
  SITE (8): n equals a,t,g, or c
tgctgaancctgcatctccyggttattggmcagtgtgacattggcaaattaacttctctttgcgtcagtttttaattttaatctttaaaatgggataatagtacttcttacaaagggttgtaaggagtaaatgagttaaagcacataagtgtagtgcttgtacatataataaaagctcaatatgtgttaacttaatattttaaaaattattcctcatatacattattaaaggcagatctgagagatgttttaaggtagaatttactggcttaatgcatctctagctacggaggaaagacagtatccaacacttcaaggcaagggccgttcacakagaggtaatatggaagtcataaaagtaaattaagggagagagggaggtaggaaatggaggattaaggactgattttgatgggatgcacaggagagaaagtggggagagt

SEQ ID NO: 814 - DNA, 366 bp, Homo sapiens
  SITE (314): n equals a,t,g, or c
  SITE (365): n equals a,t,g, or c
gtatgtcttaatttattttaaatatttattttgaatgagttggatagaaagctagtagaaaagtacagaaaatttgactattatttatagatttcaggtatatttatatgtgtaaaagaaattgacaaagaaatatttcatctggcctttactgactcctgttaaatgcagttttaaatttatatcgtaacacctacttaagtgcctgacacagtaggtattcaataaaaatttactgaattaaaggattaaattaggtgacatggtgacatctatccctttattttgacactaaaacatggacacaactaganagaggtacaatgcaatataaagtcacaatagataatatatatcaaatttcna

SEQ ID NO: 815 - DNA, 547 bp, Homo sapiens
  SITE (511): n equals a,t,g, or c
  SITE (517): n equals a,t,g, or c
ttttaattaatgccaaattggtaaatatggtgtaaaaaaaaaaaaaaagacttttcattttctcccacatagaatagtcagatatattaaacatcccttttccataaagatggtttcaatgggaatggaagaaacaaaatcttaaaagagtgagtatagctgaaccaattcttcattctagcaataaccacactaagttcattactttacaaatgactaaacccaatgtcttgtcctttaaaaaatataggtagtgcagaattgtgataaatacgcatttgtttttttagagagccccactccccaaagggtagccattaattcaggtagccttttaaatgtatttgagagggttccgtctttttgggctgctatcctagttaggtgagrtgttggctatggggaaggaacttgccactatacactaaacagacactttaggcaaaggtgtattctgggrgccgggcacagtaggcttatgtctttgggttctaggctactcagggagccngaggtnggggagcctcattttgaaccccgtttttgg

SEQ ID NO: 816 - DNA, 627 bp, Homo sapiens
  SITE (554): n equals a,t,g, or c
  SITE (568): n equals a,t,g, or c
  SITE (593): n equals a,t,g, or c
attaaaatgaaagctaagactgatttattctagctctcaggatagaactaggaaaaataagcagagttttcagtgggttttgactaaatataaagaagatgaagtacaaataatatgtaatagtggagtggatatcacagttataaactttcagcctctgttagcatttaaacagaggatacctgaccactctgaggggtgttgtgattaggaatatgtgatttgagggggctaaaattagatgctgtgatttttcaaaagatattttttaatggctttgttgaatggcaggattttattttaaaaactcatgaaaatcttgatttttgatttgttaatctttgctttataactgagrattttaaaaatatctaggggratggccgttagttatcatttaaaaaattttaaactaagcatgaatttaagagctagtcaaaagaaaacatactaaaaggtgtaatttaattaaaaatacttctggaagcttataaattttgatcagtattcttagtcattgtcaagtaaattctattagaatctgtcttctgtcntccatataaaaagnctgtgggttgtattctagggttagngtatctagttaccccagaggaatctgcccgtagg

SEQ ID NO: 817 - DNA, 488 bp, Homo sapiens
  SITE (430): n equals a,t,g, or c
  SITE (475): n equals a,t,g, or c
  SITE (478): n equals a,t,g, or c
actccccatccccagaaattctcagatcttagaagccaaagactggcaaggatactagagggaactactcgagtaggcgaggtcagactacataccgaataggagtccttccaaaaatgtaagtcatttcattaacagctgaccgtaaaactttttcaaagtggcattccattgatctaaaaattttcaagttatatgagccacttttaacctttggtttttgattacctctttccaaatcctgatttcactctgtagcattctttgcatcatgaattattaaacaatatgtgcgtgttttttactgttttaaatttatttgcaaagatattttaattttcaaacttctcttaactgtccctgaaagtgtgagttgagatayatgtttcccaatataaacttgggtttgtagctgctatattgattgtcncgccttcaccggggtcataataagggtttaacagtcaatcctggngtncctaaatctg

SEQ ID NO: 818 - DNA, 542 bp, Homo sapiens
  SITE (466): n equals a,t,g, or c
  SITE (479): n equals a,t,g, or c
gcccttggaggccmagaattcggcacggaggacatattcatcgtaggggtttcaggaactccattatctcacactcagcccctttgtcatctctgggatcaacacagtgttatcatcgatcagccccccagattcacttcagtgaatctgtaaagaacaagcatgtcctcctcatcccacgaattctgctgcttagaaagccacctgaaagtgatagcccttaaagtcctcagtctgcccctttagagcaccacagaaagatccctgaatggagatcctgacccttaagtatggaactgctgggaagagctatttggagattatcattacatggagggttagtaacatcactttctcttccctttatcctcatttttttcccttaaaaaaaaacacacacacccacacaaccatttctttgctatttgctgttggtatccagtatgccattgctttcttaattaangaggtacattttnccttcctgtatgcctattttaatggtcaatttctgatatctctaaacatgtctttgttgtccc

SEQ ID NO: 819 - DNA, 366 bp, Homo sapiens
  SITE (70): n equals a,t,g, or c
acccccccaccagtacttgaccaatttcatgtatcaatctggatttttttttaacggtataatgactgtntttattgaaagagttttacctaaaaagccaacatttggaattggttgcagcatagagaagaaacactggtccttctttcaaaattaagcaactattaaaagcgccattttatttatttcatttaaaaaataatctatgcagcatttcaagaaacaaccatatggtgttgtatattataaactggtgacattctactattgaattatgtacaacattttcattttttatgcttcttgaggtggtaatgagaaaaaagttttttaaaaaagtgtgccttgctgtatttcttataccac

SEQ ID NO: 820 - DNA, 945 bp, Homo sapiens
  SITE (66): n equals a,t,g, or c
  SITE (72): n equals a,t,g, or c
aattcggcacgagtcctcttcatctcctctgaaagatttcttcctaaataggtgctaattgcagtnattttntggaatctaagggatgttttgccaacacaacaccctctggcaaaagtgtcagttcctcatcttcagtggaaacaggcccaagtgtcagtgagcctcctggcctccccagagtgtctgcttacgtagacaccactgctgacttggatcggaaactctccttctcacattctgatcactcctctgaaatgtcgttgcctgaagtccaaaaggataaatatcctgaggaattcagcctgcttaagttgcagacgaaagatgggcatcgtcctgagtggacattttacccaaggtttagcagcaacatccacacctaccacgtcggaaagcagtgcttctttaatggagtcttcctcggcaacaagaggtctctatcagagaggacggtggacaagtgctttgggagaaagaaatacgatattgatcccaggaatggratcccaaagttaactccaggcgacaatccatatatgtacccagaacagagtaaaggcttccacaaagcaggatcaatgctcccaccagtgaatttttcaatagtgccttatgaaaagaaatttgatacatttattccacttgagcctcttccacaaattcccaacttgcctttctgggtgaaggagaaggccaacagtttgaaaaatgagatacaagaggttgaggagcttgacaactggcagccagcagtgcccttaatgcacatgctacacctttctggtgctttggactttccaagacaatcctgagcataaacaggcccacaaaacatgtgctgactgcactctggcgacccttttccagttgatgttttttgtcatgtgactgttctaaatccagtgtttgacccttaaaaaaaaaaaaaaaaaaaaaaaaaaa

SEQ ID NO: 821 - DNA, 313 bp, Homo sapiens
  SITE (308): n equals a,t,g, or c
cagtgggctacattagaggactgcttagacgcatgcttattctagaaaaggctgaaggaagaaagaaccacccctttccctcctcttctcagctcccttctgctgggagcacctggctgccagttcccaagttcctctccatggggaattgcagctccaaggtggcctcctggagctgcctaactccgccttcactgaaaataaggtgattgaactgtaaagctgaaatcctctgcagtcatgtctcctccagagtcttcaaggtcactcccactttttttctagacacaaatggggtcatttttgtnattct

SEQ ID NO: 822 - DNA, 1077 bp, Homo sapiens
  SITE (840): n equals a,t,g, or c
tgaatggcacgagatgagcaatagcaggtggtgcccttmagccagaccatcgctccgtgcgtctgatgcatcttgccaaagagtagttctgggaggtggttgcctctagagaacacattcctcctattctggggtcccgtgagagaaagaaatgcttttgcttttgatgtgggactcttactaagcctttcttcagagaaaaggaagtgaaaaatgcaccccatgataatcagtttcttacaacatactgtgatagtaccggcttcgttgtttttagctggaatcattagcttccatttttagaataacagctattggctaaattaggctacagtaggccattaagatggatgttggaattaaaaacatttttggaaaaaagcctgctttgagcctttgttataagcccttgggtagagatctgggtcctgtttctgatttcttgtgagccttcactctgacagttttgtttccagaaacacactcttagcctgctcctgaaatgggaacagacaggccaacttcccctctccagtctcccctgcgggtcaaagctttactttcctgtcatgttaagaargaatagatttaaccttgataatccatgtagtattctgtatttttaccttttccttatctgaaaaaaagtgtatatatggcatggaattgattgcacaggcacatggcatgttggcttgtgaaccaattgttaraatttcaagttaatcattaraatratatctttcaaattaagttatattaaaaccaaggtagcatctaaatcattacttctaattattcgcgttgttttgtcgtgatattagcgtaagaagtatgganaacgtataccagtcatagtgtcggagcgatccagggattccacctgacctgatgctcatattgacatatacttcaggggttgtcagatgtcatcagcagagacaagcgagggcacctgaatccaaggggggaaaggggggaagagaacagctgggtggggttttgttcgccccgtgtataaaaatcggccggcttgcggcggggcatcccccgggccttgggggggcctccccgacg

SEQ ID NO: 823 - DNA, 493 bp, Homo sapiens
  SITE (455): n equals a,t,g, or c
  SITE (483): n equals a,t,g, or c
agcacttattctttaattcagaaaagactaaagagtctaaggaaaaactctagatcttgtacctgcattacttctacacagatgcaatcttccaaattgtatctgctgacatttaaaaaaaatcaagattttaaatattgtttaaagattttaaatcccagatttagaaaatgacagtttaggactgttggtatgaatcacagaaagtaccgtttatatacagtgaaaagaaaaggtgaggggagagkaagcttaaaggagggttgacctaatctacctttttatatatcctgtcaggaaaagcacactgagttcgagggttgcatagrttgtattctaaaataaatcctttaaaaatgcttactttaagtgraaatagcmaattttgtgtatataatattttccattgggcattacaattcattataatcccatttaaatttatcaagaagtantctgttgaaatgttgctgccatgttttncttctgaaag

SEQ ID NO: 824 - DNA, 530 bp, Homo sapiens
acagagccatgcagtaaggacaggatagcctccctaargcgtattyccttccttattggcagtctgagaaaaacctggaataggaccatatttgataggtttggcctaaaaaaatagtaataatcgtccattgttctccctagtcttctcattgtccttagaagctataatcagcagcctcagaagcatttatatttttcagtttctgtaattaatacatactcttataatcaggaaatttcatatgaaataaatgggctgcttatataaattactatgagagctgttcttctcagcatgatccgtactcactgattccctccctgttgccctaaaggaataactatctgcctcttgtgttatggaacttttgaggacctcttgcagtttttagttagctcctgtttatataaaacagtggttttctgaggcttcaaaagtgactgatctcaggcacagtgaattcaggcaagaacaccatgaaaaggcataagaatagaagaagaatagctttttctagttaaagagaa

SEQ ID NO: 825 - DNA, 458 bp, Homo sapiens
  SITE (5): n equals a,t,g, or c
  SITE (458): n equals a,t,g, or c
agggnctccatcttgcctcacagggaagagtgggccccagtgtggcttttttcccaactatggrgaaactcagtgcycatctactttaagtttccacatatggcttgctcatagccttggtccttacctttcctgccataactttctagaagagcttaatgggattttttttctaaaaaatgtaaatatgcagttaggcattattttatgtaaatgcattgggtttttactgtagcatttggcactaaatggctttgggggtgatgaggtgggraaggatacagcaggtggtacagtartcaggaartacctgccaccaatgaratgtctgatgctttgcctcttaccatgcctctgaatgtctttggatccaacccagatgagactgaaaaaaaaaaaaacagtgtaactaagtggcatctgtaaacagaataaatgaaaatgtcacctgaaaaaan

SEQ ID NO: 826 - DNA, 543 bp, Homo sapiens
agaaaaggaagataaaagttagttagttagataggtcatattaaaaacctttttattttttggcagctttctgtaacacttacttacttattcatgcaatattgtatgtgaatgtttttggaaactaactaaacggtcacattatttgtttgtttgtttgagtctgagtctgtggtgggaatccaccagcrgatgaacaggctcatatgcggttttcggtttaatctatacaaagagaaaagcctgaatggcttaggatgaaaccttcataagtttagggatcaccatgtctctgggaaactaaaaaataatgtagaagaatctgatcctaggaccaagaaacatgagaacagtatggctactgacacttcagcccatgcaatgtatttggcaggaactaaacaggagttaaaccagcactgattactatgacatcaaacatcatcaaaaaaaataggtattctcttcttcactgtataacaagatatctgagacacgctctgatggcttaatggaaacaatcacgctttttttttgtttttt

SEQ ID NO: 827 - DNA, 716 bp, Homo sapiens
  SITE (16): n equals a,t,g, or c
  SITE (619): n equals a,t,g, or c
  SITE (676): n equals a,t,g, or c
cagtaaagaatgtttngggtccttattggggacctcaactgctgtctctgcataggttggattttctggcataagcctgaacaggtgatagagcaatttattcaaactctttgttttccgaagatacatggaatacaaagcccgaagctgtgatgatgcagctttgaagaaagttagtattaatttccaagtgagaaggtatcccagaacataacagaagtcttcactcagtggtttaatagtaactatctgtccaacaggaatacaccccaaaacattttctagtaagtcctcttgaatgctaagaagagacatcagtgctgctggtggtgacaaggctggctcttcttcttcatctccgtatgactttagattatcctgatcatactgtggtaattcaggcatcaatttgtatagcatatgataaacagcaatttgcacaggcctagctctgaagaggagtaatggggccaatgtatttaacaaagtctggagatattctggtaagtttgttttttggtcagcaactaatcttgcaggaagtttgtgactcaatagctgttcctttgagatatacgttaatgtttcacacatgggtttcagcattgcattctgaaangatgtttccagacacatctttgttttctcctgtaacagtcaccaaaataagttaaancaaactgtgggatgccttgggaaaaaaattctttccattc

SEQ ID NO: 828 - DNA, 502 bp, Homo sapiens
  SITE (5): n equals a,t,g, or c
  SITE (415): n equals a,t,g, or c
  SITE (471): n equals a,t,g, or c
  SITE (474): n equals a,t,g, or c
ccccnctcacaccatacacaaaaatcaactggtgataatcacagatccaacagctaaaactataaagtttctggaggaaaacaaaggcaaatgtcttcaaaatcttgagagtgggctgggcgcggtgcagggcaggactctgtgggatgccccctcttcggagtgcccccaccatctcatcttccaacaaccagcggatctcattcatggtggtctcaatagccagtctgtggggcgtggccaaattggatagtcctgggtgcctctcctcttctgggggtggcagtgggggcccgaagccatcatctgaccttaaagatgatggctgccctggggatcgtggaaatgaagcactgctttcagatgttgaccggtggtgctgaaggtccgaagccgtggggaactccacttccangggcaaattcagcatgaaaaaatccagaatcacactgaagttccctccaaaggaantcnggctcccaacttggggggccctcccaaa

SEQ ID NO: 829 - DNA, 395 bp, Homo sapiens
gactagtgagctcgtcgacccgggaattcgcggccgcgtcgaccccggtcagcccctctccgggttggttttgatctgataaatgcacgcatcccccccgcgaagggggtcagcgcccgtcggcatgtattagctctagaattaccacagttatccaagtaggagaggagcgagcgaccaaaggaaccataactgrttttgakctrataaatgcacgcatcccccccgcgaagggggtcagcgcccgtcggcatgtattagctctagaattaccacagttatccaagtaggagaggagcgagcgaccaaaggaaccataactgatttaatgagccattcgcagtttcactgtaccggccgtgcgtacttagacatgcatggcttaatctttggtc

SEQ ID NO: 830 - DNA, 569 bp, Homo sapiens
  SITE (13): n equals a,t,g, or c
  SITE (61): n equals a,t,g, or c
  SITE (103): n equals a,t,g, or c
  SITE (113): n equals a,t,g, or c
  SITE (505): n equals a,t,g, or c
  SITE (562): n equals a,t,g, or c
  SITE (564): n equals a,t,g, or c
taaaaattttggncaaagggggtacctcaaaatccaccggggacaaaaatgcccctgtttncctatacagtgtggggacctagtggatagctgtttggaaaangataagggtngatcccatttctttcatcacaccccaagaataaactcccaaatggatcagagatctaaatataaaaagtaaaactatgcaagtcccaaaaagaaaaaaaacaccccatgagtgaattcttctgaaaccagtgtataaggaaaagctttctaagtgtgactacggtcccatacacaataaaagactgataaatttgactacataataaaaattttacatggcctgaaaaataccactaagtcaaagacagctgacaaactgggagaaaatagtcacaacatatatcagataaaaggttaactcctttatttgagaactttctaaaaaaaaggaaaaaagatctatagaaatcctatagaaaaagacctgtagaaatcctattggaagaaacanaaagatataaaaatagcccttgatcacatgaaaatatgtgtaattttaatcacatananatgta

SEQ ID NO: 831 - DNA, 467 bp, Homo sapiens
cgggtcattttcactgaactacatgcatatttgccctctctctgttgctactgcagaatcatttatgagacaattagggtatgcttgcactttttttttttccctcccctgtgttattctaggaggatgtactatcttaatagattaaatacttggtgaatttgactttgtctggttatagaccattctgaagctaactaaccaacaggagggtcaaatccacagtttaaattctgatcacaactaaagtgtcctcaattcagtatcagaaattgagtctagaggggagaagccagaaagagtggacgttagccatttgattgggataaagaggcttataggctcaaactttctgtttcctatgggctawctgtctctctctttttaaatggcaaacctaaagattkgtttcttgtacatctggtgggttccagggaaaccttgtctttggaatcactatttctctt

SEQ ID NO: 832 - DNA, 456 bp, Homo sapiens
  SITE (397): n equals a,t,g, or c
  SITE (413): n equals a,t,g, or c
  SITE (429): n equals a,t,g, or c
  SITE (453): n equals a,t,g, or c
cgcctgcaggtacccggtccggaattcgcggcccgcgtcgacggcaactgaggatctagttggtccttawggkcatgctcatggcctgtgcagtccatagcctgttgcactttgtccagctgagccccagcacaggggcccccagctcatgtgcacacagccatccacagcagccctccctcatcccctgcctacagcctgggaagtgggcagagccagactgagctccgttaaggagacaggcactgtgctgagtgctctccaagcagtatttcatttaatgaaactactctatgtgktaagtgctctatttgcctcattttccatggggaaacagatgcttcgarggaggaarggactyacacaggattattgagctatcaatggaagagctggnaatttaatccaggcancaggtgaccttaaacntaacaggggctctggagcccgagnagg

SEQ ID NO: 833 - DNA, 467 bp, Homo sapiens
cataaatcatgacaagtaagtcttcctagcagctgagctggagaatgcaaaaggtcaggctacaattattcacactgtcctcagcctctcttcaggacagcctgcamactcctgttcccaggcctycccyaagacagcggtcawaatactgatctaactcacaatgatgtgagaaacagctaacaattattaaaaagcataaagcactttgcaaatatcaaagtgctattttggcatctatataacaaccagaaaacattcattgtttgtgctatttggcaattttgcatttacacctctccctgactgggctcttctgggtaaagccttgagatttctactgtgcctccacgcgcaggcaaaagacattcttacttagactagatccctcgtcaatatgcatggaagtgggggttaatggaggtcactaaaaatgcaaagtgaaggcaaatgagaccaaggagttc

SEQ ID NO: 834 - DNA, 478 bp, Homo sapiens
  SITE (439): n equals a,t,g, or c
  SITE (451): n equals a,t,g, or c
  SITE (466): n equals a,t,g, or c
caagaagggttacctggagattagaaaggaccatgacattactggcaaactgttatgcagaactttcaccttacaacttatacttctacagcctcgacagcagtgggaatcaaaacctttatgccacgtaccagctttcacacttccagagcatatctgttttaggcaacctggaggccaggatggtggatactgttttgtatgacaacactcagctacagctaaaggcagagtcaccatgggaggctttggactggggacagaagctttgggaagtagtgcatgctgctgtgcccggttacatggggcggcagaacgagctgacaatctcaccagggcttggccatcatgatgactatacacagaatcatagtttccagaagaaaaccatggggtgstgccaccgtccctgtcytggacagtccaaacataccaaaantctcaatcaggnttttaaaggtgatgncccaaaaatggg

SEQ ID NO: 835 - DNA, 541 bp, Homo sapiens
  SITE (474): n equals a,t,g, or c
  SITE (502): n equals a,t,g, or c
tttccaaaagtaatcccattaacataaactcaggtgtggttaaaggggcttgtcatcctaattactcttaccactcaggaaatttcaagggtcttagaagctctgtaccaggggatgaagaccaaatatgtatttattataaatcacaatttcacagctaccactttttgttcaatctatagatgacaagataaatgctgctagaaacatctctacactttgacatatggaaaatttttttaaagatcctgtttcacatgtttagaagctgtgattaaatggtagtgaagaactttcaaaccaataaagtttatgggctgcattattcaaagcaaaataaatctatatttgctgtgaacattgcaagaacttgcacaaactaatgtgcactaggaaaaccaaaactataccccccaaaattaaaaacaaaaaaaaattctgagaaaagggggcactggaatttatggtacttangtaagttttaatatccagaaggagtttngccctggtttaccccccgtgggaattttaaaattgggta

SEQ ID NO: 836 - DNA, 410 bp, Homo sapiens
ttagccaaagggaatgtttactgagtacctacccggtctggcactttgcaatacacttgtatattgctaagacggatagttcaaccgttacatagttatatgattgatagttatacatgcttaactgctggggattggttccaggaccgcctgtgaataccgaaatctgcaggcgctcaagtcctacagttggccctgcaaacagcagatatgaagtcagctcttcagatctgtgggttctgcatccttacaatatttcctttcctttccktttcttttcctcccttcctccctcttttttctttttctttttttgagatggagtcttgttgtgtcggccaggttggagtgcagtggcgcgatctcggctcaatgcaacctccacctcctgggttcaagcagttctcctg

SEQ ID NO: 837 - DNA, 482 bp, Homo sapiens
ccctgacctcaagtgatccgcccacctcagccttccaaagggctgggattacaggcatgagccaccgtgcccactcttttttttttttttaatataaagaaaagtggtttatttggttcatggttctgtacatttgttcaaagtctcaccgtrcccactcttacttgtcccctgcctcgggggttatctgagcctttcagaaatgcagcagcggtcatcagaaactttgagaatttgcccagagcacttgaaggtgtttccagacctgggaggtttctggtcacagccaagggtgagcagcagggtggggaagggaatctcatcccccagaggcagacagagctcagcctgaagaccctggcccagcacttycctgctggggatgaccccgggcaagttagcaggctccctgtgcttcagttttctcttctgtaaaatgggacactagttcctgtatcatagggttgctgtactaatcaagt

SEQ ID NO: 838 - DNA, 911 bp, Homo sapiens
ccacagtttctacaaagaattatggatgatttttatatttagaaaacctttttttatttgtggacatctattacctgtgggccccacagcagcatggaaaagattaaagatttgtgtcagctttgacgctgccgttaattatcaggacaacctacagcaagtcatgccatttatctgggcctcactttctttggatttaattatggactaagctgtgattttctgtgtaattaagaaccaaactaaagtttaaaaaatatgcctttgttttatggaagagtccagagacaccatcattatactgtgtgtctttataaaacccatataccttattcttttgttttatctagctattatattgtctataacttacttttaaatattctagtatagacaggtgtgtgtgtgtgtgcgtgtgtgtgtattcttaatcctctataaggttgtagctaaaatttaaaatactttaactggacacacatcttttaggagtggttggtagtgtttgaaggactactataaggccttaatgatctttatctctagagagttctagaaggttccctaattagcctaataaataaaagaagttattttgcactggaaaatyaaggagtgttggagatatgtgatttggctagtgctatttaaagacacccctgtccttgcataaatagggtttaggaatctagtaatcctggattacaaactttgtttggagtgatgcctaaaccaggtatgccaatctgtcttgtgtccacatactaacagagggttctagcaacttaatcccattagcatgttagctgaagactactgctagaatgctgttatgtttgtttagagttaatatttcatggaaatgtctgaaccctggtactgtattaaactcatagaaatggaaaaaaaaa

SEQ ID NO: 839 - DNA, 476 bp, Homo sapiens
  SITE (450): n equals a,t,g, or c
gacctgccgtcttagatgtcgtagtagtgtgactttttgtttaaattgggatgctggctaaaatttacaagccttaatggccgctttctcctctttttatctcttgcctcaatgttttggaaatgacatcagagtacagaagtctagaaacccctttaccaaggtcattcagcagaccctctatggaagggatagcccagcctctttgaaggcaactgttctcaggggttttcataaaatttttatttttaaaatttgaggacctgtgttagttattgattgctgcataactagtcaccacgtgctaagggcctcatgataacacagattcgctacggcccagcttctgggctcagatacctggcacattttggctggatcctctgctcacggctyacagggcaragtcacggtgttgacagggctggaggcccggtgaagtccagtgangtccagtgaagcccagtcaagcccag

SEQ ID NO: 840 - DNA, 377 bp, Homo sapiens
  SITE (263): n equals a,t,g, or c
  SITE (346): n equals a,t,g, or c
gtaggagccggatcgggggaggggccgggcccaggagcctcagccccgccggcagccctaagggcaaggwaaccgccacggggtccccgtcgcgaccccctccctcccggagctcccgtccccgggatcccaagctccgccccgccgacccccgtctcccctggaccccggctctagcctgacgagatccccaacctccygaggtgctctggccccggattctcccgggctgcattctctgctcctcctcgcctgcgaagatncacgtccgctttccgacgctgagggcagccccgttccagggcagtgggttctggcaatggattcctgtggagtattcagggantcactgtttgccctgggggattccttgttct

SEQ ID NO: 841 - DNA, 462 bp, Homo sapiens
  SITE (304): n equals a,t,g, or c
ggaaatcataataaagacatatgccactttgacaaacctgactagtccttactagcctgagggtaaaagattaagctccaacctcaagtcatttacctggtcttggtaataagtttcttttagcttgtacagcatcctcagaccaactgaggagctttccttgttaacaatttagcttatctttctgtttcctttatttttcccctgcctctgttagtggttaacactcttttccctcagggagcctaatgaggtttttaatatcatctaaaaataaagcattgaagtgaagttggtgaaaatntgttcctggtctaatttggcacccttccaacctgagtattgtaggggaaggaaatttacaagatttaataggaaatgaaacagcttggaattttcaaactaaattgtattttcagagctattccggaaactgaacagctaaactttaaaaaattaatt

SEQ ID NO: 842 - DNA, 841 bp, Homo sapiens
  SITE (699): n equals a,t,g, or c
  SITE (778): n equals a,t,g, or c
  SITE (792): n equals a,t,g, or c
  SITE (798): n equals a,t,g, or c
  SITE (831): n equals a,t,g, or c
tccattctctttaaatgatgcccctggtcccatgccccagttctccacgcaccwtgttttccctctggccacgctgtggcagagccactgtctgaakaactggtggtgtgaatggcttaaagataactacacctgaggagcagttcactctcatttcatctacaccccaggaaaagacaaagtggctacgagctataagccaagccgtagatcaggctttgagagggatgtctgatctccccccttatggaagtggtagcagtgttcagagacaggaaccacccatttcacgcagtsccaaatatactttctacaaggatcctcgcctaaaggatgccacctatgatggacgctggctttcagggaagcctcatggcakaggggttttgaagtggcctgatggaaagatgtattctggcatgttcaggaatggcttggaagatgggtatggagaatacagaatcccaaacaaggcaatgaacaaagaagaccattatgtgggccattggaaagaaggaaaaatgtgcggtcaaggagtctacagctatgcttctggtgaagtatttgagggctgttttcaagataatatgcgttcatggtcaggtcttctacgaatggggaaattgacgtcctcttctcctagtatgttcatggccatgggtaatggataagaaagcaggatatggtgtcttggatganatcactaagggggaaaagtatatgggaatgtggcaagatgatgtgtgtcaagggaatggtgtggtggttacccagtttnggatatactacgangggcantttcaccttaaataaaatgatggggaatggggntttgctttcc

SEQ ID NO: 843 - DNA, 468 bp, Homo sapiens
  SITE (431): n equals a,t,g, or c
cctggcatataaaattctttatgactttgacctctgccttatacagtctgttttcctcttatactccatctgcctattgtgttatggtcttatacaactatttgtagtctgtggaacatatgttctctcgggtttccttggctttgcagaaactgctccctcagctggaaatgctcacagttccaattcatctggctatcttagacctgtcccttaagatgctccagtgccatctcttctgtgatgctgtttgattttctaaggtagagccaattactccatcctttctggggtctaccaatcttcgcaaactttttatagtgcaaaaaggcagaatagcaaattctggctcctccatatactcactatatgaatctgggaaattatttaacctttctagacctcagtttttcattaaaataaggatatangccaatggaggataaatgaattacataatgcaaagac

SEQ ID NO: 844 - DNA, 636 bp, Homo sapiens
ccattaataataattttaaaataatataaattaacaacaataacccttccaaagtttcagactgttttcaaagctattaaaagctctgaacaaattactagtagttgggataaatgattccacttttcctctcactgctaaagcagagttttttaaaaataaaacttacatttttttctgaaaaaaaaaaaaagtttcttgtttatcctgtacacatatataaaaacctgaatcaaagatctgaatcagagtaccagattacgggcatctcaaagggcctatgtcttattttcytttctgataggrtaactcttccatcccctgaagtctataagcaacttattygcatgtccaatggacagggtgggkaattacttttcttccccattgaaaataaagatgggkawtttgagttcaattgkagaaaacyaataccccyacactgratttttttaaatgcagatcytttttcctgacaaaaaactagggtcaacagtcaagacyactccactaactcttcagagtattagagttcatcatcagtgaatcttctgtggaatttttcatcagttggagtgcagtatcagaactattactacmaatgtactgaactgtgtcagtatcgttcgaccgcga

SEQ ID NO: 845 - DNA, 515 bp, Homo sapiens
cctcagcctcctgagtagctgggattacagatgtgttccaccatgcctggctaatttctgtatttttagtaaagatggggtttcaccacgttggccaggctggcctcaaactcctgaccctaagtgatctgcccatcttggcctcccaaagtgctgggattacaggcgtgagcattgtgctcggccattcagttatttttctgtttccttagtagagcccaatgataatgaagaatagctgcagagatcaaagtatcctgaaatctattctgatttatgaaaagaaatttaaatggttttcaaaatagttttactattttctttgaaaacttgtgatccacaaattatctatatacatgcataaacctatatatgcacagacatcatatctcaggtaaacagmagacacatcttctaattttactggataaagtattcctcactgtagtatggtaaggttcacatttaccaattatgtattatttaaacaatcttactttaagatgaatgaattt

SEQ ID NO: 846 - DNA, 559 bp, Homo sapiens
  SITE (474): n equals a,t,g, or c
  SITE (489): n equals a,t,g, or c
cgctcccctaaactggggcctggaaaagggcatcagggatttggggtactctcagtaatattggcaaaccatgccatcaaactgctaacgtctctctttcaagacctacaagtggaggcccttcacaagggttgggagacagatggcccccctgcagccttgagcattatggcccagagcacctccatacagaggattcaacggctgattgactctgtcccactgatgaacctgctcttgacgttactttcaacttcctacagaaaggcatgtgtcctgcagcggcagaggaagggctccatgagcagcgatgccagcgcctccaccgactccaatacttactatgaggacgatttcagtagcacggagggagggacagcagccaagacgatggacagtgagcctattttgggggcaatggttttgagggagactatttcttcccagttaaagaggaaagcaggcaccttccgncttccttcccccacnttccttccattgggaaagtttttcctcggggtttaaaaggccccagttaggcagggccctggggttagga

SEQ ID NO: 847 - DNA, 4087 bp, Homo sapiens
gcattatgtatattatctcactgaatccttgcaacacctactgagatagagatttgattttcattttatagatactcaacctaggctctgagatattagattactatcttgcccaagatcacacagccagtgaacagcagaaccaataggtagaaaaatggaaagtaagatgtcccatgaaggacgagcgagctgcccaaagaaaagcaccccttttccttgtactattgccatttttcattgtgtggcatttttcagtgctgctgtatcaggcattgtgtcagaacaatggatgagaaaaatatctaggaattgatgattgaaaagggttgtgggaaatgaattcatctagttaattaaactatctcaatatcttttaagaatggtgacggaggaaatcagagttaaatttgagtacttaccatgagcaaagcattaatgtgaggtgctttacttacattactgcaatgaattctcctattaagggtcctgaggaaggcatttactatccctgttttacacatagggaagcagaggctcagaggagttgcgagagtttcccaaagttacatagataggaagatggtatgatacgaccaggatcagccttctactatatcatatgtaaaatttgcttcaaaagctatttactaaaatttaaactatgtgggggccagccatcatatcattaaattctctatactcctcagaacataatatagtacctggtacctagtaggtactcaagataatgtttctaggttgatcacccatcacagtgggttaaaaaatggaatatcaaaggcacaaagatgtatcttatttccaaatactaaaaaagaactaccttcacattccttacaggttatactgttccttagaagacttatagaaaatctttttaataaccccctatgtatagttcagaggttaaaaacctgtacatattatacaaagtttccaataaatgcaccttgtgtattataactgcatggtactgacatcttcaagatgggaaccatgaatagatttgtctaggtaggggagaaacagcttggtattttagaaatacgtatgatatacaacatagtcaaaatgcaacaactccaaatcactggaaggtgtattagaaaatactcaggcacatgtgtaaatgctttaacatggcctggccctcttcatggtccatctgtgtattttttggtttgtggctgacacctcctgcctcaacacacccaatcttcttaagtgtgtccagagttgtaaagggctgtctgtcaaggctttcctgatgatggtgttgctctaatattccagtgtcaccgtcttggttttgagatattcatttagagcttcctcacctaagtcttttccaaagccagattgtttaactccgccaaatggggccgccacatctgtcttgttgtatgtgttaataaaaacagttcctgcttccagtttttcactcacatacatagctttgtttatgtctcttgtaaaaacccctgaggccaaaccatactctgtactatttgctcgctgcaacactccatcgatgtccccattttggaatttagaaatgaccataataggcccaaaggattcctctttggcgaggtacatgtagtcttccacatctgtgaacacggtcggctccatgaaaaagcctggcctttggacttgtcttcccccgtacaccaaagtggccccttctttcactccagtttcacagtattgcagcagcttttccagatgagccttatgattttggggcccatgatcagtggatctgtcaagtggatcaccaattttcatctttttaatttcttctaccactcttgtcacaaattcgtcgtggatggattcttccacgaacaaccgcccagcagcaatacagttctctcctttgttgaaaaatactgctcccatgcccattcgcacagccttgtcaagttcacagtcattaaatattataagtggagacttgccaccaagctcaagggaaactttcttcaagttgctaacagcacagctcttcatgatctgtttgccaataggagtggatccagtgaaaccaagtttgcggatgtcaggatgttcagacagacgttgtcctgctatgccacctgagcctggaatgatgttgatgaccccctttggaaagcctgctttcacagacagttctgcaaacttcaaagcagtcaagggcgtgacctgtgctggcttgagcactaaggtattgcctgctgccaaacacgcagcactcttccatgccagcatcatcagcgggtagttccagggaataataatggcacagacaccgagtggctctttcttggtgaaggtcagattgcgatttggacgggcctggttgattggaatagtagaaccctgaattttgtcgcaccagccagcaaaatatctgaatgtttgcacagacattccaatgtgtgtcttcagggccaaggtatagacagcccctgaatcaagggcttcaatagttgccagctcttcttggttctcttccagtaggtctgcaagtctatacatcaatcttcctctttctcttgcattcattcttccccattcaccgttttcaaaagcatcttttgctgctgctactgctttatcaacatccgccaaagaagcgtaggatactttgcatattgtagatccatctgttgggttgatagtgtcgtaagtctttccatcgtctgcatctgtgaactgtccatttatgaaacactggtatggcatttttaccatgatttcattgacctgctttgaaatataatctacaaccagctccacctcttgatcttctcctctcagtttcctcacgaccttttggataaagccttcaaacttggtggccatatagacatcttcattctgcaactgaagcccaccacatttctgtctgatctcttcaaccagcctggcaacatccattgagcttgctccagatttaaagaagtctgttgagtcttcaataatggggacattgcttaaaattccagcccagatgaccttgatggtctctgccactttcacctcttcagctgtcagttctaccactgacgtctcacccgttgaaaagtactgagaggcagggatcatttttccatcttcaaactgcagatttctcaccgtcagtgcttttccatcgttaccaaaaagaacaagtccatttttggtaacgagaccaggcttcttggcacctttaatttccagtggttctccaggaggcacagagctattcagtaatgtcgagccatagaaagtgaccatctgtccatttatctctgtccaagctccagggactttatcatgacctcgaatccagttatgtaaaacttcggcagactggtcccaagaaatctcagcattttcctttttctggataccttcatatgttgccccttcttctggctggggtatacgaggagcttttccatcagctatgagttggacagcttctaccatggccttgattccttcaggaaaaagaaaccgattataaagtgcatccactgtatcattgggttcaacatcacatgatctctgaagaaggatgggtcctgtatccaagccatcatcagcccagaaaacagaaaacccagctttcttatctcccataattagagtccaattgatagcagaggctcctctgtgcctgggcacgatggatgggtgataaatgatagagccgtgctttggactatcaattatatccatgggaatgaactgagtgcagaaagggagcacatttagctctgcacccacggatctgtaggcttctgccacttctttgatggtcttgcccttgaccctccatttaggaagcttgaacacaggggtcccatctttctctgcagccaaagccagagggtcagcttttccatccttgtctggaactgtgaacacccctactactcggtggccctctttgcggaggtggctatagacttcttgtccaaagaggctctggccaattagtgccaacttcagcttgtttttcaaataaacccggccagtggagaagcgccggagcgcctggctgccccgccgcagcatgctggtcgac

SEQ ID NO: 848 - DNA, 467 bp, Homo sapiens
  SITE (365): n equals a,t,g, or c
  SITE (432): n equals a,t,g, or c
  SITE (434): n equals a,t,g, or c
  SITE (459): n equals a,t,g, or c
ggccgccgactagtgagctcgtcgacccgggaattcgcggcgctcgactgtttccagaaaaaaaaaaaaaaaaaaaaaatagaggtactgtgattcctcacctcatttttggttcttgtgatggtgcttttctgtgtacatatagttgctaaaattttgtgttcttgcagtgcagacacatggtataggattctattccaccgtcttgctctgccctccttctcagggcttttttttaacctaagattacttaagcactttcatgttttggggaggagtagtctgatgatccacttatatgcatgtgtttgatacttgtggctaaaatcctaagctgaacttttccaattcctttaagtgggganaaaataatcagtttaacctgcataaaaaaaggaatttaaaaaaccattaaaggcccagggaattaancntaggatatagaaagtgggtaaagtnggggggta

SEQ ID NO: 849 - DNA, 800 bp, Homo sapiens
taattataaaatatttatttgcacaatatttatgtatcttttagtcataatagcccaaaacaggaaacaaccaaaatgtccattaataagaaaatgaactaattgtatagcttttagaacaaaatacagctcaggaatatgaaaaaccaagcacacatcctggataaaattcataaacctgctcaatgagagaaaagttggacacaaaattgtactttatgtattttgtattttattccaggcaaaataatcctatggtgaaaaaaaatcaacaagataatctctgcatgagaaaaaggaccaaagacaagtgaattttctgagggtgatgaaagtgttgcttcgaaaaggggtgaagtttatatgggtctatttatttgtctaacatgtacagttaaggtttatgccttgcaatgtatgtacatcttcacaaaaaaaatcttaaaaaaattaaatgggtgggggtagggaaagggttgaagtatagatgaagcagaagtggtacatgattagtagttgaagctgggggcaggtctatatattttatttttatgtctttaatagcatttgtataaatgtacaatattcgtttacaatgttagctcaggatcttgtttacctttggacagggagggagggagaaatttattttctgggtaggagtaaagctggttctattccycagttatgtaaattatctgttataatccaaaaagctttacatgaatgtttctgtatgtaatgtggtatatcaataaaaaattaaatattacatatttgaaaaaaaaaaaaaaaaaaaa

SEQ ID NO: 850 - DNA, 858 bp, Homo sapiens
ggtctcactctgtcgtccaggctggagtgcagtggcatgatctcggctcactgcaacctccaagtcttggattcaagcaattctcctgcctcagcctcccgaggggctgggattacaggtgcgtgccatgacaccaggctaatttttgtatttttagtagagacagggtttcgccagttggccaggctggtctccaactcctgacctcaggtgatccgcctgcttcgcctcccaaagtgctgggattacaggcatgagccaccatgcccggcccattgttgttggtattcttaaagaaacagagccatgagtggttagtacacaaatagtttatgcagtaaataactgtggttacagttcattgttgtcagcaatacagcattttccatcacaattataggtgaaacaaaacctcatgaagtagtcatagcacattcatgctagcgagagcatattacaaagcaatgcacgtgcattataggggcagacaaaactggggaagggctatattttcactcacctctggttaactttgtgtattttgtcattaagacttacattatgtttgggtcaaacaaaaaacccaaagagattttataaaagtttacaaccattaaacagtattgtttaatcccacaaatggataaagcaaactactatagctcaacaatacacaaaccrggrctaaaaatrgtcmatctatgtatatagctagctaccatacaatagatattgaatatgctgagtctttacaaaggcattgactattttagacgagcaggttccagaaatacacttgtttgtttccaatgagaactaactgtagtgccatttcagttgaagactatgcactcctca

SEQ ID NO: 851 - DNA, 683 bp, Homo sapiens
ttttttttttttttttttttttttttttttcacgaatgcattcatttattcaatgaacttcgcgtcaccactggctgtcatcagttaccgacctgattgagggcttcatggaagggatttggaggagcattcatctaaaaccacagcacgctgcgacgctcagccctgcagtgggccctcaccagtccccgcgcctccgaatccaccctcccggggctgctcgtggctagcggggggcacctgcggggaccaagccagcccggccgaggcccgggtcccgcccgccacggccctcggggccccgcccrcatctggcagaagccacgccccgtccgtgtgggtggggacggcccgccggaccgaaattcccagactgctgcctcaggcamcsggctttccgactccttggcttcttatgtgaggaaaccacagcgcggccggcatccagagagtcggttagycgcgaagttcccgccggacgaagggaccagccagcgccctgctagacagcgaggccggaagcggaggcgtggcccctgcgcggccccggaaaccagtgaggccggcgcgcgcccgccggaagccgcgaccccgacgcgccccccattgccctcggcgccggaagtggtcgcgggtcgttctgcttcctgcccgaggggagtgcgcgggtcaggggcggccgc

SEQ ID NO: 852 - DNA, 717 bp, Homo sapiens
  SITE (12): n equals a,t,g, or c
  SITE (18): n equals a,t,g, or c
  SITE (697): n equals a,t,g, or c
ctaatttatagncggggnaaatgtcatccaaaaagatggactgttaaggcccggggtcagcactaacctgcagaacccagtattcagtcccccaagttcagtgtcttctactgccctctacctaatgaaaagtgaaaatttccctggggtctaaatctcycttcagtttgctgtgccgttgtttawctttgagtcttcattctctgaagatggctttctgcctgtttctggtacattagaattctcactatgatatagaaatggcttcagtttcatagcataatcttgcagttagctctgaattgcctcaaaaaccctgaacaacgcgaggttccagatgtgttttacttctttcattcatatttacccccatttgttgtttaaaaagaattatgaacaattattacatcatatgtagaccactttcactgattatatgttgacattttcctcagtaaaacataaarttcttaacaagactatactgtaacacctttctccaacaaaatcagctgtatgttgaaaactattaagtcattgctaatgktttaagccataatacagacagccttatactctawgatgggagaagggraagtagtttgtccgatggkgctactctgtataaacattactgatgctatctatagtagggcaagaaaagtaaaaagagttttgattattcaggcagcatttntaaaaacctgtgaatttgta

SEQ ID NO: 853 - DNA, 832 bp, Homo sapiens
  SITE (824): n equals a,t,g, or c
gggtcgcggtcctcggagcgcttctgcagcccgggcaaaggccgggctgygggctctgcagcyctccaggtgggggacttgctgttctcctgcccggcctatgcctacgtgctcacggtcaacgagcggggcaaccactgcgagtactgcttcaccaggaaagaaggattgtccaaatgtggaagatgcaagcaggcattttactgcaatgtggagtgtcagaaagaagattggcccatgcacaagctggaatgttctcccatggttgtttttggggaaaactggaatccctcggagactgtaagactaacagcaaggattctggccaaacagaaaatccacccagagagaacaccttcggaaaaattgttagctgtgaaggagtttgaatcacatctggataagttagacaatgagaagaaggatttgattcagagtgacatagctgctctccatcacttttactccaagcatctcgaattccctgacaatgatagcctcgtagtactctttgcacaggttaactgtaatggcttcacaattgaagatgaagaactttctcatttgggatcagcgatatttcctgatgttgcattgatgaatcatagctgttgccccaatgtcattgtgacctacaaagggacccgkgcagaagtcagagctgtacaggaaatcaagccgggagaggaggtttttaccagctatattgatctcctgtacccaacggaagataggaaatgaccggttaaggrgawtcttatttctttacctgtgrgtgccagggggtgtaccaccagggacagggwtaagggccaggtgggaantccggagg

SEQ ID NO: 854 - DNA, 814 bp, Homo sapiens
  SITE (311): n equals a,t,g, or c
  SITE (774): n equals a,t,g, or c
  SITE (801): n equals a,t,g, or c
ctcttagatctaagagccgaagctatagaactttgttagactatttggcaagcaaaatatatgacagtaaatatcagaattttatggtttgaccagcgcttatcacattcccaattcagtgagaaaaattcatctgggacacaacagggtactcttcccctgtttgcccagaatcagctctggattttaagcccagacttcagtggacccagatagaaaatataaagtctctgatctataggccacatcaggatgttattttatgaagaggttctagagcaaggttgcggaaatcggggtggagatggggngcagtgactccctccaaatattcattgctaacaggccattctatgcagtttgttttaacaaatcctgggttaaactgaggscacaggacatgatgggctgttctataaagcattctaagtggagaggagacgatagggcatatgaaattcactaaactctctggaaaaaaaatatgtatatattaaaaaccaagactggaatcagtgcaacagtgggaactaccttttacaagtatccattgcttcataaactccatttgtttggaccaatcccttaaacaaaagcaaggcaaattttacatggatttagagcctaggtcaggttattaggattataaattttccactggtatgtcattgtgattatctttgtttttgtctttctgaaagattggattttctataacaccttgtgtaagaaaaataaaaaacttgatctaactggaaaaaaaaaaaaaaaaancccgggggggggcccggtacccattcngccctatgggggg

SEQ ID NO: 855 - DNA, 654 bp, Homo sapiens
  SITE (348): n equals a,t,g, or c
tgccgtttcaggcgaggggcgcagaatgcagcggccgccagcctggagcgcgggccctggggcgcaacccgcgccgggcgaggtgggcagcacaccctgggccccccactccccgccgcaagtcctgaggatggccagcagagaaacaagaaaatggactccctggctgctggagagttgaatgccagccaccagccatgggtgccagagtttgtagcctattggaggaaaacacaccaagatcacctctgcagcctgcacagccgggcctttggactcctggatgctagagtgacctgggcgctgaggagggcccccgagccagtaccaggaaaggatagactcctnttgcagcattcccagcagagcatcgcctgtggacaccgcgtctgtgtctgtatatggcagagctcccagatatatgcacaagggagtgaaaaaatgtgtttgcaccccagtctctaaaaattcaacagcctggttacttctgggtggtatatcgtaggtggctttaatacgtgttatttgctcatctgtatttcttactctttgcacaattaaaccaygttccttttacttatgtacatttttaataaaagaaagttgttaatgaaaaaaaaaaaaaaagggtggccgctcgcgatctagaactag

SEQ ID NO: 856 - DNA, 207 bp, Homo sapiens
  SITE (99): n equals a,t,g, or c
gggcacgggggtcagccaagtgccacccccaaccctaggttcaggtttcaccaaagctacagatatcctccatgtcaggcttagccctgggccctcggnctcgtgcagagcagggccttagttacagtagtggggttctgacctcagccaggagtcagggctaggactctgggggtccaggttggaaggggaggtggtggtagagct

SEQ ID NO: 857 - DNA, 366 bp, Homo sapiens
  SITE (268): n equals a,t,g, or c
  SITE (289): n equals a,t,g, or c
  SITE (356): n equals a,t,g, or c
ggcacgagcggactggaggagttgagaagaggaggaagaataatgggaggagacaggacctttttcaacttgacaaatagatttctgagagagcagacaccatcttatttctgttgaattgtatttagtaactcaaaaggcatataccaagctgtcagaagcagcttcatttaaaagaaataaaatttctagtcctgcctgaagtttaagctagcccatgactacacaagtgcaactgtatttcccgggtaggatgccggtaggattngggcccagtaagtttgtgccntttgggatgttgaaagggaaggagatgcggggcaacttttttgggtcatcttctttaaaggaaaagnccatttgtcc

SEQ ID NO: 858 - DNA, 499 bp, Homo sapiens
  SITE (305): n equals a,t,g, or c
agttcaggtaaacttaggcaaatagaaaagtgggagagggtgggaaragacaaggtgagcctgcttttcccaatactgggaaaatgawttaaactagacgggggacgtcagagaacagaatgccttgcctttggtctgctttttaatatattttatgatcccaaattttacagaaagtctcaagggtttctgtgttttttaaatggtcaaatatgtgacatacatgtgtacatagatcacagagccccactgtagttttttaaatgagctacatttaccttggggaagagcccctccccgtgaangcatcataatattgtgaatgtaaagagagattggttcacaatgagaatgtacagtaggctcctataagggtgacaggmttatatgcagaatgactttgaagagccaaaattgatttatttatgttaagtagtgctaagaaggaatatttgtcccggagtgaggcatttgagatagagggggaaaagcaaaaaaa

SEQ ID NO: 859 - DNA, 554 bp, Homo sapiens
tcccatcctgtgcatcatccttgttgtctgtaatgtaaataatgctgggctcctgaactctttccctgggaagaaggcccgtatgctgtatgttctgcatcaagacccagcctgtagtcccaacaatgggctgaggtagatctctggtgactcaratactccagtratgagtgtggtctgcaggaggtgtccaggggagcaggaggcacacggcaccaattggraagttaatgaatgagtttagtgatggacacacaaggaactgttaacatgttttagaaaacttacttggcctcagcactttcttctccttttaggctgggtgcggggtgagacctcctcctcctttttccttcaccctcagttgtattttattggattacaagtttgtatttattttgtattacaagatcctgtcttctgttcctgttttggccactgtctatgccaggctgctattagagcctgacagcttcaccctaaataaaagaaaaccttttatgtgtagtttaaaaaaataaacaaaaacctctgtagatctttttaaaatctac

SEQ ID NO: 860 - DNA, 576 bp, Homo sapiens
cataaaatataaggtaaaaccaccttataaatggaaaagggctatgtctgagttcaggctactgtaacagaattccatagactggtgtctgacaaacagcaggtatgtatttctcacagttctggaggctgaagtccaagggttgggttctggtgagggccttcttccagcctgtaractgctggcttctagttgtatcctcacccattgaagtaggacatgacatccatgaggagtgtggcaacagcatggcagcgtgtcggggtccaggctggtgacacagaacctgttgctcgggctggacagtggggtggatgaccggcatctggaccagcttgggcttcacgaagccactgggtgattgccgaaggttctcgctggctacagtctagccactgaccacaggatggtgaactctgatgacaacgtggtgggtgacaaagggcaggtcccgcttgagcaccaggatgaagtctgtctgatacgtggacagcatgaacacggatatgttctgggtcagccagtggggcgatgactgacttgggcgatcttggtcatgccaataagctggggagg

SEQ ID NO: 861 - DNA, 89 bp, Homo sapiens
taaaaactggactaggcaggccaaagacagggcccaaggacaagagggggctcaaaggaacctgtctaaggtttattgaaggagagagt

SEQ ID NO: 862 - DNA, 401 bp, Homo sapiens
gcgtctataaatccccagccagagaccagcgcaggcagccctgggtgggacacctggctgyagctgccttccgttgctgtgtgattctaaggctcactggcggcctctgggcttccccttgtcctgtctatggaatgacgggaggtcggtttcgattcctccacgattctgtraagggctgagctttcctggggaggtgaaaaggggcttccctgaggacccagcattactgtacctcctcacttaggaagcaggggtgaatctgggattttgggtggtcactgtgggaggacagggctggggtacagagcaagaggctgcctgggttcagatcagcctctttgcatctttttgttgttgttgttgtttgtttttgagactccgactcaaaaaaaaaaaaa

SEQ ID NO: 863 - DNA, 235 bp, Homo sapiens
attagccagggcctcccgcatcccttcgccatcacagtgtttgaagacagcctgtactggacagactggcacaccaagagcatcaatagcgctaacaaatttacggggaagaaccaggaaatcattcgcaacaaactccacttccctatggacatccacaccttgcacccccagcgccaacctgcagggaaaaaccgctgtggggacaacaacggaggctgcacggcacctgtgt

SEQ ID NO: 864 - DNA, 298 bp, Homo sapiens
  SITE (170): n equals a,t,g, or c
cttcttctctacatctgcaccccctgaatagtaagccttctgattaggatttggtttatgttctgcactgttcctgtctaaagagaragcccttaaggcttcttgttcctagttagagggaggtaggaaaataaggttgctttcttaagccacttcaracctgtgggggnactgggtgaggtggcagcagacactctctgcctctaatcccacatgcttccaggcagcttctgcatctgctgtagggaaacttttaaggaacttgggcttattcctccaggcctgccaccaagaagag

SEQ ID NO: 865 - DNA, 372 bp, Homo sapiens
  SITE (19): n equals a,t,g, or c
aagttggctgaatttttgnaaccaactcaacaactttwatctatcaattttccattacagaatcaagaatatttttaaaaggtttataaagaataatacttgcttcttgtatttctaaataactatgcatccattcatccagaatgatcatttaaattggtggtctggtacctgttaagctgttacaactgaatctttctgggaggaagactggtcttcagggacatagagctagaccctataagtccaggtatggagctgaacttgactttagagattcctggagaatgttaatagatacactgtgttctgtctcccagtcatctccttatgttggctcttactgaattcttcttcagccagcgttcttca

SEQ ID NO: 866 - DNA, 419 bp, Homo sapiens
  SITE (324): n equals a,t,g, or c
  SITE (361): n equals a,t,g, or c
  SITE (413): n equals a,t,g, or c
ttgccagtaattatatcatttaggtggttgggcagagataagacaaataattggtgttatcatgccttctatccaagttttgtaagcaagaatttcatagcatgttttaacacaaatggcaaaaaaaataagcccacagcagcttgaagcattatatgtgaaatttactaaactagaaataagaagaagtgaaaacagtaccccaagaaagtcccagaagactgataacaccaaatgcaggggcccttgctctacctcaactccagcccaaatccaccatgaaggactccctcagttgtcctggaaacacatgccctgaaggcntaatgtgggtatttttaaaataaatttcctggaaaantgacaggataggctttctaatggaactgttgggctaaatctggatactgggnaggggg

SEQ ID NO: 867 - DNA, 344 bp, Homo sapiens
cttggatcccaatcctatttgggagtaagcctaggtcaacagatatccaaattaacaaycttaggacatttaacacctcttctgaagttagtgagtctaagctttgaagagaaggaaaactagagatttttcctatttccttcattttgtcctgtgatcaacctaaatcagctcagctcatcttgattatatctccgaaattaggcttcattggacttaagaaaaaagagaatgtattaatataaagaatggggcaggagttatcaggagaatttttcaactttcataatgggcaggacaaaaaaacttccactcatagcttccagtcttaacccagtggtatt

SEQ ID NO: 868 - DNA, 503 bp, Homo sapiens
  SITE (431): n equals a,t,g, or c
ggcagagtccatcccttaccctacacagatctacttcttcacacaggtttaggaaacagctcctccatgatcttactgaagaaacaaaagggcgactagtgagataaaccaattcttttctgcagttattcttggggctgcaactggtgctcactctccctatcctccactgttcattctaagtttccctcagccttaactattaactcaggaagtctgggtggcttacctggttggtgagactcaaacttacatacatgatcttcatgtatcaagtccaaacatttgatagkttatactcttctcaatttgaggttgctgcacatgtctcttcacagttgcagttgaggcaaggaagacccattccaatctcctgctgtggggatcaagttgattgacactccaagcttcattccccgaatccatcacgntgtttatgctgaagcatgttgcctcaaagtggtgtcacccatgacaagcatgacaggggaccagtctccgaa

SEQ ID NO: 869 - DNA, 407 bp, Homo sapiens
cagggagctaagttgcattttcctctcagccgaggatctggtgatacgttgggtggaggaggattgtgagttaggtgagttattcgtgcagacgcgctgtgtcctgaaccatgaggaaaggcagacatagccaatctgcgaattctttttgcttccccggctccccccagcctgacttctcttccctaattaggactccacacctgtattttttgttttcatcgtgtgacaaacacccatggacctgccacctgacacaagagccagctcggtcytctcacgtytcacaggtgaccacgatgcttatcccctgcctccttccgcctgggtaaccgtcagcccaaattccgcgctcatcatcccttgctgtccttttaaaataactatctggtatctatacaaatctg

SEQ ID NO: 870 - DNA, 412 bp, Homo sapiens
ggttatttatttatcatcagttgtagcagttctttatgtattctggaaycaagtctattggattscaaatacggtattttctttgtatatatggtaaatagaatactttctcttttaagtcataagmtatatttwaagatattaaatgactaaaattatttaggtcataagttaaatatttttttcctgtggtggtattttttaatcccttctttccacctactcactttttggaatatctgtagcaataatagtaggaacagtagatgtgcctttggagtgaaaataaatagccatttaaaacataggcctttatcaacatttagttctttccaattaggraatgggagaatgatgtttgagtttttaagggggaattaattgaatgatattttrtcmttttargwtgaaa

SEQ ID NO: 871 - DNA, 445 bp, Homo sapiens
  SITE (410): n equals a,t,g, or c
gaattcggcacgaggtacaatttacgtagattttccatttttctccaggcgtagccagccccattccttactatgtgccaggtttctttgttgttgttgttgttgttgtttttagatggagtctcgctctgtcgcccaggctggacaaccttggctcactgcaacctccacctcctgagttcaggagaattgcttgaacctgggaggcgggggttgcagtgagccgagatcacaccactgcactccagcctgggcaacagagcggaacttcttctcaagaaaacaaaacaaaacaaaacaaaagtgaaaacactgctgaacgctcgctacccttcatatactacctagatatagtcaaaaatgaatcttatccagcctcctccaatttaaattctgtgttaaaatttgangactcccaaaatatttctctacctaaaactctccc

SEQ ID NO: 872 - DNA, 306 bp, Homo sapiens
caccccctccccaggagtagggattagaaatcgttagtctttccattttgtcttctgtggtttcagttaaagttctaaaagacgtattttactaaaagtggaattgactttttgtattcaggggaacttgtcagtggttttcatattatgtgccgtggagtcccaggattccagaagatgcctcaagggagacccctcccttcccccgtatcccttccagctttaagcagcctgtctgctttaagctcttatatatattgagattctccatgagatttcatttgtataaatgatttcacagcttac

SEQ ID NO: 873 - DNA, 421 bp, Homo sapiens
  SITE (350): n equals a,t,g, or c
  SITE (364): n equals a,t,g, or c
  SITE (369): n equals a,t,g, or c
  SITE (386): n equals a,t,g, or c
agttagattcaacttgagtatgtgaagagctgtgtttctaaacccctcccccaccctagccccaagcttcatcttagctccactcctgaccctatccagctaaaggtccccacccagctcctgcctatctagtcattgcatatggcaagacttgaaagtcctatctcaaagcagcagaattatcagctacgactgccttgtcatggacagatgagcagaggcctgggaagacagcctggagccccaacttctggtgcacccccttgtgttatctggcacatgatcctgttgctctgggactgattatgggatctgtgtatatcttattcctttctgtcttcaggcaaggncttttggttgtgtngggcngctacaattgccagcanccttgaatttggttggacatggttgcgttcctata

SEQ ID NO: 874 - DNA, 444 bp, Homo sapiens
ggcacgagggcagaggaatctggagctgtcattttagaagagcaactagcaggtgtctcagcagagcaagaagttacatgtatcgatggaggcaagaccctccccaaacagccatctccccagaagtctgagcctctgctaccttctgcttctatggatgaggaagaaggggacacttgtacaatatgtctggaacatggaccaatgctggggaccaccggctctcagcattacgctgtgggcatctctttgggtataggtgcatttccacgtggcttaaaggacaagtacgaaaatgtccccagtgcaacaagaaagccaggcacagtgacattgtcgtcctttatgcccgaacctgagagtttggacaytagtgaacaggagcgcatgaaaaggtaggtggtaagagtatgcctggctggaatgttcccttttggttcattg

SEQ ID NO: 875 - DNA, 693 bp, Homo sapiens
aaccagcagtgtgtgtagcagcagtgacactgggctctttaccaatgatgaagggcgacaaggtgatacctctcacagttagcttggctcagtggggagataatattccctatgggagttgtgtatcctattaacaatcagaggtgctacagaactccctgaagttaatggagccaactggaatgtgttgggagtttacaagagtgaacattatgtagaatgtgaatggatatacaaataaaagatgaaacataattcatatagaagtactgacaaaaaaaaaaacactgtcattacagtgtctattgcctgtaaacctacaagcctgagctgtgtcttctgtaacttttgattaatgttatgttattattgtgtaagttaaaatactcttggcttctttatgactcctcttgaattcatgaatgcatctttgttctttcctaattttggtctttcatcctagaattcattaaaaaaaaaaaaacaaaactgttactgagtttcaagagcccctccttggccatgagggagaactatctgctgtttattcagttctgcctttgccagggatggtactagggactcagctcatttaatccttccagcaacctacaagggcaagcaccttcagcagatgaggaaaacttaggttcgaagaagttaaggaatgtctgatgttacccagataggaat

SEQ ID NO: 876 - DNA, 472 bp, Homo sapiens
ggcacgagcagcgttgaggttaagagcacggactttgggagcacacagaccaggtcccaatcctggttctgcccctgactggctggtgactctragcaagttgcttgacctctccaagcctccgtttcctcatgtgcaaagtgtggacaacaacagtaccttcctcataaggaacgtgcgacgcgcctcagaagtacgtgttcataaatggtagccattgttgttaccttcccgtctgtgaacatggatcacatcatctctgtgggtaacccagtcctcgttgtatgacttgtcaaaatgcagttccacttgtattaatattgaccctgttcatcgtcaccaggaytgcatcttgmaccactgtgccgtcttytaggcacacasgacccgttatctyccttggaaaaattcctytcactggraatgtacaattaaaggatgattgaaatgtttaaaaaaaaaaaaaaaaaaa

SEQ ID NO: 877 - DNA, 482 bp, Homo sapiens
  SITE (383): n equals a,t,g, or c
  SITE (436): n equals a,t,g, or c
tgatgagtgtttttaattatctatttaagaaatattasctatgttttacaacatttaaaaactcattkaakggtagtatacagacaatgacactctgawgggtaaaaggcagaactctttgttactggcagctccaaatcagagaaggctgccaggcagggscccataggggatttcacccaagaccatggtaacaacaagctggagctacacggggcagcttatggtaagcaggatgtgtttagctaggtcttccaagcttctcacggattgcctaatctgaatgatctccggggctccagtgtatagggactatccttaattgtttcctacctggttctggggcaataggggcaggcgcacagtggccttagtgtgtgagntcaaaatagtagaaatagttgaagtgtggctttaatcagctgctcagaaaggnaaactgattgtcctctagccagggcttcaggactgggtcaagaaac

SEQ ID NO: 878 - DNA, 511 bp, Homo sapiens
  SITE (481): n equals a,t,g, or c
  SITE (495): n equals a,t,g, or c
ggctgtccttgaactctggggttcaagcgatacacccacctaggcctcctaaagtgatgaaattacaggtttgagccaccgcgctgggctggtgtcatagtcttttatgacattgccatttttgagcaatacagacaagtggaatcatctctccgtttaggtttatctgaggtttcctcatgactgcattactgctgaactgatgttgtgttttttaacatatcaggaagcttatgatgttgatttgtcccctctaatgataatgtcaacttgtttcatcctgctgaacccacagttggaatcaccccaaaagccttagcaggggagtttccacaagggagtgccccrgaccttttccaggtgggggccagttgggattccaagggaagtagcacttagcactaaataaacaacagggtgatcagtccaaagcatttattattycatttagacagggtctcgctgstmtgttggcccaggngggtctcaaactanggagctccaggccatc

SEQ ID NO: 879 - DNA, 155 bp, Homo sapiens
  SITE (145): n equals a,t,g, or c
gataaaagcagcttggatggctgactcatatacaaggacaactgcctgagagtcaccagggctatcaagaagtttgcagaaacaagaaataaacttttactgttttaaaaaaaaaaaaaaaaaaaaaaaaaaaaaaaaaaaaaanaaaaaaaaag

SEQ ID NO: 880 - DNA, 439 bp, Homo sapiens
  SITE (371): n equals a,t,g, or c
  SITE (391): n equals a,t,g, or c
  SITE (407): n equals a,t,g, or c
  SITE (438): n equals a,t,g, or c
cataaatgtctgaaatttaaaagaaatttaacttatatatgtatataaaatatgtacatatatataaaaatatctagcattatgcctggcctgtagtggttactcaaatgccagatgaattttaatgactagcactcagccttacctagaaagacaagaacatcttgcaagtaattgcttctgtcttctaagataactgctgctgtttggcaacacagtagggactcccagtagaagcaaccttgctctcattgcatctgctccagagaaatcaagaaataattacctttttatttggagacttgattgrtgcatcagccttccccgtggctgtagagagataaactggggccaaagagaataaccgggantttattccggcctggattantcccgttggcaggggntaattggagttcagggcggggaagtaccacnc

SEQ ID NO: 881 - DNA, 434 bp, Homo sapiens
  SITE (361): n equals a,t,g, or c
cccttgtggggatcccactcaacctcgtggtgctcaaccgactggggcatctcatgcagcagggagtaaaccactgggccagcaggctggggggcactggcaggatcctgacaagcgcggtggctggcgggctctggcgccctcctctcgggcctcctgctcttcctgctgctgccaccgctgctcttctcccacatggagggctggagtacacagagggttctacttcgccttcatcaccctcagcaccgtgggttcggcgactacgtgattggaatgaacccctgcccagagtracccactgtggttacaagaacatggtgttccctgtggatcctctttggggatgggcatggctggnccttgatcatcaaactgcatcctctcccagctggaggacgccaggtagggtatgttcctggctgccaccacag

SEQ ID NO: 882 - DNA, 452 bp, Homo sapiens
cacagtgaaaccctgtctatactaaaaatagaaaaattagccagacatggtggtgggcgcctgtaatcccagctactagggaggcaaaggcaggaaaagattgcagtgagctgagatcatgccactgcactccagcctgagcaacagagcaaaattccatctcaaaaaaaaaaaagaagttcatcatgatagataataggtagctaggtagatagatacacagatagatactcacactctgttcacttacatgagatgaattgaaggtgtgtctgcacttactatcaattcctaaagcagagccgcttctatctgagtttacatagaaagaattttctagggctgggcctggtggctcatgcgtgtratcccagcacgttgatgaagctgaggcargcagattgcttgagcccagagttcaagagctgcatgtgtaacatgggcaaaccctt

SEQ ID NO: 883 - DNA, 540 bp, Homo sapiens
  SITE (436): n equals a,t,g, or c
  SITE (454): n equals a,t,g, or c
  SITE (486): n equals a,t,g, or c
  SITE (516): n equals a,t,g, or c
  SITE (536): n equals a,t,g, or c
gacagcccaacaatggcggcgcccgcggagtcgctgaggaggcggaagactgggtactcggatccggagcctgagtcgccgcccgcgccggggcgtggccccgcaggctctccggcccatctccacacgggcaccttctggctgacccggatcgtgctcctgaaggccctagcttcgtgtacttcgtggcattcctggtggctttccatcagaacaagcagctcatcggtgacagggggctgcttccctgcagagtgttcctgaagaacttccagcagtacttccaggacaggacaagctgggaagtcttcagctacatgcccaccatcctctggctgatggactggttcagacatgaactccaacctggaattgctggctcttctcgggactggggcatcttcgttcttttcgtaactgattcaaggggctgcgncaaacatgctttcttcangggctgccctgtgggggccttcttaaaatgtncctgggttaaatgtgggggccaaagttctnggtaaatcttttcgggaatnggga

SEQ ID NO: 884 - DNA, 391 bp, Homo sapiens
  SITE (389): n equals a,t,g, or c
  SITE (390): n equals a,t,g, or c
  SITE (391): n equals a,t,g, or c
ccagagagtgttggggaaacgaaggtaaaaaataaaaacatcctgttgtgaaactcatagaaaggtgaggtggttggttaagtacttatggaatttctatagctcttttccagtcctgaactatatgttactaggaacagagaatacaggtttacaagtgtaccgttcaggtcacagaactcctgtaatcagaaaatgtcataataaagcaaactgaatcatgtcaaagccagtagaggaggttgataactaagagtgagtcttgggtaagcttttttctaagttaagaatatttaatcactctccaatttgtggtatataaatctggattactataagtgtacttgtgcmtatattaatatattcaaycttaagawtaaaaaaaaaannn

SEQ ID NO: 885 - DNA, 553 bp, Homo sapiens
  SITE (416): n equals a,t,g, or c
  SITE (475): n equals a,t,g, or c
  SITE (485): n equals a,t,g, or c
  SITE (488): n equals a,t,g, or c
  SITE (532): n equals a,t,g, or c
cacccggaagagcgggaaggaaaggttgggagggttgtcgtggaagaaccccctccaagcctctgcatgtgccacgtcccccactggggctcactcacccgagacttttaaactgagactccctcaaaagctactaagacgatcaccagccgggcgcagtggctcacgcctgtaatcgcagcactttgagaggctgaggcggatggatcacttgaggtcgggartttgaggccaacctggacaatatgatgaaaccccgtctctactaaatatacaaaaattagctgggcgtgatggcgggcactgtaatcccagctacttcaggaggctgaggcagtagtatcgctttgaacctggggaagtagtttattgccattgagctggagatcggcaccatggcattccagcccggggcnaacagagtgagattccatctccaaaattaattaaattaattaacggaattaaattaaanggaattaaanccntcaaaaaaaaaaaaaaaaagggggccgctctagaggttcctcgnggggcccagttaagggtgctt

SEQ ID NO: 886 - DNA, 288 bp, Homo sapiens
  SITE (287): n equals a,t,g, or c
  SITE (288): n equals a,t,g, or c
caaagtaccatcttggtactttgccttaaccgtttatatgcactttcatggagactgcaatacgttgctatgagcactttctttatccttggagtttaatcctttgcttcatctttctacagtatgacataatgatttgctatgttgtaaaattttttacaaagattttacaacatagcaaatcattatgtcatactgtagaaagatgaagcaaaggatttgctatgttgtaaaatctttgtaaaaaatttctatataaaaatattttgaaaatcttaaaaaagggnn

SEQ ID NO: 887 - DNA, 466 bp, Homo sapiens
  SITE (353): n equals a,t,g, or c
  SITE (354): n equals a,t,g, or c
  SITE (382): n equals a,t,g, or c
cacagcacagccacagggccccagcaggagcgggcctcagttctcagakagctgcacaaagaccaaagcaaatttattactgtttttcagtttacaaatgggaaatccacaacattggtcaagaagaaaaggcaccatgaatgggaagaccgaagtgtagacaaccagctggaacaaggcaaggcattccttttttttttttttttttttaaatccaggctcttgtaaaatgagactagcagagccattcccaagttctcaggatggggagatggtagtcagagttaaaatatcacccaaatagtttaaaaactcaagagaagggcttaagagataagacattttttatgagnnccatacaactgcatctaacagatactgnatcttttctctgggagagaacagatgcagtatctgttagatgcagttgtttggggttattaaaataaggttccactggggaaaa

SEQ ID NO: 888 - DNA, 469 bp, Homo sapiens
acctgactctcatctgatctggatggttttggttttgtatcttttttacttctcccagaaaatactaaatttaaaactgtaaattaagaatataccactagataacaattatcaaattgagctttatgcatcattactcagaaagcttgccttcctttctttgctacttcaggacacagagttgatatttgcttactacagctttagatctagaagtttattcgtgcaacaaatatttattgagtaatttatactgtgccaggcatgttttgatatgtttctgtcatatgttttgatatgttccaacataagtttctgtcactttatattcagtatatattttctacagtgggtaaatttaacaaatgggaaagggatagaacactggatawtttaccggattaaaccccttccttgtaaggggctttgtttaccatattaagtggccaggtatttatccagggggacc

SEQ ID NO: 889 - DNA, 458 bp, Homo sapiens
  SITE (437): n equals a,t,g, or c
aacacagccatcattttaaaattaggcaaatgtacaatcaaataataagacaaaggtaataagtactctaaattcatgacttcctaatcataccacttttttttttttttttttttttgagatggagtctctgtttcccaggctggagtgcaatggcatgatctcggctcactgcaacctccacctcctgagttcaaacgattctcctacctcagcttcctgaatagctgggattacaggcgtgcaccaccatgcccggctaatttttctgtatttttagcagagacggggtttcaccatgttggtcaggctggtcttaaactcctgacctcaagtgatctgcctgccctggcctcccgaagtgttgggattataggcacgagccaccgtgcctggcccatatcactattttctatactttggrtgktatgtatgtncactgtgtctgtgtggaggga

SEQ ID NO: 890 - DNA, 506 bp, Homo sapiens
  SITE (502): n equals a,t,g, or c
  SITE (503): n equals a,t,g, or c
  SITE (504): n equals a,t,g, or c
  SITE (505): n equals a,t,g, or c
  SITE (506): n equals a,t,g, or c
gaattctcaaaactcaaaaataagaaaagaacccaataaaaatatggtctagcctaataaaaatatgggctaacaatgtaaatagacacttcaccaaagaaaatgtatgatagaaaataagcacatgaaaagacactcaggccaggcgcggtggctcacgcctgtaatcccagcactttgggaagccaaggcgggtggatcacctgaggtcgggagtttgagaccagcctgaccaacatggagaaacctcgtctttactaaaactacaaaaaattagttgggcatggtggcacatgcctgtaatcccagctaatcagggggctgaggcaggagaatcacttgaacccgggaggcggatgttgcagtgagccgagatcatagcattgcactccagcctgggcaacaagagcaaaactccatctcagaaaaaaaagraaagraaagaaaaaaaaaagrtactcmacatcattagtcattaggaaattgaaaaaaaaaaaaaaannnnn

SEQ ID NO: 891 - DNA, 375 bp, Homo sapiens
  SITE (192): n equals a,t,g, or c
  SITE (372): n equals a,t,g, or c
gggagctggcccgtcaagtgctgcccctgcctgtgtctgggtttctgttggctcctctcacttcccagggggtcgcctgtcctgcctgtgggtttccatggcttcccagagctccctctgccccagccagcgcctccaggcccagctgaggagctgtgagaagcagcagaggggactccccatcccgggcanaccctgtcctcccacccctgcccccttgcccttccagccctttcagctgcagctgggagctggcccgtcaagtgctgcccctgcctgtgtctgggtttctgttggctgtttttcttttcttgagtggtgatttttctctaaataaaagaagtcaagcactgaaaaaaaaaaaaaaaaaanaaa

SEQ ID NO: 892 - DNA, 527 bp, Homo sapiens
  SITE (451): n equals a,t,g, or c
  SITE (492): n equals a,t,g, or c
cttaactgtggtctctgcccaacttcactggactctgaggttagagtatttcatttctgaaaaattagtgggatatgtgagaaccagctaaatcatcaataaaacaatgtactgagattgtgaactatttttagattaatctgatacatatatattaaatagttttgtaacacattattccaaatacctttaattggaaaaggcatatcacagtgtgcgtgtgggaatggtcaggcatttgtgcttttctaccatcttggcttaccacatattaaaaggcaaagtttttaaattcaaggctctggmwgtaattaaaatcctgtaatggraactaatagttgcagttttcataaaggtagcctggtgtggaggraagcacccagcctctggkttcatgkaacctggacccaaatcttagttgccattagcagctttagaaccatgagtagangaaagtctctgaggcttaatttcttaatctctaaagtatcnctaaagaggataattctaaatacctcacagggtcc

SEQ ID NO: 893 - DNA, 555 bp, Homo sapiens
gtgtcttccattgggtctcctgttggtaccccaaaaggtccccagggagctctgcagacacccatagtcaccaaccacctggtgcagctagtcactgctgccagccggacaccccagcagcccacccatccctccacccgagccaaaactcgccgtttccctggcccagctgggatcctgcctcaccagagtgggagaagtctggaggacatcatggtttccgcgccccaaactccaacccatggtgctctggctaaattccagacagagattgttgctagttcccaggcatctgtggaggaggattttgggcgagggccmtggctgaccatgaaatccacgctaggcctggatgagagagaccctagctgcttcctctgtacctacagcattgtcatggtgctgcgaaggcagcctgaagcagcttcctaggaacaaggtccccaacatggcggtgatgatcaagtccctgactcggagcacaatggamgccagtgtggttttcaaagaccccamggaagaaratgaggcagtgagcagcccatttccagccag

SEQ ID NO: 894 - DNA, 293 bp, Homo sapiens
gttaagtttatgaagttggcagttgtactgtggtaacgtaaaagaacgttctcagttttagtaaatacacactaaagtatttagtagtaaagggccatgatgtatataagttactctcagatgctccccgctcctagatgtgtgtgcgtgtgggaggggacagaataaatgcatgcaaacgataaataaaaacactctaccagaaatgttaacagtaggtaaatctgaataaagagtgtatcacttttgctgagcttgaaattctttctaaattaaaaaattatttattttta

SEQ ID NO: 895 - DNA, 749 bp, Homo sapiens
  SITE (747): n equals a,t,g, or c
acaacattgagttctattttttgagaagatataattgtttcgtgatgtttaatgtaggctagctactgaagtctaacttgcaatctaaaagaaatctattacatttaaaatttactgtatattatcttagattattttggaccatttttcatcttagcatgtgaacgtaataataaatggagatttcctaggcttttttgttggctcccactaatagctgctttacctcttgccaccaccagagctccacattacatcagtttttacctggcagcttccaaggtaaacatttgaaggtgtgcattctaatatgcagaatcaagcaggtttcttgctgacaaactgctattatgggaaatactcccttttgcttgaggaataatcagacatcatcaaaataaggacattacgttgaaaataatatcttggggraaactatttatttctaatacggccagtgaggagttgtcttagggaatgaatgggctgaccaagaggattagaaaagagattcagcacttccacctggtttggctctagccctggtttgcagtgactaagagttgtcacctagacatctgtttgtagggcagagtgagacaagtctgtgaccttcagctcagttcctgtgggacagatgcccaccccttggaagttaaacactcttgtttaacagtttttagttcacaggagccaagggactggataggcaaaggaaggcaatggatgtgtttgttttgttgtttnca

SEQ ID NO: 896 - DNA, 548 bp, Homo sapiens
atgatattttctacttaaaatggaggaattctcataactgtgatctaaccgtcataatgaggctaaaaaggaaatcaaactgctcttgctttgcattctcttcagtagctcctttaccctttatttcaactccagcagataaaatagagatactatttgtcacccaacccctccttatcagttcagtgagggtgaatgagttaatgtcgtgaaagcacttgagttctccaaaacaaagatgttgtgataatattactacagtactttgtgattacaagttagctttgtaaataattaccaatgtgccatatccaatcgtgttctatcttggcctaggagtgttaggatttaccctcatttataagtaagcctgttaagcactatggatgttgagccagggrttaatatagccctcctcttcccaccaaataatctctcctctagggtaaatttctagaatttaaaaacacaatgaggaacctgattagggrrcagggcaaagatgrttttttggggggratgtaagtgtgtttgagggtatkgaattt

SEQ ID NO: 897 - DNA, 481 bp, Homo sapiens
  SITE (481): n equals a,t,g, or c
gtgtgaggcagaagcaacacaaaagatcttgatatgaagcaattatttttggtcttaaactgctgggactccagatgacccagaccacggtcagcaggcagaagccagagatgacatctcactatattgcccaggctggtcttgaacttctagcctcaagcaatcctcccacctcagcctctgaacgtactggaattacagatggagcaactgagattcttccccaactagactataagttctctgagggataaggaacatgtctggtttcctcatctctctgtcacagcaccctgtgaatgcctagaagacagtaagaatcaactgaatgtttgtagaaagaataacgatacttacctatagtctaaaggtttagtgatgaaatgaagtccactaacttctctctgcttacttccaccctcaataacatatttcctcaaaccccacagagggaaagacaattcattttttactaatggtn

SEQ ID NO: 898 - DNA, 480 bp, Homo sapiens
gtcactgggggaaaagcatacagacatgtaaacaaatatatcatcagcactaaattaaaattcactaatataaattagtggtcaaagaaggagaaggaaatggaggaactgagaagttactgttgccatcyctttgaattactgataataaattttatggtgagttttcatgagtttcctgcatgaagggraaaaaaatgaagattgctgaactatwgagggaagacmttatagtcatagatattcatttactcattaaagattaaaggtgtgttatttccgaaacattgtactaggcactggggatgagagtaagaagatacagttcagtaggagaaccagagataattactctagagccttgaatctagttgctttgacctcttcaaagtttctgtcatctccttataagtattgagagagactttagaagggacaaaatattaggaacactacttgatctttttaaaaaaaaaaaaa

SEQ ID NO: 899 - DNA, 377 bp, Homo sapiens
  SITE (320): n equals a,t,g, or c
  SITE (376): n equals a,t,g, or c
cgtaataccacgtatgtgacattcttcccccagataatctatattatacctaggtataaagtataaaaattgctcactaacttggatgtgattcacatcagaatttcaaaatacccttgaacaacatatctatttagaaaaaaagaaatgggtatcttaaaactagctatggtatttaatgtgagcttaaatatagtttatctaaaatcttgagaaaggctgaagtcacatgttttgcttgcttataatgaaaatacacagccattttatagtcgagaacatgataacattgcacaggtatttatgattataccatatcncattcataaatttcatatacttgtgaagaaaatacttaaaactataaattctttcnc

SEQ ID NO: 900 - DNA, 443 bp, Homo sapiens
  SITE (424): n equals a,t,g, or c
cggacggtgggttttctttcagtaacatttttctagttaattaagcttttcataagctcatttcactttgtgcactttctggtgggaaaaatgggccagaratawgaagaagctatactggattttaacattcatctcagatgatccacatcgtattaggctggtgcaaaagtaattccagtttttgctgttaacttttaatggcgaaaaaccgcaattatttttgcatcaacctaatagaaaagaagtcccacatggatagtcaacaattgtctgwactttaattaatgaatcaaccaggttattaaatgatgtcataaggctctcaacaaatgctttccaggttgattaagccgaatctatgagtggaaaagagatttkggcctgattttccaagtgcctcaaagtatctttaaaaatttantatactccaaaaatcctaa

SEQ ID NO: 901 - DNA, 364 bp, Homo sapiens
  SITE (214): n equals a,t,g, or c
  SITE (229): n equals a,t,g, or c
  SITE (251): n equals a,t,g, or c
tcccactctggagctctggttcccgggcacttgctcttcacctctgactcagagcgtgaacctgacttcaccctcctacccaggtggccaagactaagcagcagattkaggagcagcgggtgcaggtgcaggtggtggagcgggcccagcaggtggcagtgcaggagcaggagatcgcccggcgggagaaggagctggaggccgggtgcggaancaagcggaaggaacngtaacaagctggagcgcctaancgaggcagagaagtaaatgtcccctccctgaccctgcctagtcacttgcaacctaagaacccaagattgaagttcttgaagcctttaacaacttggactcctattggatttta

SEQ ID NO: 902 - DNA, 327 bp, Homo sapiens
  SITE (306): n equals a,t,g, or c
gttaagagtgggcactgacgggccctaatatgtgacatgacgatttggcatagatagggatgtgagagtggagtaccttcctttctcaagtctcgagatgccagtgaaaccagtattccctgacttgggttycacactttatcgaccaccccatgggtcctgtgtagcctttggccacgcactgacactgcccaggccaagcaaaagcagagtgtggttaagagacaagggtctatgtcatcatcccttttgcttatggtagtgggctaacataacagcccctttctcaagcagagacctggcccngggcacgcagatggaaagggc

SEQ ID NO: 903 - DNA, 569 bp, Homo sapiens
  SITE (11): n equals a,t,g, or c
ttttttttttntttttttttttttttttttttttttttttttttttttttttttttttttttttttctttctcctactttaatctgaagkgtagctmcagcaaagggcacaraatttacaaaaatgtcagggcaagggagcatgtgagcataatccagtctaraaagaaagagggtgcttcccctgccctattatctaaatatgctgggagctttactcccagaactgcaagaaraatgaaaaaraataggaagggtgtaggggaggttgagggggcaaccacaaacaraatggaratttaaggatccctgtgatccccgagatgaccctgagagcatcgattggggaactagatgaaaattcacagcagacatgcaaattttttgaagaggatgaagagccaggaacagtgaggtcttcaccgaaggagtgaccacttgatctgttctttggctgactgcagcacctgagacacggtctgctccgtaagggggacattttcaccccttaatgccacccggtggaccaccttggtgggatcacttttttagatcaccccttcatctaca

SEQ ID NO: 904 - DNA, 317 bp, Homo sapiens
  SITE (308): n equals a,t,g, or c
aaatgtttcactctgacctgtgtcagtatgtttgccatttttagttgcttggttgtttttgttagaaagtaaaatgtattgttgcaccatgcatttgttatgtgtataaaattttttacttcacaaaactgtctataggcaattagcaattagtattaagaagttgtataaattgaaatcactttcatatactaaaaactgtaaaatgagagttattacaaaagatgttgtttattgttttattgtctcaacctttttaacataaagrccgggtcataattgtggctaattggggggaggttaaaagnggattgagc

SEQ ID NO: 905 - DNA, 401 bp, Homo sapiens
  SITE (348): n equals a,t,g, or c
caaaaaatcactaacttttaaaataaagtatgccctcagttgaagtatgcctgggaaatctttccttggtccaaatcactgggattgatcttaccctaaacccatagtatttgtgcttttgaaagtgatttgaaactcaaatattttggtttttgcccccctccttttttttttcactgccccagcttgaagaagagagtaaaggagattgtactaaagcgttttgggattgcttgagtgtgcagctargtgargatcccccagcatatgrccatgctatcaaacttgtaggagaaatcaaagagactctcttatctttcttgctgcctggtcatactagactgaganaccagataacagaagtcttggatctggatctgataaagcaggaagcagagaat

SEQ ID NO: 906 - DNA, 517 bp, Homo sapiens
agttgtggcaattatcacacttaagtgacaaagtgtctcacatcaagtagctcttgtttctgttaggcgtgagagcttgctccagaatatacacgaagcatgtttagtaacaaattctttcagcagctcctcttaggagaggtaactgtttcgaaatacttctggggcgttctgtgtctgaaagtcctgtttgcaaagacaagacgaaggataaggagaataattttttgtagggtgtcctctattgcgagcaattaatctgatgaacataaagcttaatcagtgaaaactgaatcaccttccttgcaggcggatctgccattggatcgtatttcagttttttgggtcaatatatgaacaatgtgtgaaccagaacgtatggtatttgacatcaaagctatgtcttggcatatgtttatgttgatatacttgaattcatttaaaatggaatgttaattacatcgacttcttactataaaaaataaaaagttattgtccagtgmaaaaaaaaaaaaac

SEQ ID NO: 907 - DNA, 281 bp, Homo sapiens
tctttctcacattcttcagctatcgtctaggagtgtggagattgactggaagagggcctgagtgaactctctggaatgacaaaaattttctttctcttcattgggatagtggtttcacaggtatatacattgaattgtgtacaagatctattcatttaaagttccaagtgactggggaagccacaggacacctagaatcatggtgaaggcacctcytcacagggtggcaggagagacaatgaatgctggcagggcgaaatgccagatgctgataaagccat

SEQ ID NO: 908 - DNA, 417 bp, Homo sapiens
  SITE (409): n equals a,t,g, or c
  SITE (413): n equals a,t,g, or c
  SITE (417): n equals a,t,g, or c
cccaaaaaaccaccaccctccaccccaaagatgaaacatgccccatgtcatttttccccatggtcacatttaacagttttgacatgttaatacttgcgcatagatcccaagcgttycttgggaacctgacttttgagtgtttaataaagccggaagtggtgttgccctgaaccagcagattttcacctgggttctggctccggtgtttaacactggatacatctttgatgtgcgaaagtgagttcatcttcagacacatttggtacatccagaaatagatccaagaaatggggtggttgagtgggtccgcacgaaatgcttgattatgtcagcaacacccaacactgtctgttttccatttgttggttttaatcataaaattgtcaagtgaaaaaaaaaaaaaaaaaanaaanaaan

SEQ ID NO: 909 - DNA, 460 bp, Homo sapiens
  SITE (434): n equals a,t,g, or c
  SITE (447): n equals a,t,g, or c
ttaatttagtaaaaaattacttgcactttaggttttaaaaagtttaacacatttaagatttagagtagctaagagtaatgtccattcatttatcctaagtaccaaataatacgttaattcctttgtccctgactggatcttccaaattctgtctagttctaaaatattgggcttaatatttttatgaagccacaggttatagtgacctcgtgtgctcttcctttctaaggattcagtataatctctgagtcttttgccatcaaattttgaaagttttatgaagtcactttcttgttcctgttgcctagttgtcctggttgttaggagcatgttgacttttgagattaacacctcttatacagaaattaatttcctggaaaaggaagatttattgattcaaaatcattgaattccttaagtttttggttcttttnataacgggccaancggaagtgcctag

SEQ ID NO: 910 - DNA, 475 bp, Homo sapiens
  SITE (440): n equals a,t,g, or c
agcctgccagggtttgctggacatgcttcagggacgggccatggtgctggctctgctttctaatcatggtgtcagtccttcacttcccttggaaatacccagagattttatttcctgaagataggacatgatgggtgctgtgagatggtatttaaagtacctgtctgcaaggaaaactttaaaataggaagtactaaggataaggtcctatgggatattggaatattttataaagccacaatagttaaagcacttagatgtggacagatgagcagagaatagaggactttgaaacgggccaaataaatatggaaatttagtacaggctagaggtgtttccaattaacgagtaaaatggattattcagtaaaagcagttggccctctggaaaatagtaaagccatgtatgtgcctcactctttatgccagtacatattccnagattaaagatttcaatgttmcaattatgaaagta

SEQ ID NO: 911 - DNA, 607 bp, Homo sapiens
  SITE (554): n equals a,t,g, or c
  SITE (590): n equals a,t,g, or c
  SITE (607): n equals a,t,g, or c
aggagaagtgattttgcaaattgccaacagaacctgttctgccctttaatgcacttgatatagctttagaagttcaaaacaaccttaaaggtgatcaacccaacactcatcaactgttagccatggcgtcacgctgcgggagagtgctgaactttttcagtctgatgagatgcgacctgctaatgatcccaaggagagagcacccatccgcatccggatgctgaatgacattctccaagacatggagaaaagctttctggtaaagcaggcaccaccaggtttttatagaaacatcctctaccaccttgatgaaaagacaagccggttttcaatacttatagaggcttgggaacactgcaaaccccttgcatcaaatgagacccttcaagaagccctgtcagaggtgttgaacagcattaattcagctcaggtttacttcaaagcaggacttggatgtgttcaagagtgtcttggatggggaagaattgagaaaactctggagcatttttaaaagtttgtttacaattcccacaagccaaaagctctaattttanccagattttcctgacatggaagggttatttccccanggtttgaccccaggggn

SEQ ID NO: 912 - DNA, 866 bp, Homo sapiens
caaaatactttactattattgttttaggcagtcagtacttatttagatttatccacatctttattctttttattgtgctggaattttgaatcaaaaagagaacagaaaaaagaatttagtgcaaataagggccctgaggcatatggagaaacattgcgcagaaagatcataagtaagatataatgaaatggggcaggaaaatacacacaagaaagtaacattytctgaaggcaagaggcacaaaggtattctttattgaaaaagctttaggcagttaatgagttggagaagtattgccaagttacactcaccaaatttagtagtatgcctcaatttagtgggcacaaaagctgcttattgttgaatgaacaacaagcataatgtaattggtttcatacaattaggaggtcagcaagccatgcttgttataattggcactgccatagtcaggggcttatgcgacctcaagtgatgatttgcctgaaggaataagccaggaatgtgtgtgctttgggctccagagacttgactaatctggctgcaaggcctcagggagggaggccaagaatcaaatcacagtgctcaggcagggcttggtagactcagttgaatgtagtcagtctccattcagttcatcactcaccagtgtttgagccggagccggggaagtgggagatagaggagaggagagatcaagtggccgggaaccattttttttgaattgaaagggcagtgcagagtgcagcccgtaatattgcttgatcttaattcctcccaagccatccactttaagcagtctccagcctgtgtggcatgggcttaaaccttcacacaaagggtctttaatttctccttcgtgccgaact

SEQ ID NO: 913 - DNA, 489 bp, Homo sapiens
  SITE (74): n equals a,t,g, or c
  SITE (456): n equals a,t,g, or c
actggtttcttccatcctattattggaaaaacctgggggatactggattagtagaaagtactgtggaatacttncataaaaacttatgtgcctggcaggatggtagttacatttttcccttcttccatcacttagtgctttaattcccaaaaccaaaaactaggtaatttttataattttgtgttatggcatagcaatagagctaggttaccttatactgtatttcatcaaatctaatgtattctgatttcagagatactaaaatgtgggggaaattgtctcaaaattgtgaattcatatactctaatctttgtattctaaagacaaggaaataggctcacagaagtgaaataatttattttaggttacatcatcagtagaggcagagttgagattgaaactcaagtatcttgaatcgtagtccattgtatttcttactacagtggcagtattgtnttaccaattctaaactggttagtcacataattt

SEQ ID NO: 914 - DNA, 683 bp, Homo sapiens
  SITE (663): n equals a,t,g, or c
  SITE (667): n equals a,t,g, or c
aagctcttgatttatactttattttctgtctttatatgtaacacatactaatcaaagggaaaaaactaaaaatacagatttatacccaaatggataacgattatataatcattcttactccaaaaagaactgtattaggtataaacaattataaacttcagataaataggtcatattctataaatactaatttgttatatacaacacataatcttctacaaatactagttttatgttattacttttcaaaatatttcaaactagttatttttttccttgtgctycaattttctcatttgtaatttagggacttacccatttttatagatttactagaaattaagttttttttgctgacaagaatgtcaaatcaggcacactgggatttattcctttaaaaatacagtcatttttaatcttcctaataggtaatggtctaaagtcagagtccagttacaacatggagataagacacactgccaattggcaactcctcctctggcagtttttttcyccaatgkttgagtagaycattgtttctttggtttgaacaccagataaaatgtgtagttggttggatttaggacccatattgtatgacaaatacccatctttaaacacccggacgcgtgggtcgacccgggaattccggaccggtactgncagntaccgatttgcctgtc

SEQ ID NO: 915 - DNA, 569 bp, Homo sapiens
  SITE (7): n equals a,t,g, or c
ccaagtnttgggctttctctggaggggaaggtggatgctggcgggtgacttgcagtgggcgcctggcagtgggtgtggactgtaactgacaggtggaaatgagtagggacactattgttccctccatgccagcttttttgctggaaatgccccctccacacccctggtagctytgtgtcctgagaaatccagagtgtgggagacatcactgcatctgtccccccagcttctgtgaagggaagctgtggcctcttttgaatgtggggaacaactgaagactcaggggtcacccaraggtctggtggaaagcaacttcaggtttcatcttgctctattcctcaaaggtctggtctgtgggcctctgaggagaaaacaggtctagccaagacagggacaaaatggggaagggggtgtgccaggcctgaactgagctaagcacctgccccgggctccacacttccatctttyttttgtyttcatttcacctctgtgtttaaagcactgtgtgacatagctccttagagatataacctattgtctgctcaaaaaaaaaaaaaaaaaaaaaaaaa

SEQ ID NO: 916 - DNA, 808 bp, Homo sapiens
  SITE (33): n equals a,t,g, or c
  SITE (37): n equals a,t,g, or c
  SITE (380): n equals a,t,g, or c
  SITE (397): n equals a,t,g, or c
  SITE (417): n equals a,t,g, or c
  SITE (441): n equals a,t,g, or c
  SITE (467): n equals a,t,g, or c
  SITE (522): n equals a,t,g, or c
agctggtacatccatcaccactgacgggcctgngctnggaaacctggtttgtcccctgtcttgatggcctacgagaggccaagttccactgggctgggaaaagtcactttgtctgtcttgttcacctggagcctgacacaccgtagtactgagtacaaatagcttgatttggctaggcttggctgcagggggacgtgcctaaaagacattccgggcatttgcacttgggaaacttgcctcaccttcaggcttgtggggcctctctatgcccagtgagtccaggcagtcctacgcaagtactcatggagagcacggggtgggtgtgacagaggctggctctggattgggggacaacagaaccagagtaactcctccgcctnttgctgcttttgcaatngaatttccytytacctttcntggaacacaagctgctgtgaaccnaaactgatatcaagtgattagctcanccgggccttggttgcttttcaaagatccccttcagccccctgccagagtcactgnccccataatcaccatgtcagaagggaccctagggcattcgtgtcctatttatcaatcttcagcaccacctctaagatctctgagagagggtggatcagcctctgtgtaaacaaaaagctgttaggacttgttgcctctcaaggtggactattctgttttctgccaggacactgccattcatgcattgtcagatatttattaaacagcagcaaagtgccagccaatttgtcctggaggaattcatagcctcatggggcaaaagtaaataaacagcttattacaattc

SEQ ID NO: 917 - DNA, 563 bp, Homo sapiens
  SITE (537): n equals a,t,g, or c
ttttttttttttaatagttaaatttcagataatttattttcagaacaaatctatacaactatatattcaataagtgcattatggtttgattccagtatttttgtgtttcaaacatttttggtgtatttgaaactatctgaaaacattttcttctcctgcttaaaggtttcacattatgaaagcaaaaaattctaataacgtagagactagagaagaacaactagttaaaaagttagtatctcacgtgctggcagtgcaaagagaaagtaaagtcatttcttgaagaaagattttctgcttaaagtgaaatgtgtacatacagacctttccttcctgaaattaagttcctgaatcagtgcattccagctctttttccttttaactgctttactgagatatttcacacaccataacattcacccatctaaagtgggtgaattaaaccacttaggtctgttcttaaaacagcacggtttgttgaaaagcctttttgtcttggcatccttgttgaaaatcagttaactgacaatacaaggntttatttcaggagtttccactaatgt

SEQ ID NO: 918 - DNA, 641 bp, Homo sapiens
  SITE (29): n equals a,t,g, or c
  SITE (111): n equals a,t,g, or c
agatattgccaaattgtcttccataaaanttgaaccaattttcactaccaccagcaaagtaggagaggacttgtttatccacaccctctttaatgtatgtaatcaaattangggatatctgccagtctgttagggggaaatgatactcttctctacttttattttgcattctgagtgtggcagaggcaaagctatgtgcataccatagctttttctccccctgaaaacacaactaaactacattgttttcctggcctctcatgcatttaggttggggtcatattacttccctccaagaaaaacaacagttggtatgcctcctccacacttcccacaactgtggaagccagtgatccagatagcatagctattaatacaagatgggtgaaagctgctcaaccgcatcagacagcatgagtggtaagattttattgtgtcaaacgactgcattagttgtgttttgttattatggcagcatagcctagcttagccctaactaattcaataaataaagttgagcattatttgtacatttaaaagcgttttttatgtttgctttacagtggctttccacttttctatcagagaatcccccctcccttatgtaccatgctatattaataaattggaaggagctgcta

SEQ ID NO: 919 - DNA, 348 bp, Homo sapiens
caatggcgcaggcttcacttctgctgtggcggtgactgaggcctttctggtgacctcagcccaacacaggccgtctccggagcttcccggtagtggccccggattcccacggtctttgtcattggctgtcagctagcaggcctggccgctcccgtgcggagagaccatctcttcagggcaatgtccaggccgagcagcgtctccccgcggcagccggctcctggcggtggcggaggcggcggcccctcgccttgtggccctgggggcggcggccgggccaaggggctgaaggacattcgcattgatgaggaggtgaagatcgcagtcaatatcgcgctggagcgcttc

SEQ ID NO: 920 - DNA, 511 bp, Homo sapiens
gaccacgaacgtgtacattaagagtgaccctcagcctaattaaaattccatggaacacatggtgccccggaaaactttttttcaagcactgttggaaagcccacaaagccctttagaattaatctggatttgtttctcaagttctgctgaagtttaaaaaaaaactttattatacaaatwactcaaaattttcctgtgtaaaactaaacctgtagttttaaaacataatcctgtttgcattagagctcactgtctttttgtgatggaaactgtgttcgtatggaatgactaaaaatcttttatttggtttgtttcaaattacaattgctgatggacaatttgtattgcagcgagaacaacagaatgaaagaaatgtatctctgtgcggctatacatatacatacataaaattgatttttaaatttaaaacatatggaaaacaaaacattgaacagtttgaattttgcccaagttggacattaaagtaaaaatgaagtgaaatcaaaaaaaa

SEQ ID NO: 921 - DNA, 508 bp, Homo sapiens
ccgatgtccacagtgcagagagtggaaacgctgccctagtggcagacgcagcagattcagaattgaaggatctgagttcaagcccagacttgtaccttttacctmccaccctcaggcgaggcaactggcctcagcttctggacgtgcagcacgggtgagcccctcccgccagccaggaaatgatgagtttcacgagagcaggtcctccaggccccagcaaatgccaggcctgtttactaatgacagcaaaggtccaccatcacttagcaggaatgagacattcgctttcagcctgccctgccagcctcacagggctgcggcatgaacccctgtagggttagtttatgagtkcgtagggaagtgctccccagaaagcaggagaaacacggatggccagatacacgtttgagcctctgacaamtacagtcactgtgtactaactagtggtgaggttggcaatttgtaaaaattactcattaaagagggagacagagccaggctccgtggc

SEQ ID NO: 922 - DNA, 536 bp, Homo sapiens
  SITE (454): n equals a,t,g, or c
ggtaacattgtcaggacttcstgaaggattagatgtggaagggaaggataagaaacagaccaaggataactttcaaatgtatgcttaagcaactggatgatwatgatccaytgagtgagtgawaacttgatggaagtggaagattcagagttcatttcyatctaggttaatttgagacatacaggagcataagtaagtaagtagttgatattgggtgggcactattgctaccgagtattgttccttgcgggctaaccttactgcatcccgagtaaattaaggtgccttgccaatgcctcacgggaatgccagaagtgtgcgtctagctgccacagagtcacagtgcctctgggtcctctcactgagaaaggcacccttgagagatcgtaggggtctgtgggaaagcgtcggctcacccttttggaaatttcaaaaaaaaattttcgcgccttgnggtttgcgggttaggaaggaaatgcccccggtgcgcccctttgcgcgcggtggccccccctctgggccgtgggctaaaagtg

SEQ ID NO: 923 - DNA, 520 bp, Homo sapiens
  SITE (173): n equals a,t,g, or c
  SITE (185): n equals a,t,g, or c
  SITE (337): n equals a,t,g, or c
  SITE (437): n equals a,t,g, or c
tagaaattttctttggttatttttctgatttgcttaattttttttgatagtgacttgttctttgcttatgttttggcattttccttttatgtcattaatactgtaattttagacataacctatgttaggtaaagtcctataattatctctagagttcttaaaatatatttttnctgtctgctgtntctcactcatggtcaattcttgggttttatgtgtattatttatcaaccataatgttgaattatggtcttgtgttcagggatgcagggaagggttttatctatggacattatttgcagcttatgtcaaagatgggtccctctgaagtgtagtnatttgttttaaggtagcaggtaagacagtaaaaagaggctgtgatacattttgaatacggcactaagaagttagttaattttgtagacagacttattgtngattcaaaatgaggaaagaggccagggtgcagtgactcatgcctgtgaaccgcaggattttggggagaccaagaatgggagga

SEQ ID NO: 924 - DNA, 476 bp, Homo sapiens
  SITE (426): n equals a,t,g, or c
  SITE (467): n equals a,t,g, or c
agagtgtacagtctcttggaagagacaaaaatatacggaatctacatccacaaattgcagcaagctgttccattccccaccaagtctcagagatcctcctggtagtctaaggatacactgaagtagtgccaggtggtaaggcttcgggttgattgcatagatgtcttaccactgaaaggctggcaaccttaggtggagtcttaagtcccctgggaggagacgagaacatccagggcaggctgagctccacagatgcccctgcactgacaccgctgcacagcagtgcagggccagakaggacgaggctagaagaggcagcagcttccatcctgtcccaagttaagtgacagaattatgtcagtgctctcagagaggccaaggcccgaggaactgattcctttaacaaaacttgcatgagaaggattnctttttttttttttgagaggaaatctcgctctgtcgcccancctgggaaa

SEQ ID NO: 925 - DNA, 507 bp, Homo sapiens
  SITE (418): n equals a,t,g, or c
  SITE (502): n equals a,t,g, or c
ctcatcaacaatcctttcaaaacaagacctagagataaacagttttttccagtgtcaattttcatagacatttttaaaaaattaaacacatcttgtcacccagtgctagcaaaaattgtaaagagcaaaaccaaagtttttgatgtwagtcttatttttgtaagcagggtatactatagtcgtggcccatatggracacacaggcagccggttttctgctacctgagccttggrgaagatgagaaggaagggctgcctgctgtgctgccctttgaaaaggtccaaagcagacaggagcgcacacagcagaagtcaccttctccttctgatgaccacctttcaaaaggcttaacagaatcaccaagttgtcacagtcagctcttggccagtggaaaattgtctgggcctgtatatgttnggaggaactcagatagaaaaggactttgtaaacagcatggaaacctcaacatctgctgtctcaagcactttaaaaaaggctacnatttc

SEQ ID NO: 926 - DNA, 569 bp, Homo sapiens
  SITE (516): n equals a,t,g, or c
  SITE (530): n equals a,t,g, or c
  SITE (556): n equals a,t,g, or c
gcgggcagatcgctttgaggtcaggaattcaagaacagcctggccaacacgggaaaaaccctgtctctaccaaaaatacaaaaattagccaggtgtgatggtgaccacctgtagtcccagctactcaggaggctgaggaaggagaatcacttgaacccagcagtttgaggctgcagtgagctagtcatcccattgtactccagtctgaaaacagcaakacccygtctctaaaaaattaaaaaaaatatacaacataaacctaaactataaaacagcaatggttccaggtaatgttggccgtgacatttaaagaacaaaattgcttatgaagttgagatggttgccaaattgtaaattcctaactcagggctttgaaaaatcaattgtagggaaagaatctttggacaatttgggctacaggaaaaaagggaatggattctttttaaaattgtatggcaggtgggatttcactggaaatacaagggttgttaattaaaaccattttttaaatggttngggttccaccgggntaggtgttaacccaagccccctttgnaaccggttttttc

SEQ ID NO: 927 - DNA, 560 bp, Homo sapiens
  SITE (541): n equals a,t,g, or c
ggcttgctttaatgttcttaatgtttttgtatgagatcctccatgtgagatttgaaaagatccactatgcgggtcatctaaccggtcactagacattgattccacacttactacgtcgagcacagttgacactgggaatacatggatggacttatactagccctaaaataactccttttctattagaactttactaggtaaaggtatttgaatgtctgaactccatgtttagaaggagtcattggttttaaggctctgtcctagtacacctgtaagagcatttgcttaaaattgcctggcctttgtatgttatctctgtccttcatatttgaaaatccttgctagaatatggcctgatcaatgctgttatgctagtgagaaaatccmcactaaagactatttgctatatwttagcattacggktagaagtctggaagccttggaggctggtcaaatctgarttcargtctactctycsagtttactggctgtgtwaccttaggcaattacttaaccyccggartctcattycctatctgtncaaatggagggttaaaaga

SEQ ID NO: 928 - DNA, 426 bp, Homo sapiens
  SITE (1): n equals a,t,g, or c
  SITE (59): n equals a,t,g, or c
  SITE (163): n equals a,t,g, or c
ngggattgccaggttgtggcacgtctgcttttggccccgtcagtccggtgcttttccanagatggcttcaagcccagcagtgccggtagatgagtggcctcaagtcatgttcaagaggtcattccaatctgcaggtcacccgtgactggtcttatcgcagccntgacctgtttctctttttggtggcagcagctccacttgtccccacggaagacgccagggtggtaggagyccagcagtccggtgttgttgatgctcaccttccgcagcgcagacagccactggttaagctcattcacacacttggagctgggcgtcttcgcgaagctgagggcctcggtagtgagggagaagtagagcttcttgaaggaggaggacatgagggggcccttgcccttggtcctgtggatgaagagtggcccctcc

SEQ ID NO: 929 - DNA, 563 bp, Homo sapiens
ttcataagagaattagctgtctttatttttatttgagaaggattagcataatatagaaagactatgtatatgagttccttaagacatggcaggacccttgccttttaatacatatttgaaaattataaccatgttgttcaaatcccaaaatactctgggaggagataggggccaaaaaaagaaaataaatcctttttcatggatggtagaattaggatgtttccagaaccagcactgtgcccatcgtagtaggcactgaatttttttttgtaaaagaacattaggatagctcctcaagagaggatgttgttttccataatgaacttcttctggtgctgctgtgagacctccaactccagtaggccactgatgtgtttgagctgttctgaatatctcttctccccagggagcagggggctcttttagcattgacagtgaggagtatgaagcgatgcctrtggaggtgaaactgctccccaggaagctgcaktcttctgtgatcctggagaaagtttgtccagaccgtggcttctagaaggacaggtagcagctccccaatctcc

SEQ ID NO: 930 - DNA, 414 bp, Homo sapiens
tggggtgggggcggacctgccaattatgccaaagtcttggagtggcagctggcaccatcaccaaggcacaaatgccagcagagacctggcactcaccgggttgtgattccatagggcccctgtctcctgttggtctcccaggctcaaaggctgacctgataattcaagtgaaggatgcctagttcaaggcctcccagttcctcatcccaggccacctggtcaggtggtcccaagggacaagctaggtcctcctgaactgcagaggctgccaataaactggcaacacaggtgttgcaggaagatatagctgggtctcatcctgggtctgtaatttattagacgtgtggctttggacaaatgacataatttcccagarcctccttagataaaaaactagggctttgcttaccttgg

SEQ ID NO: 931 - DNA, 654 bp, Homo sapiens
  SITE (647): n equals a,t,g, or c
  SITE (653): n equals a,t,g, or c
ggagcagcttttaccctgatccagtatcctgaggaattttaagcctccactcaaatgacctgcctgtgttgtcatttccatgggaaagaactctttccacgagatctgctagttccaggcctctaagacaggaacgtatgtgccataagtgggtctacttcacagactcaatgaggcagaaattattgtagttttctcctatttcttctgcacccaactttctccttgtatttcaaaggccaggccatgtacactaacgtccttgaaatttgcagttctgtatgcttctattccaaatcattcattaccaataaaaacgaaataccaccctttccattttatagacctcatcccctatttctgtcagacagttatatgacagggtgactgtggaacctcttagttcatccaaagtctacctgaagtgctagactttcagactcttatcactgaaatccttaaggttgaggaggctttatttccctagcactggtgaagggcttcaactgtcaaacctcagaacaaatgcattagggccttagaaatgtcaatggggcaggaagaaaacacaatttctaactgcctgtttttgtataatttaataaaaaccttttaaacattaaaaaaaaaaaaaaaaaaaaaaattnctcggnc

SEQ ID NO: 932 - DNA, 424 bp, Homo sapiens
  SITE (393): n equals a,t,g, or c
  SITE (406): n equals a,t,g, or c
  SITE (412): n equals a,t,g, or c
cagctgtggctttgatagagctgtgctgttttggctgaattataagggccgcctatgacaactggaatgaacaacgaatggctttacataaggatattcatatggctacaaaggaagtagtagatatgctacctggtatccagcaaacatcagcccaggcctttgggactcyttttctccagctcactgtcaatgatctgggaatttgcctacctatcacaaatactgcacagtctaatcatactggagaccttggacactggttctgctttggtattaaccattgaaagtactctccatcactggcatgctcttcagagtctctggttagcaaagggcatttccaaaaactttgtatccgttttggccgatgggatttgagacaccaggggngacgggaaccagnaattcngggggtttatgg

SEQ ID NO: 933 - DNA, 334 bp, Homo sapiens
  SITE (56): n equals a,t,g, or c
tagttaactatggttctaaagtctactggtagtgttgcgggaggggcacagtgggntggggagttcatccaagcggtcttcagcagggatgggacttggggaggaaatccactctctgtatccattgacttttaattaatacagttagraaatgtgtccaccttaatgttatatctcggtagcaaatggaatacagtggcaagaatgacaacggacattctccacatcttttcactgcctgagcagcttgaccatttacttcccacaataaaagaaaccagaaagtggactgtattgccaggtggttaaaaacatgaccccaaaccaccttaca

SEQ ID NO: 934 - DNA, 631 bp, Homo sapiens
  SITE (467): n equals a,t,g, or c
cttgttttgctactttaggaaatgtaagagagattaaaattctttgggaaatggttttaaaaagtagttttgtactcagataggtaaagaacaagtccagtggtgctgacagcaatggaatttaaaacttgattctaataatctctgagtcccgaaggaatgccacgcagacatccgtttgagtcacgagcttgtaactgaggatttgacaaagattgagtcctcactgtgtgccaggcacatgctaaattttgtgctaggccttgggatactctttcagacaagactttgtccctgctcacagagaaatctgataggttggcctatagtcactcttttctaaacttgacctatctacctgaattaaccgargagctggttagaaatacmgattcctgggccaagaagaagagcctaaagtccaacttcctgtaaccatcaacacatttaaccctgtaagtttagangtttattgtaaccttctcatgccctttgctatactcagtgtgcaaatcatgaagactaaggtggatcctgttttggtggagattctgatgtgttaagtctgtgatgaaacctgggaatgtgagttcttgaaagctcccattattggaaatcactgagctagata

SEQ ID NO: 935 - DNA, 469 bp, Homo sapiens
  SITE (461): n equals a,t,g, or c
ttctccaatcagaagtctagaaggcagggcacgcagtaggtctgcaggatgactcagaacccgcgtatgaatgctgtctattcatgggtccaggcttttgttaaagtctgggcctgcattttaaagagggagtcagggaactggctggacctggtctgacaactaaggagtggtgaacacttcccccaggctagtactcaggtggatgaagtcatcaatattttctgggcagtcctaatctgtgattaacttttatctctgctgtgaaataacagcctccttttcagcctgctaacaataaagttaacctgggctgcccggskggggggaatattttaatgcctgggctccagcagaaggcacactttgaagaagccatgttgggactccttgcccttggagagagcccagagtggagggaaggggtctgtaatggtggttggaagtcctctcagcaaatnggtccttg

SEQ ID NO: 936 - DNA, 449 bp, Homo sapiens
  SITE (389): n equals a,t,g, or c
  SITE (402): n equals a,t,g, or c
  SITE (412): n equals a,t,g, or c
  SITE (430): n equals a,t,g, or c
tgaccctaaagaaatagagatgaattgcctgacagagaattcaaaataattgtcttataaagctcactgagttacacgaaaacatagacaacttaacaaaacaagaaaaataaaaattcacaaaattaaaatatcaacaaggagctaaaaattatgaagaaccaaacaaattttggaatacgataactgaaaaattcactagaggtcttcaacagcagacttggacaagtagatgaattggcaaacttgtagacggatcatttgaaattatctaatcagaggattaaaaataattaaaaaagccttaaagggaagtccaagtggacttctggggacaccatccaaatggaaccatttgtgtgtatgggaagtttcccgaaggagggaantggagaggagccngaaagccttntttaaaggcctactgggntgaggccagttgtagtggg

SEQ ID NO: 937 - DNA, 423 bp, Homo sapiens
  SITE (385): n equals a,t,g, or c
  SITE (388): n equals a,t,g, or c
  SITE (408): n equals a,t,g, or c
aaacctggttgaagttctcccactttatattgtaaatgattacatagtttattagtaattgtgtcccctgtccacccactggtccatttggatgggaaaattttcaaaataacttcataagaaaatgataagaaaaatgtggtcaccggtatcatgaggaacttccagacagctcagcacagaaaagttggttttaaagtcctcgaaaacgttactggtaatgagcttccactcctttagtcgttgtgcatagatacaccacagagtaaggttataaaaataaaagttgtttcaggaaatttcccattgctttattacatgatcaatgagagtaaagagaaatggaagttgacgggrtaggaatgagggactgctggaagagtgntcncatttccaaggaatttaaangcctgtgaaagggcc

SEQ ID NO: 938 - DNA, 707 bp, Homo sapiens
  SITE (175): n equals a,t,g, or c
  SITE (662): n equals a,t,g, or c
  SITE (667): n equals a,t,g, or c
  SITE (679): n equals a,t,g, or c
cttacacatacatacatacatatatgtgtgtttatttaacggtgctaatcaatcttgagcaggtcacgtgactggtcatgcggactctaaaatcatatcagattttttaaaatccttgatatatgcagatgttatacagattttcttagcagtgtaataacgttaaactgaaganataaccatcctgcaggcttcaaaggacgaggtcagcaatatttcccaacatggcttgggggaaaaggatagttttgtctccttttgtattcaagtaatgcaaagtgcatttttgtctctaagtagcttttgactaamagactttgtagtgtaaagggkgttatacmaactgtaatggtgtgcttcaaacaaatgctagacccyttcaccyttgkccgtatatacaaagctgttaattatgtggtatgaattaactttgaacatgttgaaatatgtagcatgtctttaactcagaccgaagattcctgattgcacaggttgtgttctagccagttgtgatttatttgttcagaaacaccaatgtgaattgcactcctatcatccagaatattgtatgaagtccagtgatctttaaacagcccagaagtaatacctggacctccattgggtagcccaaagtttacatagccccctttaaaaggtaatcngtccnattaagtttccnatttccggtgcaccggggattttcccct

SEQ ID NO: 939 - DNA, 457 bp, Homo sapiens
  SITE (453): n equals a,t,g, or c
  SITE (456): n equals a,t,g, or c
  SITE (457): n equals a,t,g, or c
cagttagattagctacttctaaggtgcttctactttttcaggatgttgtttctgtagcagagtcatctgtttcttgtccctccgccctctctatgttaatgattgatgaatgcctgaagtatatggagttgcagtggcaattactggggtttcagtggtgaacataaccagtccaggttccattgcccttgcccctgtcctcagagctccatctctccttagcagtattctctcttcatccctgatgggctgtataatctaaccatcaaatcccttctctaagccaccatcataggactcagtgctcctgtgtaggagatacatgctagtggcctagaactggggtggtccttgcttctgctaccaagggtgaggtaataaatgttttcctagcctcaytcccttcaaatggtgtacaaaaaaaaaaaaaaaaaaaaaaaaaaaggggggccnccnn

SEQ ID NO: 940 - DNA, 666 bp, Homo sapiens
cagtttcgtcttcccagacgcccccagccccgttkccctgaacgactgttgggtgtcccgacggctcctgtggctggcagaaagagaaagaggataacactgaccaggtktgggtctggtcagagcccccgcctcttcagggcaggtgctgagttgtggaaatttgaggagcctattttcgtgtttagttttcaaactaagactgctgcttctgcttctctgacgggcttcagctgggaacagattaactaggttgctaaaggaacaaatatttcttccgtgcactgaagacaggcaggaagacaacagataacgtacctgcagtggagaggttaagctcctgtacggaagcgtaattcataaatagataaatataggaaaggacaacaaagaaaatagggatagaataacgggcagagaatttagagatgatgtcaggtgattagttttctcatctaaaagcttgaaaatcctgcatgtttgtggagtggtcaagcaggtggtgaagagggcaaactctttgattctacawtagctgatgagggaacatggactttggaggacagaaaaatggttcgtattgttcttacaaagacaaagagagatgcagcaaattgttggacttctctactagaatctgaatatgcagcggcctcgttccgaatt

SEQ ID NO: 941 - DNA, 481 bp, Homo sapiens
  SITE (425): n equals a,t,g, or c
  SITE (467): n equals a,t,g, or c
  SITE (476): n equals a,t,g, or c
  SITE (478): n equals a,t,g, or c
aacccctctccccagaggatgccttgcatggtgaggtcaaagtacaagatggtgccagttactgagatttggcmgaaatggtcttggggtagtcgcgggagtttggaagtgggggtaaggttgctggaaggtttcaaggtctctcatctgctccctctccgtttcccatgaaatgcccttgtttaacgggctgtggtgccgaactccgggatcactcccacagcctggaagggagccgttgcctccagctgcagtgcatcaagggagctcggaatagaccctgccctctgtcagctgcaccagtggctgtccatggggggagaggcagaagcctaccagaatttcctgtcttggctccccagatcagaatcaagggacttctggcctctggactgaggaagtgacattctgtttttcaaaggaantgttgttgttgcggatacaagtgtgtgtcaatgaaatcaggncttaagtanangtt

SEQ ID NO: 942 - DNA, 552 bp, Homo sapiens
  SITE (528): n equals a,t,g, or c
  SITE (548): n equals a,t,g, or c
gtcccacagctagactacctgagttcaaatcctaactgccctcagtagtcacgtgttcttgggtaacgttcttaacttttctgtatctcagtttcctcatctctaaaatagtaggaatattaatagtctacacctcataagattgttgtgaagattaaacgagttaataaagtgctgtgaatgatgcctggcacaaagaaggcactcaataaatagtagttcttatagttgttgtatatgctttatttgttactcgttttcatagcaggattgtaactacttgtttcagggccaagataccagtttctttttatccctagagcctaaaatggcatcattcactaaaataaaattgtgtttaaaaataaagatatatacttaattctaccccaactgtcatacatttgtcatgatggcatttatatctaaactaccatcctggaatggctggattcttttgtgctcttcttggctgctaaacttctaatttccttctccatttaaaaaatggtcttagtacttcctganacctaccctgcctcccctantccg

SEQ ID NO: 943 - DNA, 476 bp, Homo sapiens
  SITE (32): n equals a,t,g, or c
tcctgatatggaawccawatgcttttgaatgncacctaawaactcagcattaacaagtatattactccttaaattatacatgcattttcaatattcctaaccaaatagtttatagcttattgagaagaagtctgttcttggagagatgttgaaattagatgtttattaaactttaaaatataatgccttaagctgtggcactttaaaaacatctttatatataaattgctaaaaggactgttaatgcttttctcagacacattggcattttacaattttgcacatggtttatttgaaatcaaaaaataactatactttgttttataagtctacctaatatctcatttttgattctcatcgttagcacagttttgttgcttttattaaactattttaactgaraaagtgtcatgtctgttttttgttttgatttaratgtacgcaaaattttgttttaccagatgtcaagttaatgt

SEQ ID NO: 944 - DNA, 550 bp, Homo sapiens
  SITE (467): n equals a,t,g, or c
  SITE (518): n equals a,t,g, or c
  SITE (535): n equals a,t,g, or c
  SITE (550): n equals a,t,g, or c
agagaacagctacaagcttgggtggagtcaccataaacacacccaagctgcgtcctctaacctcaggcaagatcctggtgaaacagcatgacatggcttctggggtggagggtgggggtggaggtcctgctcctagagatgaactctatccagccccttaattggcaggtgtatgtgctgacagtactgaaagctttcctctttaactgatcccacccccacccaaaagtcagcagtggcactggagctgtgggctttggggaagtcacttagctccttaaggtctgtttttagacccttccaaggaagaggccagaacggacattctctgcgatctatatacattgcctgtatccaggaggctacacaccagcaaaccgtgaaggagaatggggacactgggtcatgggcctggagttgctgataatttaggtgggatagaacttggtctactttaagcccatgtnacccagagcccaccaaaagttttaaaggggcccattttccaaaacgctatnaaacttttccttttttnccaaaaaaaaaaaan

SEQ ID NO: 945 - DNA, 480 bp, Homo sapiens
gacagtacggtcggattcccgggtcgacccacgcgtccgttcttctcttaaggggatattaagactgttacttcctagtaagccaagtaataccatatttttattaacatctaacttttgtagatgggtgctaaaattggcatacattttaaccactaaaatagaaaaacaagtggtgctattatgtctcatggcaccagaaatgagctagcacttgggtttgttgttgctgttgtttattaagagtattgtgttaattaaatcattacatacttgaagttatattacaaaaattctagaaggttgattgaactatttttttaggaactaccatcaagtgtagcattttctkgcagttttaaaatgaggraaacttctttgaaactgtgaaatgctccatgtggtaactggctgctgagaaaacccttcaccaaaaaaataaataaaaattgaataggattgtcatcaaaaaaaaaaaaa

SEQ ID NO: 946 - DNA, 614 bp, Homo sapiens
  SITE (7): n equals a,t,g, or c
  SITE (508): n equals a,t,g, or c
  SITE (516): n equals a,t,g, or c
  SITE (553): n equals a,t,g, or c
  SITE (573): n equals a,t,g, or c
  SITE (591): n equals a,t,g, or c
  SITE (597): n equals a,t,g, or c
ccccccnttttttttttttttttttttttttgagcatgaaaataaatctttattttcagttattacccaccaataagagaaagttaggttcacagttttagctcttgacacaaagtgaactaggaggcaaatttatatccatcagatacaactaatgcaccaactttttaagttcaggctatcttgaaagcttgcaacataccagatattgctatgttgtctctcacgacagcaatggatgacactgagaagttgtgttttgagtagcaggtgttttctatagtatgttgctggaaatcaagaggtttataaaacatggtacatgtttggaaatgagttagatacttgaaaagtctaaacacactgatttaggagtgcgtatgttgctgtctcaatgaacaatgggtcaatagttcatatggactaaattaatctctgggtagcacgtatgtgtgtaaatataaattatattagacattagcacccagtgcagaacatgctcagcatncataagantccaaacaccagcacaagttatccaccttaaaaccantacccccgggccgaatcctngccccgaggccaattccnatgggngcggattaatcggaacc

SEQ ID NO: 947 - DNA, 586 bp, Homo sapiens
  SITE (459): n equals a,t,g, or c
atgctctaaaaatctgggggtaaggatctaaattccaaatttaaatatatattatatttaggaaatgggaagggcaaagtkgaactcacaattkgacatttatttttagtgttatttatttcataacttataaaatatttaatatatacatacacactcttcttttttctctgtacaaagtggttttaatatcagctttcaaaactgatcttataaaatgtaaatctaaattgtaaaatagttaagttttaacagtccctcccaaaactttgtgttgattattcacttgctaaagagatgtgaggaatcagccttcagttttttggcagtagtatattttggaagtgaagaaattggaacacctgtttctaatttggtcttcatcattaragacaaaaccaaaacactccaggcagtactgtttatagtgctgagccaggtagcacacagacatagtanctaaaggctcacataattcgcatgctcaggccagggcagggtaaaaatagccttctgcttctttcaacccagtatcaggaagcactaccccagtgttattatttgttttgtcaaggtaagtctaaat

SEQ ID NO: 948 - DNA, 819 bp, Homo sapiens
  SITE (331): n equals a,t,g, or c
  SITE (789): n equals a,t,g, or c
  SITE (795): n equals a,t,g, or c
agccctattaaccctggttggctttatctttcccctgaccctgtgcttaagttcactttctctctagctcttcctgctcttgttcccttcttgtgtacctgaactacatttaacatcctgactcaaaacagccgagtttctaaccatgctacttgttattgtaccatttcctttctaacccagattatcatctctgtttcaaatttcttgctgtggtaacctcaccttaatttctatgtcttcgttagctcaatagattgccatgatatttttttaccacggcccataacctctttaatggcttggcagcaggacctttcctttgattgtntcttgaagatatgagatctatagttcagttgtatcgttggctcttaagggctggaacatgcaasaatagggcttccgttgttgcatggcaaacatgagaattttgcatggcccttactggggagtttcctcctcatttgactgatgtgagtagagactcttagagccagccaccatcataatcatctactagaatcccaagatgctttccccagcagctaatagcgctgttgtctgtgggtagggggaaaacaccaccctaaccctgaagaatccatgacatagtgctattactttgatgtgaataagtctggaaaatagtctctttctactgtggtttgctctataaaatccttgcctctgaattttcctggaaaactatgctttattctgacttacggggttagacaattttagtaagtatgtttagtaaacaaatttttttagggggatcagggnaaaggnattgtggaacctggacatgggctt

SEQ ID NO: 949 - DNA, 467 bp, Homo sapiens
  SITE (466): n equals a,t,g, or c
aacattgtcaggctgtcttaaaacagctgaacgaacagagactttccaaccagttctgtgatgttactttgttaattgaaggagaagagtacaaagctcataaatctgttttgtcagcaaatagcgagtattttcgagatctttttattgagaaaggagctgtttccagtcatgaggctgtggtggatctttctggtaagggttttgtattactcttgctttttgtttgtaatgacattctagaagagggggatatgtatgtcttccacacacggactttatgccaaagtaagagaagcccactgacaacagtagactaagctgtactgaaaaggttctttttagcaagatttctgtggtagagttatggaaaagggtgtcatttcctttcactacgtcttaagtgagacaattrtagcagaaaaagaatttctaggatttaactgttaaaaacagtttgagtgant

SEQ ID NO: 950 - DNA, 563 bp, Homo sapiens
  SITE (491): n equals a,t,g, or c
  SITE (559): n equals a,t,g, or c
tcctggtgattttaaggtggtgcaatttccatgacaaaccagcctaccaggtgttgtttgtccacctgagaaaacttctatttgagtattggcaccaaaattagagttcttattcttcaaaaagttgaaaaacagctgaggtcaatctcccaaaaggcaacaacgtttccattccaattcataaagtcgcgaagcagtaagatctgaaggacactgttttatttttatcggagatgaagcttgtttttatttacaatttccctggacgggtttaagccctgagaaggatgaattaactctgcctttgtatattaaacattatcaaacatccccatgcagatattatgttattaaaatgagtcctgtgtgtgagatcattctatcttgttacattgtacactagggcaaactatttagaataaattgaaatgaataattaatgaaagagaagagaatacctctttcaagttcccatatacacttgccctgtnctttttcttggctctcttacttcctctttccactctttagtggtcatttgactcattcccctcacggntatc

SEQ ID NO: 951 - DNA, 423 bp, Homo sapiens
gttttcaacagtagtgtatgagaacttagattgtccacatccttgtcaatacttcttgactgactttgattatagccatccwgcwggatatraaggggtttgatttgcatttccctgatgactaatgatatcaggcatatgtatttattattcatttgtatgtcttcacttgatcttagccaaaaagcagagaagcaatacatttgtatatcttctttggagaaatgtctactcagatcccttgcccattttaaaattgggttatcattttattatgrgttgcgaaagttcttcatakggtatagttcttcatatacarggtatccaaactatacaarggtatatgattaggraatagatatttgatttggaaatatactcttctatgagctgtctttttactttcttgaacatcacttctgc

SEQ ID NO: 952 - DNA, 515 bp, Homo sapiens
  SITE (436): n equals a,t,g, or c
atcattcttttgctgcatcaaaagatgggaaaccaaacagttgtcctcttgtggtttttcccagcaatacaatttataaagttcctataatcaggtgccctgtgacccagcaggatccttggtaccatggacctaaattggttgtatttattatcatggtatggaatttgactgtgaaagttgwttagagaccttgagggaaagcctccctggagatccagaacatcagatttgctatgctggcttagaactgtgtcctatcctactacagatgtgtctgtcagccatgaagagatgttttaggtgtctcttccagaagttaatttccgctaataacccacagtgggatctatgaataccagagttgtacgtgattttccaagtgaatagggcgccattgttttgggttttaaataccctttccagtaaatgactnggtatttttttaaaaacctacccctaggcatgtttgatccagggctaaaattaaggttccccctcttcaagggccttat

SEQ ID NO: 953 - DNA, 244 bp, Homo sapiens
  SITE (242): n equals a,t,g, or c
  SITE (243): n equals a,t,g, or c
gtgtttctgccgctgtcctggagttgtcaccactgactgggcaaggcttcttgggcatsgatgtagaactgttgtccttttyccactaacagttatctttgactctcttgcctgttatgcttacaaaatggtgatggcttatggaaggctgttaaattaatattcctgttaaaggaaattaaagtttgtctatttttgacaataaaacattatatatttttaaaaaaaaaaaaaaaataaanna

SEQ ID NO: 954 - DNA, 281 bp, Homo sapiens
gatcatgacctcctctatccctgcctccctctcccccctctgtttttctcccttcmktccctctccgaccctcttcctctccctcccgatcctttccctcctcctctcatctttcccctgtctctccgttctagctcgttccccaccccaccttttcttctttctcctcctctccttcctctccccctctcctctgtctccttccaccgtctcccctgcctccctgtctttcagtccctgtttttcagccccgtctccctctcggtttctctcccgtcgac

SEQ ID NO: 955 - DNA, 404 bp, Homo sapiens
  SITE (329): n equals a,t,g, or c
  SITE (364): n equals a,t,g, or c
gtgtacctaaaggataatacagatgttcctctcaacttagcatgggggttgtgtctcaataaacccatttttaagttgaaaacgttawgtggaaaatgcatttattatacctaacctactagacctcgtagtttagcctcccttaccctacaggtgctcagaacacttagtagcctacagttgagcagtcatctaacacaaaacctattttatagtaaagtgttgaatatctcaagtaatttattgatgttccactgaatgcgaatcacttttgcaccgttgttaagttgaaccattgtatgtttgtggaccatctgtacttgtaattnctttacattcattgggtatggaaaaatatggttcntaagaagccgggaaaaagaattccagtttggccttgggaa

SEQ ID NO: 956 - DNA, 568 bp, Homo sapiens
gtcctcggaagcaggtgtgttatgttctagaacactgcccccctgcgtcgacagcctccggggttgggggtaagtagaagggggtgaggggccagcactagttgactcaaggcaccctggtggggmcggagaggttttttcgctcagtggtscaggccatcaggcaggggtgtccaggcagggcccgggtgcaagaaaacattctgtgtgcgctagtgcgagaggatcttctacagtcacctgccttcatgccattacagacagacgggaagtcactgggttctaggacataaaaagacctacatgttgkytagcctaaatcgaacccttttatagtaataaagattcatcaatgttttaaactgtccactgtcaagcccctgggactcaggtgaaccaactctctttgggaatctatcttagaagatgaaaccataaagccttcagtttcaatgtcagggatgcacactctatatctggtgaaattatggaggggtgaaaacttctgtacagcaaactgtacctccaaatctttaatgtcgaaataaagggctttttgccaaaaaaa

SEQ ID NO: 957 - DNA, 408 bp, Homo sapiens
  SITE (7): n equals a,t,g, or c
  SITE (12): n equals a,t,g, or c
  SITE (50): n equals a,t,g, or c
cctgccnggtgnccggtcccgggaattcccgggtcgacccacgcgtccgnggaggctgcagtgagccaagatcgcgccaccgcactccaccctgggtgacagagagagactgtctccaaaaaaaaaaaaaatgtatctgacctcctttgttttgctggtaggttgtaagaccccattccaggaagggttctttcccctatccagaaggaaagaatccagacaggcctcgctgggcttccccactcagtctatgagcattagatcatgcccttcttgtccagtcctatttctactcagctgtgcatattttgttgagcctaagcataaaaatagttttccctgtaamtttggggtcttaaattctgaaggttcctttgtcatgtaaaaagcatgaccggaataaatttg

SEQ ID NO: 958 - DNA, 766 bp, Homo sapiens
  SITE (54): n equals a,t,g, or c
gttctgggaaaactttttctgctcttatagtatgtatgtattcaggaagtgcanatttattaaactaagcataattcagaagctaagtttcctttcatcaaaatttaatattacgaattgtgcaaagaagtatgttactttgatcagctttattttagagcttctttatcaagttatcatcagtcctcttgaattatttctgaaataaggggaaggaaggaagggaaaaaatatgaatgcatagatagatctaagcagatgccttcagagccctggaataatcctagctgggatatgggacatgaaaacaactctggcctactgctgctgggggctgttgcatggtgtgacataggaagtaaaatgttgctgtatgaataggaaggagggtcttcctgtcaatgagaattaatgttttcctaatgatttaacttttttactgaaaaaataatatgtgtacatggtaaaaatccaaattgtatcacagaaaatacagtgaataaaaccatcctcttaagagggtgtgtacatttataaatttgcctatgattgcctataaagtcaaagaagttgcaccagtatgcatgactgccaaaagtacataaactgagcatatccatttccctacattcttgcaaacattgtgccttcgaactttttggcctctgatagaggaaaaatggtaactccttgttttattttttatattcattattccttttgtaagattaaatatcatctcatgaaaaaaaaaaaaaaaaaaaaa

SEQ ID NO: 959 - DNA, 513 bp, Homo sapiens
tgaatcataagattatcaacttgaaaatctttggacctatatccattcagtgtctacttaaatacaatttacctctattttatcatgagcccctcccccagtttcctcccacgaatgttctgcctccccttgccccagcatgtctctctgtgactaaagaattcttccaatccactaataacatttcttatttctgcacatctaggatgacagtacgagccatagtgaccaccaagaccccatctcattagctgtggaaatggcagcagtcaaccacactatcttggcattggsccgacaaggagccaacgaaatcaagacagaggccctgggatgatgactgatcagggaggttaaacatgacaagttaacttagtttagacgtagcacctttagcagactttcctcggtccttaacatgtgttcttacagtataacttgcagtttcttgtatgtcaggtagstgttarggtcytgttctgtggaagatgggcatggtggcctcagcctttg

SEQ ID NO: 960 - DNA, 373 bp, Homo sapiens
tgcctgtagtcccagctactccagaggctgagacaggacaattgcttgaacccaggaggcggaggttgcagcgagccgagaccatgccagtgcatgctagcctgggtgacagagcgagactgtctgaaaaaaaaaaaaaattccttatgtggtttgtaaaataacctaatgaaaatggaatagttttctaattacagaaagaaaagaagttgaagtgggtttcgccatgttgagcaggctggtctcgaactcctgacctcaggtgatcagctcgcctcagcctcccaaagtgctgggattacaggcatgagccaccacggcctggccaaaaatcttataaataatccccttctaatttcgggccagcttaatc

SEQ ID NO: 961 - DNA, 531 bp, Homo sapiens
  SITE (485): n equals a,t,g, or c
  SITE (514): n equals a,t,g, or c
  SITE (524): n equals a,t,g, or c
aaattggctgggcatggtgtgtgtgccttgtagatccagctacttgggaggctgaagtgggaggatcgccactgcactccagaaactaaaaaaaaaaaaaaaagcttagtcagatttggggatgcagccaaacccttctgttgctgtggtttgaacatacagtctaatgagcagggagaccattagctctttctggggcagtgggacaggaaagaataccttggaccttagggctactctagttgtaatgtattagtgagttatcactagagaagttccacagtttaatattatctatacctatatctatatatctacctatatagatagatatatgttagatgcttcaacaactagggtctacacttaatatactgacatctaaggatgcggccaagaaaagctgtaattaggctgaattttattgccaaagttgttcttttttcatttagtcctttaataaaagrtgrtcttcataaattacnggaaagtttggcctaaccccggtttgganccttttggcnggaaagg

SEQ ID NO: 962 - DNA, 584 bp, Homo sapiens
taacatattccattagatctaattagctatttatttcaacatctttatatcttttcacctgtactcatgaccacctttagaagtaaatggggttacaatctgctggctgaaaaataggtcataagtgatttttcttgaggttagtagcaaacataggcagaactagaattagaattcyggtatctagggctgtttctttaagtcctaaggttgttaaaagcagagactctggagctagactacctgaatctaaatctcagcctttctgcttatcagccatgtcattttcttccatttgtacaaagcaggcaatactgagcaactaccttataggaataactgagttaatatctaaggggctttcagcagtacctgaaatatagtaagtgttacatatatgtttactctttttattttatttggaattgtgaactgataataattgaagcctacctgctagtgggccatctctgctgccaggtgaaaagagcctgacttaagaaatgaagtcatcgaaggaaagcagagtggagagaaaaagagagactgaagtcctgatgacatcatttatttacctagaccta

SEQ ID NO: 963 - DNA, 673 bp, Homo sapiens
  SITE (307): n equals a,t,g, or c
gaaaatggaaccaccacccagccaacctacacttctcaggttatgcccaaagtggtacctacactcccagaggtctacctgtacttcttgaaaaacgtatcgaagaccttcgtgtagctgccaaactttttgatgaagaaggaaggaaaaaattctttacacaggatatgaataatattcttctggacattgagttacagctacaagaactaggccctgtcattcgcagtggtgtctactcccaccttgaagcttttgtgccatgcaataaagaaacactagtaaaacgtctgaagaagttacatcntcaatgtccaggatgatcgtttaagagaacctctgcaaaaactgaaactggctgttagcaatgtcatgcctgaacagctatttaaataccaggaggactgccaggctcgtagtcaagctaagtgtgccaaattgcagacagatgaagaacgagaaaaaaatggatctgaagaggatgatgatgagaaaccaggaaaacgtgtcataggaccaagaaagaaattccactgggatgacactatcagaactttgttatgtaaccttgttgagatcaaattgggatgctatgagttagaaccaaataaaagccagtctgctgaagattatcttaagtcttttatggagacagaagtgaagcccctgtggc

SEQ ID NO: 964 - DNA, 747 bp, Homo sapiens
  SITE (74): n equals a,t,g, or c
  SITE (513): n equals a,t,g, or c
  SITE (624): n equals a,t,g, or c
  SITE (682): n equals a,t,g, or c
  SITE (687): n equals a,t,g, or c
  SITE (696): n equals a,t,g, or c
agcaaatcctcagaacccaagtcagaccttggattattgcttttcagtaagttctggtcctggctgtgtctctnactcttgctgtgggaccctcagggaagctacccacccccttcaccccacctgaatgagatgatttctgaagtcctcagcagccctgattctaagcctcataaggaagagtaggtgttaatggcatcctagggcaatggtaggcgcctgatgcagatctgctgtgagccatgtgctggcatcacaggggtggtttattaatttcatttatcatctggamagccccttcttataacgtacatccttgcctcttctgaggctctaagatccccaaggtggctcctgtatccagaaaccccttggccttccctcccagttaagcaagatctctcttcaactcagggatgctgagagattgaaagtgaactacacacaggaacagccaagataggagttatttctatagcaccatgcttggctgatgttctttacacggagtgngcaggatttttaaaacagccgttttgtgccttttagcctggggctcctcctaaaaagcagactctggggacaaggatttgtgtgcaagtagctggcttgaaagggtgattncaggaaagcactgaggttggcatggaagaagcaaggcttgaagaaggaaggggaatgnaaagnacaagccancaagggtgcacgggccaggggcctctgttaagctgtgaagaaaatgctgca

SEQ ID NO: 965 - DNA, 435 bp, Homo sapiens
  SITE (403): n equals a,t,g, or c
  SITE (408): n equals a,t,g, or c
gctcctgaaccccaaatctccagagcaccccttcctccccagagtggttcagtgctatactgtgacccctaggggtacaatcacagctgcagcctagctccgtgggcccaagctgctagggagtacttcacaatcacagatcctagctcagtaggcagcctacatccaacctgccacagaaaatgaacctgtgccccaagacccagctgctacaataggttggcaaaaccctgcacctaggaccctggcctcacagctgctctgaamacctgctcccagaacccagcatgctacatctgcttgtaggccatgtcagacctgacacaaaaaaggwtcccctyagctaagtctccccattctggggaaawtarggatwgragggccccaagggcctttgatactnagggncatttaccatgtattgctgccaccctg

SEQ ID NO: 966 - DNA, 673 bp, Homo sapiens
  SITE (31): n equals a,t,g, or c
  SITE (144): n equals a,t,g, or c
ctagagatggtaataggagctagtatcaganaagcttaaggcaaagcataaagtgtaggctagaatgaagctggagaatggggagggggcttgggtaacatccagaacctggctggggacctggaactacatgagatgtaagantggagaggttctagcagtcagaggtcaggtacaaatgaacagctgggatctgcgcatggcagacagtgaaaaaacccaggcaagcaaaatggtcagagcagaaaggggcccaagcacgttcttgagatgtggagggggctgaggaagccacgccaagtaaggacagatgcagctcagcagttcctagcgagccctgacaagccagctcagctgaagcttcgggtgggagccagtcatggacagtggagtgaaggaagagcagtttcaggcacccaaaacctgacccccacgacctgttttccacctgaagagccacccattccatccaaacccttggcaaaagtctgctaacagagagaaccgccagtatgctggcyagtcgcgatcatgcctgtctttaccctctaagctgaagctgctcatcaacggtgagatggcaaaaaggtgggtccagaagaggggaaaagaagggagtctgtgaaaacaaaatgctgaagaatctgcatcaaataaacccttccttccttcc

SEQ ID NO: 967 - DNA, 475 bp, Homo sapiens
  SITE (335): n equals a,t,g, or c
  SITE (421): n equals a,t,g, or c
ggccgccctttttttttttttttttggcttttgttaaaagtgagctggaaattgaggcacaaaacacaggctgattcaattctgcaattcagatttgggtcaaatttgcatctttgttttggtggctttagtgtgacttgaaagctgtagtgacaactccacttttcatcttaagggtacagtaaatagttaaacagtagatgtctctcacatgtaccttcagaataaattctattaacattcattcaagcatgacagtcagtatatatcagatatactgtattatagttgacttggtgcatacccataatacatggcatattttacttactttntcatgtattaaagamccaaattattaaaatctgagagggggccaagctcagaaaaaaaaaatcaccrgagagggaagcagggcttncccataatagcctggatagctggtttgaacgtgggagtggattgaaaggggggg

SEQ ID NO: 968 - DNA, 803 bp, Homo sapiens
  SITE (543): n equals a,t,g, or c
  SITE (768): n equals a,t,g, or c
cccgggctcgcaggaattcggcacgagagaaagtccaaagagctcctatatagactactccagataacttcgcttctttgatacttgtagcttattgtaattttttttaagaaattcaaggtcattattattgtacaaaataagcgctttgattaacacagctatatagtttttttaatttttaaaaaacctgtggagacggtgatcttgtctttaaaacatgatagtcctttcagtataatgtcttacgattaaagacgttgcctttaatatctgttgggaaggaaatgtccagacttttcaaatctcttattatatgtttcctttttttgtttacatagggaacaatgtttatagtcgtgtgtacagtgggggtctacaacaagaagtgtatattttcaaacgaatttttaatggawtaacaatttttgtaaatcattttcaggcttctgcagctgtagattctcactgtgaatcccttgcttgctcatgcataagtgtatttgcaataccaaatatacaggtttagtatttttgcctgtnattgattgtttcacatgtgtaacgttttggttgagatgttaaaggtggacgagtactgtggatgtgaagtgggaagtaattttaatcatatgtaatggtcacaaggcctaatttgcagtaactatgcgttttattaacaagcctgttgcttgtagcataagttggagtaagatggtgtcttccacaggagcacgtattaaatgaccactatgtacacacttgagngcaagtaacaagctataagtggcattgtatactag

SEQ ID NO: 969 - DNA, 746 bp, Homo sapiens
  SITE (629): n equals a,t,g, or c
  SITE (646): n equals a,t,g, or c
  SITE (655): n equals a,t,g, or c
  SITE (722): n equals a,t,g, or c
tctaagccttagattttggagatacaaagaggagtgatacaaacctagctctttccccaggaagctgccttgataactagttttctattggtttctgattgaaagttttcagtttcattgattttagaatttaacttcagaatatgacatctgaccttccatatcttagaaacctgttattccttttttttagtctctgcattgtctttgatgccttggtagcatgcactgaaaattaactcttctgtttgaagctgtaattgtcaagattaaagattaactttttatctttgagttcactttagcattgatctcttagtgacagtgcccttgatgaaaaacagataaggggggcacaagcttataaacgtcaagtgaaagtaaatgctgcmggaactcatgttgtttttttaaccaacattctttgcttttggrtgtttaattcacyggrgrgcwtaawtcagatctaaattaagaataacttatttagcaatgctgttgctcaccttggggttgagcagtgcattgtggtgtttcagcagttattaatctagttaaatgtattttgaaatgttagatggtagctttgcatgaaaggaattctagcaccaaccaagtataaatcctgnaaaccccaagttgtttnaaaatgtangataatttgtgggttgtgaaagatgaaaggaagttatagcccaagataatggccagatagcctttangggaaaccccagttttaaaaaccg

SEQ ID NO: 970 - DNA, 351 bp, Homo sapiens
  SITE (325): n equals a,t,g, or c
  SITE (328): n equals a,t,g, or c
cgtctaatacgactcactatagggaaagctggtacgcctgcaggtaccggtccggaattcccgggtcgacccacgcgtccgggcaactgcagcccccgcctccccctgagccagggctttgggcccatctggctcccctctggaggccggcccatcacgcagccagtgctgacagattgggtgtctccggtgcgccgcggctgcgcttaagtagcttcctgtcagggagtcaggggtcacctcatccccgctctgttcaaaacagtactgacctcttcgtggtgcctcccacacctgtctactgcacgagcatgtgtttagtgtnaantctgcgatccagaccctgcctgg

SEQ ID NO: 971 - DNA, 859 bp, Homo sapiens
  SITE (825): n equals a,t,g, or c
  SITE (850): n equals a,t,g, or c
tgtaacttcaaaaagacattatctgaaaggttgaaagccagtttctaatagtacctggtgtcttggcttcagggctcacagcaatcctgtggagaaagtatgagtttcccatttcaacaaagaaggtgaggcttagagggaaaggaagttgctcaagatttgctctggaacagacgcaggattcccactcagatcttcgactctgaatcctgcaggccttcacctgtgcgagcactgarcscctggctgccarctccaragctcctctggggccttggtcagtgtggtgttgtttatgtcccagcaamactttccgttggtctactggaggamagttcctgtacaggcagatgacttccttcacccaaggacctgtgactctctccctgagggctttctctgacatcatctgcacatggacagcttagactgaaagtttcaggggttcgatgccttccagaggcacctctctaacaataagagcccagattgagtggaaataccccagcttccttaccactccagcctccatgcccttagtggcatgattccgaggtgcatcctacactgactcttggtggctccctggccagagctcattcgcgtggccctcagcagctctcctccttccctggctgtcttcctcaccacctctccgtgattccaggaatcagctcccgaataaacgacttgcacccgaatccttgtctcagggtctgcttctgggggcacaccgaggaagacagcaatcccgtcctaaggttttgcacatctgagccagagggaccccctgggaccgggtctcagggctgagttttggaggantgggagacactcagggtgcggcttnaggagggat

SEQ ID NO: 972 - DNA, 410 bp, Homo sapiens
  SITE (341): n equals a,t,g, or c
gcccagggctctgcataccttatctgggtcttttgaacttcaatagcatttcaccagtggccatccttcctggtgtggattcatcactctgcctctgaaatcagccatccctatgggaagacacagccatgatttttcagtactcataatacagccaggactgkcgggagcaactgtcccagatggtgcttaaaccccttaggagctcatgatcttcttgkaaagccagtaagacagaaccatacaggacacaattakatgctaaattgtgatttagataggagacagaagtatycaaaaaggaagggaaattyctgtgagtagctgcccaraaaggtggnattgggtgttgctctcacttggaaaaattgagttagggttcttcttcaggtgggccacaaagtcccggg

SEQ ID NO: 973 - DNA, 495 bp, Homo sapiens
  SITE (476): n equals a,t,g, or c
agcatggttctggagttaacgtatactgagttacatgtaggtatttagttatataaataactatagtgtaattgctataataattatatggcatatatatacatacaataaaattaaggtatagtggggtcattattagggtttctgatgaaagcttattggatcactcctggaggaagtcaggtgctaaggtttctggacaggttcagttaactgaaatacaggaattaaggcatcattttcaaaggtggccctggaggaagactgctatgctgggtcactgtattagggcaaagagcatgctagccctttggaactaacagtaaacgaaaaagctgaacagagaggtctttgctgaaggtggagctattgacaccttctcaccaaacacaggcatcttcatggatctaaaccactagggctccaaggagacaccgttaccctcatcaccgaggtcatattctagggctacaggntaaaaaaaaaaaaaagggg

SEQ ID NO: 974 - DNA, 708 bp, Homo sapiens
gaggccttacagtttaatggctctttttaagaggatttttatttcatgttacttctgatagtacaacattaattctttaattcatcttttctctctactgtgctcattcttttttctctttcactcgttggcttaccttaatgtcttcacctttcaatggcaagtaataatgacactcaacgtgaaacaattaagaaactttgtaggctttcgtttttctttatttcaaactctagtcttcctctgaaaatggctgggctggtggcttatgcctgtaatcccagcaatttgggaggccgaggcaggagaattgcttgagcccaggagtttgagaccagcctgggcagtatggcaagacctccatctctacaaaaagttatttaaaaaattagccagttggctgggtgtggtggtgctcacgcctgtaatctcagcactttgggtggccgaggcaggcagatcacctgaggttgggagttcgagaccagcctgaccaacatggagaaaccccatctccactaaaacatacaaaattagctgggcatggtggcgtatgcctgcaatcccagctactcaggaggctgaggcaggagaatcgcttgaacctgggaggcggaggttgtggtgagccgagatcgtgccattgcactctagcgtggtcaacaagagtaaaactccatctcaaaaaaaaaaaaaaagggcggccgc

SEQ ID NO: 975 - DNA, 529 bp, Homo sapiens
  SITE (90): n equals a,t,g, or c
  SITE (506): n equals a,t,g, or c
gggccgctggcccttggtgctggcgctcggggcccggcggtgctgggctcggtgctcttcatcctctggaagacctacttcggccgcggncgagagcgcggctgggaccggggagaggcctggtggggcgcggaggctgcccgcctccccgagtgggacgagtgggaccccgaggacgaggaggacgaggagccggcgctggaggagctggaacacgcgaggtgctggtgctggggctggatggcgcaggcaagagcacgttcctgcgcgtgttgtcggggaagccaccgctggaaggccacatccccacctggggyttcaactccgtgcgtctgcccaccaaggactttgaggtggacctgctagaaattgggggcagccagaacctgcgcttctactggaaggagtttgtgagcgaggtggatgtkctggtgtttgtggtggactcggctgaccgactgcggctgccctgggcccgacaggagctgcacaarctgctggacaangaccctgacctgcctgtcgtcgt

SEQ ID NO: 976 - DNA, 673 bp, Homo sapiens
  SITE (562): n equals a,t,g, or c
  SITE (637): n equals a,t,g, or c
tttcatctgatatctcacaatgtatgatatacgtacaaaacacacagcaagttttctatcatgtccaacacattcaacactggtatacctcctaccagcaagcctttaaaatgcatttgtgtttgcttatttgttttgttcaagggttcagtaagacctacaatgttttgtatttcttgacttattttattagaaacattaaagatcacttggtagttagccacattgagaagtggttatcattgttaatgtggttaatgccaaaaagtggttaatattaataagactgtttccacaccataggcaataatttcttaatttaaaaaatctaagtatattcctattgtactaaatatttttcccaackggaaagcacttgattgtacccgtaagtgtttgagtgatgacmtgtgatgrttttcagaargttgktgkttttgtttccatagcctgtttaagtaggttgtaagtttgaatagttagacatggaaattattttataagcacacacctaaagatatctttttagatgataaaatgtacacccccccatcaccaaccncacaacttagaaaatctaagttgttggattccttggggattcctttgtggggaacactggcaagccaattttccntataaaaatccatagtaatccggccaaatgggccaa

SEQ ID NO: 977 - DNA, 283 bp, Homo sapiens
attgtctaagtaamtsggtaggrgaatctsaaagacagcyacgattgctgtttgatcaggcctatcagatgcgcccawcaattatttyttttgacgaaattgatggtctggctccagtacggtcamgcaggcaagatcagattcacaggtaamacttgcttgatggcacttcaacgtttcttcctattycctgagtggtattgatgtgtgagagatagaatgttaaatggtgaaagaaactttataagctagtagttcctttttttggtagtagaaccccagt

SEQ ID NO: 978 - DNA, 701 bp, Homo sapiens
  SITE (93): n equals a,t,g, or c
  SITE (234): n equals a,t,g, or c
  SITE (236): n equals a,t,g, or c
caagtttgaaaaatgctgttctagaaagcagggaagtggtctgcctttggttgattttgggagcagtgatcatgctcccaaaataagcgaaanacggcccatagtgaatgcctcccagaagagctggccccagggacagagggggaagaaggtggctggatggagacagatgggggcaggagaggacaggggaaggcaagggctggaggccaccctcccagggggtggttctancnaatgtcagccagcctgtggccttcaggactccctgcctgtcctggggagtgtgtttttgacacgctcatgacaaggtcccccagcgtgaggcaggaacaggacccaggcagggcagtagtggtagcacctgtccagtgtgtctaaggagtggamtgttgatctcgttcacacctcatagtgacagtatggttattttcacttaacataggagaaaacaaggctcagagagacagagcaggctgcctgaggccacacagcttggcctggtggagctgggtttggatctgtattattagccacgggtcacctgtgatcggagctctggggagggaccttgctatgaacgccgaaggggatgcacacccgttgagcttccaagaggcaggacccagtctcagcctcagccttgcctgggcagcctgggcttggctcctggctcctgctcttaccgtgtgactcgggta

SEQ ID NO: 979 - DNA, 361 bp, Homo sapiens
  SITE (359): n equals a,t,g, or c
ttaagtcttgcacgttagcactgacccacaactgggcctcaactgtgctgtgttcacgtgaggaaagaatgaagggttgagggtacatgaggggggagaatggaaagaaaaggacgattcactcagacatagcccctttgctactggagtggacagataartatcaaaggtaactccgcaggcctgcagccggtgaactcagttgaagtgcaagtatctaaaggaagtgaagttgaaagtgtgatttaaggctggcgtggtgggtggctcacacctgtaatcccagcactttgggagacccrggtgggtgaattccttgaggccaggrgttcaagaccagcctggggccaacatggggnga

SEQ ID NO: 980 - DNA, 358 bp, Homo sapiens
agttaaaaacaagtaactttgagagcacagtatgagataaataaaaaaggctaagaatacatgatgaggcacattccccttctgaggagaaagcgaaataacatgtctgtgcattgacccattcattacatttcatgtatcttaagcaaaagagcatgattttctctcattgctaaaaagagttgctttaactcatccctggatttggtggggaaagggtacaactcctgatttgctgtttcactttgaaacaacacmatttgttagatacttagggagatatactgttgaatttgccacaggatgtgactctgtttatacatattaacaaatttccttttggattccttagcagttc

SEQ ID NO: 981 - DNA, 471 bp, Homo sapiens
ggcatcaaaagatgcatctttgatgaagtcacacaaacgtaacatgcatgctgagactgttactcctggaccacaactgtaggtgaggattcataggaagagtagaactcagtctctagtttcctcataaccctctgatattatatacttcagcataatcagaagtccaaatgtgttaaaactcattacatgatacatatcaaaggttgtaggatgtttggaaatggccaattactttcagcttataaaatgttttgttgaagtatttaagatttattgaaaaggctactatttataacttccaaccagaactttgcaatgtgctgattttatacatgattataygcctaacatggtgttgttcgggaaagaatcaaaggatggaagggctcactcacttcattaggtgaggattattcwctccaagctcctgaagaaraaagctctgccttttaaaattaaatattagtc

SEQ ID NO: 982 - DNA, 909 bp, Homo sapiens
  SITE (18): n equals a,t,g, or c
  SITE (24): n equals a,t,g, or c
ctaaatttgggaagaatnccatangggcaaaccgtttaataaacacatgaagggaaatccaggtggcaggcccaagttaaagagcaaggccagaaaagaacttaaaagagaagagaaaacatagacagtttaggaacaatagatcatgtcytctccatgatttggaggtaaactgattacctatcagctgataaatagagaaaggttttagaactcttcccttgagtagactaatgagaggtgtcagagaagatgttttctgttatttgtgtgctctccaggaaactttgagcattcagctgaggggccaagttggctgcctctgagaagaagcccttccacctccactccaytgcacttgggtgccattcccctcatttgaatrtctcmaagagatgagcaaaggtacatctacagagttcagggtaytgacgtttatcataatgatttataactctcagaagagtgaaaaacacatgaatgcacagaatagragattgaaawataaaccacagaacattcatayaatggaatactytgcagtcataaaaatcttctcatagaagaatatttgacagcatagggatatctgtggcatattaagtagaaagtcagacttgtaaacattatatacatattcayrtatatttaaacaccatgatcccatatttagatataacaactaaaagttcagatggctatatatcaaaatgtgtcaaatgttcaaccttgcataggctgactgtagatgaattttatattattctttgtgctttcttgtagttcccaaattttctttactgaatctatattacttttgcaatttaaagaatttaatttataaaattttataaaataacttataaatttgaaatgtattgcatttaagaataaaaagtgtttaattac

SEQ ID NO: 983 - DNA, 848 bp, Homo sapiens
cgctggctcacacctgtaatcccagcactttgggaggctgaggcaggcagattacctgaggtcaggagtttgagagcagcctggccaacatggtgaaactccgtctctactaaaaatacaaaaattcgccaggcgtggtggtgggcgcctgtagtcccagctacttgggaagctgaggcaggagaattactggaacccgggaggcggaggctgcacagtgagccaagattgcaccactgcactccaggctgggcaacagagtgtgactccgtctcaaaaaaacaaaaacaaaaacaacttctccctcctccacagactcctccctggtcaccactagtgatccaccttatggatctcccaaggccacctctgcctctgctctgtgttgtattatttggggacctgtggctggcatgcattgtacttggtgccccaaagggstgtggcatctgataagtgatttatcctcaggcacagatttgcactatgtcaccactacttgtatgtagaagtgagtcaccggctggcaaatgggcatagctgctgggcagtggatgcagctccatgcatgttattctcatttgatacaggatctcattggcttctcacagcaatcctgtgcactataggtattgctcccgggaacagatgaggaaacaggagagtgcgagattacagtaattttgtaaatgggaggatttgtgaaggtttcagacatacaccctctctcatatgtcaaggatatgaagtctaatgaatcccctaaagcagcaggggttggcaagcttgtgccctggggccaaatcagcctactgcctgtttttgtaaataaagttttattggaacac

SEQ ID NO: 984 - DNA, 574 bp, Homo sapiens
  SITE (561): n equals a,t,g, or c
  SITE (574): n equals a,t,g, or c
ataaataaataaataaataaataaataaataaataataaatgaaaataaatgttagcttccagaggtaactactccctatacatttagacatatataaaatatgagaagttaaggaaatttttcacaaataatagctaatgttagtggagtgttcacatttgttatttttttgtgcattaattcaatctttacaatagcccacttaagtaggtaatattgtccccattttacaaactgaggcttaacaaggttwagraattttccttaaagttgggggcmgtggctcrcacctgtwatcctagcactttgggaggcaagaggattgcttaagcccaggagttcaagaccagactgggcaacatggtgagacactgtctctaccaaaataaaagcacaaaagaaaattagccgggcatggtggcatgcgactgtggtcccagctgcttcagaggctgaggtgggatcaattgggcccgggaggcaagcctgtagtgagccatgattgcatcactgcactctagcctgggtgacagtgagtgaaacctgtctcaaaaaaaaanggaaaaaaaattn

SEQ ID NO: 985 - DNA, 510 bp, Homo sapiens
aacaaatgaaggctgttcgaaagagaaatgagacctctgttatcgatcagattggggaagatttgctgacatggttcagcggaccaggagaggagaaattgaaacatgctgctgctaccttttgcagtaaccaacctttcgccctggaaatgatcaaatctcgtcagaaaaaggattctcgatttcagacttttgtgcaagatgctgaaagtaatccactgtgtcgtcgtcttcaactgaaggatattattcccactcaaatgcaaaggcttactaagtaccccttctgttggataatattgccaaatacacagaatggccaacagaaagggagaaggtgaagaaagctgcagatcactgtcgtcagatcttaaattatgtaaatcaggctgtcaaggaggcagaaaacaagcagcgccttaggaagattatcagcgtcgccttgatacctccagcctggaagttgtcagagtacccaaatgttgaaagtgctcaggatttgggtttaac

SEQ ID NO: 986 - DNA, 530 bp, Homo sapiens
ggcccagatttattcagtggcaatttttcttggtattaatttggccgcatttatcatcatagttttttcctatggaagcatgttttatagtgttcatcaaagtgccataacagcaactgaaatacggaatcaagttaaaaaagagatgatccttgccaaacgttttttctttatagtatttactgatgcattatgctggatacccatttttgtagtgaaatttctttcactgcttcaggtagaaataccaggtaccataacctcttgggtagtgatttttattctgcccattaacagtgctttgaacccaattctctatactctgaccacaagaccatttaaagaaatgattcatcggttttggtataactacagacaaagaaaatctatggacagcawaggtcagaaaacatatgctccatcattcatctgggtggaaatgtggccactgcaggagatgccacctgagttaatgaagccggaccttttcacatacccctgtgaaatgtcactgatttctcaatcaacga

SEQ ID NO: 987 - DNA, 613 bp, Homo sapiens
  SITE (397): n equals a,t,g, or c
  SITE (459): n equals a,t,g, or c
  SITE (483): n equals a,t,g, or c
  SITE (512): n equals a,t,g, or c
agtattctagttcatattctgctgtaacagttttctcagtatcctttaagtgacagaacagcctcctcggggtctgcagttcacactaggcacaaaaaataaacctgctgtggttgatacaatagtgatggcacatcatgggtattttcaattaaaagcaaacccaggtgcttggatactgaggttacaccaaggaaaatctgaagatatttatcaaatagttgggcatgaaggaactgactctcaagcagacctagaagatatcattgttgtattaaacagcttcaaaagcaagatactcaaagtaaaagtgaaaaaagaaacagacaaaattaaggaagatatccttaccgatgaagatgaaaaaacaaaaggactgtgggattccattaaaagnttcacagtaagcttgcataaagaaaacaaaaaggaaaaagatgtcctaaacattttttcagntgcttctggcatttatatgaacgntttttaagaattatgatgcttttctggtntgcgtaacaccaaaaacaccagtgaaaatctgggttgctaaaaaaattatctgttaccgacatttaaagaagtaatttcctcaaatgggcttaaagagtat

SEQ ID NO: 988 - DNA, 504 bp, Homo sapiens
  SITE (459): n equals a,t,g, or c
  SITE (495): n equals a,t,g, or c
  SITE (501): n equals a,t,g, or c
atcatttgtgatgttgtatgcctgggtatatgatgtcagcaatcccaaatcctttgaatactgtgccaggatttttaagcaacactttatggacagcagaataccttgcttaatcgtagctgcaaagtcagacctgcatgaagttaaacaagaatacagtatttcacctactgatttctgcaggaaacacaaaatgcctccaccacaagccttcacttgcaatactgctgatgcccccagtaaggatatctttgttaaattgacaacaatggccatgtatccgcacgtgacacaagctgacctcaagagctccacgttttggcttcgaggcaagttttgggtgctactgtttttggcagttttggggctttgctatgtacaaagcattattggaaacagcgrtggatatwaaaagaatacttgtccctacccaaaaacaattacttttatggtacattnggatggttttaggttctggttgggatttttgggggntttttnctg

SEQ ID NO: 989 - DNA, 294 bp, Homo sapiens
  SITE (119): n equals a,t,g, or c
ggattgaattccgttcctgtggctttttcttcatcatactagtagatgtagccagtgtttttgtttctagcctgcttaacttgtgtggttcttggaacaacataagttttggttgattnaggatcctgatttcacaggatactgtatcaactgctttaccaagatcaaagtacatgggttcactgcattcctttcagttgctaattcagttgtgctgtagccaggcaatcctggagccttgaaatccaggattctggtcaagtgaggaagcagcccttcctcctggcctttcat

SEQ ID NO: 990 - DNA, 613 bp, Homo sapiens
  SITE (2): n equals a,t,g, or c
  SITE (3): n equals a,t,g, or c
  SITE (12): n equals a,t,g, or c
  SITE (41): n equals a,t,g, or c
  SITE (52): n equals a,t,g, or c
  SITE (391): n equals a,t,g, or c
gnnatacggtcngattccgggtcgacccagcgtccgcgtanaaatcacagantagcaagaaagctcaagactagagatagctttcaatctcttcagaaatagcctggtgcagtgagaaaactaggtttgttttcaggccagtctgatcttcatcctattctgtctataactagttgcaggtccttgctcggatggcataattttttgatgcctccatttgcttaactagaaactaggattcatatacacactctgcactttgtattgaagattaatgataatgtaggttttggttgctgtggctgagcctggccagtaataggtgcataacagaagtagctaagagcatttcataatcaggaggaactctccaggacagccctacaaagangagctgtttgttcccgggaggcctcgaccttccaggcttggatgtaaagagtttagtgtcctctccttctctcatccctgcagttcattccaataaactgcagttattcagttggagcaagttccggaatttagtgcctaccatgctatggggcagtttatttataagtgcttatgaggatactcagagaaatttaatggctatacaaaaagacgaatcatg

SEQ ID NO: 991 - DNA, 517 bp, Homo sapiens
  SITE (3): n equals a,t,g, or c
  SITE (470): n equals a,t,g, or c
  SITE (492): n equals a,t,g, or c
  SITE (504): n equals a,t,g, or c
ganaaaaaaaactagtactaccaatgaaataaatgcaacagagttggagagctcaagtcacgtattcatttattctacaaatactctctaaatggctactctgtaaccaagcattttatattgcttttttattgagagaggacatacatgtttagaattcacacagctcaagtatacagcttgaccaattcttacattagtgtccatccatgtaaccatcatccaatttaagatgtggaatatttctagcagctcagaaggttctcttgtgccttctccccgttcctaatcccctccaaaagatacccattattttgacttctatcactgtgggatagttttgcctgctcttgaattcacggacattcaaatcgactcatccagtacatactcctttgggtctggtctgtttcgttcaacattatgtccaggaaattcatccctttgcttatgtgcactatagttcatcnttttctttgatgcacagaatanatggccatccantacacatggaaca

SEQ ID NO: 992 - DNA, 773 bp, Homo sapiens
  SITE (30): n equals a,t,g, or c
  SITE (632): n equals a,t,g, or c
  SITE (666): n equals a,t,g, or c
  SITE (714): n equals a,t,g, or c
  SITE (727): n equals a,t,g, or c
  SITE (755): n equals a,t,g, or c
  SITE (770): n equals a,t,g, or c
agggcccccctttttttttttttttttttntttttgttttttttttttttttttttttttttttttttttttttttttttttttttttttttttttttttttttttttttttttttttttttttacagcgtcttttcatttttattactcaaaaaagtttcatttttttatttagctttctgactctgtgcttgtgccttcaacactttcacaacgattttctgctcctcgataaggaaagcacgcttgatcctgtcacgaacacatttagcacacatggaaccaccataggccctgctgacatgtttctttgttttggacaatctcataagaactttaggtcttacagcacgaacccctcgaagtctgcctgggcacacaccacatgcagattttggtgctttcccaaccttcttggtataaaggtaaacaattctattaccaggggttcgggacagcctagttttgttagaggctgtattgtaggaaagcctacgtcggtatgtcaaacgctggaccattctgagtgcctgcagacrcgtgggcggacgcgtgggtcgacccgggaattccgggaccggtacctgcaggcgtaccagctttccctatagtgagtcgtattagagcttggnggtaatcaatggtcataagctgttcctagtgtgnaaatgttaatccggtcaacaaatttcccaccaccaaacataacggaanccgggaagccatnaaaagtggtaaaaacccttggggggtgnccctaaatgaagtgnagc

SEQ ID NO: 993 - DNA, 293 bp, Homo sapiens
  SITE (269): n equals a,t,g, or c
atacaccaacttaatataaacccttttcagagaagataaaggaattagctgtttaatgactacattgtggtgaagttttaaagccactaaatgggaggtccattcccatggcaccattgctagcagcccaaacacagtctgcagaaacactcatttcagtggctgacttcagtcagtaattgatacagcaaaatttcattctaacatttcaaagctgtctcacagaatttctgagaaaaaagtgttcccaatcactgatttcatcaatncgcgtcaatattacttcagcacct

SEQ ID NO: 994 - DNA, 343 bp, Homo sapiens
  SITE (208): n equals a,t,g, or c
  SITE (233): n equals a,t,g, or c
  SITE (248): n equals a,t,g, or c
cacgaccatgcctggctaattgcatttttactggagacaggtttcaccatgttggcccaggctggtctccaattcctgacctcaggtgatccacccgacttggcctcccaaagttctgggattacattttttttttaaagaaagaataaattaattgtgattaaagttgaaatcaaggcatagtctttccagtctaatttttactgtnaatgcttgtatgtcaacagttatgnaaggccgggcggcgngtggctcaggcctgtaatcctagcatttgggaggctgaggagggtggatcattgaggtcaggagtttcgagaccagcctgggccaatatggtgaa

SEQ ID NO: 995 - DNA, 358 bp, Homo sapiens
  SITE (293): n equals a,t,g, or c
  SITE (345): n equals a,t,g, or c
  SITE (349): n equals a,t,g, or c
ggcacgagaagcctgagactagggaggagagggttgctccaaactggttcctacacaaccaggaggcagccctaggaacttcagatcaaagcggatggactttggattacaggagaaatatttagtggtatctggaaaagaaatacattaaaaagaataaaataactttgaaattaaaaaatcccaacaatcttttgtttcacattttagctgcggatcagcatttagggtaaaggtgtaacttcctcctgaaggtacatccttggctagaaatctgaaaggccaggtcattnctttggttctctggaaccggatttaggcatagtttccattcaagtttttctnggtnctttgaagt

SEQ ID NO: 996 - DNA, 435 bp, Homo sapiens
  SITE (1): n equals a,t,g, or c
natcagatttcaagctccttgagagcaggtatttttaattctataaagcctctacgtggccttggacatgggtaggtgctttaattacccaagatgctccttgaatacagatggtacacgacctacacagacttagatctttaccacttcccccctctccccaccctgacttgctcaatcctgaaggaactggagacgtctaagtgtctgaggttcacgcttccacacagaagcttgggtctgtgtgggagggaaaaaggaagccatctgtccgcagccagaccaggccacaccctgctagcacccaraaccctttgtcccaggcccagccctgccattttactttccttgcatctggaaagcacagggaatatagtagtgacaaaagaaggaagggttgtttgagtttaagaatagtttactctaaaaaaaaaa

SEQ ID NO: 997 - DNA, 403 bp, Homo sapiens
  SITE (18): n equals a,t,g, or c
  SITE (390): n equals a,t,g, or c
  SITE (400): n equals a,t,g, or c
tgggtccagggcagcganctagtccatttgtccttttcgaagtgtggcctgggacacctcctatccagccatacgccgcccaggactggctcaacagctccaccctccactgctgttcacccatgacacgtcacttcccacccgccactgctggctcacctgtracaccccaggcagctcagatgcccggcaggtcctgctggtgtgtgttagccggggtctscarrgaaccagagccagcaggggacacacccatctctgtatctggagaaaaagatcgatgagaaggaatctgctcctgtgaatgatggaggctgacaaktcccgagagccacggttggcaccctggagacccctggagggtggattaccaccactccaggctgaaanctggccaggnctt

SEQ ID NO: 998 - DNA, 477 bp, Homo sapiens
  SITE (24): n equals a,t,g, or c
  SITE (472): n equals a,t,g, or c
gcctcctatcaacaaagggaaacnggaaaaaaaagaagcccttaggtggggaataacgaagaagctgtcccttcaaaacatcctggggaagaatgtccctgtgttccccctcaccgtcctaaggcctcagggacttcttcccagaacaggatggagccccggacacacaactacacacacaaacaattgtcacagagtgggaggcaggataaagtggtgagtaacagcctggcctgagacacagctcacgcatctgacactggctgagccgcgcactagctgagtggccttgggcatgttttgtaacctccttgactgttcccttatctgtgaaattgagataaatgtactacccacttcataaaaagatcaaatgtgataatacttgaaatatgtttagaacaaagttggccatattcaataaatgttagcttaaaaaaaaaaaaaaaaaaaacctggggggggggcccgntcccc

SEQ ID NO: 999 - DNA, 686 bp, Homo sapiens
  SITE (12): n equals a,t,g, or c
  SITE (32): n equals a,t,g, or c
  SITE (48): n equals a,t,g, or c
  SITE (670): n equals a,t,g, or c
ccttaagggggnggaattctgcaataacattntcccaaaaaggattangcaggtttccagatctacatgaacttgaagccctccagttccactgcttatgttcccaatgatttagctaacaatgcgtaacagctctgacatcctctgtcatgctttgattctgcatacaaaatttcttctgtctctgagggatatccagcccatctcccttcctgaactgactgaccaacatagtatcgtatcacatcacccttgaaatcagggcccttttcctttaatgtgggaccctggactccattttatccaagaaaaagtctgcattattagctaataacagaaggctactaatcactgcccttgtatttatatcctttgcaacacctaaaacctcccatgttctgttttatttcagtgggtcactacaagctgctggagcaaagacttggtgggtgggtaacttaacctcttcacagaggataaaaaatgcttgtgagtatgacagaagggaataaacaggcttaaagggtaaactcagtccttttccttgtcttctcttctaagggataaaggtattatggccaattctctataatatttgcccctgaagctccccttatctggtctaatctagctccaataaatcaaaggagcacctaataaaacacattgntctcttttaaaaaaaa

SEQ ID NO: 1000 - DNA, 278 bp, Homo sapiens
  SITE (186): n equals a,t,g, or c
  SITE (207): n equals a,t,g, or c
tgtggtctratctttggttagtraccccagctgcaaactcagtggggccaagtgccttgttcagtatcctccctatcatgggagacccccaagaccacacctgctccccctccaaggcaacatccacactgtgggtcttgtgtattctggcacccgatggcaatgaggagagccactcacctaccntcaggtgtacagggtgcaagnaaaagtatgtaagggggttggaaacaaaattcttcctcggtgggaaccccaggtaattgaaattgaggaag

SEQ ID NO: 1001 - DNA, 631 bp, Homo sapiens
  SITE (16): n equals a,t,g, or c
  SITE (511): n equals a,t,g, or c
  SITE (538): n equals a,t,g, or c
  SITE (583): n equals a,t,g, or c
  SITE (624): n equals a,t,g, or c
taattcggcacagggnattattctcacacttctgacatgagggggtgcttgatgatgactcttgaatattgacatttcaagtttctaaggacagttctgctgtccctgcaggcaggttaggagccattgtttaagagccagacacagcaaagttaaatttgctttaatggtttaatttagggagaaataattttcacgttgctcattgagctttcaactctgagtttgtcttcctattttgaattgtttttctttacctgtttctttttgcaaaaaaaggggacagggtaatttactctgtggcatatttagcacgcctgagggaatgaatgtgggctgctgtcagaatgtttgttgtacagagagttaaggtggtattgaggagggagattgtaggagttggagtggtgagggaaggccttacagaaaatgcagactatgaagtgggcctcagggaggttagaaaactgggaaaggcccagaatgtgccagattaagggcaaagaagggncttggaggcagggagaggggaggactncccaagctgttaacacaggaataagccttttcaagttttaggggnccactgaagaggccctttccctgcagagaaaggccaagganctacccc

SEQ ID NO: 1002 - DNA, 645 bp, Homo sapiens
ggcacgaggaaaaactacagcatttaggctaccaggttgtgtttccttaataggaagccatatcccagccatgtggcaagaattagtcattgccttccatatgggtagtaataataaatgtaggaatttagaggctaatgaatcagtgggagttgctatgggtttgctgggtgaatgaatcaaaggcgatcccttctttctccctgcttccatctttccggtcctttcctcctgctatgcttttatgcgtatgagctttcatctctggcccactaaccccaaggatcctttgaataatctggaaggagaccatctaaagaactctctggccaggtacagtggctcacgcctgtaatcccagcactctgggaggccacagcacgtggatcacctgaggtcaggagtttgagaccagcctggccaacatggagaaaccccgtctctactaaaaatacaaaaattagccaggtgtggtagtgcatgcctgtaatcccagttacctgggaggctgaggcaggagaatcccttgaacccaagaggcggaggttgcagtgagccgagatcgtgtccattgcactctagcctgggcgacagagtgagactctgtctcaaaaaaaaaaaaaaaagaaaaaaaaaaaaaaaaaa

SEQ ID NO: 1003 - DNA, 519 bp, Homo sapiens
caggttggagcccctttccctctcccctgcatgtccatcgcaggcttcaatgtgtctggcaggcaggaaaattgaagtgcgaatttgagtgaccgtctgtacgtccaaaatggaaaatggcattcatcagactacttckwtctcttatttcatgtgtaactccttaacagaaaacaactgctgcacacggagggccttatcagacacaggacagggaccacagtattagcactcaagtgctcatagcctttcccccaccaagcccatccattctgtgcactgttggccccaggggaracaargtaattttctcccttcctggtcatcttggggcccagaccaccagctggagaaatgatgcagagagagcagatgagaaagctgaaatactgcaagttgaaatgactcgtcctagatcccaggtctagtgaagagtgagcaccagaaatcacatgtactagactaccagcagtcagatataatcagcccccaaatctcctgtggttcactatatataaa

SEQ ID NO: 1004 - DNA, 476 bp, Homo sapiens
acatttactgtactacagggaatctctcatttcaaaatgacctgtgttgcagttattgtttataaaactgtycatttatctgacgtaaggggctaatcaaactgcttaagtacattcctggatgtttggaagatttttaagcgccatagagagggtacttatgctatggaaattgtgtttatatatatatgcataattgccactgaaattctgaacagacccaaaggaagaaaaatactgtgatttaaataaagctaacataattaatttatatctattttatatttgacttagtgggataaattgttttgtggaaaaccatattataaaatagtctaagttttttatagttgaggaaraatttgaggtgaaagatcatgttaattgtaacaattgccagtactttgtgttcactatgtgtctggcactgatttatgtttattaatttactacatcctcagaaccattccgtggtt

SEQ ID NO: 1005 - DNA, 318 bp, Homo sapiens
ccttgagcaagttcttgaactcatttaakcctctctacaatgccataaggtgggctactattattactctcacttacttgaggcacagagttaaagaacttgctcaaggtcaaaactggtgagcaatggggccaggacttcaactagacagcccggcctcagtgtccaggcccttcaccaacacaccacactgcctcttcctgtcmctacggctttttaaactggcgaagtaggatccgactgactatactgctcaacttgtaagggtagcacagatccttttttatggatttactggtaatagtttttcttgggtaa

SEQ ID NO: 1006 - DNA, 486 bp, Homo sapiens
ggacttgctgtgatacctgccaagtttccttatggaggaaggaacacatacctcttctaggcagttgacataagagccttgagggttaagtgactccactgacctccacttcagatgcctggagaatcaacgtgagcacagataggctagaacttggggatgtggagctggagtgtgggtttcccacagaagttgatgggagcagagtatggatggctctacatgctgaagaaatcacttcttgtactttggcttttcttgttagggagggtaggcgagtctataagatgtcaaaaggagttttaacactggtcttacatcactcaagggcagattgatcagagacagactggaggcttgaaaaacatacctttgcataagagaaaaaagtattgcggaaataggagtagttcactggagagttgccaatagaagctgaaaatycttcagccttttgacccataaagactggaaatcttatactga

SEQ ID NO: 1007 - DNA, 470 bp, Homo sapiens
aactcccttgtaactagtacttatttgaaataatgtcctcgggattattttaagcaatgtttaagtatgaaatcatttcattctcctaacatctcaaggaatatactattatattctactttacaaaaggggaaactgaggaacggggaagttaagtggaagctaagtggaagaatccagataattgacctctccttctattggtatgcaattgctagagcaatgatagtcctccggtagagccttagacattgtgtttattgcattcctgttccacccactgcattccggatactccaacttacttccaacacacatatgcaggcgtctctaaaattccggagatatggtcaccaattatttttatgtgcgacatgctcaaatcttaatatagtaaacgcttgtatattcataaaccagcttaataaatgaaacattaccaaaaaaaaaaaaaaaaaaaaaaaaaaaaa

SEQ ID NO: 1008 - DNA, 437 bp, Homo sapiens
attcggcacgaaggttgagaagcagaagagaattaagaggaaccagcagctggaagcaatagccaaagaacattatgaaagggtcttgctaaggaaaaaaggtctagagccttggaagagattgagaatgcaaagcaaacaaaacatccaggtggcagaagaacattactctttgttcctgcagaggaaatacatgctgacgtggttccagcgtagtcaggaaagtctggctagaaagatggcccaggctgatcaattttattcccaaatactgcttaagagagtcatccagagctggctacagtacgtgattgatctgcaggaagaagtaagaaaattttgtgtacattttcttcaaaagaasattttcasggcctggtttaacatggtcagggaggtgaagatcgattctcagggcaagcatgagattgcagcgg

SEQ ID NO: 1009 - DNA, 1095 bp, Homo sapiens
  SITE (33): n equals a,t,g, or c
  SITE (41): n equals a,t,g, or c
  SITE (48): n equals a,t,g, or c
  SITE (57): n equals a,t,g, or c
  SITE (63): n equals a,t,g, or c
  SITE (228): n equals a,t,g, or c
  SITE (431): n equals a,t,g, or c
  SITE (989): n equals a,t,g, or c
attgcaactttctgtccactcaagttccaagcnagtttttncttcaancttcccaangtaacntgggatttccaggccacccgccaccatgttcagctaatttttagtattcttcatagagatgggttttgccatgttggccagctggtcttgaattctgactttaggygatccacytgccttggsctcccaaagtctgggattacaggtgtaagccactgcatctgnctgtctttttactacctttcaattgggttgtttgctttctttctgttgagttttgagaattctttacacattctggagtagtttccctgatttgcaaatgctgcttgatggttcccaggtgccagagcagtgctgggtatggaagctgtagcccaagtgaagatggcctgcaggagcctcctgacagggctgaggccagccgnccagcaagctgttgttacctctgagtgggctgagggcacacaggacatgtctgctccagccttgagtgtccagcatgactttccagatgaggcgttcctgagccagggtttatccaaactccttgcccagttgtctgtggttattccacttccacaggtctcattggttccttgccccactccagccaggctgcacactcgccagtcctccgtcgcagtgatccacctytcgcctgggcaggaatcagtgctcagcccttacctgagtgcattgtcagcagcaccccactccttttctggctacgcctgtcctggcacactttctttcccagccttctttccctgcctgcacaccctcctgatgcttsttccatctcctccgttgctctttctgcatctcctttgtaggaggcggtggtcttctccagaagaaccctgaatgcacaactgtactcagatttctgtctttaatcccctactctattctctctcagtcccctaggtcatcttggtaagaaccatgtctttaaatattaggaatgtgtttggttggacctntctcctgcttcctgaaataaacactggtgccaaccaaaaaaaaaacaaaaaaaaaaaaaaaaaaaaaaaaaaaaaaaaaaaaaaaaaaaaaaaaaaaaaactcgag

SEQ ID NO: 1010 - DNA, 1273 bp, Homo sapiens
aacttccactttgtaaaggcagaccagtttgctcccagaaaatcaatatctgcttccaatttggaccctttccaataaaccataaactctcatgagtctttgggaacattactgtagggctaagttggtggacaaatatttggtttttaaagttattgcaatgaaagccttaaatagtgaagaaattttcattttgaaaatgcagactggctttagcatgaatgtcaacacagagcatttgtgtagcaatttacagttgctagaactggcaagattcattatcccattttaccctcaagaattctatgggaagttaagtcgtctttacacaaacatggagtctgaggtcattaggggataagaaatttagccaagttcacacagctatatagagggcacaactcataccccagctgtgtttaaaatagataatttatcatatatacatggtccactacatagtcaaacaatttctatagtgggcagtaaatagccacccagactatactcacatcaagaaatgtcctcaataacacagttgacaggatggtgctttcagaatggatcccctgccagtaagtccaagattcctgtgtcccaaaggtccacagagcaacttccccatgcaccctgacccccattcaaacccattagaattcacacacaaggttgcaatgggcaaggcacttggcaagaggagggtcttcagaacacactttccagcttggcgtgtacttcccactctcctaccctgagggcacctggcagcagacaccctcaggggctgaatcagaggtgactgagcttggcacacagtgaagaggcccatgcgctccagtgtgtcttctgatggccaacacctgtgctcctttggaaaagggtgagtaagcacttcttagagagtgtgtttctctatcagtacaggtccaccttgtgaaarggctggaagccctctagaatggtgttcttctytgtctgcggcctcagggtctcataggtgggcaccatggcattcagagacagaccttatacttctctagtcagtctgcccctctggccttaatcttcagggttagtgcatctatttaaaacaagagatgccatctcaggtggtgctggcaatcagcagttgctgtggscctgcaatgccatctgatccttggaaaaccaacatatgtgccatcttacagttgggtccataatggcatttcctctagctatatactgtgagcttgtatcgtggatacaggaagagtagagagtaaaattaatg

SEQ ID NO: 1011 - DNA, 99 bp, Homo sapiens
caaaataattgagacagcctggtacatgacaaggagaaaaaaatccagacatcgtgaggagtatttcttggatgacaaagacttcattttacttttatt

SEQ ID NO: 1012 - DNA, 556 bp, Homo sapiens
  SITE (489): n equals a,t,g, or c
  SITE (499): n equals a,t,g, or c
gaattcggcacgagaaaaaatcccaaaaaacaaagttaagcaggctggggacaaggaagggtcagggaagcttcctggaggaagaaacagttgtcagttagaaatgaatggcaggctcctggagtgaaggcctcctgagtcatccatccctgcccctgcctaaccgcaggctgactggcagagccattgggtcgcgtacgtcatggggcagactccggaggctcaatgtgtggctgctgcgggcgggaccatttgtctttgggaaaagtggttcagggaggctgaccacagaggccagaggctctcaatgctgacccctatctaccaggatttagaaagtcaccctgaccccacgaccacggcatccttggctgtgcctggggttcacaggggaactgaggctgaagcacttcccagaggtcacatccaggttggggggcccaggagtggatttcgccgaatgtcccatctggggctgtgtcccaagangggaggtaanccacaggttttcccagccccgtgtgctccaagaattgaaaagtactaagggggcttc

SEQ ID NO: 1013 - DNA, 529 bp, Homo sapiens
  SITE (8): n equals a,t,g, or c
  SITE (12): n equals a,t,g, or c
ttgtatcnacgnactatagggcgattgggtccgggcccccctcgagtttttttttttttttttttttttttttttttttgagtgggagtttcactcttgtcactaggctggagtgaaatggcacgatctcggctcactgcaacctctgcttcccgggttcaagcgattctcctgtctcagtctctccagcagctgtgactacaggtgcctgccatcacgcccagctgattttgtagttttagtagagatgaggtttcaccatgttggccaggctggtctcgaactcctgacctcaggtgatccacccgccttggcttcccatagtgctgggattacaggtgtgagccaccgcgcctagctatttttacttctcaactgtctcactgaccagaacaggaacttgckgagatcagggacgcgctctgggaccttagtgcccacacttggcctggtaagtggcaaggcctcagccacatttgttgaattaataaaaggatcttgggacagtctcctagttcccaggcaatga

SEQ ID NO: 1014 - DNA, 251 bp, Homo sapiens
ggcttggcctctggctagaacatggcaccttgaaggagcaaaacaacttggggtagaacagattgtttcacggtgagacagttagagccttataaggagttaatgatgggattggggttctgtcctctgttctcaactctgaacctagcacattgctgctgtgaggtctgctgctgtgaggtccaccactgtttattttccatgtaatttgcaacaactctagtctggagtggcaagacttctgatttctc

SEQ ID NO: 1015 - DNA, 379 bp, Homo sapiens
ccgaggcgggcggatcacgaggtcaggagctcaagagcagcctgaccaacatggagaaagcctgtctctactaaaaataccaacttagctggagtgcagtggtgcgatctcagctcacctcaacctccgcctcccgggttcaaggaattctcctgcctcagcctcccgagtagctgggatgacaggcgcccgccaccacgcccggctaattttgtattttttttagtagaracggggtttctccatgttggtcaggctkgcctcgaactgccaacctcatgtkatccacccacctcagccttccaamgtgctgggattacaggcgttaagccaccgggccattaaacattatcaatttcctcccttttttttttttttt

SEQ ID NO: 1016 - DNA, 1595 bp, Homo sapiens
  SITE (433): n equals a,t,g, or c
  SITE (467): n equals a,t,g, or c
tccatgacggtcagtgcagcaatccacaaactactcccggctgccagcatcgcggtaatgacgaactggctcgcgcctgcataaatgatgcaggagaaaaaaacgctttcgagaggagagaatcccagacgggtcgcattcagaccgaacgcaaaggccaccggaatataactaataacaatcggtaaactgtctttgcatccttccatgaaggtcgccgaaccaggagcaggctgtggagtagggctttccatagagtgtacgcttaacgattgttaatattataaatagactgaatgaatatcttaaccttatcagactgatgggcttcttaacacccttataagtgtaaagccacgaaaacggttgctgattgcttaatttgcggcttcctgacgatgaaaacctcgccaccagaccagtaagttaagcngggcratcgtcgctccarmcwgraaacgsgcccnaaccgccatgttgccaggctgaggctgaaattagcgaaccggcggcaccgccaataaagtagctagtcatgtaacctgcggtcaggcgattgcgcgcatcaggatgtatccgataaattaccgtctggttagtgatatgcacgccctgcacggtgagatccagcaccaggattccgataatcaacgccagtacggaagtgtgaccaaaccagatcgccagccatgaaagtaatagcagcagcagaccgaaagttktggtktggtgcgatttgcccttatyggcaaaaccscccsccggacgagcgcccaacgytccggcagytcccgcaagtccaaacagaccaatgacaccatcgctgtagttaaaaggtggagcggcaagcaaaaaggccattgagktccagagaatgctgaaattggcaaagktcaggcagcccagcaacgcgcgggtacgcagaattttatcgctgataaacataytgaaaacggaacccaasaactgtgggtagttgwggtgggtttctgatttcatttgtggcagaccacgccataatgccagcgccatcagtgccattaacaccgaagcaacccaaaagacggtgcgccagccgccgagattcgccagcaatccggcaactgtccgtgccagcaagatccccaacagcagaccgctcataatagtgccaaccactttgccgcgtttatccggtgaagccagcgtcgctgccagcggaaccagaatttgtgccacgactgagaataaaccggttaatgccgtaccgaggatcatcatcgccagcgactgactgctggcggtaatcaacatgccgccagtaaggtcatcgagacaatcaggcggcggcgttcaaacatatcaccgaggggaacaagaaacagtagacctgcggcatagcccaactgcgcggcggtaacaataaagcctgccgaactggcggaaagggaaaagttacgcgcgatggtgtcgagcaatggctgggcgtaatagttactggctaccgccagaccggtggcgatagacatcagcacgatcagcgccgggctaagctcatgattaggtttagtcattatttttgttcatcaggtgatgattaagctggaaatcaattc

SEQ ID NO: 1017 - DNA, 332 bp, Homo sapiens
  SITE (2): n equals a,t,g, or c
  SITE (4): n equals a,t,g, or c
  SITE (9): n equals a,t,g, or c
tntncgggnaaggggagtaaaggcaaaactcctttatgatctctcttgtaatccagtttgtgawaaatatggtgctcattagytgtctactttttaacaatatgaccagaatgtaaccagtaacatatatattaaggctcactaaacacagtgcaaaacagaaaggaaatagattgtgcagtaccatcactgatgacaaattcgcaaagcagaaaggaaatagattgtgcagcacaatcactgatgacaaattcctatcaaatttccttagttttcctagttctccattgatactaatgaatttcacaaatatggtaatgatgaaaatataa

SEQ ID NO: 1018 - DNA, 268 bp, Homo sapiens
aaggccccatcycaaaaaaaaaaaacaaaaaaaaaacaaaaaaacacaacaacaacaaaaaacatgacataagaaactatttttggccagatggggtctctagatctctattaccacaaataccaacactggtcctcaaaaatttcaattctgataccatttccatactgctatgaaggttaatagtcacgtgagaagagtttcttatgattcctttgacaacatcaaatttaattcctaaatatgatctcgtgccgaattcctgcag

SEQ ID NO: 1019 - DNA, 605 bp, Homo sapiens
ctcgagtttttttttttttttttaataaggaagttattggactctagaatggggattctaaaagataaaatgaagaattatctagcctacaccccatccaaatccaattaaataaaaatttccaggattctttttaataacttctccacatgattctgatatatggccaaatttgggcatgtcaatacttaggaaaccttttccctataccttaaaatgttaagagaaaatggataagatctgtaaatccaagaattacataaatatgcataaaatcctgcttgtgacaagttatttacaaaccagagctcagctctgaaaagtacaaatttagtggccaaatactaatwtattctaaatgatgcctaatgtaccatatagataaacctataaatgtatatccccatagaggaacttataaaaagctccatactgtgttctacaacacactattaataaaataatcagcaatttttttctctgaactttcccctcaattttgtaatgaacccaaaactgctctaaaaattaatgtctattataaaaaatgtttaggtactaatgaacagtgaaattctatgtgttgccttatctgtgaagtctgt

SEQ ID NO: 1020 - DNA, 794 bp, Homo sapiens
  SITE (57): n equals a,t,g, or c
  SITE (65): n equals a,t,g, or c
  SITE (66): n equals a,t,g, or c
  SITE (162): n equals a,t,g, or c
  SITE (756): n equals a,t,g, or c
  SITE (771): n equals a,t,g, or c
gatgtttacgatcatatacggcgatttgggtacgggcccccctcgagtttttttaantttttttnntttttttttttgtaggtgctctacaaattttaatgggctgattacaatatttgatgaattaattaattagctaatatcctccccatttcttgtttntccttctgctttagtctgcaaggtccttgctgtttttcttttcagtgaaactccaaactggcctgctctgtccgttgctttgatatcgyctcctgmcaactcccctcacctcatcctctcacatttaaaaccttccatcagcaattcttgcaggcaccgggctccgggtctccctgtccagtcaccctcagtgactgggacyccccttcactttgctgawgtaaagctttgcttgtgcaattttctccgcccttctcttctgctgcccatatttgaatctcacctccaccatgcctgccaaaaggaggtcttgttcctgtgacctactatctctcccctggcacctgcccactttctctaattgaccctgaccattttctgcccaatgaaacatttttttaacatatatagcttattacccgtataagggctctttgagcattttgaaggctataggatagctttctagggaagatccttgcttatagcaatacctgctgaatttgccatgatagcagcaagttagcctttgtattgaatgacattgcatttggcaaagcattgtattttgggatctagtgctatattctgaangccaccaaggtatanaatttaattcctgctcaaacttt

SEQ ID NO: 1021 - DNA, 527 bp, Homo sapiens
  SITE (435): n equals a,t,g, or c
  SITE (463): n equals a,t,g, or c
  SITE (470): n equals a,t,g, or c
tcgtgttttttttttttttttttgttttacctccgctagtatggcgaatgttgctgtaaagtacctttatttcttaagtgcttcagcgacagtttccgccattactaattgattaaactttattcattaaaacttcactgttttatttgtgattttttttttcacaagggctgggctagactttacagtttacacacacaaaaaagtgcttaaagcaattaggagtgtaaacaaaactgaaatagaaaacttttaaaactgctattttctactagtttatgtacaaatgacatgctaataataaatcaaccctgtctagtctaatcttcaagcaactctactaggaaacattatcttagtttttagttaaaattgacttgaaaatatggaaagtgcatgtctttaaaggkattttataattttgactttktccyncaattgkaatcactgaggktttgcygknaactgcnatttccyttcaccaagtccyccaacttttgkcycatacagaaatagaaataaaggtt

SEQ ID NO: 1022 - DNA, 622 bp, Homo sapiens
  SITE (490): n equals a,t,g, or c
  SITE (564): n equals a,t,g, or c
tgcagcatgaagatcactcacaagatgatcaagagactcatgtgagaacacagccaccaacacctctctggccgtcctgaaggtgcctggaaggttggtgctgatgcggcccccatggaggaacgggctcccatggagggatgagcccccaggatggagagctcagggcctagcctgacaccatgagcctaggattgggggcactggctgccacacaggcagcccttaccacgctacggttatgtccttgcaagtttgattcttacccgtaccaktggrccccggamsgtctgcccatgcctcacctgcccaaggttctgtgcaggaatgggaatggcgtggaacgcagcagggargarargtgaggsctargcctggccctgtagcacaagctctgaacctgggcttgcctcacctgcacacgggggatcgctgggamcggaagaactctaacggcccctctccaagctactgcttgccattctgccangcctgctggtgctcgcataacaccttgagactgcttcttgccttggggaccccgcactgtgcctcctagcccancgccaggcatggctccaggcagctgtggcagcagagtggtaggactgaaggtgtccca

SEQ ID NO: 1023 - DNA, 704 bp, Homo sapiens
cggcacgagctccaggcaagcagggcccagcctcggcacctccagcactgcgtctgggagctgctcttctctgctctcagctggggctatctttaggacactactgtttggttagagccctttcctcacaaggcacttttcctacgtcgcatttccagagtaacctgccaccgtggcagccctcctcatcacaaagaggactaggagacgacagaaaagagacattcccagaatgtcagcggaaatagaaataaagggatgagatccgcgtgccacgaggaatctgttccaggaatgtctgcatctcttcggtgcttctcttgctcagtaatttgatgaaaccaccagcaggaacctcttctttgatgtgcacaacatgctctccaaataaacacaggaaagagggacaagggtggcctagagtgkgggatagttctagaaatctggccacatcaattctaaaaagcctgttggcgtaraaagtaggcccatctttgcaaagtaatgcccactctgaaggkcttgggattcctgagtttggagaagacagacmatataaagattgagccagggctgacaaagggctagcctgaggctgaagttgggcaaaaatcaacccttggactcaattcaaagktactttcacttyawttaactgktatmcaaggaarcgtgcacatgaagatcactcacaagatgatcaa

SEQ ID NO: 1024 - DNA, 517 bp, Homo sapiens
  SITE (1): n equals a,t,g, or c
  SITE (4): n equals a,t,g, or c
  SITE (420): n equals a,t,g, or c
  SITE (515): n equals a,t,g, or c
ngcnccccctcgagttttttttttttttttttttgcttattatacccagactgctctgaaagatacaaatcttaagtcacagatgaagactacaaagaaacttatctgtctctagccagtttgggatgaaagaaaataaaatctctccttgaatggaaaggaaaaaatagtaactttacagcagtgaatactgacaagtactaccttaaccacacaatcagagtcaacaacaccagtgataggtcaatcatgttgatattatgttcactctgacttaatgtgatgagaaaaccatttcacctctgtgatattgtcccccaaacccccataaccctagtttaattatcaaaaaaaatcagagaaactcaaattgagggccgttctacaaaacatttgaccagtactcmaaaccacagaggncattaaaawtwgrgaaagcctargaaacygttacagaggagacaaaggagacgtatggactagatgcagtgtggtattctagatgggattgtggnaa

SEQ ID NO: 1025 - DNA, 649 bp, Homo sapiens
  SITE (643): n equals a,t,g, or c
  SITE (649): n equals a,t,g, or c
gaattcggcacgagaggaaatccagctagtcctctctcaccaggttcaggcgattctcctgcctcagctcccgagtagctgggattacaggcatgcaccaccatgcccggctacttttgtatttttagtaagagacagggtttctccatgttggtcaggctggtctcgaactcccaacctcaggtaatctgcccgcctcggtctcccaaagtgttgggattacaggcatgaaccactgtgctgggcctgtwttgtttttttgtttgtttgttttagcaatcaaaaacctaataaagacagcataggaatgataaaatcttatttcttaagccggttaccaaaaagacaaagaaaaacctattgcagcgtgactgcttctacttatgggaagcccatttagataacctggaagtcaaacttgataaaagtgcttgaatttaatcagacacagaaagagtgtgttcaaggttatgaggatagcagggggaatacatgactctaaggaatagtatgaaaagttttctgacggatgtggtggctcacgcctgtaatcccagcactttgggaggccggggctggcggatcacgacgtcaggagatcgagaccatcctggctaacatggtgaaaacccgtctctactanaaatan

SEQ ID NO: 1026 - DNA, 449 bp, Homo sapiens
  SITE (91): n equals a,t,g, or c
  SITE (92): n equals a,t,g, or c
  SITE (94): n equals a,t,g, or c
  SITE (419): n equals a,t,g, or c
cgtcgacccgggaattcgcggccgcgtcgaccagcatgctgcggcggggcagccaggcgctccggcgcttctccactggccgggtttattnnanaaacaagctgaagttggcactaattggccagagcctctttggacaagaagtctatagccacctccgcaaagagggccaccgagtagtaggggtgttcacagttccagacaaggatggaaaagctgacmctctggmtttggctgcagagaaagatgggacccctgtgttcaagcttcctaaatggagggtcaagggcaagaccatcaaagaagtggcagaagcctacagatccgtgggtgcagagctaaatgtgctccctttctgcactcagttcattcccatggatataattgatagtccaaagcacgggtctatcatttatcancccatccatccttgcccaggcacagaggaa

SEQ ID NO: 1027 - DNA, 571 bp, Homo sapiens
  SITE (35): n equals a,t,g, or c
gtaccttgggaaacctctggcaactcctttgagcntctgttccctatgtgtaaaccaggatagtaaakgccttcctcaggaccyttmataggagaattcattgcagtaatgtaagtaaagcacctcacattaatgcwwtgctcatggtaagtactcaaatttaactctgatttcctccgtcaccattcttaaaagatattgagatagtttaattaactagatgaattcatttcccacaacccttttcaatcatcaattcctagatatttttctcatccattgttctgacacaatgcctgatacagcagcactgaaaaatgccacacaatgaaaaatggcaatagtacaaggaaaaggggtgcttttctttgggcagctcgctcgtccttcatgggacatcttactttccatttttctacctattggttctgctgttcactggctgtgtgatcttgggcaagatagtaatctaatatctcagagcctaggttgagtatctataaaatgaaaatcaaatctctatctcagtaggtgttgcaaggattcagtgagataatatacataatgcgtc

SEQ ID NO: 1028 - DNA, 426 bp, Homo sapiens
  SITE (378): n equals a,t,g, or c
  SITE (379): n equals a,t,g, or c
  SITE (392): n equals a,t,g, or c
ccgcgtcgacctttaattttccaaagccagcttactagggtcatgtatctgcctttgcaatcactggtattactgctcactgcctggtcacatctgtgtccatttttccgggttctccaaacctctaaaatgatgattaatatgcaaagaaataattatatcatcacataaatcttgtmatcatttgtccagaaggtactactaatgtgttaaatgtgttaacaatccaagcaatgcagtcatatcatatagaaatgaatcttgaaactgcagctatatccaatagacatgttaggcctgagtgggatgggtggaaagtggagtggacctgggtaagagagggctgatccaaagtgataaatcatgtatgtattagcnngtctcacactggnataaagaactaacagagactggggaatttattaa

SEQ ID NO: 1029 - DNA, 760 bp, Homo sapiens
  SITE (620): n equals a,t,g, or c
  SITE (628): n equals a,t,g, or c
  SITE (636): n equals a,t,g, or c
  SITE (666): n equals a,t,g, or c
  SITE (680): n equals a,t,g, or c
  SITE (718): n equals a,t,g, or c
  SITE (750): n equals a,t,g, or c
gaggaaaaacaaaattaatcacttaaatgaaaatacttttgcacctctccagaaactggatgaattggatttaggaagtaataagattgaaaatcttccaccgcttatattcaaggacctgaaggagctgtcacaattgaatctttcctataatccaatccagaaaattcaagcaaaccaatttgattatcttgtcaaactcaagtctctcctagaagggattgaaatttcaaatatccaataaaggatgtttagacctcttatgaatctctctcacatatattttaagaaattccagtactgtgggtatgcaccacatgttcgcagctgtaaaccaaacactgatggaatttcatctctagagaatctcttggcaagcattattcagagagtatttgtctgggttgtatctgcagttacctgctttggaaacatttttgtcatttgcatgcgaccttatatcaggtctgagaacaagctgtatgccatgtcaatcatttctctctgctgtgccgactgcttaatgggaatatatttattcgtgatcggaggctttgacctaaagtttcgtggagaatacaataagcatgcgcagcttgtggatggagagtactcattgncagcttgnaaggatcntttggccattctgtccacagaagtatcagntttactggtaacanttctgacattggaaaaaaacatctgcattggccatccntttagaagggggggagaccgggaaaaaggccnaaccaattac

SEQ ID NO: 1030 - DNA, 872 bp, Homo sapiens
  SITE (688): n equals a,t,g, or c
  SITE (697): n equals a,t,g, or c
  SITE (735): n equals a,t,g, or c
  SITE (742): n equals a,t,g, or c
ggtcgacccacgcgtccggttgatgatgaagttggaagatttgtgaatttatcctgtgttacttctgggattcagaatgctcagtgctggcatggaggaactcacatcgacatttgtgaagatatttctgatcatgttgagcaaatccatgccctccttgaaacagagttctccctaaagctgctgtcttactctgtcaacgtgatagtggacatccacgcagtgcagctcctctggcaccagcttcgagtctcagtgctggttctgcgggagcgcattctgcaaggtctgcaggacgccaatggcaactacactaggcagacggacattctgcaagctttctctgaagagacaaaagagggccggcttgattctctaacagaagtggatgactcaggacaattaaccatcaaatgttctcaaaattacttgtctctggattgtggcattactgcattcgaactgtctgactacagtccaagtgaggatttgctcagtgggctaggtgacatgacctctagccaagtcaaaaccaaaccctttgactcttggagctacagtgagatggaaaaggagtttcctgagcttatccsaartgttggkttacttacggtagctgctgactctatctctaccaatggcagtgaagcagttactgaggaggtatctcaagtatctctctcagtanacgacaaangtggatgtgaggaagacaatgcttctgcagtcgaagancaaccangcttaacactgggggtgtcatcatcttcaggagaagctctgacaaatgctgctcaaccctcctctgagactgtgcacaagaatccattcctcctcccatcatgatgccaaagaatcacagctgttcctgt

SEQ ID NO: 1031 - DNA, 1699 bp, Homo sapiens
  SITE (6): n equals a,t,g, or c
  SITE (19): n equals a,t,g, or c
  SITE (32): n equals a,t,g, or c
  SITE (38): n equals a,t,g, or c
  SITE (39): n equals a,t,g, or c
  SITE (1679): n equals a,t,g, or c
  SITE (1683): n equals a,t,g, or c
  SITE (1687): n equals a,t,g, or c
  SITE (1688): n equals a,t,g, or c
  SITE (1694): n equals a,t,g, or c
cttagngggcgcaccaacnggaatactctgtngcatgnncgcgtacgtaagcttggatcctctagagcggccgccctttttttttttttttttttttaaattttataaatcttttattttttccaaagaacaaaagaagcactataaaccattgagatacatttaaaaagtacaattttaacatagtacttgtgatgcatatgtaattctttgtaacaaaatggtcaaacacttaaaaagatacagtatatatgtctgcacattttagcaaggctgtgcattttttataaactacatgagtttatattcaaagaccttgaatatgctttcagaactttcaaagtatagatcattgttaagattgcctttactcttaaaaacctaaagggatgtatttctataaaaactagaaataaggaatttacctagttcctagattatttattagtcaaaaatacatgcttagtggctagaaatacaatactcctgataaaatagctaataaataccatataaaatcaaaggtttaatgagtaagtcatgacattatgccatactaggaagmcatcaaatgtytaaatttacagaaaaagaatatattagtccttatagaactcatatatttagaaattctaaataaggaaatatattctacacagataactgtataacactcatatttctaatgcagtataacttaaatatcttccaaaggtcaagagtaagaaaattctctaacatattccccaaaaaacaatactaaagttgttcctatttcataagagagtgaggataacaatttatctccatatacagcattccaatgaaattccattcactctcatacagcttttcccatggcagtataagaactacattctagaaataacagtagtcacattgaaaggattaacaatcagtgatttcttaattcacaatttagtcaactcttaaagatttcaatagcataacagttaaaataacagcaaatacggagcaggaaataatatgctaaacaggacataaactgagcagaaagctgcaagggcaagcatagattccctcttcctttctctctttcatagtagggaattcgtacagaaacctaactcattggagaaaatgagcccttgcttcttgtcttcagtgggtccagaggtccccagaaaattctgctgaagaactgggcaacttttctaacacatggtcttttctttcaattgttctttccactgtccaatattttctgaacgatctttttgatcaaaggagcttctgggtccagacagacttcccttccattcttcaaggtggctatcacttccaccttggagcactgcggtcccgcggcgatcacctgcagatcactgaccgttttgggatgaattcccggtgtggtggttaaacacacacaacgcagctctctcacaacggccgcgacaggaccggcgctggcgaggggcccgggcggcgtcagcagcagcagcgcgagcagcgcgcacagggagcccgaagggccggagacgcgggcagcgcggctggatagcagtctcatagtggcgaagagaggactgcagagggctccgaaggagggagaaggcgcgcggacgcgtgggtcgacccgggaattccggaccggtacctgcaggcgtaccagcwttccctatagtgggcgtttnggtnaagnnccccgngtaaa

SEQ ID NO: 1032 - DNA, 1539 bp, Homo sapiens
ccacgcgtccgcgcgccttctccctccttcggagccctctgcagtcctctcttcgccactatgagactgctatccagccgcgctgcccgcgtctccggcccttcgggctccctgtgcgcgctgctcgcgctgctgctgctgacgccgcccgggcccctcgccagcgccggtcctgtcgcggccgttgtgagagagctgcgttgtgtgtgtttaaccaccacaccgggaattcatcccaaaacggtcagtgatctgcaggtgatcgccgcgggaccgcagtgctccaaggtggaagtgatagccaccttgaagaatggaagggaagtctgtctggacccagaagctcctttgatcaaaaagatcgttcagaaaatattggacagtggaaagaacaattgaaagaaaagaccatgtgttagaaaagttgcccagttcttcagcagaattttctggggacctctggacccactgaagacaagaagcaagggctcattttctccaatgagttaggtttctgtacgaattccctactatgaaagagagaaaggaagagggaatctatgcttgcccttgcagctttctgctcagtttatgtcctgtttagcatattatttcctgctccgtatttgctgttattttaactgttatgctattgaaatctttaagagttgactaaattgtgaattaagaaatcactgattgttaatcctttcaatgtgactactgttatttctagaatgtagttcttatactgccatgggaaaagctgtatgagagtgaatggaatttcattggaatgctgtatatggagataaattgttatcctcactctcttatgaaataggaacaactttagtattgttttttggggaatatgttagagaattttcttactcttgacctttggaagatatttaagttatactgcattagaaatatgagtgttatacagttatctgtgtagaatatatttccttatttagaatttctaaatatatgagttctataaggactaatatattctttttctgtaaatttagacatttgatgtcttcctagtatggcataatgtcatgacttactcattaaacctttgattttatatggtatttattagctattttatcaggagtattgtatttctagccactaagcatgtatttttgactaataaataatctaggaactaggtaaattccttatttctagtttttatagaaatacatccctttaggtttttaagagtaaaggcaatcttaacaatgatctatactttgaaagttctgaaagcatattcaaggtctttgaatataaactcatgtagtttataaaaaatgcacagccttgctaaaatgtgcagacatatatactgtatctttttaagtgtttgaccattttgttacaaagaattacatatgcatcacaagtactatgttaaaattgtactttttaaatgtatctcaatggtttatagtgcttcttttgttctttggaaaaaataaaagatttataaaatttaaaaaaaaaaaaaaaaaaaaa

SEQ ID NO: 1033 - DNA, 683 bp, Homo sapiens
  SITE (4): n equals a,t,g, or c
aatncatcatcagggacgattgggtaccgggccccccctacgagttttttttttttttttttcttttttttttttttttgagacagagtctcactctgtcgcccaggctagagtgcaatggacacgatctcggctcactgcaacctccgcctcttgggttcaagggattctcctgcctcagcctcccaggtaactgggattacaggcatgcactaccacacctggctaatttttgtatttttagtagagacggggtttctccatgttggccaggctggtctcaaactcctgacctcaggtgatccacgtgctgtggcctcccagagtgctgggattacaggcgtgagccactgtacctggccagagagttctttagatggtctccttccagattattcaaaggatccttggggttagtgggccagagatgaaagctcatacgcataaaagcatagcaggaggaaaggaccggaaagatggaagcagggagaaagaagggatcgcctttgattcattcacccagcaaacccatagcaactcccactgattcattagcctctaaattcctacatttattattactacccatatggaaggcaatgactaattcttgccacatggctgggatatggcttcctattaaggaaacacaacctggtagcctaaatgctgtagtttttscc

SEQ ID NO: 1034 - protein, 29 aa, Homo sapiens
  SITE (2): Xaa equals any of the naturally occurring L-amino acids
YXCIRIMGVIIDKDWLSLMYYDIIAYRHN

SEQ ID NO: 1035 - protein, 61 aa, Homo sapiens
YPFLSSLACFHSKAKLCGIKSCGPTTHPTITHSQARDGSHALPSSRLWAEVFFFFRRKVCN

SEQ ID NO: 1036 - protein, 42 aa, Homo sapiens
  SITE (33): Xaa equals any of the naturally occurring L-amino acids
QFELHLRGRVINIHLPFVQKWKFHFLEPDIHAXTISLLPLEN

SEQ ID NO: 1037 - protein, 41 aa, Homo sapiens
  SITE (41): Xaa equals any of the naturally occurring L-amino acids
KVALHSGENVKSSFKEILTSNPHSWGGEKLHVFLMKKKKKX

SEQ ID NO: 1038 - protein, 52 aa, Homo sapiens
  SITE (50): Xaa equals any of the naturally occurring L-amino acids
TMFKKKEKKTENKTKKNHKVFRQQNSTVNKIVPHISINTFWIKKKKKKKXGG

SEQ ID NO: 1039 - protein, 44 aa, Homo sapiens
DEYFVLQQFPAEALVDPGLHAVKGCFPSYKKKKKKKRGGPPKKT

SEQ ID NO: 1040 - protein, 49 aa, Homo sapiens
DQDFYECCFKNLADFIQNYFKEFEFSTFNHNLKSLFLQIAQSDFGMLLL

SEQ ID NO: 1041 - protein, 59 aa, Homo sapiens
AKCPSFQLTRFSSPTNSMSMCLTEVYVPVRSRSCLPYSPPYSHSRLLPRCSINIYKVRI

SEQ ID NO: 1042 - protein, 32 aa, Homo sapiens
MPNWIFLIHAGLLHWSRFRLVGVATQEVRNEP

SEQ ID NO: 1043 - protein, 36 aa, Homo sapiens
GSWQVTLMSEKKKKKKKKKKKKKKKKKKKGGGPPKK

SEQ ID NO: 1044 - protein, 58 aa, Homo sapiens
NKLYIACFLNWIDFNIMRVDRYTNRNKFILLISAWHIKTILWGDRIGGMKIWANTISF

SEQ ID NO: 1045 - protein, 27 aa, Homo sapiens
  SITE (13): Xaa equals any of the naturally occurring L-amino acids
TYSRLGRKTTLVXFQKVFASYLVYFSF

SEQ ID NO: 1046 - protein, 31 aa, Homo sapiens
  SITE (10): Xaa equals any of the naturally occurring L-amino acids
  SITE (26): Xaa equals any of the naturally occurring L-amino acids
ELFSLRRERXSSSQKKCYPLTKRTEXRDVYP

SEQ ID NO: 1047 - protein, 77 aa, Homo sapiens
KPLVVSCCLKRNASNTWMVFSIFPRGPSLPSQTIFCLDHPLGCSPSRPHSFILLPCLWSSFCLEFLLWASPPHHPTT

SEQ ID NO: 1048 - protein, 48 aa, Homo sapiens
  SITE (48): Xaa equals any of the naturally occurring L-amino acids
INNTFPKPRYLYKYIKHFCTISCYDLQPHQTDKLRPIFIEQKTEFKRX

SEQ ID NO: 1049 - protein, 65 aa, Homo sapiens
VGFIHKLGLTILLYLSELNSLEREENMWQSMVKVKNLCFMDCKRVEGGRSRKTNVNMNVMWPAVA

SEQ ID NO: 1050 - protein, 65 aa, Homo sapiens
  SITE (63): Xaa equals any of the naturally occurring L-amino acids
WHGKSGDLLAKRLRKRVLKMKGIILVRFPNSLLGTKMVTITYLLNPITLIPLCCLRYGMLREXRT

SEQ ID NO: 1051 - protein, 73 aa, Homo sapiens
  SITE (60): Xaa equals any of the naturally occurring L-amino acids
YYVRKKLGVEQYVSYASFFIRKVTKCLHETTTGRAHKKLITWFMYGKRGIETLSSHGKDXGRLFTGYFYLFTK

SEQ ID NO: 1052 - protein, 37 aa, Homo sapiens
  SITE (35): Xaa equals any of the naturally occurring L-amino acids
GKENIVIKNASLASVSGDNFIHVCYVFYDKGIILXIT

SEQ ID NO: 1053 - protein, 48 aa, Homo sapiens
  SITE (37): Xaa equals any of the naturally occurring L-amino acids
  SITE (39): Xaa equals any of the naturally occurring L-amino acids
AAKTDQRTSDLIKEKWRFVKRLTGYSSSICISVHLPXQXMNTITTNNK

SEQ ID NO: 1054 - protein, 61 aa, Homo sapiens
  SITE (49): Xaa equals any of the naturally occurring L-amino acids
  SITE (56): Xaa equals any of the naturally occurring L-amino acids
VLETLGSQTEWNFSLFSLQLRKHTQTQEHIYCDISIPKFVFKKKKKIKXFLCPSTXIPLPP

SEQ ID NO: 1055 - protein, 58 aa, Homo sapiens
  SITE (58): Xaa equals any of the naturally occurring L-amino acids
WLDRGHGLAAFKNAGTLCCAVRFAQTHSISALAGSPLMKLTLALISLVLGRKGSEAIX

SEQ ID NO: 1056 - protein, 78 aa, Homo sapiens
  SITE (46): Xaa equals any of the naturally occurring L-amino acids
AIYLPLHSGMFVFWSGWHSSFPGTCFCSHPVIPLLSLFPCYFLSGXILLFEHRTFFHSIEIKCYENYTILECFHFPFY

SEQ ID NO: 1057 - protein, 66 aa, Homo sapiens
  SITE (63): Xaa equals any of the naturally occurring L-amino acids
  SITE (64): Xaa equals any of the naturally occurring L-amino acids
  SITE (66): Xaa equals any of the naturally occurring L-amino acids
LLREQGIIFWNSSHLPPFSSPWAFASAISVPSNSDSQTKSNVPSAGHDDSSFCFILKIDDLWXXFX

SEQ ID NO: 1058 - protein, 39 aa, Homo sapiens
  SITE (38): Xaa equals any of the naturally occurring L-amino acids
VVVINYVCVYINHFRKSPYIILYSIFSSKVYSFNVFLXN

SEQ ID NO: 1059 - protein, 46 aa, Homo sapiens
  SITE (12): Xaa equals any of the naturally occurring L-amino acids
GRELGLDPLLIXLHLAQCLPQSGLSINIICPRKKKKKGRPLAIGRV

SEQ ID NO: 1060 - protein, 52 aa, Homo sapiens
  SITE (9): Xaa equals any of the naturally occurring L-amino acids
  SITE (15): Xaa equals any of the naturally occurring L-amino acids
  SITE (21): Xaa equals any of the naturally occurring L-amino acids
  SITE (37): Xaa equals any of the naturally occurring L-amino acids
  SITE (51): Xaa equals any of the naturally occurring L-amino acids
YKPIGKVKXILNSIXHLTFWXHSCFPKKQAIIIPTQXSYCFQEKLINFFFXI

SEQ ID NO: 1061 - protein, 66 aa, Homo sapiens
  SITE (58): Xaa equals any of the naturally occurring L-amino acids
SIHQFLYLSIHHPLSTHPPTIHPLNKLNTFYVPGTVFGSENSGEQNRLRRPDVLSSWXLGFCLSKR

SEQ ID NO: 1062 - protein, 65 aa, Homo sapiens
  SITE (59): Xaa equals any of the naturally occurring L-amino acids
NKRLDITLFFFWLLPHFYVYFYQFDLVHMLYVFRNNSRSEPTTVKYCRVLTWENYYSRXINLIVI

SEQ ID NO: 1063 - protein, 50 aa, Homo sapiens
  SITE (41): Xaa equals any of the naturally occurring L-amino acids
MNMKQKSVYQQTKALLCKNFLKKWRMKRESLLEWGLSILLXLCIALFSSP

SEQ ID NO: 1064 - protein, 90 aa, Homo sapiens
  SITE (48): Xaa equals any of the naturally occurring L-amino acids
  SITE (58): Xaa equals any of the naturally occurring L-amino acids
  SITE (73): Xaa equals any of the naturally occurring L-amino acids
  SITE (74): Xaa equals any of the naturally occurring L-amino acids
RNRAPLRVRGCCKCGSAGHGRACLADAHGKCSSKGMGGAFGAGERLVXAASRGNTRLXRPALCGATSGKRAPXXRSGLKAILTIPRTPLE

SEQ ID NO: 1065 - protein, 78 aa, Homo sapiens
  SITE (52): Xaa equals any of the naturally occurring L-amino acids
  SITE (53): Xaa equals any of the naturally occurring L-amino acids
GPSIDVQSFTVHGDSQQLDVFIATSKHAYATYLWTGEATGQSAFAQVIADRXXILFDRNSAINSSIVLHLRDNAALDG

SEQ ID NO: 1066 - protein, 79 aa, Homo sapiens
VARMGGTTADRGQGEQGSALLGEGHPAPEARWASLVGGLLGAARDRAGWVSAGGALSPTPRGRRKRSPSLAAGWAPPQL

SEQ ID NO: 1067 - protein, 82 aa, Homo sapiens
  SITE (35): Xaa equals any of the naturally occurring L-amino acids
SSAWADDWQGVQPQEPFIMGSLGRPGRSALKAPGXAGPAFLWLRLGRHPKPGWPELCLCSPAPRQAGNNAPEQPPPICRGGS

SEQ ID NO: 1068 - protein, 33 aa, Homo sapiens
  SITE (29): Xaa equals any of the naturally occurring L-amino acids
  SITE (30): Xaa equals any of the naturally occurring L-amino acids
CLLNSYGWLNLSMIKKSLKSITHGSPLPXXQVF

SEQ ID NO: 1069 - protein, 65 aa, Homo sapiens
IQVVFLRYPPSSVPCYLPRGLRRGYSGNCIETGSKVDLRERMKNSVSLVPTGPSQRGITSRDIDQ

SEQ ID NO: 1070 - protein, 83 aa, Homo sapiens
  SITE (82): Xaa equals any of the naturally occurring L-amino acids
VFMPVKLEKTLYFTTIATLVSLPSKVVFKIVISWRKSISDFSVVLINYVTWLSSIIFLPFSQFISRVLKMPYFPSKKLLQPXF

SEQ ID NO: 1071 - protein, 62 aa, Homo sapiens
TVKSFPNTGSAKFRTPSELSPERMVGFIGAKVDKYHVRHQRRVDTRSIGRVFIVYSITLKNS

SEQ ID NO: 1072 - protein, 52 aa, Homo sapiens
TCHLSSNLNYPEFSQASRREQKGSYTVCMLILKPSAHRQPPWAFIQSLFLLL

SEQ ID NO: 1073 - protein, 75 aa, Homo sapiens
QKGARTRMNKQITNIVAEIKMFNRRIKVQKENFPNTKRDRRHREPIQTIRNLERRKWRRKCYHVEEDFLGMNKIH

SEQ ID NO: 1074 - protein, 50 aa, Homo sapiens
  SITE (46): Xaa equals any of the naturally occurring L-amino acids
TTAHPSGRGGRDHNSAGSPPTPALGSQSALPPPSFFHTSWSCFWSXSWSR

SEQ ID NO: 1075 - protein, 58 aa, Homo sapiens
GNPFYSYRVLHKCVLMFIKCFFRVFGDDHVGIFPPLFHKTELPFIEFFERLNHFAYFE

SEQ ID NO: 1076 - protein, 95 aa, Homo sapiens
  SITE (10): Xaa equals any of the naturally occurring L-amino acids
  SITE (91): Xaa equals any of the naturally occurring L-amino acids
MYTKIFPEDXYPENPGNMLFIILFLKIACHFGKMSLTVKLFLFVSPIKHNLSVQKNLKPLLFLIFYDFAWGTIAPHILSPHVFPPVITTVXLHYP

SEQ ID NO: 1077 - protein, 48 aa, Homo sapiens
  SITE (33): Xaa equals any of the naturally occurring L-amino acids
  SITE (42): Xaa equals any of the naturally occurring L-amino acids
  SITE (44): Xaa equals any of the naturally occurring L-amino acids
NGQWTSEFWCRVFFFHNTIKVIFPFEELKCNLXLWFRNWVFXLXFFSL

SEQ ID NO: 1078 - protein, 113 aa, Homo sapiens
  SITE (2): Xaa equals any of the naturally occurring L-amino acids
IXTVSWKKGGCPSHRQPWRCSCKEDLANALWARCKVETPMTMRTRRRVKLTWKMMMTRMTIWKTRAFLSHQPSPIEGSGNLNPWMRVTMTSKFPFTYKSEGFNLPRSVRRGRE

SEQ ID NO: 1079 - protein, 45 aa, Homo sapiens
  SITE (36): Xaa equals any of the naturally occurring L-amino acids
SISISPFSFPSSPKILILTNTPSIRALLCFCRWREXQLLFYRLWS

SEQ ID NO: 1080 - protein, 42 aa, Homo sapiens
VLIKSYSCPQGLQGRKQMIRISDHSLIVSLQSLGGCRAQRIA

SEQ ID NO: 1081 - protein, 112 aa, Homo sapiens
  SITE (43): Xaa equals any of the naturally occurring L-amino acids
  SITE (48): Xaa equals any of the naturally occurring L-amino acids
  SITE (88): Xaa equals any of the naturally occurring L-amino acids
  SITE (89): Xaa equals any of the naturally occurring L-amino acids
  SITE (92): Xaa equals any of the naturally occurring L-amino acids
  SITE (96): Xaa equals any of the naturally occurring L-amino acids
  SITE (108): Xaa equals any of the naturally occurring L-amino acids
GCGSGQDYAHQNREAATQSDAARCGVFLIFQNQVDASNQAIFXKLNQXIEHAGLTGEVAIQCRFGNADRGGQFCRRDTLVSIVGFQHXXQRXKYFXATVPFRICFSAXYKYP

SEQ ID NO: 1082 - protein, 126 aa, Homo sapiens
  SITE (93): Xaa equals any of the naturally occurring L-amino acids
  SITE (109): Xaa equals any of the naturally occurring L-amino acids
  SITE (118): Xaa equals any of the naturally occurring L-amino acids
  SITE (119): Xaa equals any of the naturally occurring L-amino acids
DGPDCKPARFHGPCHGINRLSPHGEGLFHDEQRLTSHLLRDFHTHQRQHGRRDVRKFAAFNRFHVLITNVNQRNWQVGVCRVCLTRCRIAHLXSVTVVSGDQQLSTHGXNRFGIFSTXXSQRFNRF

SEQ ID NO: 1083 - protein, 48 aa, Homo sapiens
HLGWHRLAPLGNNSLSDCVPKLVTRFLEKRGWVPISLCRFYGQRLASY

SEQ ID NO: 1084 - protein, 91 aa, Homo sapiens
  SITE (1): Xaa equals any of the naturally occurring L-amino acids
XRISKSNPPPFSQGCLMRCLYCHNRDTWDTHGGKEVTVEDLMKEVVTYRHFMNASGGGVTASGGEAILQAEFVRDWFRACKKEGINTGVKN

SEQ ID NO: 1085 - protein, 66 aa, Homo sapiens
  SITE (29): Xaa equals any of the naturally occurring L-amino acids
  SITE (43): Xaa equals any of the naturally occurring L-amino acids
  SITE (60): Xaa equals any of the naturally occurring L-amino acids
LYKLDYLRYLKRVGIIQRLYFCNWRISLXVSSEFNNVVAGVRXSFLFKAESLSSECLGHXCVFRSS

SEQ ID NO: 1086 - protein, 75 aa, Homo sapiens
PLIKPWHLLADDVVFFDHQLHTTEKTRCHVVVMNAAGDTAFQLAHQSQQTSVIKRLAAVFIHRHQRRDHRTGTGA

SEQ ID NO: 1087 - protein, 39 aa, Homo sapiens
  SITE (18): Xaa equals any of the naturally occurring L-amino acids
  SITE (37): Xaa equals any of the naturally occurring L-amino acids
FSFPLIIHGFLKIVSKFXSLLSFTGMVMPLAKIGQVXPR

SEQ ID NO: 1088 - protein, 122 aa, Homo sapiens
  SITE (77): Xaa equals any of the naturally occurring L-amino acids
  SITE (106): Xaa equals any of the naturally occurring L-amino acids
LTGGTVISEEIGMELEKATLEDLGQAKRVVINKDTTTIIDGVGEEAAIQGRVAQIRQQIEEATSDYDREKLQERVEXWQAALQLSKWVLLPNLKLKEEKSTRLKMXLQRDPLFAVKKEGLFV

SEQ ID NO: 1089 - protein, 66 aa, Homo sapiens
ALEVEAAVSCDHAGVLQPGQHSDSLSQNKKERKEKKERKKKKQQPFFKLKRERQGKKKKKTRGGPR

SEQ ID NO: 1090 - protein, 36 aa, Homo sapiens
  SITE (18): Xaa equals any of the naturally occurring L-amino acids
EKKRIGRIKTFLQVSKIXKFLARFLKKKKKNSGGAP

SEQ ID NO: 1091 - protein, 55 aa, Homo sapiens
  SITE (45): Xaa equals any of the naturally occurring L-amino acids
VHATTSPEGLLPPPLLSILFFLFFILNTLSINLPKDPDVLLLLQXHSGAPYCLQN

SEQ ID NO: 1092 - protein, 45 aa, Homo sapiens
  SITE (19): Xaa equals any of the naturally occurring L-amino acids
  SITE (20): Xaa equals any of the naturally occurring L-amino acids
ALIGFQLWNSLNFRSIFTXXLYLVPLEQSSSLDIFPFPCLHLWTV

SEQ ID NO: 1093 - protein, 64 aa, Homo sapiens
ESILKKTPGSVKNVATLLINAHPLLHRKAFILQKDCTNTRNVEKPLLSAQILLNIRELVRNKSL

SEQ ID NO: 1094 - protein, 51 aa, Homo sapiens
  SITE (12): Xaa equals any of the naturally occurring L-amino acids
FSSFNTTYPTPXLIFQVSLNIFVVIHLFVYLFCRENKCHCFCLLHLDFCSP

SEQ ID NO: 1095 - protein, 52 aa, Homo sapiens
  SITE (8): Xaa equals any of the naturally occurring L-amino acids
CWINVHHXQYGNGILTRKNVLILKGCRLKSSAFSLYRLMDKASVMLVLLGGI

SEQ ID NO: 1096 - protein, 93 aa, Homo sapiens
  SITE (42): Xaa equals any of the naturally occurring L-amino acids
  SITE (44): Xaa equals any of the naturally occurring L-amino acids
  SITE (85): Xaa equals any of the naturally occurring L-amino acids
  SITE (86): Xaa equals any of the naturally occurring L-amino acids
VMQVVWVSENTLGWADSEAAICLFPLLQKHMQLLQGHFQSTXTXGSSNKLQIPVEKHSRAFQPWGRHWLVEGTEGPWQFPEIPLXXCGRARPG

SEQ ID NO: 1097 - protein, 43 aa, Homo sapiens
FNVVDSNVLLKITLHSYAGGFSILMYACVMTAEFLTAFLIQTS

SEQ ID NO: 1098 - protein, 65 aa, Homo sapiens
EYQFIINLASGKEGVIETHRANYEVNSLYFKCKYETPWWSKKNIHISTCEYVYIYLHKPCLLRNQ

SEQ ID NO: 1099 - protein, 68 aa, Homo sapiens
  SITE (29): Xaa equals any of the naturally occurring L-amino acids
ECGDGHWRGQWELAFLTSWECHLTSCEDXRAVACHLVVEIQHSERKCWEPQSSLLFTGCVCFTAVLFG

SEQ ID NO: 1100 - protein, 56 aa, Homo sapiens
  SITE (26): Xaa equals any of the naturally occurring L-amino acids
GWPLGVKSDLWLTASKITGTSLIKLXVSEFSQQPESLEKDHKDEKASLDDSLILSW

SEQ ID NO: 1101 - protein, 41 aa, Homo sapiens
  SITE (11): Xaa equals any of the naturally occurring L-amino acids
  SITE (24): Xaa equals any of the naturally occurring L-amino acids
SFSCCVPIFHXKCACLWKPWAMHXNLLQKLNVCEINLSSRL

SEQ ID NO: 1102 - protein, 120 aa, Homo sapiens
  SITE (37): Xaa equals any of the naturally occurring L-amino acids
  SITE (74): Xaa equals any of the naturally occurring L-amino acids
QSLDLSQRSLPKCVKFLPVCVSPGKLTLLHWDAHARXGTGCTEVIERAGGTSRAGKTCPGFTNCWLTRGVSQRXLGTEIDCETLGPPGTFRDTQRGIHSSPDLTTPNWTSLWPFLVVFGV

SEQ ID NO: 1103 - protein, 77 aa, Homo sapiens
  SITE (60): Xaa equals any of the naturally occurring L-amino acids
  SITE (69): Xaa equals any of the naturally occurring L-amino acids
GRAEVHNLDAKVDSGKTVKLNSPLEKINSFSPQKPFRFLNILSEEMNRTHKTLLPYRSRXDVLGRKRLXDSLDCEAD

SEQ ID NO: 1104 - protein, 41 aa, Homo sapiens
  SITE (35): Xaa equals any of the naturally occurring L-amino acids
KDFLQIRDPFNTLLYAFNPLLRPTLKLYFCMCTLXMFCPVW

SEQ ID NO: 1105 - protein, 57 aa, Homo sapiens
  SITE (20): Xaa equals any of the naturally occurring L-amino acids
  SITE (23): Xaa equals any of the naturally occurring L-amino acids
SAIRDFHKSNISQMTSMKNXVNXFCLAWEIGLGSLCGLFFKSGILYHECQMNISFSF

SEQ ID NO: 1106 - protein, 66 aa, Homo sapiens
  SITE (34): Xaa equals any of the naturally occurring L-amino acids
  SITE (35): Xaa equals any of the naturally occurring L-amino acids
  SITE (38): Xaa equals any of the naturally occurring L-amino acids
  SITE (62): Xaa equals any of the naturally occurring L-amino acids
VSMKAVRCGIPQGSVFCLSLVHIFNSELTRAPGXXHLXKSVKYCTAAGATNMMGIEMDFRRXWLER

SEQ ID NO: 1107 - protein, 84 aa, Homo sapiens
  SITE (13): Xaa equals any of the naturally occurring L-amino acids
  SITE (55): Xaa equals any of the naturally occurring L-amino acids
  SITE (69): Xaa equals any of the naturally occurring L-amino acids
  SITE (72): Xaa equals any of the naturally occurring L-amino acids
LQYQCGINTAAHXFENRIFKFIPVINVGLLKNQIMIQETTLGKVISLCNTFKNPXYYIAFYCHCGKQVXRFXYSILKCIFPVYM

SEQ ID NO: 1108 - protein, 120 aa, Homo sapiens
  SITE (100): Xaa equals any of the naturally occurring L-amino acids
  SITE (110): Xaa equals any of the naturally occurring L-amino acids
  SITE (111): Xaa equals any of the naturally occurring L-amino acids
  SITE (117): Xaa equals any of the naturally occurring L-amino acids
AERSRPHPRTLAAHRPAPESKREGRTNFKQPACPTLLPPRSGLVHSAERGPFPDGQPTSSPLPLAAVSPPQAALSGALFPGQDSGRRTTTPTSFPTSPAXSSAGGRGERXXGGLPSXGSQ

SEQ ID NO: 1109 - protein, 40 aa, Homo sapiens
  SITE (17): Xaa equals any of the naturally occurring L-amino acids
  SITE (30): Xaa equals any of the naturally occurring L-amino acids
ILTNVTLVNHQPLLTYXHRHDFCLIVTSMXTIALVLLILL

SEQ ID NO: 1110 - protein, 82 aa, Homo sapiens
  SITE (33): Xaa equals any of the naturally occurring L-amino acids
  SITE (55): Xaa equals any of the naturally occurring L-amino acids
CLPHRAFVVVKRDNIHTMTNIVYSRCLMSKIFXRVKTNLSLRSFLNFLILVAKLXFFKKGNRLLLCFPGCSAQVPIGSTSQP

SEQ ID NO: 1111 - protein, 28 aa, Homo sapiens
  SITE (3): Xaa equals any of the naturally occurring L-amino acids
  SITE (16): Xaa equals any of the naturally occurring L-amino acids
  SITE (18): Xaa equals any of the naturally occurring L-amino acids
LFXEYVLPKVPLVHIXFXHSENLILYPS

SEQ ID NO: 1112 - protein, 65 aa, Homo sapiens
  SITE (20): Xaa equals any of the naturally occurring L-amino acids
  SITE (44): Xaa equals any of the naturally occurring L-amino acids
  SITE (55): Xaa equals any of the naturally occurring L-amino acids
  SITE (61): Xaa equals any of the naturally occurring L-amino acids
SNGKYTCILSPPILVLVTIXNFSPRLLSIKLSIYVSLSSLAVLXFGSCRLRLPFXWLTPLXLPTR

SEQ ID NO: 1113 - protein, 41 aa, Homo sapiens
KVKESDKLVATSKITLQDKQNMVKRVSIMSYALQGKMKGSL

SEQ ID NO: 1114 - protein, 39 aa, Homo sapiens
NRYHYYCPHFTDRENRDRKNIAQLTQLAVADVGFELCEI

SEQ ID NO: 1115 - protein, 47 aa, Homo sapiens
  SITE (31): Xaa equals any of the naturally occurring L-amino acids
  SITE (44): Xaa equals any of the naturally occurring L-amino acids
CKQENTLMLEKTGEKQIVFSVNVLFSWEFFXQNPAFCLSFKIYXLSA

SEQ ID NO: 1116 - protein, 30 aa, Homo sapiens
  SITE (23): Xaa equals any of the naturally occurring L-amino acids
  SITE (30): Xaa equals any of the naturally occurring L-amino acids
VSLGTGLSHNLHCGAQAAQASHXPSLYFLX

SEQ ID NO: 1117 - protein, 49 aa, Homo sapiens
  SITE (28): Xaa equals any of the naturally occurring L-amino acids
  SITE (40): Xaa equals any of the naturally occurring L-amino acids
  SITE (42): Xaa equals any of the naturally occurring L-amino acids
EKEGLHQSIVPIQFALNCLPPLPQKFEXFFCNTLTPVMGXCXNLCKKTK

SEQ ID NO: 1118 - protein, 53 aa, Homo sapiens
SKHASMRTVIFSRSSPLQENSISSLLLFMCYWQKHSLHLSRGRVSKTGFSLRT

SEQ ID NO: 1119 - protein, 43 aa, Homo sapiens
  SITE (24): Xaa equals any of the naturally occurring L-amino acids
  SITE (30): Xaa equals any of the naturally occurring L-amino acids
  SITE (36): Xaa equals any of the naturally occurring L-amino acids
KLVSLWFVYSTKIFSILATSYIYXHKASHXWFCCMXFLCEILS

SEQ ID NO: 1120 - protein, 25 aa, Homo sapiens
  SITE (13): Xaa equals any of the naturally occurring L-amino acids
SIFIKHDYLKSLXTLCSDSFLFYDT

SEQ ID NO: 1121 - protein, 24 aa, Homo sapiens
  SITE (3): Xaa equals any of the naturally occurring L-amino acids
  SITE (10): Xaa equals any of the naturally occurring L-amino acids
FFXNIITSCXWESGESMINKGFDE

SEQ ID NO: 1122 - protein, 56 aa, Homo sapiens
  SITE (38): Xaa equals any of the naturally occurring L-amino acids
  SITE (47): Xaa equals any of the naturally occurring L-amino acids
IIIIIILRRNFTLSPRLECSGTILAHCNLCLLGSSEFXCLSLLSSWXLQACTTVPS

SEQ ID NO: 1123 - protein, 45 aa, Homo sapiens
VCLLNIQHIAIQYKFLPQLSSSELPVLFLVETMLPSLQAQTLCKK

SEQ ID NO: 1124 - protein, 27 aa, Homo sapiens
  SITE (26): Xaa equals any of the naturally occurring L-amino acids
GRFVECPLPFNFVNLCFPMCGLGANXY

SEQ ID NO: 1125 - protein, 57 aa, Homo sapiens
  SITE (43): Xaa equals any of the naturally occurring L-amino acids
QSQIYSNLPSKVVPLVKLFWSIFFLKKTLKMFHFFHEAKSTLXSNQGERNEIIGEFT

SEQ ID NO: 1126 - protein, 46 aa, Homo sapiens
LVHFSLSYVMLQFKSFKMYMYMCVHILLVCVFLNQPLQEKNTNSRK

SEQ ID NO: 1127 - protein, 40 aa, Homo sapiens
  SITE (23): Xaa equals any of the naturally occurring L-amino acids
  SITE (38): Xaa equals any of the naturally occurring L-amino acids
ADNTGNIFIRLRPKGLDQKQYCXPEWDSGKLVPPFKVXFF

SEQ ID NO: 1128 - protein, 79 aa, Homo sapiens
  SITE (12): Xaa equals any of the naturally occurring L-amino acids
  SITE (53): Xaa equals any of the naturally occurring L-amino acids
  SITE (57): Xaa equals any of the naturally occurring L-amino acids
  SITE (60): Xaa equals any of the naturally occurring L-amino acids
  SITE (74): Xaa equals any of the naturally occurring L-amino acids
NREWGSPLLRAXRPYNGIIWPTRLITFSGITPCAFGSHILSDCSVMSCGSCIXSKQXLKXCCILKLRFLSLKWXFFHPL

SEQ ID NO: 1129 - protein, 152 aa, Homo sapiens
  SITE (17): Xaa equals any of the naturally occurring L-amino acids
  SITE (18): Xaa equals any of the naturally occurring L-amino acids
  SITE (111): Xaa equals any of the naturally occurring L-amino acids
  SITE (115): Xaa equals any of the naturally occurring L-amino acids
  SITE (117): Xaa equals any of the naturally occurring L-amino acids
  SITE (143): Xaa equals any of the naturally occurring L-amino acids
  SITE (148): Xaa equals any of the naturally occurring L-amino acids
HEVLGAFIAGVAVYCYXXMFVRKNRKIHKDAESAQSCTDSSGSFAKLNGLFDSPVKEYQQNIDSPKLYSNLLTSRKELPPNGDTKSMVMDHRGQPPELAASSHSWSLTPVXHQKXLXGHGRATQEKGPWPWELSRKETPQFFXRLVRXLIPH

SEQ ID NO: 1130 - protein, 48 aa, Homo sapiens
YHWNLQTGKQNKRTEQIFKDNVQENSAQVKIDGSVHCERANFMLGKVD

SEQ ID NO: 1131 - protein, 33 aa, Homo sapiens
  SITE (24): Xaa equals any of the naturally occurring L-amino acids
KLDTLFETIDMEVFMPGNGHTSVXARPLVWVLG

SEQ ID NO: 1132 - protein, 33 aa, Homo sapiens
TNRQIANIVFNGDMLEIKNTMRWLLLPFHLMVL

SEQ ID NO: 1133 - protein, 55 aa, Homo sapiens
  SITE (11): Xaa equals any of the naturally occurring L-amino acids
  SITE (19): Xaa equals any of the naturally occurring L-amino acids
YSLSLNPLCWXILVWGTAXQHSTSATAPSNFHLLCCLVHTTALQGRYYCPSLLYR

SEQ ID NO: 1134 - protein, 62 aa, Homo sapiens
  SITE (42): Xaa equals any of the naturally occurring L-amino acids
AKYFVVKILICTKYHNLSFLSMIIFFKMTFKMNVLNYNNTCXQLKIKNHAGGCKKQKPHHIL

SEQ ID NO: 1135 - protein, 70 aa, Homo sapiens
  SITE (9): Xaa equals any of the naturally occurring L-amino acids
  SITE (33): Xaa equals any of the naturally occurring L-amino acids
  SITE (64): Xaa equals any of the naturally occurring L-amino acids
AESTSRLGXKRGSGAQEAGGSLRVQTGVHVSKXLRVWARGYLPGFSLEGGFTGFTNLSLSLPPXARPLAC

SEQ ID NO: 1136 - protein, 62 aa, Homo sapiens
  SITE (55): Xaa equals any of the naturally occurring L-amino acids
  SITE (60): Xaa equals any of the naturally occurring L-amino acids
NHVENLKAVTTILPNPTLNLLNQISGNEAQKFVFFGKHSQMILDSTQVLRNHWFXVLLKXLT

SEQ ID NO: 1137 - protein, 16 aa, Homo sapiens
EILKWHPLIQTFIKLK

SEQ ID NO: 1138 - protein, 49 aa, Homo sapiens
  SITE (48): Xaa equals any of the naturally occurring L-amino acids
NLIKLNPTLLFLLSLQDNYCFIVCGYHSLTCVYTFTKCVCIQKTVVLXF

SEQ ID NO: 1139 - protein, 41 aa, Homo sapiens
PTRPQRHSLNLGPPGLYNSKKLIYFLYKLPSFRYSVMSDRK

SEQ ID NO: 1140 - protein, 48 aa, Homo sapiens
MFKIEVYFFRFLEINSKINGTNSFNKFTNLSVFSSISKLITNLQNYWN

SEQ ID NO: 1141 - protein, 56 aa, Homo sapiens
  SITE (2): Xaa equals any of the naturally occurring L-amino acids
QXILTFFWPVICEVHNPKYCVCLIKSLNAHLRGYYADILTEILCGQNKCSSFFNCE

SEQ ID NO: 1142 - protein, 67 aa, Homo sapiens
SHFNFQVLLFKTFHKATAAIDSDSSDGARKSLLKTCWKGFTILDALKTFMIRGRRSKQQHEQEFGRC

SEQ ID NO: 1143 - protein, 68 aa, Homo sapiens
  SITE (55): Xaa equals any of the naturally occurring L-amino acids
  SITE (57): Xaa equals any of the naturally occurring L-amino acids
  SITE (60): Xaa equals any of the naturally occurring L-amino acids
  SITE (61): Xaa equals any of the naturally occurring L-amino acids
  SITE (62): Xaa equals any of the naturally occurring L-amino acids
  SITE (63): Xaa equals any of the naturally occurring L-amino acids
  SITE (64): Xaa equals any of the naturally occurring L-amino acids
  SITE (67): Xaa equals any of the naturally occurring L-amino acids
GNNVLKLIAKQIVTLQFLYTHSSNHSERVFFFELMLLDLIVFQRILTGSSIGKSXLXQLXXXXXPNXE

SEQ ID NO: 1144 - protein, 91 aa, Homo sapiens
  SITE (25): Xaa equals any of the naturally occurring L-amino acids
  SITE (27): Xaa equals any of the naturally occurring L-amino acids
  SITE (31): Xaa equals any of the naturally occurring L-amino acids
  SITE (35): Xaa equals any of the naturally occurring L-amino acids
  SITE (36): Xaa equals any of the naturally occurring L-amino acids
  SITE (43): Xaa equals any of the naturally occurring L-amino acids
  SITE (54): Xaa equals any of the naturally occurring L-amino acids
  SITE (57): Xaa equals any of the naturally occurring L-amino acids
GHCASQLVGGGAGLDLVHFTFWPNXEXEASXRVGXXWLLALTXHCHFCLARPRXGGXQASRVSWSNGCASPQHDSAKHPDHKCRNLAEEQL

SEQ ID NO: 1145 - protein, 37 aa, Homo sapiens
HFSSIHISRISDPLLTKNLLIRVKNHTSRSSLKSRVS

SEQ ID NO: 1146 - protein, 73 aa, Homo sapiens
SKTLMDHHCIITAYAVTRRSQSLCYLSQKQIYRGVIFSSAEKVSMFLCACTMLTYKVNIVIMHFPVVKFAKYV

SEQ ID NO: 1147 - protein, 70 aa, Homo sapiens
RQDGPSSVSSASHLLVEQVQCGSIHDCCSCCQELSQHRKEWDTIPAVKILREEAGRSTGASSLQGSSQGL

SEQ ID NO: 1148 - protein, 81 aa, Homo sapiens
  SITE (6): Xaa equals any of the naturally occurring L-amino acids
QIKRQXGIIPMIGLICLGMGSAALYLLRLALRSPDVCWDRKNNPEPWNRLSPNDQYKVPLDGSRVAPHPLISWSWHPQLPY

SEQ ID NO: 1149 - protein, 56 aa, Homo sapiens
  SITE (32): Xaa equals any of the naturally occurring L-amino acids
FLKLLGSNYESLYWITILGVRGVIIIYGSDCXFCVWNKLIKRYKSHRDRDLEMLAL

SEQ ID NO: 1150 - protein, 34 aa, Homo sapiens
  SITE (17): Xaa equals any of the naturally occurring L-amino acids
  SITE (18): Xaa equals any of the naturally occurring L-amino acids
LTAKGLKGVFRGHGMFXXLDGSDASIGICICQNL

SEQ ID NO: 1151 - protein, 189 aa, Homo sapiens
  SITE (14): Xaa equals any of the naturally occurring L-amino acids
  SITE (15): Xaa equals any of the naturally occurring L-amino acids
  SITE (183): Xaa equals any of the naturally occurring L-amino acids
  SITE (189): Xaa equals any of the naturally occurring L-amino acids
RNSRVDPRVRMEKXXKEGIVCKEDKKQSLDNFLSRFRWRRRLLVISAPNDEDWAYSQQLSALSGQACNFGLRHITILKLLGVGEEVGGVLELFPINGSSVVEREDVPAHLVKDIRNYFQVSPEYFSMLLVGKDGNVKSWYPSPMWSMVIVYDLIDSMQAMVTIVTTKDTRMVTRMTTVIMRVXHHGIPX

SEQ ID NO: 1152 - protein, 38 aa, Homo sapiens
KKDICNTIVSAIYMLRIPPNTTNYIGSNSCDFHLLKGK

SEQ ID NO: 1153 - protein, 47 aa, Homo sapiens
PDRPEFPGRPRVRVYVRYSVSRDLRVRWGNVAPYFASVKQIPCFSLQ

SEQ ID NO: 1154 - protein, 74 aa, Homo sapiens
  SITE (30): Xaa equals any of the naturally occurring L-amino acids
  SITE (48): Xaa equals any of the naturally occurring L-amino acids
NAIKEEKYECCTEELLVLIFFKPRSFEDHXDFLISHVYRNFACPGLIXLDLYAGFYFRTLQYVLERLIPLCLAI

SEQ ID NO: 1155 - protein, 68 aa, Homo sapiens
  SITE (40): Xaa equals any of the naturally occurring L-amino acids
NKWARPNGPYSNGLLVNFLDCASLNENFLGMLHIPCVCIXVYTYVHIYKSHRNITLISYDWLGMWPSL

SEQ ID NO: 1156 - protein, 50 aa, Homo sapiens
  SITE (5): Xaa equals any of the naturally occurring L-amino acids
  SITE (34): Xaa equals any of the naturally occurring L-amino acids
YFIVXLKKKKRRPSRGSSLRRGCTHSFYGALNSXMGRGYTADWKTWGTQL

SEQ ID NO: 1157 - protein, 51 aa, Homo sapiens
  SITE (2): Xaa equals any of the naturally occurring L-amino acids
SXKRLSFYKKKKFLYSSSLRNTFLCSFLFDRTDNRGDTMTSQPNSHPVKGR

SEQ ID NO: 1158 - protein, 175 aa, Homo sapiens
  SITE (96): Xaa equals any of the naturally occurring L-amino acids
  SITE (98): Xaa equals any of the naturally occurring L-amino acids
  SITE (129): Xaa equals any of the naturally occurring L-amino acids
  SITE (141): Xaa equals any of the naturally occurring L-amino acids
  SITE (145): Xaa equals any of the naturally occurring L-amino acids
EGTGPEFPGRPTRPVHVIKMSLLSKKFCLRLLQIAWLGWDLERGLLAAFWAQRLRAGHRAGGTGCWGAWHFSGSWRGSLASVGPVPPNVSVSQPFXFXSASCLASPGHPVPPSPLICSDGRSLTPCPHXQHRVLTSWLFRXSPSXLCPPLGFLLSIFLSFFSKPPIPRPPFPRVF

SEQ ID NO: 1159 - protein, 37 aa, Homo sapiens
IRLTIGKAGTPAGTGPEFPGRPTRPVKGDLENAFLNL

SEQ ID NO: 1160 - protein, 64 aa, Homo sapiens
  SITE (6): Xaa equals any of the naturally occurring L-amino acids
  SITE (20): Xaa equals any of the naturally occurring L-amino acids
  SITE (28): Xaa equals any of the naturally occurring L-amino acids
  SITE (34): Xaa equals any of the naturally occurring L-amino acids
  SITE (35): Xaa equals any of the naturally occurring L-amino acids
  SITE (39): Xaa equals any of the naturally occurring L-amino acids
  SITE (47): Xaa equals any of the naturally occurring L-amino acids
  SITE (55): Xaa equals any of the naturally occurring L-amino acids
  SITE (56): Xaa equals any of the naturally occurring L-amino acids
RNMNLXTSLKRTGRAGRRCXTPVITALXEAEAGXXASGXKTIWLTWXIHLSKIPXXTWRGGRTW

SEQ ID NO: 1161 - protein, 44 aa, Homo sapiens
THASVSVEYRKYCEKGMFRELEDSSGGQLTEPGRERAILSKNIF

SEQ ID NO: 1162 - protein, 51 aa, Homo sapiens
IEKALLSKQDFCSKPNGKAISGVRFVTVLLGHFMFYREKDLCTPPQPVSRN

SEQ ID NO: 1163 - protein, 425 aa, Homo sapiens
  SITE (140): Xaa equals any of the naturally occurring L-amino acids
  SITE (196): Xaa equals any of the naturally occurring L-amino acids
  SITE (351): Xaa equals any of the naturally occurring L-amino acids
  SITE (368): Xaa equals any of the naturally occurring L-amino acids
PPKRAGLSWPVGLPAPFTPHSRFEVLGWDYFTEQHTFSCADGAPKCPLQGASRADVGDALETALEQLNRRYQPRLRFQKQRLLNGYRRFDPARGMEYTLDLLLECVTQRGHRRALARRVSLLRPLSRVEILPMPYVTEAXRVQLVLPLLVAEAAAAPAFLEAFAANVLEPREHALLTLLLVYGPREGGRGAPDPFXGVKAAAAELERRYPGTRLAWLAVRAEAPSQVRLMDVVSKKHPVDTLFFLTTVWTRPGPEVLNRCRMNAISGWQAFFPVHFQEFNPALSPQRSPPGPPGAGPDPPSPPGADPSRGAPIGGRFDRQASAEGCFYNADYLAARARLAGELAGQEEEEXLEGLEVMDVFLRFSGLXLFRAVEPGLVQKFSLRDCSPRLSEELYHRCRLSNLEGLGGRAQLAMALFEQEQANST

SEQ ID NO: 1164 - protein, 203 aa, Homo sapiens
  SITE (7): Xaa equals any of the naturally occurring L-amino acids
  SITE (60): Xaa equals any of the naturally occurring L-amino acids
  SITE (179): Xaa equals any of the naturally occurring L-amino acids
  SITE (183): Xaa equals any of the naturally occurring L-amino acids
RPRCWRXPAPEVCAALNVTVSPGPVVDYLEGENATLLCHVSQKRRKDSLLAVRWFFAHSXDSQEALMVKMTKLRVVQYYGNFSRSAKRRRLRLLEEQRGALYRLSVLTLQPSDQGHYVCRVQEISRHRNKWTAWSNGSSATEMRVISLKASEESSFEKTKETWAFFEDLYVYAVLVCCXGILXFCSSCWSSSGSLCLTSGNPE

SEQ ID NO: 1165 - protein, 48 aa, Homo sapiens
FNSAQLRSITNDGGLLLISEVFNIVFYFVPWLIYTHFFKVKDQGYSLL

SEQ ID NO: 1166 - protein, 58 aa, Homo sapiens
MNWKSTTSLGPSKKGGHRESCCPQIWRDKWGRYIESQSLYPWSRNPPAETSAGTMPGR

SEQ ID NO: 1167 - protein, 37 aa, Homo sapiens
IKKIRHYISDANYMFCKQFSLIKIHFCYFFVFIVMIM

SEQ ID NO: 1168 - protein, 53 aa, Homo sapiens
  SITE (22): Xaa equals any of the naturally occurring L-amino acids
  SITE (40): Xaa equals any of the naturally occurring L-amino acids
  SITE (44): Xaa equals any of the naturally occurring L-amino acids
  SITE (50): Xaa equals any of the naturally occurring L-amino acids
LLLMLLYILLLMGNSNYIPSRXLISFYTAATTSFFFLKGXSERXATYESXPRN

SEQ ID NO: 1169 - protein, 59 aa, Homo sapiens
  SITE (36): Xaa equals any of the naturally occurring L-amino acids
FNISNIRYLKNHKCYFTLQVSSIKIESSNPPSVGAXGGGCRNSPDMVWALVPTQISSQF

SEQ ID NO: 1170 - protein, 67 aa, Homo sapiens
CLSYLSRFKSVTIFLLFKNSLMKYLSPSTYQDLVLHLIGLLTEVAKEGSNSAKYCFKICVNKWTMFK

SEQ ID NO: 1171 - protein, 60 aa, Homo sapiens
  SITE (30): Xaa equals any of the naturally occurring L-amino acids
VICLPRWVVTWIKLYHVYEALSLACGMQVXLKKWCQCEYSPLNVGMLCEGETGIVSLALT

SEQ ID NO: 1172 - protein, 64 aa, Homo sapiens
  SITE (32): Xaa equals any of the naturally occurring L-amino acids
DLRVVFMCENLNFEAPRTIYRPVAVAHACNPXTLGGQSRRMLEARSLRTSQGNTAQPCPYKKKF

SEQ ID NO: 1173 - protein, 48 aa, Homo sapiens
EKVKKTYGRCYQEGNQAMRINEFKKCLQTLWRTEGFLKGINSEDDKTG

SEQ ID NO: 1174 - protein, 76 aa, Homo sapiens
  SITE (18): Xaa equals any of the naturally occurring L-amino acids
  SITE (30): Xaa equals any of the naturally occurring L-amino acids
  SITE (38): Xaa equals any of the naturally occurring L-amino acids
  SITE (48): Xaa equals any of the naturally occurring L-amino acids
  SITE (53): Xaa equals any of the naturally occurring L-amino acids
  SITE (71): Xaa equals any of the naturally occurring L-amino acids
  SITE (72): Xaa equals any of the naturally occurring L-amino acids
  SITE (76): Xaa equals any of the naturally occurring L-amino acids
TRRRETVDCRTLPWKQAXPSSIKREDCAHXVGRTPRSXKSFGFGCPRXLSLPXFEGDPFLERCFGWALQCXXNPLX

SEQ ID NO: 1175 - protein, 133 aa, Homo sapiens
  SITE (5): Xaa equals any of the naturally occurring L-amino acids
  SITE (31): Xaa equals any of the naturally occurring L-amino acids
  SITE (90): Xaa equals any of the naturally occurring L-amino acids
  SITE (118): Xaa equals any of the naturally occurring L-amino acids
  SITE (132): Xaa equals any of the naturally occurring L-amino acids
EQEQXLWKPAFSRAMTARIHRLTHAPHQLAXCWHHMGCGHRSCPSQDTWHPRVEGLKDHRESGVSSEWARSMEQATYEGGCGISRGMWLXPPFFQHSCSSRTPRQDGRIPGDGRTLFXCWDCVDEGSRKRQXR

SEQ ID NO: 1176 - protein, 42 aa, Homo sapiens
NYCAGPSHVDCYQLSCFCMFTQVFLKIMTVQICIVVYFFLRC

SEQ ID NO: 1177 - protein, 66 aa, Homo sapiens
  SITE (39): Xaa equals any of the naturally occurring L-amino acids
  SITE (53): Xaa equals any of the naturally occurring L-amino acids
  SITE (57): Xaa equals any of the naturally occurring L-amino acids
  SITE (58): Xaa equals any of the naturally occurring L-amino acids
  SITE (63): Xaa equals any of the naturally occurring L-amino acids
TIDNSAGFCIPETVAVRINNILSKTLCMFGDNRCIMDFXLVCSCLEKLNGWNXKKKXXEKKKXGAP

SEQ ID NO: 1178 - protein, 34 aa, Homo sapiens
CLFISVTRNTDNYINLLKTLSSKYNKTWSEIIHI

SEQ ID NO: 1179 - protein, 40 aa, Homo sapiens
GYMLGLVGKSSCTWQLGHMLGLVGKPSRTGELWVYVRASG

SEQ ID NO: 1180 - protein, 41 aa, Homo sapiens
  SITE (15): Xaa equals any of the naturally occurring L-amino acids
CFTFPRLIRVLNLTXSFVKIFVDATLEAVISQSYIWRMWMA

SEQ ID NO: 1181 - protein, 58 aa, Homo sapiens
IFSCIITLSWSRKSPALGYEVIHFETLQSLGRVRCFAIIKWPYRVACGHVSDCKVNIP

SEQ ID NO: 1182 - protein, 29 aa, Homo sapiens
SEFPVDHASEFKKTILNLFIFLNITRGRC

SEQ ID NO: 1183 - protein, 47 aa, Homo sapiens
FCYKSVNQQRLSKSGFICILNYRAKARIYIMLSVLPFFRNEELTRKY

SEQ ID NO: 1184 - protein, 37 aa, Homo sapiens
  SITE (25): Xaa equals any of the naturally occurring L-amino acids
ILEHFLFLTFRLGILTPYQYLESFXLSYLSINHFHII

SEQ ID NO: 1185 - protein, 55 aa, Homo sapiens
  SITE (49): Xaa equals any of the naturally occurring L-amino acids
ISNILPWATTPSLTLTFKANFVLSPTFPLDCKFMQSQQVAPKKSPELRXKKKKGG

SEQ ID NO: 1186 - protein, 80 aa, Homo sapiens
  SITE (54): Xaa equals any of the naturally occurring L-amino acids
  SITE (80): Xaa equals any of the naturally occurring L-amino acids
VLCERLKSPLTHFSIWGHLASDCISTRVLGAMQGSPVGQSGRSILERKRENWRXGLGTKQGSRPGIKCNPKVWMSQFPAX

SEQ ID NO: 1187 - protein, 34 aa, Homo sapiens
  SITE (3): Xaa equals any of the naturally occurring L-amino acids
  SITE (19): Xaa equals any of the naturally occurring L-amino acids
  SITE (34): Xaa equals any of the naturally occurring L-amino acids
SLXLIHLILVLQNFYNLNXYVSSLSLFLSFMYKX

SEQ ID NO: 1188 - protein, 82 aa, Homo sapiens
PLFRPCFSLWGPLPYASCLPSPTHASRLPIRPFLVITAYGDHILRFFPAQDSEDFSLYPMSCYIHIYTLFVLYVFSVFQCGF

SEQ ID NO: 1189 - protein, 62 aa, Homo sapiens
  SITE (36): Xaa equals any of the naturally occurring L-amino acids
  SITE (39): Xaa equals any of the naturally occurring L-amino acids
  SITE (41): Xaa equals any of the naturally occurring L-amino acids
  SITE (54): Xaa equals any of the naturally occurring L-amino acids
HNNREGARDYLNFKSHFHTIMLYLRICVHSVPTAVXMDXGXLLGNFHPGLNLEXVDFCGVLN

SEQ ID NO: 1190 - protein, 57 aa, Homo sapiens
EECHDEKAPNQWNRPSLDTNASALILDFTASVTTKSVQRRGITLWPAVYLQPCAKVC

SEQ ID NO: 1191 - protein, 65 aa, Homo sapiens
  SITE (46): Xaa equals any of the naturally occurring L-amino acids
  SITE (50): Xaa equals any of the naturally occurring L-amino acids
  SITE (64): Xaa equals any of the naturally occurring L-amino acids
NPVNNLVILANLKHLPPSNLIFLFRLLIKENEKYTLILLPKALVCXIHAXHNTQLLLPADLQKXG

SEQ ID NO: 1192 - protein, 120 aa, Homo sapiens
  SITE (92): Xaa equals any of the naturally occurring L-amino acids
  SITE (100): Xaa equals any of the naturally occurring L-amino acids
  SITE (115): Xaa equals any of the naturally occurring L-amino acids
PQRYHLGLCPVLLQHLQMGGEGPFLPVLTPTSVKGTLYKMLRKPKKVRVQAASCDLLRGLLVSPLLLPVRLLLAGWAHAWMHGCGGWEPRIXQQSASCQXLAKGRNQGSTKSFKXKLEDS

SEQ ID NO: 1193 - protein, 31 aa, Homo sapiens
LNNCFGSEYKCWEYTFYYFLIWVSKILPPGK

SEQ ID NO: 1194 - protein, 35 aa, Homo sapiens
  SITE (14): Xaa equals any of the naturally occurring L-amino acids
  SITE (28): Xaa equals any of the naturally occurring L-amino acids
LKNGVSHHVAFYLXNHWIILISHPNPNXGGFPIAD

SEQ ID NO: 1195 - protein, 61 aa, Homo sapiens
TVSVLALKVQCPWKPISPGQTRIVSNLSFWYTGFTASAVEQKFLHCFRALLSREQNLLRIK

SEQ ID NO: 1196 - protein, 37 aa, Homo sapiens
  SITE (15): Xaa equals any of the naturally occurring L-amino acids
ICRSLWRHFNSFESXSHEHGTSLHLFRSSLIFLSNIL

SEQ ID NO: 1197 - protein, 46 aa, Homo sapiens
  SITE (4): Xaa equals any of the naturally occurring L-amino acids
  SITE (9): Xaa equals any of the naturally occurring L-amino acids
  SITE (13): Xaa equals any of the naturally occurring L-amino acids
  SITE (18): Xaa equals any of the naturally occurring L-amino acids
CSSXPHFNXILYXGSTTXYIKPYEDLNQHRAIQLFLLLIKPSIIKS

SEQ ID NO: 1198 - protein, 58 aa, Homo sapiens
VVDVEKQIEAFRSRLIQMLGEPLVPQLQDKVHLLKLLLFYAADLNPDAEPFQKGWSGS

SEQ ID NO: 1199 - protein, 55 aa, Homo sapiens
  SITE (48): Xaa equals any of the naturally occurring L-amino acids
  SITE (50): Xaa equals any of the naturally occurring L-amino acids
  SITE (54): Xaa equals any of the naturally occurring L-amino acids
FYIEYEFTLFLQSLLYTAVVRSGRGTTWCFLLFKLWMNVKTIIWEYLXIXKGNXC

SEQ ID NO: 1200 - protein, 66 aa, Homo sapiens
  SITE (61): Xaa equals any of the naturally occurring L-amino acids
SLQIVKIQNVQVENRINNNLGRLLIADLLTLIWLKGLFWIQLKVIVISRSGKSHLMENKIXLTPEV

SEQ ID NO: 1201 - protein, 61 aa, Homo sapiens
YVWQDPTLGEKKRYMCTVYAPVSVKAHNKVIKLLTAVAFEKGSVSGMKRPKRIQIAQHFIV

SEQ ID NO: 1202 - protein, 41 aa, Homo sapiens
GYRQNQHHILRKPWYFPKSAYVLDTLINANTVQFLRELVLS

SEQ ID NO: 1203 - protein, 92 aa, Homo sapiens
  SITE (75): Xaa equals any of the naturally occurring L-amino acids
WENNDMAGASLGARFYRQIKRHPGIIPMIGLICLGMGSAALYLLRLALRSPDVCWDRKNNPEPWNRLSPNDQYKXLAVSTDYKKLKKDRPDF

SEQ ID NO: 1204 - protein, 48 aa, Homo sapiens
LSCFNSLYILDINPLSDVWFANIFSHSAGCLLTLFIIFVVMQKLCSLM

SEQ ID NO: 1205 - protein, 54 aa, Homo sapiens
FCVCICNPSYSGGSGRRIAGTRETEAAVSTALHPGRQSDTLSQKKLVPYIFILP

SEQ ID NO: 1206 - protein, 54 aa, Homo sapiens
  SITE (13): Xaa equals any of the naturally occurring L-amino acids
  SITE (16): Xaa equals any of the naturally occurring L-amino acids
  SITE (39): Xaa equals any of the naturally occurring L-amino acids
  SITE (53): Xaa equals any of the naturally occurring L-amino acids
GWKNRLEQISKGXNAXPRACSYFPGMSRRQKKVGCFFFXPGPFLRGGFNLGAXP

SEQ ID NO: 1207 - protein, 42 aa, Homo sapiens
REQTNSLMLVSDVLSFFILKYFEQQNVLSYKTKTKTKNSAVS

SEQ ID NO: 1208 - protein, 77 aa, Homo sapiens
  SITE (35): Xaa equals any of the naturally occurring L-amino acids
  SITE (36): Xaa equals any of the naturally occurring L-amino acids
  SITE (37): Xaa equals any of the naturally occurring L-amino acids
MVIRRNGWSQWLMPLIPPRTLGGKGVWIAGDIYIXXXHDLGSLQPLPPRFKQFSCLGLPSSWDCKRVPPYLANFCIL

SEQ ID NO: 1209 - protein, 64 aa, Homo sapiens
CPRNYHLNSQIRVIVTSKTLQIFSFAFDSGSLNLGSSISPGSLLKFQKTTTKKPLLKYKMDHFL

SEQ ID NO: 1210 - protein, 107 aa, Homo sapiens
ATFSRHSHLPLTTQYLESIEVLKSLRYLVPLQSKNKLRKRLAPLVYVQSDCDPPSDRDSYVRELMTYIEVDSYGECLRNKDLPQQLKNPASMDADGFYRIMHSISLS

SEQ ID NO: 1211 - protein, 51 aa, Homo sapiens
KSSLLIQCWQFNNSKLNPITKLAITILCHVLQKHCQFIIMWLSVPSFGVNK

SEQ ID NO: 1212 - protein, 56 aa, Homo sapiens
  SITE (53): Xaa equals any of the naturally occurring L-amino acids
HKNIFYSYISHQFQLFFTCLFVQVREVLRSFSFICSLPLKDYICIVCFKPRVXPWI

SEQ ID NO: 1213 - protein, 47 aa, Homo sapiens
  SITE (40): Xaa equals any of the naturally occurring L-amino acids
  SITE (41): Xaa equals any of the naturally occurring L-amino acids
  SITE (46): Xaa equals any of the naturally occurring L-amino acids
KNYLESQKTLEALATEDRSSPDGCRLLQPLPARTLAIFTXXGPLPXC

SEQ ID NO: 1214 - protein, 57 aa, Homo sapiens
  SITE (12): Xaa equals any of the naturally occurring L-amino acids
  SITE (13): Xaa equals any of the naturally occurring L-amino acids
NTPRVCCHFTNXXRQIFCFEKIFLHARVSVSGLRFCLFLQCFQSSHKINCGFFFSQS

SEQ ID NO: 1215 - protein, 59 aa, Homo sapiens
  SITE (48): Xaa equals any of the naturally occurring L-amino acids
GGLSCLTLLTAYFPFPGAERVKVCGEGEDWFPGFSGARRSNRTRSAPXLTRMASLPLCW

SEQ ID NO: 1216 - protein, 60 aa, Homo sapiens
  SITE (58): Xaa equals any of the naturally occurring L-amino acids
LYRLAIELSSAGWLFWFWLDTPSICSQLGCSKASIHMSSNWLVVALGDRISGAIVSHXPA

SEQ ID NO: 1217 - protein, 41 aa, Homo sapiens
ERNTVLTRQKGKLGNCYVRSHLYKPLNAIHQGKSPYDLITS

SEQ ID NO: 1218 - protein, 119 aa, Homo sapiens
PRVRRKQMNGCERLGWGGGWGVISFFLFFFFETVLLCCPGWSAVARSWLTASSTSQVHAILLPRPPASASQVAGTTGAHHAQLGSDFLMGIGFFYGVMKVLWNQMEVVIAQHCECTKGC

SEQ ID NO: 1219 - protein, 33 aa, Homo sapiens
  SITE (30): Xaa equals any of the naturally occurring L-amino acids
FFKINYLYLYVLKKKKKKKKKKKKKKKRGXPPR

SEQ ID NO: 1220 - protein, 54 aa, Homo sapiens
  SITE (33): Xaa equals any of the naturally occurring L-amino acids
  SITE (35): Xaa equals any of the naturally occurring L-amino acids
  SITE (36): Xaa equals any of the naturally occurring L-amino acids
LVSRHLSRLNFKIPLIDMHLVDDSSSLFIFLMXEXXMVMHRLQKMRPPAFHKTQ

SEQ ID NO: 1221 - protein, 53 aa, Homo sapiens
WISTPHHGAQSTWTCLAISTEVGIFITVTLIKGHKDWLTEAYTICFNSFHNLS

SEQ ID NO: 1222 - protein, 25 aa, Homo sapiens
KILKLDGKSHHYQYYLAVTFSYNLL

SEQ ID NO: 1223 - protein, 56 aa, Homo sapiens
  SITE (34): Xaa equals any of the naturally occurring L-amino acids
  SITE (51): Xaa equals any of the naturally occurring L-amino acids
GRSRFKRYLSYLSLLAWRPANKTLSSVANHHVGXSGSHGAGLVRTHFQFLXTGVEG

SEQ ID NO: 1224 - protein, 53 aa, Homo sapiens
  SITE (16): Xaa equals any of the naturally occurring L-amino acids
VRDFSPTSSSGEMVRXEMLRLFFFTSHPLLQIYQPLILFTQHNKNFFFRNSVP

SEQ ID NO: 1225 - protein, 85 aa, Homo sapiens
WLYIMGVLGASCNWHVGVPFPGTHWPRSQNHLLWVYNHLNELPVPAGRSSEQLYLGYTEKLCIWISCYLAIRITEIQGSRVILMA

SEQ ID NO: 1226 - protein, 80 aa, Homo sapiens
  SITE (79): Xaa equals any of the naturally occurring L-amino acids
IEMTAEKQHGENRFTLPASATEDFLYLSTLLLPEVKTIGPSASLHWRTTSSHSTKCNKYIFRDLKQNVMLEYKAVLLGXA

SEQ ID NO: 1227 - protein, 89 aa, Homo sapiens
QSQSFCPTLWFWSPRGGVTFSIRHSLGPFPNPAWFLHWALQPGGESPVLSALPRHTPPTPCVLGREDAWAVVCITMFFFSPSPMLTRRN

SEQ ID NO: 1228 - protein, 25 aa, Homo sapiens
RIFREKKKRISGNTQAQVPCHLQEL

SEQ ID NO: 1229 - protein, 59 aa, Homo sapiens
  SITE (21): Xaa equals any of the naturally occurring L-amino acids
ATSCFVIFSPFLLCNILPVSXSYHLLRQDDKSFSNQESNNRYHFTGQTPNSVLEIPTVG

SEQ ID NO: 1230 - protein, 142 aa, Homo sapiens
  SITE (102): Xaa equals any of the naturally occurring L-amino acids
PALPPRPSLESSSHGPTLPYGRGPQQGPQSDQEREQAQAQPTPRASDQTHQVRAGHDSGGVWLCPVRAARHGVTEGLQGQTGPQIYQEKGGDAHPRQEEAGXAEQRTGRHEESCCQERLSPSPALSLNKEQLTEKKKKRAAA

SEQ ID NO: 1231 - protein, 59 aa, Homo sapiens
RAVGKERRDLKLGVIESNLHSRSDGCQVKNDQNRVRKRLSLLQLPGQEREVSAETMAVR

SEQ ID NO: 1232 - protein, 59 aa, Homo sapiens
TGGTENSLDLTMLPFSSYIFECTTNCLPRTYVLLLIFLFYIFFNCTLILVIIYSGDLGK

SEQ ID NO: 1233 - protein, 188 aa, Homo sapiens
  SITE (171): Xaa equals any of the naturally occurring L-amino acids
SRERPYECSKCGIFFTYAADLTQHQKVHNRGKPYECCECGKFFSQHSSLVKHRRVHTGESPHVCGDCGKFFSRSSNLIQHKRVHTGEKPYECSDCGKFFSQRSNLIHHKRVHTGRSAHECSECGKSFNCNSSLIKHWRVHTGERPYKCNECGEILQPHCQPHSTSDSSHWXSGLTGVVSVGKPSAEAL

SEQ ID NO: 1234 - protein, 87 aa, Homo sapiens
  SITE (72): Xaa equals any of the naturally occurring L-amino acids
  SITE (83): Xaa equals any of the naturally occurring L-amino acids
SAPRSCRAGPGGSCVQQSCWVVAPPGLSSPVSGPTPAPPTSLALAALSLEATLWGRASNPAFPGPSSHPLSXPTSVPFRGPVXRALR

SEQ ID NO: 1235 - protein, 124 aa, Homo sapiens
DSTKELVALQGQHPPCSANEDLLHLLTLSLDLFYTEDEIYELSYAREPRCPKSLPPSPFNAPLVVEWAPGVTPKPDRVTLGRHVEQLVESVFKNYEPWKAEEQSLRRTLKRLSGNFPFACHGLH

SEQ ID NO: 1236 - protein, 38 aa, Homo sapiens
SRKQGKGLSSGCELIWDGDTGRAMKPAQPNKDTTQVRM

SEQ ID NO: 1237 - protein, 69 aa, Homo sapiens
  SITE (16): Xaa equals any of the naturally occurring L-amino acids
FGTEGSGPRFLWVIPXTATRHRGGGDPGVGASSFVRSPRLSCFAPCCLLPSVTGDGGRVSAVSRCSCAG

SEQ ID NO: 1238 - protein, 63 aa, Homo sapiens
GSLRASPFSPAVSVFGAESPCLHLTHSRRLERLAAGPFSNGSSCSRRDAGLSRTHFACITSAQ

SEQ ID NO: 1239 - protein, 31 aa, Homo sapiens
FGTSSHDRPGMSYLVQPRYILEYVTLGRFIN

SEQ ID NO: 1240 - protein, 145 aa, Homo sapiens
  SITE (9): Xaa equals any of the naturally occurring L-amino acids
  SITE (25): Xaa equals any of the naturally occurring L-amino acids
  SITE (56): Xaa equals any of the naturally occurring L-amino acids
  SITE (63): Xaa equals any of the naturally occurring L-amino acids
  SITE (65): Xaa equals any of the naturally occurring L-amino acids
  SITE (85): Xaa equals any of the naturally occurring L-amino acids
  SITE (97): Xaa equals any of the naturally occurring L-amino acids
  SITE (134): Xaa equals any of the naturally occurring L-amino acids
  SITE (135): Xaa equals any of the naturally occurring L-amino acids
  SITE (142): Xaa equals any of the naturally occurring L-amino acids
CALQPPWKXLRDPKSLPSTRHLCEXRAPSSPPSTPLLGSEPQRPPFSSAIQNRPEXLPETPPXSXSPAMLTRFPLRAIVVWARVXAPGCVLESGGGXPATHGERQERRVMEDVGALTPGVGWRAEPAGGPAFTXXPRAGKAXGVP

SEQ ID NO: 1241 - protein, 64 aa, Homo sapiens
  SITE (38): Xaa equals any of the naturally occurring L-amino acids
  SITE (39): Xaa equals any of the naturally occurring L-amino acids
  SITE (61): Xaa equals any of the naturally occurring L-amino acids
  SITE (62): Xaa equals any of the naturally occurring L-amino acids
MTNGRSCRWRLRSVVACAIPESIQRKQGKMSTATFHPXXECEGCSTCSPAAVETDLRPDTXXFS

SEQ ID NO: 1242 - protein, 40 aa, Homo sapiens
ICLDTQILPIRLLLSMVFPIVTSCTGLEPRGNRLYHLLIA

SEQ ID NO: 1243 - protein, 75 aa, Homo sapiens
  SITE (56): Xaa equals any of the naturally occurring L-amino acids
  SITE (75): Xaa equals any of the naturally occurring L-amino acids
RAQWLLPCTPGSLPVGTSHCHAYHENTRAALWRGPYRQEPRPLANSQPRGNHVSRXTLGRDPTALQYSRDLSLGX

SEQ ID NO: 1244 - protein, 75 aa, Homo sapiens
  SITE (43): Xaa equals any of the naturally occurring L-amino acids
  SITE (63): Xaa equals any of the naturally occurring L-amino acids
  SITE (66): Xaa equals any of the naturally occurring L-amino acids
NPVLPHPQKKKLEFLDGKLQRTLGNWEEAKKGGKGKKKMGVLXGKLQRTLGNWEEVKNGVKGXPNXMGMTHGQCR

SEQ ID NO: 1245 - protein, 53 aa, Homo sapiens
DKRLHGTDHDVLRKKKSGNPLQSGSRRRICKNCFGKVNTKAHRRKYFTQQILY

SEQ ID NO: 1246 - protein, 64 aa, Homo sapiens
TEPDLTQPRAGLRTWWGLRKLSLAGSHTGLRLCSASKIPLSPRGGMIQGTASVQSCCRNIGRKL

SEQ ID NO: 1247 - protein, 85 aa, Homo sapiens
QKKWWQGSVQLNFFYSFNVRNLSDNLLKGTLALTVSERKEIFPISQGCPLEAGTWRSTVEQRLDMPNAPPTPCSTPHETGRHWSR

SEQ ID NO: 1248 - protein, 55 aa, Homo sapiens
TQTVVCVLSPLVPFSSSADFTIVGKVFISLTDTPGGKGKGKGKKSQIDCFNLNGS

SEQ ID NO: 1249 - protein, 36 aa, Homo sapiens
KPTFKDTDMLEKKIDGKSNISSNQKETKMTILISTK

SEQ ID NO: 1250 - protein, 59 aa, Homo sapiens
AKGTAPVEQCSPAVTFFPDSGKLLPGYLGNIGNGFRLLLVPGRSHHPLLISLNPTHLCR

SEQ ID NO: 1251 - protein, 59 aa, Homo sapiens
  SITE (37): Xaa equals any of the naturally occurring L-amino acids
EHWEPGWAVAGEAAGRKRLRSRSWRPMNPPAGKLRTXPSCLSSRLPFTFGTLGSSGRPP

SEQ ID NO: 1252 - protein, 67 aa, Homo sapiens
KIFPPLPSSPSMFLLRRKIRKKVLGWGQAWWLMPINANTLGRPRQPDHKVRGSKPASLAQHCEPNLY

SEQ ID NO: 1253 - protein, 102 aa, Homo sapiens
  SITE (50): Xaa equals any of the naturally occurring L-amino acids
  SITE (95): Xaa equals any of the naturally occurring L-amino acids
  SITE (97): Xaa equals any of the naturally occurring L-amino acids
GTSLGSEISHGTRHLRALTKFNLSSPAPLSATLPPTALKMEMYPTFKPLXVQLANFRLKIHYQMDEMFISTYTAYGLCVEKDVEPTKWSATQNCXYXLFTLY

SEQ ID NO: 1254 - protein, 39 aa, Homo sapiens
VNEIWIFFQLLQQRTSVSSVEVTRDRVGWGGGHSSGQVP

SEQ ID NO: 1255 - protein, 101 aa, Homo sapiens
  SITE (39): Xaa equals any of the naturally occurring L-amino acids
GFPQAARQPPPCGPVPFTAPGRRCVHFSGITVADGTLHXKLGKQERGPVFPGLFTVWPVFLFSPLSVKTVLNGVTKCRGEVEKCFKRPSLGQFFFQSSDPV

SEQ ID NO: 1256 - protein, 32 aa, Homo sapiens
  SITE (6): Xaa equals any of the naturally occurring L-amino acids
IRYVSXSLLLPKTILRHQEKGFLGCFFFKCIN

SEQ ID NO: 1257 - protein, 23 aa, Homo sapiens
IKPLRCLGLHKMSKFMIDQYSQG

SEQ ID NO: 1258 - protein, 36 aa, Homo sapiens
  SITE (34): Xaa equals any of the naturally occurring L-amino acids
VVVRPGQAAGGLPWTQGSLVLGDLSTPMCYGHLXEV

SEQ ID NO: 1259 - protein, 56 aa, Homo sapiens
  SITE (45): Xaa equals any of the naturally occurring L-amino acids
  SITE (52): Xaa equals any of the naturally occurring L-amino acids
KESSIHRLSNFHLLVDFFPFASENKFCGTLHYTSVNLLKNKEYGXRGLKFVXDIFQ

SEQ ID NO: 1260 - protein, 25 aa, Homo sapiens
AESKLAKLCNMHIVYQLYLNKAVFF

SEQ ID NO: 1261 - protein, 38 aa, Homo sapiens
  SITE (28): Xaa equals any of the naturally occurring L-amino acids
  SITE (31): Xaa equals any of the naturally occurring L-amino acids
  SITE (33): Xaa equals any of the naturally occurring L-amino acids
GRKPLETDFKWVDLLDLADRDFQVSYYXICXKXLKSVF

SEQ ID NO: 1262 - protein, 93 aa, Homo sapiens
  SITE (35): Xaa equals any of the naturally occurring L-amino acids
  SITE (85): Xaa equals any of the naturally occurring L-amino acids
RLAITFANGACYWPPLSCAPPSVRFLISQWTWVMXRSRPSPAFSVGSLIALPAIIATACKFYCPRVNSRAGNCSIHCINTCGGIXFAKNHPWQ

SEQ ID NO: 1263 - protein, 36 aa, Homo sapiens
TVTMGGVFFLNLLKVDVYISLPLSISFQLGMWQFLS

SEQ ID NO: 1264 - protein, 68 aa, Homo sapiens
  SITE (3): Xaa equals any of the naturally occurring L-amino acids
  SITE (45): Xaa equals any of the naturally occurring L-amino acids
  SITE (65): Xaa equals any of the naturally occurring L-amino acids
KEXQFPVCFSRLPEALPANLKSFLPLLPMDPSADTRSPRCCLAPXTRYVAGHLRSLFLLAWKMVXKRF

SEQ ID NO: 1265 - protein, 34 aa, Homo sapiens
AEGQIFSTYLGFHFLVCKMRYLVPLGVFCKGEVR

SEQ ID NO: 1266 - protein, 156 aa, Homo sapiens
  SITE (144): Xaa equals any of the naturally occurring L-amino acids
  SITE (155): Xaa equals any of the naturally occurring L-amino acids
CSFCPFLGCLKHDKQGDLLYTLSYEGDGDFSFFLWISAIVCSQFKIADHLSSKHTNRTEFQKGSSFWCFAYVQIHASGRKFQCTLPMLLSLGVVVNMQESFMRQNVFCCMTEGFSKQTAVSVVLNMLHVHVRKTESSHQLIQMXSQSSVCFKLLXK

SEQ ID NO: 1267 - protein, 50 aa, Homo sapiens
IPQTINHIMDIQLDPARDDLPLMANTSHILVKHYVLDLDVDFESQVIEGT

SEQ ID NO: 1268 - protein, 104 aa, Homo sapiens
KAIKHAETERLSWIIWVGPNAVMYVTYKTEEREIDAHKRNPGEDGGSHGNDAPTAQGCWQPSPEAGRGSSRACAGLQASGTDFRLLASKTERADFCCLSHPPRL

SEQ ID NO: 1269 - protein, 87 aa, Homo sapiens
  SITE (63): Xaa equals any of the naturally occurring L-amino acids
  SITE (78): Xaa equals any of the naturally occurring L-amino acids
  SITE (79): Xaa equals any of the naturally occurring L-amino acids
  SITE (85): Xaa equals any of the naturally occurring L-amino acids
GRTPLGSPHPPLPEHQQWGEGSIAGAGTPWVRTDQPSRAPGTHGLRLTSPGRRPRVEGRGRGXSGGWGLSADGVAMEXXAFTTQXRF

SEQ ID NO: 1270 - protein, 78 aa, Homo sapiens
SLVGPFQVSLVPNVLIAQSLHEDCNVKHILALCLTSHLNSPSLISHPSIAFATAEISGSSHLSQFFPHRFVTWPACLL

SEQ ID NO: 1271 - protein, 92 aa, Homo sapiens
GVGGKGGCAGRWDGDAPLKLCRSLLHFFKLGRPPRPCGLPRPARPWGSENPGFGDWHFHPIKKSSWLGGGHLLMGGHGHRGFSDELGAVLRG

SEQ ID NO: 1272 - protein, 109 aa, Homo sapiens
  SITE (31): Xaa equals any of the naturally occurring L-amino acids
  SITE (86): Xaa equals any of the naturally occurring L-amino acids
  SITE (91): Xaa equals any of the naturally occurring L-amino acids
  SITE (100): Xaa equals any of the naturally occurring L-amino acids
  SITE (106): Xaa equals any of the naturally occurring L-amino acids
IINYEFDTKDLVCLGLSSIVGVWYLLRKHWXANNLFGLAFSLNGVELLHLNNVSTGCILLGGLFIYDVFWVFGTNVMVTVAKSFEXPIKLXFPQGSAGEXPRSKQXLPS

SEQ ID NO: 1273 - protein, 41 aa, Homo sapiens
  SITE (19): Xaa equals any of the naturally occurring L-amino acids
  SITE (24): Xaa equals any of the naturally occurring L-amino acids
  SITE (34): Xaa equals any of the naturally occurring L-amino acids
  SITE (40): Xaa equals any of the naturally occurring L-amino acids
NSNSTSLLNGQEYNPLLEXGMSMXPFVKSSTTKXPTNNHXR

SEQ ID NO: 1274 - protein, 46 aa, Homo sapiens
GSCVKTSWEPTACCHLQLRPPHHALPGRAARPEAEYHQAPGGQERS

SEQ ID NO: 1275 - protein, 103 aa, Homo sapiens
  SITE (98): Xaa equals any of the naturally occurring L-amino acids
AVAGPGQGGHGGRAAQREPAARALAFCLGTSGAKALIFGGEMVAAVAEVSGHLGKSLIKFCSGDLGPEGILPDTHLLDPLLKEASNCPLWHRSPARAXTIVFF

SEQ ID NO: 1276 - protein, 31 aa, Homo sapiens
RKTSGTQGDMPQYGGPIVQGSAGGPGTQFAL

SEQ ID NO: 1277 - protein, 59 aa, Homo sapiens
  SITE (26): Xaa equals any of the naturally occurring L-amino acids
FLCLGLGFPHLAYHLLFSRSVEGEAXGVTDPRRSPGLRTLSRPSPLFSAVVNSAVSAVG

SEQ ID NO: 1278 - protein, 42 aa, Homo sapiens
  SITE (31): Xaa equals any of the naturally occurring L-amino acids
QHAVSADTREAVMKAVSELDYRPNANAQALXNSRLATPLAWW

SEQ ID NO: 1279 - protein, 63 aa, Homo sapiens
  SITE (20): Xaa equals any of the naturally occurring L-amino acids
QPPSLFTDLDCPSPARPAGXTAARALLVAHDDGHSQSPEYTDQSASTQSTELALVTVSLYLTE

SEQ ID NO: 1280 - protein, 45 aa, Homo sapiens
RHEVSHRAQQVFFKYHFFCFSELNIQLKDKLKGVLFSSSVSSFLK

SEQ ID NO: 1281 - protein, 52 aa, Homo sapiens
CLLFNQIFVKVSWEWWYVPIVPATWKAKARGGPVPNSPYSESYYNSLAVVLQ

SEQ ID NO: 1282 - protein, 73 aa, Homo sapiens
  SITE (35): Xaa equals any of the naturally occurring L-amino acids
YHISTFISLHFLFSAVHNDNFNQALLMLKYCARVXTQPTPGNMPQPSPHWTAEPSGPLSLDVLLSSHTQHTSI

SEQ ID NO: 1283 - protein, 63 aa, Homo sapiens
  SITE (4): Xaa equals any of the naturally occurring L-amino acids
  SITE (11): Xaa equals any of the naturally occurring L-amino acids
  SITE (61): Xaa equals any of the naturally occurring L-amino acids
CPKXLIGVGVXRKIQALIVCSPGWEGNSSRKKVTHCFNHLPANCNEVYRAMGLWDELFHLXTL

SEQ ID NO: 1284 - protein, 160 aa, Homo sapiens
  SITE (149): Xaa equals any of the naturally occurring L-amino acids
  SITE (150): Xaa equals any of the naturally occurring L-amino acids
  SITE (151): Xaa equals any of the naturally occurring L-amino acids
  SITE (153): Xaa equals any of the naturally occurring L-amino acids
  SITE (156): Xaa equals any of the naturally occurring L-amino acids
  SITE (158): Xaa equals any of the naturally occurring L-amino acids
  SITE (159): Xaa equals any of the naturally occurring L-amino acids
LYKLAGELTPFVLHVAARTVATHALSIFGDHSDVMAVRQTGCAMLCAANVQEAQDFALISQIATLKSRVPFIHFFDGFRTSHEINKIVPLADDTILDLMPQVEIDAHRARALNPEHPVIRGTSANPDTYFQSREATNPWYNASMTMLNXXXMXSLXRXXV

SEQ ID NO: 1285 - protein, 77 aa, Homo sapiens
  SITE (63): Xaa equals any of the naturally occurring L-amino acids
RSQLSPVMEWEHWKGAVFCDGMGTLEEALSFAAQLHFLLTSWIMPLHLLMTELCPICRYTSTXRPQGRPFWWLESGF

SEQ ID NO: 1286 - protein, 57 aa, Homo sapiens
LHVGVGERHLVMMKSLPCGRPPKIPQCLPDLANSHSWCFTIRWSAGSGLGGTPVIQG

SEQ ID NO: 1287 - protein, 109 aa, Homo sapiens
  SITE (44): Xaa equals any of the naturally occurring L-amino acids
  SITE (48): Xaa equals any of the naturally occurring L-amino acids
  SITE (49): Xaa equals any of the naturally occurring L-amino acids
QDRRPGPWSRRGRAAEVAVAGSELRLPGPSPRWRPRPRTLPRAXLSRXXAASLSTRTAHEIPDVYIVERLFSSSLVVVVSHTKPRQMNVYHFKKGTEICNYSYSSNILP

SEQ ID NO: 1288 - protein, 53 aa, Homo sapiens
  SITE (27): Xaa equals any of the naturally occurring L-amino acids
  SITE (45): Xaa equals any of the naturally occurring L-amino acids
EHEFLLHKGHLKKIWSGLAWWLTPVIXALWEAQAGGSPEGGSSRXGWQRGETS

SEQ ID NO: 1289 - protein, 161 aa, Homo sapiens
  SITE (114): Xaa equals any of the naturally occurring L-amino acids
  SITE (149): Xaa equals any of the naturally occurring L-amino acids
  SITE (152): Xaa equals any of the naturally occurring L-amino acids
FSSLGLPKCWDYRRASPHLAHAKIAKLQRRIKTVLLFQRNCLKPNMLSSNGASKVANSEAMILDKNLESVNSPIEKSSVNYEPSNPSEKGSKKINLSSDQNKSVSESNNDDVMXISVESPNLTTPITSNPTDTRKITSGNSSNSPNAEXMAXQKKLGSIID

SEQ ID NO: 1290 - protein, 29 aa, Homo sapiens
LPAAHADEQLSNIAVKLTVTIPFVMQNHK

SEQ ID NO: 1291 - protein, 64 aa, Homo sapiens
  SITE (43): Xaa equals any of the naturally occurring L-amino acids
LPLQRASACVPWLPKIIRMASPTSPGHVLPACLQSSIVGNKQXKKSETWMLFSWGDFFVCFKVI

SEQ ID NO: 1292 - protein, 208 aa, Homo sapiens
SCLVRFLPAEMHNFEEELTCPICYSIFEDPRVLPCSHTFCRNCLENILQASGNFYIWRPLRIPLKCPNCRSITEIAPTGIESLPVNFALRAIIEKYQQEDHPDIVTCPEHYRQPLNVYCLLDKKLVCGHCLTIGQHHGHPIDDLQSAYLKEKDTPQKLLEQLTDTHWTDLTHLIEKLKEQKSHSEKMIQGDKEAVLQYFKELNDTLEQ

SEQ ID NO: 1293 - protein, 67 aa, Homo sapiens
  SITE (44): Xaa equals any of the naturally occurring L-amino acids
  SITE (47): Xaa equals any of the naturally occurring L-amino acids
  SITE (53): Xaa equals any of the naturally occurring L-amino acids
  SITE (55): Xaa equals any of the naturally occurring L-amino acids
  SITE (56): Xaa equals any of the naturally occurring L-amino acids
  SITE (59): Xaa equals any of the naturally occurring L-amino acids
TLHNIVMGNIIKTMHNIVWYVLKIYINYISLAIFIYEWNFSTGXNIXLEDLSXWXXFNXDGNTFRKI

SEQ ID NO: 1294 - protein, 34 aa, Homo sapiens
  SITE (11): Xaa equals any of the naturally occurring L-amino acids
  SITE (18): Xaa equals any of the naturally occurring L-amino acids
STNFLMFFFNXLELFKTXWSLHIWCSTSMLKMSY

SEQ ID NO: 1295 - protein, 52 aa, Homo sapiens
IKVNIGIISSRDRRFFTHQLLNGCHDNMLNRFLHHHNGLDVLLLLFTVHSTA

SEQ ID NO: 1296 - protein, 89 aa, Homo sapiens
  SITE (66): Xaa equals any of the naturally occurring L-amino acids
TVACRSGPAFAAVDLLQLQEAHQLRDEARVQGLLQDLALAGDPSHLASFLTCLVEEHNLLDVPLRXLTVHIVLQQAHHEAVVAFRGMRG

SEQ ID NO: 1297 - protein, 46 aa, Homo sapiens
PGRLLQLVFKDSMWKVRIILDYQAIRGHRERTAGDGRLLYFHLQWG

SEQ ID NO: 1298 - protein, 96 aa, Homo sapiens
  SITE (96): Xaa equals any of the naturally occurring L-amino acids
KKDHISHSTPSPPKNYQGYPRKLDAFQLNEFSVTTCSLSYSCFSGTFPEWIEHYQEAGPPCLFTSRCRGPWQKGTVVAWASRGPLSEPGVSSFVCX

SEQ ID NO: 1299 - protein, 122 aa, Homo sapiens
LFLLFTPFSTPLHPALWPGDCPVWIAPVGFLSSGSWLVLVKKLSGRRLPRYFISLVPPCWLPQVGCVLLLKAAASVRCPLCAAISFPSCVTAPSPGPFRLSVEICSTDIQQPSQWQRYLDFP

SEQ ID NO: 1300 - protein, 86 aa, Homo sapiens
PWIQRWGRDFREGQPSCLTFRGRNITGREQIYLTKSFLLGWSALAKSILVKCNFITSSILHELPGSAFIYWISKIFEARPYSGTLL

SEQ ID NO: 1301 - protein, 63 aa, Homo sapiens
  SITE (59): Xaa equals any of the naturally occurring L-amino acids
NVTYKLSTNNILHLLGALQFKKLLSNIVFSHLVLQVLTYLQVNGRRYNKSYHWLASPSXPSYR

SEQ ID NO: 1302 - protein, 66 aa, Homo sapiens
  SITE (45): Xaa equals any of the naturally occurring L-amino acids
  SITE (53): Xaa equals any of the naturally occurring L-amino acids
  SITE (54): Xaa equals any of the naturally occurring L-amino acids
PSRPHPKSPGRKMRETGPALSSQSSSSSSSGSGGRCFAVSSSAAXTRWAAAAXXGLSPGWVVPPAE

SEQ ID NO: 1303 - protein, 56 aa, Homo sapiens
  SITE (50): Xaa equals any of the naturally occurring L-amino acids
STWCTAAWRTSSELTDGKLEVPHFEQQGRGGGVLLVHWHPHEPVSAWRPXFEKLFS

SEQ ID NO: 1304 - protein, 165 aa, Homo sapiens
  SITE (119): Xaa equals any of the naturally occurring L-amino acids
  SITE (135): Xaa equals any of the naturally occurring L-amino acids
RHEGAGLGSWLSQQLQQLREWPGGRRVPAAMEAVPRMPMIWLDLKEAGDFHFQPAVKKFVLKNYGENPEAYNEELKKLELLRQNAVRVPRDFEGCSVLRKYSASFITCRVGSPWARARXPLSLSPGQRSSQASLXPMRTSSTSRPVFSTTLERCTPCWGPWTTGV

SEQ ID NO: 1305 - protein, 38 aa, Homo sapiens
HFPKNILRAISSSRYFVGGKRGFCGQMSLGNAEHFILL

SEQ ID NO: 1306 - protein, 193 aa, Homo sapiens
  SITE (10): Xaa equals any of the naturally occurring L-amino acids
  SITE (103): Xaa equals any of the naturally occurring L-amino acids
  SITE (166): Xaa equals any of the naturally occurring L-amino acids
CCRRRSCPGXPRPGSGGPWGASLWSSPCKGPRRSGSGPATWGGAARPGSVRAWAGKVTDPRLCSGVPGGAGTWRREEGAAVVGPGRVSSFWEHWDAAVTVLRXDEQGTRGGLWTLAVLWENDPPCPRLCSVEHPEPWRPGRSTCPEDVYLPLWIWGSLGWVPSDAXWPLSAGFSLSPPSPGRWAAWRRKARGH

SEQ ID NO: 1307 - protein, 34 aa, Homo sapiens
LFCTLIFESNGYREIFLHCFKELKQYSFIVDTSS

SEQ ID NO: 1308 - protein, 38 aa, Homo sapiens
FFVIDYKLVLKCPNIRCVSFSASYLKHTIQYKDTQRMF

SEQ ID NO: 1309 - protein, 50 aa, Homo sapiens
  SITE (2): Xaa equals any of the naturally occurring L-amino acids
  SITE (16): Xaa equals any of the naturally occurring L-amino acids
  SITE (27): Xaa equals any of the naturally occurring L-amino acids
KXLGIATPPSIPWGGXFPQTPNFAHPXGQPPTTQGKRYWLKVTLVQGGRK

SEQ ID NO: 1310 - protein, 56 aa, Homo sapiens
SSNFQYDGIERWGLWVVIRVRLGHEGGAAIMGLVFVRRDMREFILSLSPPRERVRK

SEQ ID NO: 1311 - protein, 47 aa, Homo sapiens
  SITE (35): Xaa equals any of the naturally occurring L-amino acids
VPRYLVKYKSRHCRESVSLNEINVYTSRHGVQQKXPPPCGGGLIQAS

SEQ ID NO: 1312 - protein, 58 aa, Homo sapiens
  SITE (28): Xaa equals any of the naturally occurring L-amino acids
  SITE (29): Xaa equals any of the naturally occurring L-amino acids
FTQRAIYQMPTFVSGTGHAKSILMEYGXXTPYLLFCFVLLTWSMFYLYYSHNIFNTLS

SEQ ID NO: 1313 - protein, 38 aa, Homo sapiens
  SITE (35): Xaa equals any of the naturally occurring L-amino acids
RRWWVIKSNLHQGCWITSKKQLYVNKAVLPVLLYXCTL

SEQ ID NO: 1314 - protein, 78 aa, Homo sapiens
  SITE (66): Xaa equals any of the naturally occurring L-amino acids
RPQILFSLPIQWPSLRCHLSQPLSNIRHNILLSSLEFQDTPLLVCPYSFSVLLFVPNSLPTYCKYXNILGAGCGDSHL

SEQ ID NO: 1315 - protein, 42 aa, Homo sapiens
  SITE (25): Xaa equals any of the naturally occurring L-amino acids
  SITE (38): Xaa equals any of the naturally occurring L-amino acids
KFDLNIYISCHPGTYLLMQVLNDYXRYFAENLVKKPQXMKNF

SEQ ID NO: 1316 - protein, 146 aa, Homo sapiens
  SITE (1): Xaa equals any of the naturally occurring L-amino acids
  SITE (5): Xaa equals any of the naturally occurring L-amino acids
  SITE (8): Xaa equals any of the naturally occurring L-amino acids
  SITE (9): Xaa equals any of the naturally occurring L-amino acids
  SITE (14): Xaa equals any of the naturally occurring L-amino acids
  SITE (50): Xaa equals any of the naturally occurring L-amino acids
XRLGXRRXXSRDRXWPRPSRPWVWGTALRSWKLSRQKQVLKMLKAVLKKXREGGKGGKKEAGSDFGPETSPVLHLDHSADSPVSSLPTAEDTYRVSLAKGVSMSLPSSPLLPRQSHLVQSRVNKKSPGPVRKPKYVESPECLEMQL

SEQ ID NO: 1317 - protein, 54 aa, Homo sapiens
LKFFLVMVSRTWTLAGAGDSPASGDPPEPSSNTTLTQTMKSQIQEAQRTQAQET

SEQ ID NO: 1318 - protein, 49 aa, Homo sapiens
  SITE (23): Xaa equals any of the naturally occurring L-amino acids
  SITE (26): Xaa equals any of the naturally occurring L-amino acids
  SITE (42): Xaa equals any of the naturally occurring L-amino acids
VTIALFHSSYVKFYIPVKRLSKXSQXNATLLFCLFYPMNGKXGPPFPRP

SEQ ID NO: 1319 - protein, 112 aa, Homo sapiens
QIFWKKKKIWKCHVTGGNVRLLEQILNNNDSLTRKSESSNTTSLTRSKIGWTPEKTNRFPSCEELETTKVTMQKSDDVLHDLGQKEKETNSMVQPKESLSMFEASRSSTEFC

SEQ ID NO: 1320 - protein, 42 aa, Homo sapiens
KISFEIELRCFCCYYRKKKSLIFFEYPVSLKNFCFANLLKTG

SEQ ID NO: 1321 - protein, 43 aa, Homo sapiens
  SITE (30): Xaa equals any of the naturally occurring L-amino acids
VYGNLGNIQFSEDSQGLRRKNVYFFLYFGXINRSCNLLCSTTW

SEQ ID NO: 1322 - protein, 53 aa, Homo sapiens
  SITE (32): Xaa equals any of the naturally occurring L-amino acids
  SITE (50): Xaa equals any of the naturally occurring L-amino acids
  SITE (51): Xaa equals any of the naturally occurring L-amino acids
QTSCQPGDERWGSGNRQCLPLAQTWHHLPFIXGLIHWEPEKPVELHGVHXXPG

SEQ ID NO: 1323 - protein, 45 aa, Homo sapiens
  SITE (33): Xaa equals any of the naturally occurring L-amino acids
  SITE (39): Xaa equals any of the naturally occurring L-amino acids
FHLQNVSKIVKIMETENTIVVSRGGRWYREMEXVFPLVXRFYYAR

SEQ ID NO: 1324 - protein, 54 aa, Homo sapiens
KYSWDIVTVAVGRVFSLHTVRGCFVCKCLSHKLVRISDAGNFDMLIHKEETSVF

SEQ ID NO: 1325 - protein, 148 aa, Homo sapiens
  SITE (74): Xaa equals any of the naturally occurring L-amino acids
  SITE (127): Xaa equals any of the naturally occurring L-amino acids
  SITE (133): Xaa equals any of the naturally occurring L-amino acids
DEQEPTSRGCDHHSDKLIGVSTVETTKAKWATHAGFIFKPISIFTCSAGVVHLVELKVSRLALAQGNAVQVSAXGGVFVTFGTLPLAQAARSKDPPLRSQGAGRPQQKDLQELTHFCILSARSNSVXLEAREXVVCSEITTALDSLEA

SEQ ID NO: 1326 - protein, 54 aa, Homo sapiens
  SITE (32): Xaa equals any of the naturally occurring L-amino acids
  SITE (41): Xaa equals any of the naturally occurring L-amino acids
  SITE (45): Xaa equals any of the naturally occurring L-amino acids
CVKGYRAFPVSPPALAWEVSWGQLLRRLLAAXLDLGLIDLXCYLXRALLLPAHV

SEQ ID NO: 1327 - protein, 81 aa, Homo sapiens
KKYGPAKWVSTSVESMDWDSAIQTGFTKLNSYIQGKNEKEMKIKMTAPVTSYVEPGSGPFSESTITISLYIPSEQQFDPPR

SEQ ID NO: 1328 - protein, 69 aa, Homo sapiens
  SITE (47): Xaa equals any of the naturally occurring L-amino acids
  SITE (69): Xaa equals any of the naturally occurring L-amino acids
IRHELPCPGHFFQSPPWLFIYSVFLPFHESIQPIKFSLKIIHFLWIXTFMMKTLYTVSYNFRNSLCIYX

SEQ ID NO: 1329 - protein, 35 aa, Homo sapiens
  SITE (26): Xaa equals any of the naturally occurring L-amino acids
  SITE (35): Xaa equals any of the naturally occurring L-amino acids
FGRAIVSNWPVSFSNQTAAACLLSVXAHAHYTECX

SEQ ID NO: 1330 - protein, 47 aa, Homo sapiens
  SITE (46): Xaa equals any of the naturally occurring L-amino acids
YMLDPGFEQWLSVLKAYPFLTTPVLEDNKRAFFKGRRRQYLIFRLXQ

SEQ ID NO: 1331 - protein, 42 aa, Homo sapiens
LDYYFWLLDGIFRYITKSTVATSIFLRDFKTRNTFFPFCFID

SEQ ID NO: 1332 - protein, 68 aa, Homo sapiens
  SITE (29): Xaa equals any of the naturally occurring L-amino acids
  SITE (37): Xaa equals any of the naturally occurring L-amino acids
  SITE (41): Xaa equals any of the naturally occurring L-amino acids
  SITE (42): Xaa equals any of the naturally occurring L-amino acids
  SITE (45): Xaa equals any of the naturally occurring L-amino acids
  SITE (47): Xaa equals any of the naturally occurring L-amino acids
  SITE (64): Xaa equals any of the naturally occurring L-amino acids
WSRGPQDGIVWLQEATQSQEAASKRPTWXAWGCAWLXSMWXXELXMXHWDAYRKVDRRCGKSFXNVAN

SEQ ID NO: 1333 - protein, 50 aa, Homo sapiens
RPSRIVDPRAAGFGRGNCYHFAVQDITYLFLDQDYSVIRHLDVDDCIELY

SEQ ID NO: 1334 - protein, 98 aa, Homo sapiens
  SITE (80): Xaa equals any of the naturally occurring L-amino acids
IPALLFYPVAQEAATMGSKDHAVFFREMTQLILNEMPKAGYSSILNDFVESNFFVIDGDSLLVTCLGVKSFKWGQNLHFXYLVECYLVGLLSNGGHSP

SEQ ID NO: 1335 - protein, 76 aa, Homo sapiens
  SITE (62): Xaa equals any of the naturally occurring L-amino acids
  SITE (72): Xaa equals any of the naturally occurring L-amino acids
  SITE (75): Xaa equals any of the naturally occurring L-amino acids
SSTLRGQHTHCSPSLLPQMHLDLFTLEVPDHRPGMVAYGYNPSNPSTFGRVEAGRSLEGQEXQDQPGQHWQXPIXG

SEQ ID NO: 1336 - protein, 78 aa, Homo sapiens
TIKNSMMEEPNINKIEADLGYPGGKARIIHKESDIITAFAVNKANRNCIAIASSHGCSRTGCFWNSGHTGLHLGRWMI

SEQ ID NO: 1337 - protein, 40 aa, Homo sapiens
  SITE (11): Xaa equals any of the naturally occurring L-amino acids
IRHRVLFADAXLRQWMAELEHRGKLRSRKLNKWYLRTYLW

SEQ ID NO: 1338 - protein, 42 aa, Homo sapiens
  SITE (5): Xaa equals any of the naturally occurring L-amino acids
HNISXFILFLSPTNLICNHFKRSLFKGYSHSEMKTPILGNQD

SEQ ID NO: 1339 - protein, 51 aa, Homo sapiens
  SITE (14): Xaa equals any of the naturally occurring L-amino acids
  SITE (45): Xaa equals any of the naturally occurring L-amino acids
IRHSQPGEKSETLXLRKRERETESKEQVGYNGVPGTKQSLMAALXLNFLVM

SEQ ID NO: 1340 - protein, 81 aa, Homo sapiens
NEVLPNLGDGSQRTRESTPSCIYVLPQIIHRHKELELPGVFFRKKGIQKANVKCNRTWPQSDVGKIASPDDLVEVTCFAHC

SEQ ID NO: 1341 - protein, 56 aa, Homo sapiens
VVIKTSYFVFSGKGCYTSSIVVEFKCFSSLPGSEESFGQIWSCRCGKTLQGSGSYR

SEQ ID NO: 1342 - protein, 50 aa, Homo sapiens
LFFRNLKFLVTHILKCTDSVSVLRNMAQRYLGKKYVCTRTYIHSICAHKH

SEQ ID NO: 1343 - protein, 33 aa, Homo sapiens
LTTLGLLYKIVMIAMGSFNLIPVRSVLKTYLSG

SEQ ID NO: 1344 - protein, 41 aa, Homo sapiens
GHSYTSKEWQTLEILGLPVNNERKGMWEEKQPRGRIQKLTN

SEQ ID NO: 1345 - protein, 55 aa, Homo sapiens
  SITE (55): Xaa equals any of the naturally occurring L-amino acids
KHITCYLCNYLCEHTYRTLILPVAEPLSFSNNAKCKFLVKKCIVLIICSPTHLLX

SEQ ID NO: 1346 - protein, 124 aa, Homo sapiens
  SITE (124): Xaa equals any of the naturally occurring L-amino acids
DSHALASQVAGITGVCRNAQLIFVFLVETGFHYVGQAGLELLASRDLSTSAVQSAGITSVTTVLGPRPWTSCCNFPCIFFKRSSVDFRTLCGTKFNALYPNLPNWNYKKVIIPFLSPQGLNKGX

SEQ ID NO: 1347 - protein, 59 aa, Homo sapiens
ATKFVVICYHSIGNEYKYQSVCGHILRLPQATLWSQIIYSSPTCKINLPLLRPQSLIPL

SEQ ID NO: 1348 - protein, 78 aa, Homo sapiens
  SITE (28): Xaa equals any of the naturally occurring L-amino acids
SAWAAITKYHTLGGLHNRNLLLLKVGSXRSGCQHCWALVKSLSLACQWPHSHPLTHVSSLDAEREQASSLVSLLIRVL

SEQ ID NO: 1349 - protein, 64 aa, Homo sapiens
KTFILDAMGLNLEKMGLNLDKHYLFGLVMMAFKLLKAMKYFFQKKPYTRSQHTESSICRWKISG

SEQ ID NO: 1350 - protein, 60 aa, Homo sapiens
VLATKPGQFFVFLVEMGFHHVGQAGLELLTSGDPPTSASQSAGITGMSHCAQPQIITFKL

SEQ ID NO: 1351 - protein, 64 aa, Homo sapiens
  SITE (19): Xaa equals any of the naturally occurring L-amino acids
RASEGSGDQKGGRMKEASXMHHQTFLQMCKESTRREGEGKHCQMSPSQPFNPFLYLLPTFKFCF

SEQ ID NO: 1352 - protein, 68 aa, Homo sapiens
  SITE (57): Xaa equals any of the naturally occurring L-amino acids
  SITE (62): Xaa equals any of the naturally occurring L-amino acids
  SITE (67): Xaa equals any of the naturally occurring L-amino acids
AIPSKKDVRWIRFDVLCLLILALWETEVGGITLSPAVQHQPEEHGQNPVFYKNKTKXKTHMXKTFAXA

SEQ ID NO: 1353 - protein, 98 aa, Homo sapiens
  SITE (85): Xaa equals any of the naturally occurring L-amino acids
  SITE (94): Xaa equals any of the naturally occurring L-amino acids
PHFPSTLTAPPLHPHFLALFHHLHSPSCLAPGPGSASWSSHCLVRLSESRSARQQGSTPSEEGGPSLDLRGEEVGMQILLGATVXGKATQFKVXKSWV

SEQ ID NO: 1354 - protein, 75 aa, Homo sapiens
KMPPFMAGIPLCIRSSRQIIRQEMKGIQIGNEEVKLSLFTDSMILYVENANTARPCLYKEILARRGGSCLLIPGL

SEQ ID NO: 1355 - protein, 48 aa, Homo sapiens
YLVHSQYVKLSFKTFLPKGIQYFLSQILTNHPSPPIKSETKVPLSQQK

SEQ ID NO: 1356 - protein, 54 aa, Homo sapiens
  SITE (48): Xaa equals any of the naturally occurring L-amino acids
QKQKLDRESSCSSSQGSYPNTEVIGISAIEGHFFFHKKKLSFLNVFKXLLALMC

SEQ ID NO: 1357 - protein, 47 aa, Homo sapiens
  SITE (2): Xaa equals any of the naturally occurring L-amino acids
  SITE (17): Xaa equals any of the naturally occurring L-amino acids
  SITE (19): Xaa equals any of the naturally occurring L-amino acids
  SITE (26): Xaa equals any of the naturally occurring L-amino acids
LXIHLLKMKDILPHTWXYXYQSNSMXYPVHFQISPIVPKTYFTVLMR

SEQ ID NO: 1358 - protein, 56 aa, Homo sapiens
TNSSLVASPFCINDCLLPDILMSQKPFQRFIDKQLYNFFVVLYNCLSTYICFSYAL

SEQ ID NO: 1359 - protein, 50 aa, Homo sapiens
FGRGGLLGSHGWSLLLICHRQFTGTCWPNHDLRWLSVSACLTSVTVGTVQ

SEQ ID NO: 1360 - protein, 69 aa, Homo sapiens
  SITE (65): Xaa equals any of the naturally occurring L-amino acids
RRVVRTLMFSSYIAVRNMYVIEYFTNSASLANQDKQPHICQKNHLAMMPDILLASPWDSRHGCSXTVLC

SEQ ID NO: 1361 - protein, 63 aa, Homo sapiens
SGRVSPGASAHSPQGVSSMWVISNQADINQTVQSSDILITALGDTWIVLHFPALGGTGVELGR

SEQ ID NO: 1362 - protein, 52 aa, Homo sapiens
  SITE (28): Xaa equals any of the naturally occurring L-amino acids
  SITE (31): Xaa equals any of the naturally occurring L-amino acids
LRVKILLIETVPNILLPFFLVTFLAFYXCGXILWGADHSLGPDPGWVPQVFG

SEQ ID NO: 1363 - protein, 40 aa, Homo sapiens
KVSAKNVFLKTLKFKIYPDYKPSFIVYLTNSIKNNFNIKN

SEQ ID NO: 1364 - protein, 78 aa, Homo sapiens
  SITE (33): Xaa equals any of the naturally occurring L-amino acids
  SITE (64): Xaa equals any of the naturally occurring L-amino acids
  SITE (67): Xaa equals any of the naturally occurring L-amino acids
  SITE (74): Xaa equals any of the naturally occurring L-amino acids
SVTETQPRIDCGCLHAMTELSNCDGDYMACRSXNIYSLGPLGLVMPFKAPKHEFLLLVGQTHSXWDXTINQVPXNKLG

SEQ ID NO: 1365 - protein, 52 aa, Homo sapiens
ELRASRKPRPSIATKRKSTKWHHQTSFIILHLQTQSRHKMSQCKTLPQLRTR

SEQ ID NO: 1366 - protein, 59 aa, Homo sapiens
TISFLHNFPLSHVSALPYRLAPFLSVGKIFPKASGDFSCHMLLLKPVVSKGENKVTVVG

SEQ ID NO: 1367 - protein, 67 aa, Homo sapiens
  SITE (23): Xaa equals any of the naturally occurring L-amino acids
  SITE (59): Xaa equals any of the naturally occurring L-amino acids
  SITE (64): Xaa equals any of the naturally occurring L-amino acids
LWESKFGSPASFHPFSPLSSVNXLFGNHYLYSYACPSSPRRIIKLKRVGIVQVWWVRTXGFWRXWGG

SEQ ID NO: 1368 - protein, 39 aa, Homo sapiens
  SITE (24): Xaa equals any of the naturally occurring L-amino acids
  SITE (28): Xaa equals any of the naturally occurring L-amino acids
FLFKAELSLWVFCSSPRIHCRIVXTFGXILCSPKPAGPW

SEQ ID NO: 1369 - protein, 42 aa, Homo sapiens
  SITE (40): Xaa equals any of the naturally occurring L-amino acids
NLGRAWYLTLLISALWEAEAGGSPEVRSLRTSLTMWGKPXST

SEQ ID NO: 1370 - protein, 61 aa, Homo sapiens
  SITE (57): Xaa equals any of the naturally occurring L-amino acids
  SITE (61): Xaa equals any of the naturally occurring L-amino acids
GSRNIKFPRQFSSIYYLVILIYTFATTDFNTVIHLQFIHTLFHHLPHGSRCFMWNVXLLLX

SEQ ID NO: 1371 - protein, 53 aa, Homo sapiens
  SITE (53): Xaa equals any of the naturally occurring L-amino acids
QAFISCSLLGSGENAPFLETSVTHRMHRFPQTWTYRTSTLMSERSQLYADHNX

SEQ ID NO: 1372 - protein, 125 aa, Homo sapiens
  SITE (41): Xaa equals any of the naturally occurring L-amino acids
  SITE (119): Xaa equals any of the naturally occurring L-amino acids
  SITE (121): Xaa equals any of the naturally occurring L-amino acids
  SITE (123): Xaa equals any of the naturally occurring L-amino acids
NSAEQTPPRHIPGVVEVTLSYKSKQFCKGAPGRFIYTALNXPTIDYGFQRLQKVIPRHPGDPERLAKEMLLKRAADLVEALYGTPHNNQDIILKRAADIAEALYSVPRNPSQFPALFSXPXHXGM

SEQ ID NO: 1373 - protein, 61 aa, Homo sapiens
NSARGNKNVNSRMGYFRWLLFCYLSGYPVLGFHVASLMSHFFSLCFSIKGKSTHLHDIPET

SEQ ID NO: 1374 - protein, 55 aa, Homo sapiens
NSAECIYNVGQPSPLSRSFLLSQAETLYLLTVIPHFYLPTALGNFCYNLALNYLF

SEQ ID NO: 1375 - protein, 72 aa, Homo sapiens
FCRDEGLVLLPRLVSNSGLKQSSRLSLPKCWYYRCELLCPGSVTPFLAVGLKNMAKGLDFISWLHFVSPWLI

SEQ ID NO: 1376 - protein, 50 aa, Homo sapiens
  SITE (30): Xaa equals any of the naturally occurring L-amino acids
  SITE (34): Xaa equals any of the naturally occurring L-amino acids
GHECSQISLFCEKSVRHTFPQSQCSGGVYXFAAXCLKQEFFRRFFNPNIP

SEQ ID NO: 1377 - protein, 45 aa, Homo sapiens
  SITE (7): Xaa equals any of the naturally occurring L-amino acids
  SITE (19): Xaa equals any of the naturally occurring L-amino acids
  SITE (23): Xaa equals any of the naturally occurring L-amino acids
  SITE (24): Xaa equals any of the naturally occurring L-amino acids
NMVIHSXQVKVTVGLWNGXFYGXXLLHRPKGEHLTSSWRLFSPWL

SEQ ID NO: 1378 - protein, 49 aa, Homo sapiens
  SITE (43): Xaa equals any of the naturally occurring L-amino acids
KITKLIREQSTMNESQQKQQTDLVYEKHQGLASLEKQYKITTXWECLKI

SEQ ID NO: 1379 - protein, 43 aa, Homo sapiens
  SITE (36): Xaa equals any of the naturally occurring L-amino acids
  SITE (42): Xaa equals any of the naturally occurring L-amino acids
VCAPKSLQTCWAGWTVSQLIGMAELGHIQGLGQQGXGMGKGXH

SEQ ID NO: 1380 - protein, 29 aa, Homo sapiens
IRHEVKGFAWEKMKIFSKEKKKIGWPGMV

SEQ ID NO: 1381 - protein, 59 aa, Homo sapiens
  SITE (8): Xaa equals any of the naturally occurring L-amino acids
  SITE (16): Xaa equals any of the naturally occurring L-amino acids
  SITE (40): Xaa equals any of the naturally occurring L-amino acids
  SITE (42): Xaa equals any of the naturally occurring L-amino acids
  SITE (46): Xaa equals any of the naturally occurring L-amino acids
NKIFYSRXFLLGASNXFLFSVAALIDLILLLKMDMCILLXTXTQQXITQWPGPVAVGPA

SEQ ID NO: 1382 - protein, 77 aa, Homo sapiens
  SITE (75): Xaa equals any of the naturally occurring L-amino acids
IRHEVIITVTPDSHSPQGLGLWKLLGWDWVGIGGCGFGGIFEGTAALCPSECSDHRWNSSFTVKIKYVALACFFXLF

SEQ ID NO: 1383 - protein, 62 aa, Homo sapiens
  SITE (13): Xaa equals any of the naturally occurring L-amino acids
  SITE (27): Xaa equals any of the naturally occurring L-amino acids
  SITE (44): Xaa equals any of the naturally occurring L-amino acids
  SITE (53): Xaa equals any of the naturally occurring L-amino acids
AVCLCILLTTLLXYNWTYRETTYLFLXICFFETDLALLPRLRCXVHLGSLASXLRVQGLSCL

SEQ ID NO: 1384 - protein, 26 aa, Homo sapiens
FGTRFPSFLRGKAINFMVNHKGILGL

SEQ ID NO: 1385 - protein, 64 aa, Homo sapiens
  SITE (35): Xaa equals any of the naturally occurring L-amino acids
  SITE (39): Xaa equals any of the naturally occurring L-amino acids
  SITE (51): Xaa equals any of the naturally occurring L-amino acids
  SITE (54): Xaa equals any of the naturally occurring L-amino acids
  SITE (61): Xaa equals any of the naturally occurring L-amino acids
LNFLKPHCAHLLQMFKHLSSIFYFLRMVDLLTCGXHTPXKEVGLKSFKYLXGLXFNSVGDXRGQ

SEQ ID NO: 1386 - protein, 81 aa, Homo sapiens
STCLGLSKRWDYRCEPPPSTVSFSSVLTVSAWNTSHGLQLGKKSHLISQMCKLLANSRPIRELRNSQRKCSPFCNYFFRFS

SEQ ID NO: 1387 - protein, 41 aa, Homo sapiens
IQLLMPLFIATFQDSIQWPYVKRCFTVADGNMELLLAWCEL

SEQ ID NO: 1388 - protein, 69 aa, Homo sapiens
  SITE (10): Xaa equals any of the naturally occurring L-amino acids
SQGSAEMRSXPGPCGWLGRSLAGNFSCSGKKPQMGLFLQLNSTSKMLVFTSSFDFQGFISQLLSELDMG

SEQ ID NO: 1389 - protein, 51 aa, Homo sapiens
ERGGGAVLLFLHRKRRTSTAAIVANCCVEISRMRLGCCLEKLARAMGVGCG

SEQ ID NO: 1390 - protein, 93 aa, Homo sapiens
  SITE (72): Xaa equals any of the naturally occurring L-amino acids
  SITE (80): Xaa equals any of the naturally occurring L-amino acids
  SITE (90): Xaa equals any of the naturally occurring L-amino acids
PSLPLVLLPSYPSTLMLAFPPYQLLGRMRSASPSWEIVALGKSGMGRASFQKWGGGTWLPGAPDSWQICCPXESGYRAPXRSLFSGSSLXPVS

SEQ ID NO: 1391 - protein, 30 aa, Homo sapiens
LKPKRNNFKPTELFSDHCNIGEKVLGRPIN

SEQ ID NO: 1392 - protein, 47 aa, Homo sapiens
  SITE (30): Xaa equals any of the naturally occurring L-amino acids
  SITE (34): Xaa equals any of the naturally occurring L-amino acids
ATSADLTPLVKTSSLRLFTVRLTGVFWYLXGWLXGYEEFYLFALTCS

SEQ ID NO: 1393 - protein, 58 aa, Homo sapiens
GTVYWMIVLILAYCVGLQVFELAFVGLNLYIHLAHLTAIFPNGCFKVHVSQIGIFVLT

SEQ ID NO: 1394 - protein, 68 aa, Homo sapiens
  SITE (27): Xaa equals any of the naturally occurring L-amino acids
  SITE (54): Xaa equals any of the naturally occurring L-amino acids
FLQIKFYLASSVTALWLPCYNQRDVFXSVKIESVFLFLLFHLIRKVMLCIETRXKLKSSSPHLPDNQL

SEQ ID NO: 1395 - protein, 29 aa, Homo sapiens
VDTKFPFKVKFDSYKKLVILSHRKYTLKN

SEQ ID NO: 1396 - protein, 31 aa, Homo sapiens
RYTFGGSWHVERFKAIGMSERGREKKEGLAL

SEQ ID NO: 1397 - protein, 64 aa, Homo sapiens
  SITE (23): Xaa equals any of the naturally occurring L-amino acids
IPVRDLRRVEPLPTVPRVGAPLXAPSGSSAFSTFRDFFHPLLRRPDFLPNKGKTTILFSTLFFF

SEQ ID NO: 1398 - protein, 72 aa, Homo sapiens
ITDTQYTTQIYFSICFCCCCFETESRSIPQAGWSAAPQSRLTATSTSHVPSDSECLSLLSSWDYRHLPPHLG

SEQ ID NO: 1399 - protein, 64 aa, Homo sapiens
ENILHRSTVSLAILNEKKNSKCMWFGPEEHLLIWWLVKKSALWPGTLADARNPSTLGGQGGRIT

SEQ ID NO: 1400 - protein, 40 aa, Homo sapiens
VTLSYYPKAHDTQPVVNIVSFHLENIAIKLKTLSKVVNFY

SEQ ID NO: 1401 - protein, 31 aa, Homo sapiens
DTNEDTPSFKNLRSICKYIVKNVNLKSRRLS

SEQ ID NO: 1402 - protein, 59 aa, Homo sapiens
  SITE (52): Xaa equals any of the naturally occurring L-amino acids
AVIGDTSQQCGKHVGLNVSKEGLSAYLGHVFKGMQRVETGFLHLFFSMEVWXKGTTDFR

SEQ ID NO: 1403 - protein, 48 aa, Homo sapiens
  SITE (18): Xaa equals any of the naturally occurring L-amino acids
GTSSGQIHTSWLCKYMCXRTQPGSFLNEILKCIVLWLLSHYSSRVEKL

SEQ ID NO: 1404 - protein, 80 aa, Homo sapiens
  SITE (42): Xaa equals any of the naturally occurring L-amino acids
  SITE (51): Xaa equals any of the naturally occurring L-amino acids
  SITE (52): Xaa equals any of the naturally occurring L-amino acids
  SITE (56): Xaa equals any of the naturally occurring L-amino acids
VGSRMWVGGKNQIWFICLQNILGSSGKRYLLVVVSHPENFPXPLVFPVRCXXSTTXGVSHFEGQAPGLLPSICFAFSPSA

SEQ ID NO: 1405 - protein, 54 aa, Homo sapiens
NTDVNEGLGIFTLFCRNTGYHTPIILSDWVKLSIEINYKSQAGHFQDGIQVFTV

SEQ ID NO: 1406 - protein, 58 aa, Homo sapiens
  SITE (58): Xaa equals any of the naturally occurring L-amino acids
VGDSWFHSGSGRVTGSPVGSGPEVKEEGHGLSLRGCFEHRMTLWGTGGPMPRPTGLFX

SEQ ID NO: 1407 - protein, 86 aa, Homo sapiens
  SITE (19): Xaa equals any of the naturally occurring L-amino acids
  SITE (26): Xaa equals any of the naturally occurring L-amino acids
  SITE (73): Xaa equals any of the naturally occurring L-amino acids
  SITE (81): Xaa equals any of the naturally occurring L-amino acids
IKVGFTSPGGLLSAAFMRXLFSFFPXKKTRSGALLRMYILLLEMSRVGRAWWLMALNPSALGRLRWAESLGGXGVGRPSWXQQGWK

SEQ ID NO: 1408 - protein, 77 aa, Homo sapiens
  SITE (16): Xaa equals any of the naturally occurring L-amino acids
  SITE (45): Xaa equals any of the naturally occurring L-amino acids
  SITE (49): Xaa equals any of the naturally occurring L-amino acids
  SITE (63): Xaa equals any of the naturally occurring L-amino acids
KELNENLCTQDSVIHXSEQSIWHDFHGDTNVNIKRKHKYLSQQVXIALXHICHVPDTEQCMGXTKLIKRQFLVSRCC

SEQ ID NO: 1409 - protein, 81 aa, Homo sapiens
REPLYSMDSSFLRVCRGQKIVVPPESDTEASESPTLPAGVCRSAILQFPGEERGARWRGRDGELRKGFLEVHFSRAFSNLQ

SEQ ID NO: 1410 - protein, 90 aa, Homo sapiens
  SITE (80): Xaa equals any of the naturally occurring L-amino acids
  SITE (85): Xaa equals any of the naturally occurring L-amino acids
  SITE (90): Xaa equals any of the naturally occurring L-amino acids
RMRPCPDSGASLTLCVSVLPFLSLPAAPEHLWLAYCYCRSVACAPGTVPLIPRSHSNRLSTCSHVSGLSSMAVPQVPLKXWYCPXWQNSX

SEQ ID NO: 1411 - protein, 40 aa, Homo sapiens
  SITE (1): Xaa equals any of the naturally occurring L-amino acids
  SITE (11): Xaa equals any of the naturally occurring L-amino acids
XWSVAYRMVSXSASAAKTEYHKLGSLNSRYFDQAWWLMPV

SEQ ID NO: 1412 - protein, 37 aa, Homo sapiens
  SITE (9): Xaa equals any of the naturally occurring L-amino acids
GKKSTGYQXLNNKMSWQEEFLSFYSNFLIFKNDANNI

SEQ ID NO: 1413 - protein, 58 aa, Homo sapiens
DINWIPWLKQQRKQIFEPEEKAHRNQKSSQHYFTPLQKLESPSFSCFLFSQLPNVLTP

SEQ ID NO: 1414 - protein, 153 aa, Homo sapiens
ARGGSGLDRDSALLSRYAFVRPVILQGLTDNSRFRALCSRDRLLASFGDRVVRLSTANTYSYHKVDLPFQEYVEQLLHPQDPTSLGNDTLYFFGDNNFTEWASLFRHYSPPPFGLLGTAPAYSFGFAGAGSGVPFQWHGTRVLRSDLRFVKRW

SEQ ID NO: 1415 - protein, 40 aa, Homo sapiens
ERSLLAFCPIGCSFFATDTKWEQTPLPVMPGPQEAGGEVH

SEQ ID NO: 1416 - protein, 111 aa, Homo sapiens
  SITE (103): Xaa equals any of the naturally occurring L-amino acids
RDFSSKLRINIDITVAMKCQYVGADVLDLAETMVASADGLVYEPTVFDLSPQQKEWQRMLQLIQSRLQEEHSLQDVIFKSAFKSTSTALPPRAIPHPRGHAHXGSTCSTLD

SEQ ID NO: 1417 - protein, 52 aa, Homo sapiens
  SITE (44): Xaa equals any of the naturally occurring L-amino acids
GTLSYLEIIKILKFSFFFAYNVFYDSKFSLNKVTFYIESLIPLXICFYLGLR

SEQ ID NO: 1418 - protein, 54 aa, Homo sapiens
PLPLCLIHTALQVCLSKASLIFVMQICWQWAASRAPSLREGAGCPNPPGQSCLT

SEQ ID NO: 1419 - protein, 65 aa, Homo sapiens
TTLPCLCKPAYLSLSGRVVCWGWLTLFKEHLTYTNSRSQILLFIHLFLRPQLDWSGCREVRRLWQ

SEQ ID NO: 1420 - protein, 32 aa, Homo sapiens
LDIWIKYNLRLTIITAPDPLFELLHLIHTTNL

SEQ ID NO: 1421 - protein, 102 aa, Homo sapiens
  SITE (7): Xaa equals any of the naturally occurring L-amino acids
  SITE (101): Xaa equals any of the naturally occurring L-amino acids
ARVGKSXKLKVFSKTLDFSDSRGKCVQFLHIGKKARISMGNEKNVYNNTSPFFQANVPSLVFYLPGLLALSLPLLLALSSAEYSAQETGQVMTLQAGDQPXL

SEQ ID NO: 1422 - protein, 73 aa, Homo sapiens
  SITE (30): Xaa equals any of the naturally occurring L-amino acids
  SITE (72): Xaa equals any of the naturally occurring L-amino acids
PAWAYTDMGSPLRDVFPPCLCLKGREARRXHAVGQKAAEARSVPAGEQRPRSPAWGQALTDPQGSPQGAVCXE

SEQ ID NO: 1423 - protein, 26 aa, Homo sapiens
WTSRGDCSWWVGGLSVGREEWGVVPV

SEQ ID NO: 1424 - protein, 51 aa, Homo sapiens
  SITE (35): Xaa equals any of the naturally occurring L-amino acids
LLGLGSYSLPPVFSSLGKAAHLPTLLPNINKPCPXFHDSSMSVLVKIRVRK

SEQ ID NO: 1425 - protein, 54 aa, Homo sapiens
QSTSRQWFLWCWGALGSRTWNVLFLGLGASQRDPYTSFFFCETVSLARHGGTNL

SEQ ID NO: 1426 - protein, 115 aa, Homo sapiens
  SITE (21): Xaa equals any of the naturally occurring L-amino acids
  SITE (29): Xaa equals any of the naturally occurring L-amino acids
  SITE (50): Xaa equals any of the naturally occurring L-amino acids
  SITE (107): Xaa equals any of the naturally occurring L-amino acids
  SITE (111): Xaa equals any of the naturally occurring L-amino acids
ATQKSPHSWTPRCGKRASESXACEASGEXSLRRKKEERYKRHRQKQKHKXKWKHSDDCGMKLAANRIYEILPQRIQQWQQSPCIAEEHGKKLLERIRREPAEFPQSXSGNXTPIH

SEQ ID NO: 1427 - protein, 57 aa, Homo sapiens
ARALAETFCIVLEGEGPQISVGPILLPTFNLGSCPPWIAPISNEEVSLSEGDSVWVL

SEQ ID NO: 1428 - protein, 46 aa, Homo sapiens
LKLLQVMTHGGNRVRERRDFRTIVREGLSQEVAFKLSTQHEVELPM

SEQ ID NO: 1429 - protein, 39 aa, Homo sapiens
  SITE (19): Xaa equals any of the naturally occurring L-amino acids
TKLWSYSLKFHLMGLFSLXAMKPGPGVVAHTYNPGTLGG

SEQ ID NO: 1430 - protein, 30 aa, Homo sapiens
KKKKKPQISLIICPQGSFCGQRTGRTQSLV

SEQ ID NO: 1431 - protein, 72 aa, Homo sapiens
  SITE (8): Xaa equals any of the naturally occurring L-amino acids
  SITE (11): Xaa equals any of the naturally occurring L-amino acids
  SITE (21): Xaa equals any of the naturally occurring L-amino acids
VSQDQTTXKWXELGFEPRKSXSGVHVFNCHTLLVEQLSTKLLRKRPAKMGRVLIHTCTHTLASDSPKTDSAN

SEQ ID NO: 1432 - protein, 61 aa, Homo sapiens
  SITE (24): Xaa equals any of the naturally occurring L-amino acids
GRAAESKPQGPMGRNAQNPMKENXAFPASCTPALGKGQLLPPSWSLLPSYSCSLAHPLPPK

SEQ ID NO: 1433 - protein, 65 aa, Homo sapiens
  SITE (14): Xaa equals any of the naturally occurring L-amino acids
QREPIFQYRGIAIXTEINSCRTSRTGGRSFILTSITPKIRRLDFFKDTLAGQGIRFWLGPWGGVG

SEQ ID NO: 1434 - protein, 95 aa, Homo sapiens
  SITE (5): Xaa equals any of the naturally occurring L-amino acids
  SITE (91): Xaa equals any of the naturally occurring L-amino acids
VLLRXPGLLAGTVPGFVSQPEARGRPGEAMLFPVCTPHCWQVTQNRDWLPQGARRQRKPEAQTLVRRSSSGPKSEPGQLWDSGYGVCRTSXKRKE

SEQ ID NO: 1435 - protein, 39 aa, Homo sapiens
  SITE (18): Xaa equals any of the naturally occurring L-amino acids
KVEQKSREKENRRRKTQXIEHPFRRSDIQLTGSTENREC

SEQ ID NO: 1436 - protein, 76 aa, Homo sapiens
  SITE (69): Xaa equals any of the naturally occurring L-amino acids
  SITE (74): Xaa equals any of the naturally occurring L-amino acids
TETKYKNDFRLTPVIPTLWEAKVAGSRGQEIKTMVNPVYTKNTKKISQAWWRAAVVPATREAEAGEWRXPWRRXLQ

SEQ ID NO: 1437 - protein, 63 aa, Homo sapiens
  SITE (37): Xaa equals any of the naturally occurring L-amino acids
  SITE (43): Xaa equals any of the naturally occurring L-amino acids
QSSNVKLVHFFIHSFTHSLTNTFKCWVLLLCQALQEXNESLMXLSCLTQETADKTMNSQGIIS

SEQ ID NO: 1438 - protein, 69 aa, Homo sapiens
TKKEQMEPRRWNLRIQLCETIRYTCHQPNIIVLWIFIMLGRKEYIRLLFVYSALNRNVQNNTLAFGPII

SEQ ID NO: 1439 - protein, 60 aa, Homo sapiens
  SITE (56): Xaa equals any of the naturally occurring L-amino acids
  SITE (60): Xaa equals any of the naturally occurring L-amino acids
KIRIAAQARWAHACNPSTLGRPRQVGSPEVQELETSRANMVKPCLLLKYKMGQCGXWHAX

SEQ ID NO: 1440 - protein, 59 aa, Homo sapiens
  SITE (22): Xaa equals any of the naturally occurring L-amino acids
GTRENAQDFIANGSWSFRQKAXFHSLAPKSYVQQATECSQLSGAIPVAKQTCFAFEWFG

SEQ ID NO: 1441 - protein, 55 aa, Homo sapiens
  SITE (35): Xaa equals any of the naturally occurring L-amino acids
HIEVICYTHESVRSDKKEAIKRVFWMGSVFNSLIXDFTVAQKRCLLQASYDGSHL

SEQ ID NO: 1442 - protein, 101 aa, Homo sapiens
  SITE (20): Xaa equals any of the naturally occurring L-amino acids
HERHERHERHEQQMNDLIIXKVSTALKGHWANPDLASSLQYEMLLLTDSISKEDSCWELRLRCALSLFLMAVNIKTPVVVENITLMCLRILQKLIKPPAPT

SEQ ID NO: 1443 - protein, 48 aa, Homo sapiens
TSLANMAKPLLYLKIQKISQAWWQMPVIPAIWEAEASAIPAHMAPSQS

SEQ ID NO: 1444 - protein, 25 aa, Homo sapiens
  SITE (24): Xaa equals any of the naturally occurring L-amino acids
EFCWHTGLDETEASFLGSAWKGQXM

SEQ ID NO: 1445 - protein, 31 aa, Homo sapiens
  SITE (14): Xaa equals any of the naturally occurring L-amino acids
REKKKKRYVLNFGXFITGQLVWFKLIIPSNR

SEQ ID NO: 1446 - protein, 71 aa, Homo sapiens
  SITE (34): Xaa equals any of the naturally occurring L-amino acids
  SITE (52): Xaa equals any of the naturally occurring L-amino acids
  SITE (71): Xaa equals any of the naturally occurring L-amino acids
VEKDCGKMWVEAWGPSFGNIQAGDDGDPDQGHGXVERWSEGRSRGGGQGVTXGIFSTCRAVQQGFLTDWVX

SEQ ID NO: 1447 - protein, 49 aa, Homo sapiens
SVVPLLENTKKPETFVYKGQDIRVVCGNTVYNGLKNWKQPKCPLLGECL

SEQ ID NO: 1448 - protein, 63 aa, Homo sapiens
QFIVINRIFSFQMCHLLFKNLSHLLEAWHSPPCPRSVPGCGVCVRLNRHQDTRRTKEKEGFVL

SEQ ID NO: 1449 - protein, 44 aa, Homo sapiens
  SITE (43): Xaa equals any of the naturally occurring L-amino acids
YHLFPLSSLLVLTHSFKNLKAPGIVPSKGIALSLLLWPDGCLXF

SEQ ID NO: 1450 - protein, 135 aa, Homo sapiens
  SITE (38): Xaa equals any of the naturally occurring L-amino acids
  SITE (75): Xaa equals any of the naturally occurring L-amino acids
  SITE (91): Xaa equals any of the naturally occurring L-amino acids
  SITE (92): Xaa equals any of the naturally occurring L-amino acids
  SITE (116): Xaa equals any of the naturally occurring L-amino acids
  SITE (126): Xaa equals any of the naturally occurring L-amino acids
LMPAMSSELDGAFLLLYLRKTIIAMWAVFLVPYNKHGXVCLFSFQKCVRFPSCSVVCFLLKFLTICFKQHCYICXQRIQKSFKNRTTYIPXXALKKLPGIMALKFTKTWRPYYGVXCWPFCEWNHXDRHEASYTG

SEQ ID NO: 1451 - protein, 152 aa, Homo sapiens
  SITE (84): Xaa equals any of the naturally occurring L-amino acids
  SITE (102): Xaa equals any of the naturally occurring L-amino acids
  SITE (116): Xaa equals any of the naturally occurring L-amino acids
  SITE (136): Xaa equals any of the naturally occurring L-amino acids
  SITE (144): Xaa equals any of the naturally occurring L-amino acids
ARVILMFVCQCIEREIISPRHEKMKTGLIDKTQEPFSVRNKPFFDICTSRKLLEGNFAKEVSHEMDGLIFQPTGKYKPGRCDDXLKWKPPSLNSVDFRLKIXRWEEKASQSLWTMXRGQTMQATIFLKGTPPDGCXRNVGGMKXPCTNQGRL

SEQ ID NO: 1452 - protein, 44 aa, Homo sapiens
HEPFSVVDLGQFEGIVCPYFAWSVLGGAPLSAFKQRVAWACFLR

SEQ ID NO: 1453 - protein, 71 aa, Homo sapiens
  SITE (70): Xaa equals any of the naturally occurring L-amino acids
SYRHTGGVMVTTFRASKAFAGALELTGKATLVALINRCIGAVIRYMLIAVNPRHLPAPSGCAECLDTCRXK

SEQ ID NO: 1454 - protein, 54 aa, Homo sapiens
  SITE (12): Xaa equals any of the naturally occurring L-amino acids
  SITE (43): Xaa equals any of the naturally occurring L-amino acids
KYFWKITQFCIXFFILVSIVQLWQLNTYNFQHPLVPLAPVDSXWMHKNVPDVWV

SEQ ID NO: 1455 - protein, 38 aa, Homo sapiens
  SITE (2): Xaa equals any of the naturally occurring L-amino acids
LXCLYYLRNCEELTKFVNLQVCTINQVLISTSVTRAIQ

SEQ ID NO: 1456 - protein, 46 aa, Homo sapiens
  SITE (26): Xaa equals any of the naturally occurring L-amino acids
  SITE (35): Xaa equals any of the naturally occurring L-amino acids
GTSPSLVGFLNPSLASVSGPFIRLSXRNPFSCYQXPTGTLTLLTLF

SEQ ID NO: 1457 - protein, 62 aa, Homo sapiens
  SITE (2): Xaa equals any of the naturally occurring L-amino acids
GXQKVALNLASGEGNFFIRPGGVFYVAGDKVGIVRLDAFKTSERDSVCGAVQGQCWMENGVN

SEQ ID NO: 1458 - protein, 88 aa, Homo sapiens
GTRRFGSLQLRRGRVHPRSPECRTVIPGAGHSPIRGWEGLPEAGKMGDLSALLASHTQDLLVPQFPTETTELKREACSLGAVARKASG

SEQ ID NO: 1459 - protein, 172 aa, Homo sapiens
  SITE (1): Xaa equals any of the naturally occurring L-amino acids
  SITE (155): Xaa equals any of the naturally occurring L-amino acids
XWGRNLGRGKTRLELVPLLPRESPLCRHQRQPPKRPTHFPEHLDHFTENMEDFSNDLFSSFFDDPVLDEKSPLLDMELDSPTPGIQAEHSYSLSGDSAPQSPLVPIKMEDTTQDAEHGAWALGHKLCSIMVKQEQSPELPVDPLAAPSAMAAAAXMATTRCWGSALVQAAIP

SEQ ID NO: 1460 - protein, 50 aa, Homo sapiens
  SITE (11): Xaa equals any of the naturally occurring L-amino acids
  SITE (38): Xaa equals any of the naturally occurring L-amino acids
GRADTRASLCXLSPDVPVFILKDIRLFSCPMTQIAHMXYCALFSRCTHRY

SEQ ID NO: 1461 - protein, 90 aa, Homo sapiens
PSTRSTSEPHTGQCVGNTTSRVSSGRSESTTLTTCGITSPARRITTLSPMRKPRRSISSALCKVALLTSTPATWTGSRRATGVIAPVRPT

SEQ ID NO: 1462 - protein, 49 aa, Homo sapiens
  SITE (44): Xaa equals any of the naturally occurring L-amino acids
FPGPGCSPLVVDFSQIVVFMNFHSFVHSFSQPLPIELLGMCQAXEGDLF

SEQ ID NO: 1463 - protein, 133 aa, Homo sapiens
GVINCICWKKLNTESVSAAPSAARELSLTSQLKKLQETIEQKTKIEIGDTIRVRGSIRTYREEREIHATAYYKVDDPVWNIQIARMLELPTIYRKVYDQPFHSSALEKEEALRGENPGGMRMCAYLLIYAKRL

SEQ ID NO: 1464 - protein, 142 aa, Homo sapiens
  SITE (110): Xaa equals any of the naturally occurring L-amino acids
RHDCLVTKERDMTHGIWELGNGQEKKSVKVSGHLSSNSGEIVLQWALEGKGIMLRSEWDVLPFLESGKLVQVLPEYAQSANIWAVYREPLYRSMKLRVCVEFLAAWCQQXWASPMKAIRSCRSTRNHSGIFSRFLLNFVQIL

SEQ ID NO: 1465 - protein, 41 aa, Homo sapiens
  SITE (1): Xaa equals any of the naturally occurring L-amino acids
  SITE (12): Xaa equals any of the naturally occurring L-amino acids
  SITE (21): Xaa equals any of the naturally occurring L-amino acids
  SITE (27): Xaa equals any of the naturally occurring L-amino acids
  SITE (28): Xaa equals any of the naturally occurring L-amino acids
  SITE (30): Xaa equals any of the naturally occurring L-amino acids
XMVFLRAWVVPXTGRQNHRQXWPPRKXXQXVLCLGAPQILW

SEQ ID NO: 1466 - protein, 127 aa, Homo sapiens
  SITE (107): Xaa equals any of the naturally occurring L-amino acids
DSIHDAVRAGDVKQLSEIVVRGASINELDVLHKFTPLHWAAHSGSLECLHWLLWHGADITHVTTRGWTASHIAAIRGQDACVQALIMNGANLTAQDDRGCTPLHLAXTHGHSFTLQIMLRSGVDPSV

SEQ ID NO: 1467 - protein, 61 aa, Homo sapiens
TWPLPASLPSCVIRLLHVLHAHIFSIFLLSLNTPCFPPLSVPFYLLLHLFRWFIFTCLGSS

SEQ ID NO: 1468 - protein, 19 aa, Homo sapiens
  SITE (3): Xaa equals any of the naturally occurring L-amino acids
  SITE (15): Xaa equals any of the naturally occurring L-amino acids
ATXTCLLNIKLLIFXFGHS

SEQ ID NO: 1469 - protein, 78 aa, Homo sapiens
  SITE (63): Xaa equals any of the naturally occurring L-amino acids
  SITE (67): Xaa equals any of the naturally occurring L-amino acids
  SITE (78): Xaa equals any of the naturally occurring L-amino acids
GRLNSLENMTASTPPFWSAIRSSQALSITQFIPNCASKLGSPGNARRWHMGDDRFFRPNNLFXPTHXKVLLIPIIHVX

SEQ ID NO: 1470 - protein, 101 aa, Homo sapiens
RIFRLTLPPSLSPSPYSSSCSLGSFSLIKEKLIDLCPSFCFLGNAGQSSHTTLPPCNLTMPSPCLKAFSASPLPIKLILSSYELQGHLEVIWPTFLPATTV

SEQ ID NO: 1471 - protein, 50 aa, Homo sapiens
  SITE (20): Xaa equals any of the naturally occurring L-amino acids
  SITE (28): Xaa equals any of the naturally occurring L-amino acids
GNESQYLVKAELGWAAGGLXACDPQDFXKPEPGRSRGPGVGDQPDQHGEP

SEQ ID NO: 1472 - protein, 55 aa, Homo sapiens
  SITE (9): Xaa equals any of the naturally occurring L-amino acids
  SITE (35): Xaa equals any of the naturally occurring L-amino acids
DSACAQLSXLLFPTQGPILTATWNYLHSSLNVNAXSHQRLWTYNSSFLEHLSPIS

SEQ ID NO: 1473 - protein, 50 aa, Homo sapiens
SLDLYNNISEKVTKNEDCNNTHAKQAETRAKNANMGELDLNFGLPQFINI

SEQ ID NO: 1474 - protein, 55 aa, Homo sapiens
SQEVKNPEHESGCDSWAQGVDSVWASEEPAPPSCLEVRLCCSPVLLALRSECCDH

SEQ ID NO: 1475 - protein, 44 aa, Homo sapiens
LMTVLSIETASVCVVTEGGESIPSSEELLKLSSNGSFKTCPQVP

SEQ ID NO: 1476 - protein, 110 aa, Homo sapiens
  SITE (8): Xaa equals any of the naturally occurring L-amino acids
  SITE (100): Xaa equals any of the naturally occurring L-amino acids
GSEAERMXLSHPLLCGWVHTGHLGVYDITMGLVTEPVCGGVLRSPARVPTRGVKGQRVRPFHRSSWTLASGISCSWGQVCGPGWAPLWGCWGCEADPPEXFHLAPGPSAG

SEQ ID NO: 1477 - protein, 36 aa, Homo sapiens
DPVSKKRKKKFSQSEIDQYVKQKFAPVEFSVSLKIY

SEQ ID NO: 1478 - protein, 44 aa, Homo sapiens
HRLKQAGADSGELWSLCGIRAHASFTGDTFFSPSDNYWRARLGA

SEQ ID NO: 1479 - protein, 49 aa, Homo sapiens
  SITE (2): Xaa equals any of the naturally occurring L-amino acids
QXIGARGVILMINSILLVVMWSRYWNGSGRMWSPDIVYHSCYLLVILRC

SEQ ID NO: 1480 - protein, 86 aa, Homo sapiens
SVCVCERSSQFHECPLDSGQVPGPRRSQTLLFQSGLAWVTLLLWICSLKGHYIWQLRLEFAAHTFVPAFRNSCDRMPESIESWEQF

SEQ ID NO: 1481 - protein, 65 aa, Homo sapiens
QKGLMIFLLKTHSPNSIMSNSSVKAQSRDILKNTCPVLLKTLKALKILALKLYLRRGVLGNLISI

SEQ ID NO: 1482 - protein, 56 aa, Homo sapiens
REILHCPALAGLNLLCCHFGKKSLTSVVVGDIRIEDHVRLIRSKKTLSPLLEKGSS

SEQ ID NO: 1483 - protein, 19 aa, Homo sapiens
  SITE (1): Xaa equals any of the naturally occurring L-amino acids
XQKKKRQYGRVYLLGSCED

SEQ ID NO: 1484 - protein, 43 aa, Homo sapiens
IKHSSKNDKSGKKKCLNKIKIYSMVINKKVWGKSGVVVHAYNP

SEQ ID NO: 1485 - protein, 64 aa, Homo sapiens
  SITE (30): Xaa equals any of the naturally occurring L-amino acids
  SITE (35): Xaa equals any of the naturally occurring L-amino acids
  SITE (36): Xaa equals any of the naturally occurring L-amino acids
  SITE (62): Xaa equals any of the naturally occurring L-amino acids
KNRFFFILIGYFTWCLCYTCAYNENGELIXPSASXXSNFHGLYKIMDNPIWQHNLLVDLCFXMF

SEQ ID NO: 1486 - protein, 70 aa, Homo sapiens
  SITE (34): Xaa equals any of the naturally occurring L-amino acids
  SITE (44): Xaa equals any of the naturally occurring L-amino acids
  SITE (59): Xaa equals any of the naturally occurring L-amino acids
VDHHHTEYIRHNVANNNARCRYTANLCRLNKLFXPSNSGFGPRXNYGAIIQPGKPWPYXPRKIQAGMFLT

SEQ ID NO: 1487 - protein, 41 aa, Homo sapiens
  SITE (33): Xaa equals any of the naturally occurring L-amino acids
FLNSFIYSFQKFLPGAYSDWYYVRVRGPWQTKXFLVPVSGG

SEQ ID NO: 1488 - protein, 90 aa, Homo sapiens
  SITE (1): Xaa equals any of the naturally occurring L-amino acids
  SITE (90): Xaa equals any of the naturally occurring L-amino acids
XRDCTLQHPRVHGQILTVTDEYTEAPRGGGARQVADRVRLPPCRGSRRNETLLPLALCPSLSSCLASYSLPCVPRLPHILGGGPSPLSAX

SEQ ID NO: 1489 - protein, 99 aa, Homo sapiens
  SITE (89): Xaa equals any of the naturally occurring L-amino acids
CSDRAVEGIIADTLKFLKDNGDSGLMVKDPGFKTREIRFNEKKMDNYLNCKTKARIIYEYPFSGMSRPSLGKMMARSQRATTSKRESIXLDHELNAEGV

SEQ ID NO: 1490 - protein, 94 aa, Homo sapiens
  SITE (63): Xaa equals any of the naturally occurring L-amino acids
  SITE (94): Xaa equals any of the naturally occurring L-amino acids
KAYRLGGDEFAMVLYDVQSESEVQQICSALTQIFNLPFDLHNGHQTTMTLSIGYAMTIEHASXKKLQELADHNMYQAKHQRAEKLVKITRIYPX

SEQ ID NO: 1491 - protein, 154 aa, Homo sapiens
  SITE (137): Xaa equals any of the naturally occurring L-amino acids
  SITE (139): Xaa equals any of the naturally occurring L-amino acids
TRGNKRWETFHIRNPKGGKLRVSVSGAGRPTKRSPHPHRPLPFPVYLQGCCFQQDPKLEKEEEETDPISARSHCIQRRISKKEKKEGREVDRYKMKSCQKWKENQKMRVEPKHEEEPKPEEKPERRRVRGGGPKQRXFXGRLFHFFQVLRSFSP

SEQ ID NO: 1492 - protein, 92 aa, Homo sapiens
RALPFLAHLLPISMINYYDPLVNLAPQEDIVDPHTPNLTSCIAEQMSPYNMPSHMLAHHSHFGCLSPSARLGTRVSRELCLCFADVSQEAQN

SEQ ID NO: 1493 - protein, 99 aa, Homo sapiens
VQKVLMNSERPDENHSEPSHQDVIKVKEEFTDPTYDMFYMSQYGLYNGGGASMAALHESFTSSLNYGSPQKFSPEGDLCLAQTPKSVMCARRVSKAPTV

SEQ ID NO: 1494 - protein, 67 aa, Homo sapiens
  SITE (41): Xaa equals any of the naturally occurring L-amino acids
GCSRIYLLHPGAADQAVPPTINLDNPDEGCDLDFVPHEGVXVSGMEYTLLTPFGFGGTNGSLIFKKI

SEQ ID NO: 1495 - protein, 93 aa, Homo sapiens
  SITE (20): Xaa equals any of the naturally occurring L-amino acids
  SITE (41): Xaa equals any of the naturally occurring L-amino acids
QWRWFYPDDDRHTQLLPTPXYRLCSRLCRLVLNGAVVQRQXLLVALLLTGSTPVVPMAALAAIFFQAAKLPQWQRFTQRFRPELWAIFTDVAL

SEQ ID NO: 1496 - protein, 42 aa, Homo sapiens
GTLKSGLKYRTLMNFTFLMVIMFLSILGILFCFRLFLLEVSP

SEQ ID NO: 1497 - protein, 99 aa, Homo sapiens
SGEEDRYSHTDLWDFQANVEGSQKIVDLLRPQLQKANPELLAKVDANFKKVDTILAKYRTKDGFETYDKLTDADRNALKGPITALAEDLAQLRGVLGLD

SEQ ID NO: 1498 - protein, 132 aa, Homo sapiens
  SITE (11): Xaa equals any of the naturally occurring L-amino acids
  SITE (125): Xaa equals any of the naturally occurring L-amino acids
  SITE (127): Xaa equals any of the naturally occurring L-amino acids
  SITE (128): Xaa equals any of the naturally occurring L-amino acids
NPTHHSLVPVXKCRNIKPSTRASHYSGLGSWFLGCLVGEGPGPGGVSGSSGLIWWTGPCSGENVGIGLHACSQETGLFFLSVPEKPSLGIGTTHRVVPSFLALELHSLPPTLPSPSIPPPKRLTXTXXRTLP

SEQ ID NO: 1499 - protein, 75 aa, Homo sapiens
  SITE (5): Xaa equals any of the naturally occurring L-amino acids
SPEPXLGKVLRACPVNTRCSCLPSSTPWKMRSSRMQASYPKPSCECVGQRDRGTERAVENLRQEGMRQTNKQMAK

SEQ ID NO: 1500 - protein, 72 aa, Homo sapiens
  SITE (57): Xaa equals any of the naturally occurring L-amino acids
RHTCRNKACQTGKKTRIRNQLFALTFIERDGWNQRPEGNIHNGVSHAPEDVGHANKXNLSSTFKQMRTKEEK

SEQ ID NO: 1501 - protein, 27 aa, Homo sapiens
  SITE (7): Xaa equals any of the naturally occurring L-amino acids
  SITE (13): Xaa equals any of the naturally occurring L-amino acids
IKRKRTXLNNIMXKKSSTAIDKADLKR

SEQ ID NO: 1502 - protein, 88 aa, Homo sapiens
SYDLVAGFEDLPQLSAENNCPDFCFYLAETLMVIDHQKKSTRIQASLFAPNEEEKQRLTARLNELRQQLTEAAPPLPVVSVPHMRCGM

SEQ ID NO: 1503 - protein, 68 aa, Homo sapiens
LFYSGKFPAYLSHISKVTGNQPYVPIPGASVSILCVLHTSKSPRWCCGTHSSLISSIIVSLSQGDKNC

SEQ ID NO: 1504 - protein, 74 aa, Homo sapiens
  SITE (67): Xaa equals any of the naturally occurring L-amino acids
QARLLNILRQRNIIRPFVQRQRLAHLSACKFSHQRHRFVILLTEDKQSCRRFVAHAIHRWAYSTSCXRFFSERR

SEQ ID NO: 1505 - protein, 54 aa, Homo sapiens
VRWLPIKPFTPRMSTRVRRRAVQAGWLFKREPCTRPSVCANCEPCIVMPRPPVR

SEQ ID NO: 1506 - protein, 73 aa, Homo sapiens
  SITE (23): Xaa equals any of the naturally occurring L-amino acids
SCGRGIPSRAITTSRVDSFCCDXVRETLRTGAPKNAEDGPLPMACWSCKSPDVARLIQKDGEDGYFHGKWARG

SEQ ID NO: 1507 - protein, 92 aa, Homo sapiens
  SITE (27): Xaa equals any of the naturally occurring L-amino acids
GALAKTGKYDAVIALGTVIRGGTAHFXYVAGGASNGLAHVAQDSEIPVAFGVLTTESIEQAIERAGTKAGNKGAEAALTALEMINVLKAIKA

SEQ ID NO: 1508 - protein, 64 aa, Homo sapiens
  SITE (11): Xaa equals any of the naturally occurring L-amino acids
  SITE (31): Xaa equals any of the naturally occurring L-amino acids
  SITE (44): Xaa equals any of the naturally occurring L-amino acids
PHKTYSLRKVXDHIRKWRISSASLKQEFIRXAGVQARIPEAQTXLFTLSASTLWRDAPRVVVAM

SEQ ID NO: 1509 - protein, 73 aa, Homo sapiens
  SITE (41): Xaa equals any of the naturally occurring L-amino acids
TRRVIGFGGRVLGNDTPKYLNSPETDIFHKGRQLYGLYEAXRITLNPIVCLWSKAIWTWWRWRNTALITPLRR

SEQ ID NO: 1510 - protein, 99 aa, Homo sapiens
  SITE (78): Xaa equals any of the naturally occurring L-amino acids
RSATLGEISDALEVAFDRYLVPSQCVTGVIAQSYHQSEKSASEFDAIVAQTEQFLADNGRRPRILIAKMGQDGHDRGXKVIASAYSDLGFDVDLKPDVL

SEQ ID NO: 1511 - protein, 94 aa, Homo sapiens
GTAFSHSGRETEAGKVSGYSCIAGYSGAPPVIRGLLGEPDAGTRAGTHILCPPPVEKQCSSLVWSHLCPHAPFPSSVSPIPSDVASGCSPIFPH

SEQ ID NO: 1512 - protein, 130 aa, Homo sapiens
  SITE (106): Xaa equals any of the naturally occurring L-amino acids
  SITE (110): Xaa equals any of the naturally occurring L-amino acids
FAGAIHLSATLRLFVKIVAVALLHKHCRESFMKTLGEFIVEKQHEFSHATGELTALLSAIKLGAKIIHRDINKAGLVDILGASGAENVQGEVQQKLDLFANEKLKXALKXRDIVAGIASEEEDEMSSLKL

SEQ ID NO: 1513 - protein, 117 aa, Homo sapiens
  SITE (39): Xaa equals any of the naturally occurring L-amino acids
  SITE (74): Xaa equals any of the naturally occurring L-amino acids
  SITE (92): Xaa equals any of the naturally occurring L-amino acids
  SITE (97): Xaa equals any of the naturally occurring L-amino acids
RNSSDSRPTMPVAAQATAIDCGEIILPVTPPLVFAATSXVSETLICCAVVDCSEPNRALEEVSEPVRNTPSQPXNGEKNGNITPVPASTSAXLVGHXQIVGDEGERQQHGNRHYRAF

SEQ ID NO: 1514 - protein, 99 aa, Homo sapiens
  SITE (42): Xaa equals any of the naturally occurring L-amino acids
  SITE (93): Xaa equals any of the naturally occurring L-amino acids
DWTRTDLEYVLPDGSKALRFDQIEFAAFEMHILKRPGAEGIXTEEEIAQAAERFATMSDEDKARLTRNIIAGLPGAQALRRTPCWMHKNVGVXSGPAAG

SEQ ID NO: 1515 - protein, 71 aa, Homo sapiens
  SITE (6): Xaa equals any of the naturally occurring L-amino acids
  SITE (53): Xaa equals any of the naturally occurring L-amino acids
TALRRXSFYRMLKGKILGQKKPASYGGKTSSYGRTMNNEIAGLSSPSISILTXRLFTQPGINILFCAWEQP

SEQ ID NO: 1516 - protein, 73 aa, Homo sapiens
AVTTIMVSWVSSSSRSRRLTPPSPNRQRWSLPMEETRRVASGAEVFFIRHDKANLSGVIWMAKDLRGTVAALT

SEQ ID NO: 1517 - protein, 47 aa, Homo sapiens
PSAPTPGSPWKPAVPQKEYVECLEKKVETFTSENNELWEEGGDPGEC

SEQ ID NO: 1518 - protein, 63 aa, Homo sapiens
  SITE (62): Xaa equals any of the naturally occurring L-amino acids
GKATKGQETGSSALGGGEGVGDCSSCGDVVIEVGRSGNSEDWCGFHWFRAWSQLSWFCHLPXI

SEQ ID NO: 1519 - protein, 96 aa, Homo sapiens
  SITE (1): Xaa equals any of the naturally occurring L-amino acids
  SITE (85): Xaa equals any of the naturally occurring L-amino acids
  SITE (90): Xaa equals any of the naturally occurring L-amino acids
XIFLDRRPEMPFKPLVTAGIESLLNTFLYRSPALKTARSRLLGKVLRVEVKGFSTSLILVFSERQVDVLGEWAGDADCTVIAYAXCCRNXRDSPAA

SEQ ID NO: 1520 - protein, 62 aa, Homo sapiens
TLVLALIEEKWRSHRILRMNSGRPETMENLPALYTIFQGEVAMVTDYGAFIKIPGCRKQDEK

SEQ ID NO: 1521 - protein, 87 aa, Homo sapiens
AAGDCQYADPAGTKSGYSAVGGSGKRGDSGGAGENGRQQNRSRPSVRDHAQNAIGKTVALVLLAFDSAPPISFRQKQSSQWISVIKA

SEQ ID NO: 1522 - protein, 110 aa, Homo sapiens
  SITE (88): Xaa equals any of the naturally occurring L-amino acids
  SITE (108): Xaa equals any of the naturally occurring L-amino acids
RAGLVGSGWGCPGWGWPPSLPLTWARPALSGVAPPFFTPQAPGRCPAFPLPLSLPTHPLPPSPCPPRYKYKSIFHGLRQKGKHALFSXCEIPVLHSQQVQSPHLDIGXQK

SEQ ID NO: 1523 - protein, 101 aa, Homo sapiens
  SITE (75): Xaa equals any of the naturally occurring L-amino acids
FNSVHGFMVFKLRGSDKTERTGQGQFLQERIVGAFQGNLQLCFTECFNINNLVCQLQPGVTLTVIEHCAEVFCRXLGIERFTVGEFHVITQVKVQVLPSSE

SEQ ID NO: 1524 - protein, 92 aa, Homo sapiens
PHREDAHYVYRHDEYGRLTEKTDRIPAGVIRTDDERTHHYHYDSQHRLVFYTRIQHGEPLVESRYLYDPLGRRMAKRVWRRERDLTGWMSLS

SEQ ID NO: 1525 - protein, 45 aa, Homo sapiens
  SITE (36): Xaa equals any of the naturally occurring L-amino acids
  SITE (37): Xaa equals any of the naturally occurring L-amino acids
RNKTKRKITEVGWSSDIGSFPKLPDILIVPLQLRIXXWRTNFLMY

SEQ ID NO: 1526 - protein, 97 aa, Homo sapiens
LNGFQCLQSAHNPDHRANHARRAAVAFWLLVIWPQAAVTPLLPGRRQYHQLTAKSDRAGVISGVLSATQAALISWRVAILSVQSSTTSARANASFKP

SEQ ID NO: 1527 - protein, 106 aa, Homo sapiens
  SITE (63): Xaa equals any of the naturally occurring L-amino acids
TDGIGGGMSTHLRNIDHAAVERTAIPETIFRTAQAAVTIASLERAFSLFRPAARRTLRFIRVXSGCFQPPRAQPAYENYSNRDQWLHTATRWNPYSSSSICLCVGC

SEQ ID NO: 1528 - protein, 110 aa, Homo sapiens
  SITE (50): Xaa equals any of the naturally occurring L-amino acids
  SITE (54): Xaa equals any of the naturally occurring L-amino acids
  SITE (98): Xaa equals any of the naturally occurring L-amino acids
RRHGVNHLSDNINVRHFYVALCICQRITRFINQFVRGLTFYNIGNLYAAXRSTXCSVNLGIPPVLPDMAVHRDRSRYQHSPDYWPPRSSAGTGQLTPXRRLSKIFSSAIR

SEQ ID NO: 1529 - protein, 138 aa, Homo sapiens
  SITE (70): Xaa equals any of the naturally occurring L-amino acids
  SITE (82): Xaa equals any of the naturally occurring L-amino acids
  SITE (83): Xaa equals any of the naturally occurring L-amino acids
  SITE (86): Xaa equals any of the naturally occurring L-amino acids
  SITE (90): Xaa equals any of the naturally occurring L-amino acids
  SITE (93): Xaa equals any of the naturally occurring L-amino acids
  SITE (95): Xaa equals any of the naturally occurring L-amino acids
  SITE (99): Xaa equals any of the naturally occurring L-amino acids
  SITE (106): Xaa equals any of the naturally occurring L-amino acids
  SITE (107): Xaa equals any of the naturally occurring L-amino acids
  SITE (111): Xaa equals any of the naturally occurring L-amino acids
  SITE (121): Xaa equals any of the naturally occurring L-amino acids
  SITE (126): Xaa equals any of the naturally occurring L-amino acids
  SITE (138): Xaa equals any of the naturally occurring L-amino acids
FQYQRGFINLYPLDAAFRQFCQHLLINRQNVVQQAQAVKLFTFHFPQPQPGNRPQQHRFHLVAQRQRLVXFVQQLRPGQFEXXAFXELRXHVXIXGVKXFGHFRCXXSSPXGASPRPIRNXVSILXNHLCSDDAPERX

SEQ ID NO: 1530 - protein, 51 aa, Homo sapiens
VEEYFQLCFATSEFHEIRNSNCQSNILVNSNPFHNKILNIKELRYNKCREY

SEQ ID NO: 1531 - protein, 129 aa, Homo sapiens
ELEGSAQGAPWHPPASRRQLGGNVTCYFDLFFSPLFICFLFLFVFSLFPLSPFCSRDAAKRKAWKLNRVGSLRNIYSSSTNTEGNASAPPPAHTSTCLFPSHPLPAPSFPTQAWKCNLPKAACSLIVFA

SEQ ID NO: 1532 - protein, 80 aa, Homo sapiens
  SITE (44): Xaa equals any of the naturally occurring L-amino acids
YWHRRHYPVRHTPVAADNAEWRFHKTVNTLVPVQVAMPGVPAPXGHGINMLNNKLAVRYPQFHICQIMAVKRRFLHRLIQ

SEQ ID NO: 1533 - protein, 47 aa, Homo sapiens
VNLLAPPHNVRNSTIKHSFPVALITLEITFNYHRKLTDTLILGITWR

SEQ ID NO: 1534 - protein, 102 aa, Homo sapiens
  SITE (13): Xaa equals any of the naturally occurring L-amino acids
  SITE (49): Xaa equals any of the naturally occurring L-amino acids
  SITE (68): Xaa equals any of the naturally occurring L-amino acids
LLTPSSSAALKGXSVQWHLRETGQSLPRRLTCAGWNKKISLLFAHCCPXWSAMARSQLTTTSASWVSXDSPTQPPNYLEYRFGFKFANSHFPLPLPTAFPSP

SEQ ID NO: 1535 - protein, 47 aa, Homo sapiens
  SITE (2): Xaa equals any of the naturally occurring L-amino acids
  SITE (10): Xaa equals any of the naturally occurring L-amino acids
  SITE (14): Xaa equals any of the naturally occurring L-amino acids
  SITE (20): Xaa equals any of the naturally occurring L-amino acids
  SITE (22): Xaa equals any of the naturally occurring L-amino acids
  SITE (36): Xaa equals any of the naturally occurring L-amino acids
NXLLVYSTCXEIKXIFFHSXGXKMGYSTPSVLLNVXLQNLGLSMVYL

SEQ ID NO: 1536 - protein, 127 aa, Homo sapiens
  SITE (41): Xaa equals any of the naturally occurring L-amino acids
  SITE (108): Xaa equals any of the naturally occurring L-amino acids
TARHITNTYRLAHTKIHQRTADMPGFIGGDQQHFKTVTAVXSSRQVFNQHNLWPLRNEFARCQNRFFDVIYRMLTEYFQLNQIWRNDIAGRQTVPHMKLCDTPCNDTXFFRMTITGSQKYFACGFAA

SEQ ID NO: 1537 - protein, 41 aa, Homo sapiens
QAFFQDRQLSFRVFIATRHPFQRQPGHYCPPDSLKWRRLNS

SEQ ID NO: 1538 - protein, 110 aa, Homo sapiens
  SITE (76): Xaa equals any of the naturally occurring L-amino acids
  SITE (101): Xaa equals any of the naturally occurring L-amino acids
RWFHWYRRHPGYRSPRSGEAFRVDMDALDLSEEQDVSHRPYRDGFASCNAGMMHACGHDGHTAIGLGLAHTLKHSXPDYMASSNWIFQPAEEVRWPRAMVXAVSKRSGYF

SEQ ID NO: 1539 - protein, 44 aa, Homo sapiens
VAGLISPYSVAPWLPNACSKGIVFITCLILIFRQHQISCKTNPS

SEQ ID NO: 1540 - protein, 129 aa, Homo sapiens
  SITE (61): Xaa equals any of the naturally occurring L-amino acids
  SITE (129): Xaa equals any of the naturally occurring L-amino acids
IAWWGNNYYDVNELGHISVCPDPDVPEARVDLAQLVKTREAQGQRLPALFCFPQILQHRLXSINAAFKRARESYGYNGDYFLVYPIKVNQHRRVIESLIHSGEPLGLEAGSKAELMAVLATCWHEPVAX

SEQ ID NO: 1541 - protein, 48 aa, Homo sapiens
  SITE (31): Xaa equals any of the naturally occurring L-amino acids
ADWKCWDPGGGGVPAPEPSPLEAGEGPLSRXTGQPVTPWRPAHRRHVS

SEQ ID NO: 1542 - protein, 110 aa, Homo sapiens
  SITE (39): Xaa equals any of the naturally occurring L-amino acids
  SITE (52): Xaa equals any of the naturally occurring L-amino acids
  SITE (90): Xaa equals any of the naturally occurring L-amino acids
  SITE (100): Xaa equals any of the naturally occurring L-amino acids
  SITE (101): Xaa equals any of the naturally occurring L-amino acids
SRSRCSKSPCNDNALCPTSFSASQQPGNLFWYCKTPRKXMADASLITVATEXFCLCWMSHKIVVQWVAKHLLSQFQSPKDRVALRPLIAXMASGQVAENXXSVEMQAQNG

SEQ ID NO: 1543 - protein, 87 aa, Homo sapiens
  SITE (58): Xaa equals any of the naturally occurring L-amino acids
  SITE (62): Xaa equals any of the naturally occurring L-amino acids
  SITE (81): Xaa equals any of the naturally occurring L-amino acids
PVKGYGEWMGSVKIRNVHGRGNRGGKGQEVEEKKNRIIWGNKFGHVHWLTPVNPSTLXSQDXKILEFRISIFSPWATRKPXLPPKIT

SEQ ID NO: 1544 - protein, 46 aa, Homo sapiens
  SITE (13): Xaa equals any of the naturally occurring L-amino acids
  SITE (39): Xaa equals any of the naturally occurring L-amino acids
EMKNNPVHLITEXDLKQISTLESVSTSKKDKKDERRRKXTEGSGSM

SEQ ID NO: 1545 - protein, 83 aa, Homo sapiens
  SITE (6): Xaa equals any of the naturally occurring L-amino acids
  SITE (16): Xaa equals any of the naturally occurring L-amino acids
LGEFTXQRIVAHHTGXDVITIKRNSKAMCTAEVTQFFECVEILANGNFRDSSGFCQIGYANLTLVNGPCCENSLLSGIHRCNS

SEQ ID NO: 1546 - protein, 104 aa, Homo sapiens
  SITE (61): Xaa equals any of the naturally occurring L-amino acids
NRPIAGSITSRHPAIIPGIVSGIMIRIKVCNLLAPRSRAASSNGLSSFSILEYSGHHHKRXQNVNQTDNHRTGREHDTDWCVDNAQPEQKLVEIAFGAEENFSP

SEQ ID NO: 1547 - protein, 113 aa, Homo sapiens
  SITE (56): Xaa equals any of the naturally occurring L-amino acids
  SITE (108): Xaa equals any of the naturally occurring L-amino acids
EDTTTFEQSFVKSNDRNERNKPEHRSSSQGPLSSIRAVIKRSSRTSIQSELHRDRXRPEITIVATEPLEGKPRGFQGTPTPRLGNSYNQSATSSLEGLMSLGSCLNFXHFMNQ

SEQ ID NO: 1548 - protein, 66 aa, Homo sapiens
  SITE (59): Xaa equals any of the naturally occurring L-amino acids
RLSCHHSVRISKFYSPLNEQRRVSILMNKTSGTRHKFFFAHLLSVKNNFTRCITQLQRXGIVVNRD

SEQ ID NO: 1549 - protein, 83 aa, Homo sapiens
  SITE (65): Xaa equals any of the naturally occurring L-amino acids
  SITE (79): Xaa equals any of the naturally occurring L-amino acids
  SITE (80): Xaa equals any of the naturally occurring L-amino acids
IIKEMVSSSTFSHVPFLISCIFQAMCLLICAQMYQVPDCSTSCELVIITQLQSMPSRELASMNLXIVDLLKKAKVIDSXXLIA

SEQ ID NO: 1550 - protein, 31 aa, Homo sapiens
PALASQSAGIAGVSHHTWPSASNFLSVVSGV

SEQ ID NO: 1551 - protein, 107 aa, Homo sapiens
  SITE (42): Xaa equals any of the naturally occurring L-amino acids
  SITE (85): Xaa equals any of the naturally occurring L-amino acids
  SITE (101): Xaa equals any of the naturally occurring L-amino acids
THYVILILEAARPVLLLIARIAVVLIFIIFGFPKMMGFDGTXQYMASLGAPMPMLAAIIAVVMEVPAAILIVLGFFTRPLAVLFXFYTLGTAVIGHHYWDXTGDAGW

SEQ ID NO: 1552 - protein, 88 aa, Homo sapiens
  SITE (69): Xaa equals any of the naturally occurring L-amino acids
MYKLRLRFTLGSVHSNNKERLPQALMFVVIGVEETQETAWRGRTRLDARPTVGKILKVVFKEKTQENVXHSPNNLLHRVLVARWPAAS

SEQ ID NO: 1553 - protein, 70 aa, Homo sapiens
RNFYLSPCYFVSSVLPASQADPQELRRWALDSYRIVLRVRQTLRRKLARRAMRKNKNRTRTGSSNRQSFP

SEQ ID NO: 1554 - protein, 50 aa, Homo sapiens
DPEVNTGSLEARRWCDLSRESFLRGNPREAGERERNGWCSDSVDVSGMWP

SEQ ID NO: 1555 - protein, 81 aa, Homo sapiens
  SITE (54): Xaa equals any of the naturally occurring L-amino acids
  SITE (63): Xaa equals any of the naturally occurring L-amino acids
  SITE (65): Xaa equals any of the naturally occurring L-amino acids
  SITE (68): Xaa equals any of the naturally occurring L-amino acids
  SITE (72): Xaa equals any of the naturally occurring L-amino acids
YYIIAIIFCYSLIFNVSFLNCAGLSLDALQLCWGTILMGSQQRKSAKTPVGVSXVLLLFKGRXMXFLXMARXSRWERGKVV

SEQ ID NO: 1556 - protein, 39 aa, Homo sapiens
LTEILVLGSRILCLTGKGSEDVISLFFKLHRLHMRILPT

SEQ ID NO: 1557 - protein, 74 aa, Homo sapiens
  SITE (7): Xaa equals any of the naturally occurring L-amino acids
  SITE (40): Xaa equals any of the naturally occurring L-amino acids
  SITE (50): Xaa equals any of the naturally occurring L-amino acids
QFGSGGXISGRFHPKTWEFQGLHRPAQLLAAADVSIWVLXQKGPKCRGTXQGGEACGQSSGFCVGALSTKWVPP

SEQ ID NO: 1558 - protein, 41 aa, Homo sapiens
PREAKSHWQAQVWTKWEAKQEVGNNFERPKVVSNFSSLIVY

SEQ ID NO: 1559 - protein, 50 aa, Homo sapiens
  SITE (15): Xaa equals any of the naturally occurring L-amino acids
NSAQLRSIQNLRLRXGLLLEGSPVLGLELCLDACNWLCCFVTEHAMVFFT

SEQ ID NO: 1560 - protein, 41 aa, Homo sapiens
NLGLRISPSPWNEMHRKENLEDLEGRSPPKPGVSTGMKLQS

SEQ ID NO: 1561 - protein, 44 aa, Homo sapiens
  SITE (15): Xaa equals any of the naturally occurring L-amino acids
  SITE (29): Xaa equals any of the naturally occurring L-amino acids
  SITE (31): Xaa equals any of the naturally occurring L-amino acids
TECKELLYPCCCGLXRLFKHCRRHVWRKXFXIIAITTHALTTFP

SEQ ID NO: 1562 - protein, 32 aa, Homo sapiens
  SITE (29): Xaa equals any of the naturally occurring L-amino acids
KVSLSSLCRTQILLPEVITFLNFLGKFRXSFR

SEQ ID NO: 1563 - protein, 41 aa, Homo sapiens
ENINCRPHCQNTDQNEQKQLLGNRPKCRTLAYRRKSERAGK

SEQ ID NO: 1564 - protein, 83 aa, Homo sapiens
  SITE (72): Xaa equals any of the naturally occurring L-amino acids
  SITE (74): Xaa equals any of the naturally occurring L-amino acids
  SITE (75): Xaa equals any of the naturally occurring L-amino acids
PQPLLSLGPYMYLYPRRLPQDGISGSVCSLSSPRTYSPLGAPACRKGHHVPLPPHPKAHRGIPFTPSFFPWXPXXFKVFPLVN

SEQ ID NO: 1565 - protein, 48 aa, Homo sapiens
FGTGKEVMIGVEGGIKLNLVEEIDFLLTICVSVRYKTLNWVQQGLHKR

SEQ ID NO: 1566 - protein, 56 aa, Homo sapiens
  SITE (46): Xaa equals any of the naturally occurring L-amino acids
  SITE (53): Xaa equals any of the naturally occurring L-amino acids
LFKWQVELVQSRGLGDGFLKEVEPGNSPSLRGRPGFGQMGKASGRXCRGQGMXSRT

SEQ ID NO: 1567 - protein, 171 aa, Homo sapiens
NSAEVKTQFISLKPKIPLSPEVTHTKPAPEPQTLLPSQSTIGPETPGTKPSTTLAPRKTKRPGRRPRPRPRPKTTPSPEVPKSKPALEPATIQPEPLVPTTASKPSERPKTTHRPDAPQIQPGSKPPKQLLPKPQTTAEPDMPPTKSVSEPVPFETEAPSMTIVPTTDIEL

SEQ ID NO: 1568 - protein, 55 aa, Homo sapiens
RNNSTAHTLGTTELTHSVLSITSKGVFCKLICLECVCHVLITSRYFLRVQCSEVW

SEQ ID NO: 1569 - protein, 39 aa, Homo sapiens
KQCDPVICNNMDETGDNLLSEISKAQKDKQCMFSLICGI

SEQ ID NO: 1570 - protein, 41 aa, Homo sapiens
  SITE (7): Xaa equals any of the naturally occurring L-amino acids
AEFAPLXSSLGDRVRLHLKKIKIKIKKMKKKRKVRYRVSHS

SEQ ID NO: 1571 - protein, 65 aa, Homo sapiens
  SITE (13): Xaa equals any of the naturally occurring L-amino acids
  SITE (17): Xaa equals any of the naturally occurring L-amino acids
  SITE (33): Xaa equals any of the naturally occurring L-amino acids
  SITE (63): Xaa equals any of the naturally occurring L-amino acids
LLVAAAAYEICKXCSSXMVALVAPIKRWLKPIXAPASPLLSARQHQSSLSMVGELSAWVSWSXVD

SEQ ID NO: 1572 - protein, 49 aa, Homo sapiens
  SITE (8): Xaa equals any of the naturally occurring L-amino acids
  SITE (13): Xaa equals any of the naturally occurring L-amino acids
LEGFSTSXHCLIXRFFLSLKKFLLSGCTTVDLSIYILKDILVASKFWQL

SEQ ID NO: 1573 - protein, 37 aa, Homo sapiens
  SITE (18): Xaa equals any of the naturally occurring L-amino acids
QGSSSAEACVEMRIFYNXIKLLLEFNIFPGSEFCIFL

SEQ ID NO: 1574 - protein, 91 aa, Homo sapiens
  SITE (40): Xaa equals any of the naturally occurring L-amino acids
  SITE (62): Xaa equals any of the naturally occurring L-amino acids
SLGQGHHKLEMAKPGFESRWSNLKAAVLSMFPSAYAHAFXTVAPHTRARSGLLSEVLPLPGXSPDAAAMARSIRQPVFPEMSQLGQDLGQS

SEQ ID NO: 1575 - protein, 45 aa, Homo sapiens
  SITE (42): Xaa equals any of the naturally occurring L-amino acids
RYLTFPSEGGNSQGLLPSLEQNCEGKWRRVYIVFKGMEKQGXWYA

SEQ ID NO: 1576 - protein, 76 aa, Homo sapiens
WIFVSFPHFDCHEQCCCETFMYKFLYRQMFSYLLGLSIHRSGIIGSYGNSIFNFLRNCQTAFHGWLHHFFIFTSSV

SEQ ID NO: 1577 - protein, 45 aa, Homo sapiens
  SITE (23): Xaa equals any of the naturally occurring L-amino acids
HSFVKIFYYFTITITSWIFLKNXYVVINYSYCSWFFFLMLQFVSN

SEQ ID NO: 1578 - protein, 35 aa, Homo sapiens
  SITE (21): Xaa equals any of the naturally occurring L-amino acids
FGQSKLQNKHYYWGIKGGYYXKYRGGNLDSPKLPL

SEQ ID NO: 1579 - protein, 71 aa, Homo sapiens
  SITE (65): Xaa equals any of the naturally occurring L-amino acids
AEVSELASVLHKFAAQSVTCQVMKNTMDRMERRQTVGCEGHLSKERSLLIKDGKEGFLKIVASGXTAYMRA

SEQ ID NO: 1580 - protein, 37 aa, Homo sapiens
FRFFLSLKKFLLSGCTTVDLSIYILKDILVASKFWQL

SEQ ID NO: 1581 - protein, 41 aa, Homo sapiens
  SITE (40): Xaa equals any of the naturally occurring L-amino acids
AECKLLTSSNLPTLGLPQCWKPLHLAQNTFFFEMQSCSAXR

SEQ ID NO: 1582 - protein, 82 aa, Homo sapiens
  SITE (5): Xaa equals any of the naturally occurring L-amino acids
  SITE (14): Xaa equals any of the naturally occurring L-amino acids
CSGAXALEHTQCFXPFSHLSESSATSFSFVRPCSLVSLVHSVYLILNHLFVCSFLPPLTNSNRIQATLSHLLPLPSLLSFFY

SEQ ID NO: 1583 - protein, 63 aa, Homo sapiens
  SITE (10): Xaa equals any of the naturally occurring L-amino acids
  SITE (13): Xaa equals any of the naturally occurring L-amino acids
  SITE (19): Xaa equals any of the naturally occurring L-amino acids
KITLYLFIFXYLXKLSFFXWNGFLITCLVFIAHSNNKVVKPYLSGFRSVMHINSIICAELFNL

SEQ ID NO: 1584 - protein, 64 aa, Homo sapiens
  SITE (59): Xaa equals any of the naturally occurring L-amino acids
  SITE (61): Xaa equals any of the naturally occurring L-amino acids
  SITE (64): Xaa equals any of the naturally occurring L-amino acids
ERMEGELEKGTIQLFRGGLFGEEQKNEVVALELYGLQRIYKIHKRNYIYFICRWKRSTXMXEKX

SEQ ID NO: 1585 - protein, 47 aa, Homo sapiens
GKASIWAVGYREKDGLDFKIFKSLSQLHLAAVGFQDPHTGGVTWTIT

SEQ ID NO: 1586 - protein, 80 aa, Homo sapiens
  SITE (13): Xaa equals any of the naturally occurring L-amino acids
  SITE (23): Xaa equals any of the naturally occurring L-amino acids
ASPCVTREAKHVXFTSPIFLHFXLPSFRNNSPSSISKESLNHLSLLAYPLSLKSMQNIPGTLSLCVCEAIKSNVTCAVVL

SEQ ID NO: 1587 - protein, 50 aa, Homo sapiens
LPASASQSARITCVSHRPWPTYLFDSISSSGSLLWPTSLPLTPFTSAYST

SEQ ID NO: 1588 - protein, 42 aa, Homo sapiens
  SITE (27): Xaa equals any of the naturally occurring L-amino acids
  SITE (35): Xaa equals any of the naturally occurring L-amino acids
IYRRNTRNLPTWNLHFNGDGGWVNVKXTKCTQIYXYELCQMS

SEQ ID NO: 1589 - protein, 70 aa, Homo sapiens
  SITE (64): Xaa equals any of the naturally occurring L-amino acids
TLAGTMFILFPTGVPGLHLEGGMWSVCNEQAAWVHLKTEALAMGQHSQMCVLERMFWRLCGGWXTEPLAC

SEQ ID NO: 1590 - protein, 65 aa, Homo sapiens
  SITE (17): Xaa equals any of the naturally occurring L-amino acids
  SITE (57): Xaa equals any of the naturally occurring L-amino acids
IAPLELCRAHLCGHSIXLSKGVTTEVHGKAERCDVLEDAGGKHAQRTGAITRLRAAXENLAWATV

SEQ ID NO: 1591 - protein, 63 aa, Homo sapiens
AIVLCKQRSHQESVNQSRVSMTVDRPVWCACFARRPENLMYCRQLSYAFGFEKLSCVRNMIIT

SEQ ID NO: 1592 - protein, 37 aa, Homo sapiens
ARRHTDLMDSGTMVQSPHTCCPAITFRKTRVQGSTHF

SEQ ID NO: 1593 - protein, 60 aa, Homo sapiens
  SITE (19): Xaa equals any of the naturally occurring L-amino acids
NGRGPTRCPGSSGRPSSLXAGFLVLMRIVKPSHRIPFQTQPFTCGSISYSEVLGLETQCP

SEQ ID NO: 1594 - protein, 123 aa, Homo sapiens
  SITE (85): Xaa equals any of the naturally occurring L-amino acids
  SITE (105): Xaa equals any of the naturally occurring L-amino acids
AALPNLIALTSEAAGPRFRGTAVSLMYCGVPIGAALAATLGFAGANLAWQTVFWVGGVVPLILVPLLMRWLPESAVFAGEKQSAXPLRALFAPETATATLLLVGXLILQSAWWSTMLIKLVTV

SEQ ID NO: 1595 - protein, 48 aa, Homo sapiens
  SITE (25): Xaa equals any of the naturally occurring L-amino acids
  SITE (30): Xaa equals any of the naturally occurring L-amino acids
GGQITRSRDRDHPDQHGETPSLLKXPKFTXRGGMCCSPSTLELKQKNP

SEQ ID NO: 1596 - protein, 29 aa, Homo sapiens
  SITE (24): Xaa equals any of the naturally occurring L-amino acids
GRPKGSTKNYRVIFLFCFFFFFLXDRFWL

SEQ ID NO: 1597 - protein, 76 aa, Homo sapiens
ARGNFAMLPRLVLSCWAQANLPITASQCAGITGVSHCTWPALLLLPALLDFINSEAYQPHFYPNLLVDLSIVGLHR

SEQ ID NO: 1598 - protein, 57 aa, Homo sapiens
  SITE (36): Xaa equals any of the naturally occurring L-amino acids
  SITE (39): Xaa equals any of the naturally occurring L-amino acids
ASRTSGSPGPAGIRHEVQTGHGGSTEPAPHVHPGTXGPXLHGKEVDTILFAEFQAWR

SEQ ID NO: 1599 - protein, 94 aa, Homo sapiens
  SITE (26): Xaa equals any of the naturally occurring L-amino acids
  SITE (66): Xaa equals any of the naturally occurring L-amino acids
WIPRAAGIRHRDSGPRRDCPPPSSRXHGRPCSLTPALFLTEIGRCLGILLNTASLAASTEKFALAXNKRRPQVISYTSLGLFFLFFSFFLNNEK

SEQ ID NO: 1600 - protein, 75 aa, Homo sapiens
  SITE (39): Xaa equals any of the naturally occurring L-amino acids
SPGCTGVVRAARTCYPIGKSQFPQGIEAKGKDAESPPVXRGCRWLARPRSAPCPPGSTSTPVCYPSAQTHPAPCP

SEQ ID NO: 1601 - protein, 37 aa, Homo sapiens
  SITE (32): Xaa equals any of the naturally occurring L-amino acids
RTKWSHACASRLWSRVRFDRVRLVSFAWLCMXVLERE

SEQ ID NO: 1602 - protein, 63 aa, Homo sapiens
EKTFSVYLSFCLSFKVASLFFSDVPICPGCGWRGRVAPEVLVVLWVHASSLCVREELPRSAFY

SEQ ID NO: 1603 - protein, 84 aa, Homo sapiens
  SITE (47): Xaa equals any of the naturally occurring L-amino acids
  SITE (70): Xaa equals any of the naturally occurring L-amino acids
GLQLAPSGLSPYAEIGIWHTPVVERHSMPYSLPLLSALSPPHSRTMXLVTIFGPNSPSIIICYSPPCRFXLTPFDQNRYFENVK

SEQ ID NO: 1604 - protein, 40 aa, Homo sapiens
  SITE (31): Xaa equals any of the naturally occurring L-amino acids
  SITE (40): Xaa equals any of the naturally occurring L-amino acids
EICSEVIWSRIHNNQCQIWAHTFDSKVFCSXLFPLNFDHX

SEQ ID NO: 1605 - protein, 30 aa, Homo sapiens
SHQSNQGKSVTIYNCFKFFIVFLFFFFLRR

SEQ ID NO: 1606 - protein, 85 aa, Homo sapiens
NEPGERGCGGGHPEKPGRLVEDQVPGQRRLGPRSYLKKNSGEPLPPKPGPGSPSHPGALIGWCFPAAERGGAGRRSCSAPEGRGV

SEQ ID NO: 1607 - protein, 83 aa, Homo sapiens
SAASAPAVSSGPLLTDSGHCPGDARWDEPGLGVYKRFVRYVAYEILPCEVDRRWYFYRHRSCPPPVFMAWSLLPRSSCSVLRG

SEQ ID NO: 1608 - protein, 99 aa, Homo sapiens
  SITE (15): Xaa equals any of the naturally occurring L-amino acids
  SITE (83): Xaa equals any of the naturally occurring L-amino acids
  SITE (87): Xaa equals any of the naturally occurring L-amino acids
  SITE (88): Xaa equals any of the naturally occurring L-amino acids
  SITE (93): Xaa equals any of the naturally occurring L-amino acids
LPLQKGLGKSRPRGXRFAHPQNGASWYRVSREELGEFSALSRDPSIWRSQDCEKVTAVILFKIRNLIRATLLCEARRLRTSGXVPKXXSRGQXLWEHGL

SEQ ID NO: 1609 - protein, 40 aa, Homo sapiens
  SITE (27): Xaa equals any of the naturally occurring L-amino acids
  SITE (32): Xaa equals any of the naturally occurring L-amino acids
STFSLFITRAIDYSRSNREPNMICYPXTVTVXNEYTVLGV

SEQ ID NO: 1610 - protein, 95 aa, Homo sapiens
  SITE (52): Xaa equals any of the naturally occurring L-amino acids
RNRSVVECSGTAPMRRAPPPAGIWNCPCVTPAVAGRLCGQAGGTDSHPRCLXWLREGRVFEAEVLGAGPLQGVAQAVSPFVQVNAEKKLTGSNVG

SEQ ID NO: 1611 - protein, 82 aa, Homo sapiens
HELLVPRGLLPGPHVPFVNPDPVYAHVYHTSPLMSVTCLGRPSPASWSPPFKPWALPVFHPWGSSKKPSMAISEDFRVDFVL

SEQ ID NO: 1612 - protein, 134 aa, Homo sapiens
  SITE (49): Xaa equals any of the naturally occurring L-amino acids
  SITE (50): Xaa equals any of the naturally occurring L-amino acids
  SITE (51): Xaa equals any of the naturally occurring L-amino acids
  SITE (76): Xaa equals any of the naturally occurring L-amino acids
  SITE (79): Xaa equals any of the naturally occurring L-amino acids
  SITE (119): Xaa equals any of the naturally occurring L-amino acids
  SITE (123): Xaa equals any of the naturally occurring L-amino acids
  SITE (129): Xaa equals any of the naturally occurring L-amino acids
ARAPPWAGRPSGCNLAGAGRRCRAWPERAWPRARDSDLLGQDSAGRAPXXXASPSGSSEATGKPRGRDGGPRREEXDVXPEEKRLRLLLEGGSAQPEDCEDGEDAPRPGREETGTQTSXDGRXAEFSTXFSSSV

SEQ ID NO: 1613 - protein, 33 aa, Homo sapiens
GLAGYLKCDLWTSSVDITWELVRKAEPQAHRMF

SEQ ID NO: 1614 - protein, 30 aa, Homo sapiens
  SITE (23): Xaa equals any of the naturally occurring L-amino acids
IVLLIMFRKIPNVFNFILKCLVXMVYNYHF

SEQ ID NO: 1615 - protein, 53 aa, Homo sapiens
ARGLSAYYAPAHGHRGLVSFPLPQALASKLKCCFTDAKAGRFGVTYSRSPNSL

SEQ ID NO: 1616 - protein, 96 aa, Homo sapiens
  SITE (90): Xaa equals any of the naturally occurring L-amino acids
QQHTSQEKCPLVLSFQSSNVLLSSVLPTQPDPAASWDSGFIWRPSALVIPQRFLNPVAWFLVKIFQSSLCCTFTLSVIWSNQVLTTCLVXCIHEKE

SEQ ID NO: 1617 - protein, 76 aa, Homo sapiens
  SITE (38): Xaa equals any of the naturally occurring L-amino acids
  SITE (58): Xaa equals any of the naturally occurring L-amino acids
  SITE (65): Xaa equals any of the naturally occurring L-amino acids
  SITE (69): Xaa equals any of the naturally occurring L-amino acids
  SITE (75): Xaa equals any of the naturally occurring L-amino acids
KTNISARTCSAFQPRATHRHLWVAKYRRAEEALQVKVXFLSSTTSHSCLHSLQIEKVXFKKERMXFSRXEASWHXS

SEQ ID NO: 1618 - protein, 80 aa, Homo sapiens
  SITE (60): Xaa equals any of the naturally occurring L-amino acids
STAPGPGATNSLLSAKARPCVTVSLSDITGPNSADYSFLLQLYPSGLLNPMLSLLSFLPXCLFRIIFLVGSPFACALLIC

SEQ ID NO: 1619 - protein, 101 aa, Homo sapiens
HEKINLALLILKLTGAPYDLKDQDQTPSLDIQSSSQPSPKLFPRLLPTFCYSYSHLDDFLFFKQASHPFCPDFSLCLQCSFPLLPWANSPYLPRTQCRGQV

SEQ ID NO: 1620 - protein, 72 aa, Homo sapiens
RALCIVSFWACGNEYSNDHLLCVWRHVPERALLLHKSWVPGQEAGSVRHMVFLSLRQPLWAQEEGLSPFILL

SEQ ID NO: 1621 - protein, 123 aa, Homo sapiens
  SITE (8): Xaa equals any of the naturally occurring L-amino acids
WQVQCLQXERGCSGITRTPGLGGTLQPQESALEGNVYFSTGNILEIGACWLLPPAAKLHLPPDSRSPCVGRIPGPLPASIEGPGCGLFSFDPTQRHCGSWGAPGGSLWSRITYLCRNRLCGCI

SEQ ID NO: 1622 - protein, 60 aa, Homo sapiens
  SITE (34): Xaa equals any of the naturally occurring L-amino acids
NPVSIKNIKISQAWWRMPLVPATREAEAGESLEXGRQRLKLAKIMSLHSSLGDRVRPRLK

SEQ ID NO: 1623 - protein, 136 aa, Homo sapiens
  SITE (122): Xaa equals any of the naturally occurring L-amino acids
  SITE (128): Xaa equals any of the naturally occurring L-amino acids
  SITE (132): Xaa equals any of the naturally occurring L-amino acids
SGNPGYQLGKPVRALNINRMNNVTTLHLWQSAGRGLCTSATFKPILFGENVLSGCLLEVGINENCTQLRENAVERLDSLIQATHVAMRGNSDYADLSDGWLEIIRVDAPDPGADRWLACEGXCLDIPXHLSXGSPF

SEQ ID NO: 1624 - protein, 112 aa, Homo sapiens
  SITE (103): Xaa equals any of the naturally occurring L-amino acids
  SITE (105): Xaa equals any of the naturally occurring L-amino acids
  SITE (111): Xaa equals any of the naturally occurring L-amino acids
HEPGPGTPRRGGQSSRGGRGGRGRGRGGGLPFVIKFVSRAKKVKMGQLSLGLESGQGQGQHEESWQDVPQRRVGSGQGGSPCWKKQEQKLDDEEEEKKKKKKXLXGGPVTXF

SEQ ID NO: 1625 - protein, 47 aa, Homo sapiens
SLQIVSVFSNHMYPQHMCINYVSKKLKLKNRQGGREENCVTVKLRET

SEQ ID NO: 1626 - protein, 33 aa, Homo sapiens
  SITE (17): Xaa equals any of the naturally occurring L-amino acids
  SITE (31): Xaa equals any of the naturally occurring L-amino acids
  SITE (33): Xaa equals any of the naturally occurring L-amino acids
FKFWVFYSGILIKKLGXPLLKTRRPGTVDLXGX

SEQ ID NO: 1627 - protein, 71 aa, Homo sapiens
WSYHQNISSIWLLPSGPPTISHLDYPCLFLCPIAYSQHSSQRDLSKTRDKSCTPLVGNQAVSSPSHGKVKS

SEQ ID NO: 1628 - protein, 68 aa, Homo sapiens
  SITE (17): Xaa equals any of the naturally occurring L-amino acids
  SITE (23): Xaa equals any of the naturally occurring L-amino acids
  SITE (52): Xaa equals any of the naturally occurring L-amino acids
GARGQSHPSCIRGVHQXQVSRHXATAEKQPEVVAGPERAPSQLRKGAFGDMXNANRVGLKMQRQESSQ

SEQ ID NO: 1629 - protein, 73 aa, Homo sapiens
  SITE (23): Xaa equals any of the naturally occurring L-amino acids
  SITE (44): Xaa equals any of the naturally occurring L-amino acids
  SITE (45): Xaa equals any of the naturally occurring L-amino acids
  SITE (47): Xaa equals any of the naturally occurring L-amino acids
RRHDRGSSPAVQATPRMGALNPXGMCAEIQGGPCTHLPFPAAGXXQXISCECQPAHCMFRKLCRVRQYSRVSK

SEQ ID NO: 1630 - protein, 86 aa, Homo sapiens
GSPTPGTPWTTPARPLPSSGLQFPFCKKDNETSNTGLLQRSHQTRATGCFISLSLFLQSWAAQCRATACSVHPPSWGWRQMQRAHP

SEQ ID NO: 1631 - protein, 86 aa, Homo sapiens
QGPQLGRGSQRRSVSLMGSALSAAALRPHGLRVLYRKDASFQHLVPEKCPLSPWEVSLGSGRAVSLKLPPGALQGMTLSLELWSWF

SEQ ID NO: 1632 - protein, 68 aa, Homo sapiens
  SITE (27): Xaa equals any of the naturally occurring L-amino acids
  SITE (39): Xaa equals any of the naturally occurring L-amino acids
LVTCIALKFLKNPGQLSCRMCFLICVXVSCMISFMLNVXGVGAIKLHNCMFCVSHCTVLGGMCYPLNY

SEQ ID NO: 1633 - protein, 69 aa, Homo sapiens
  SITE (11): Xaa equals any of the naturally occurring L-amino acids
  SITE (39): Xaa equals any of the naturally occurring L-amino acids
LQVLATVPGQXSDFLALGPLLYSSHHTTSLEVHLGNAWXLNFIFPHDGRYAMGTFQGCRWKLEKGSLNL

SEQ ID NO: 1634 - protein, 43 aa, Homo sapiens
  SITE (5): Xaa equals any of the naturally occurring L-amino acids
ITEGXNVSGSTGTVAHACKSQHFGRPRQVDHKVRSSIPAWPRW

SEQ ID NO: 1635 - protein, 86 aa, Homo sapiens
  SITE (77): Xaa equals any of the naturally occurring L-amino acids
  SITE (80): Xaa equals any of the naturally occurring L-amino acids
IISILFLFSNHNTFYFSYIVALVQASTLLNRNDKYISLFNIMLAFFPGWAWWLTPVIPALWGGPRQEDCLSPGRSWXPAXATPPPN

SEQ ID NO: 1636 - protein, 99 aa, Homo sapiens
  SITE (67): Xaa equals any of the naturally occurring L-amino acids
DLSVVTGQWYPSIVSSTNAGVKPFLNFNRKMLIEVLDSCVHAAILTRKCSLNCAIYSIDSSVMIIAXVWMTIAAMWITDKRDVQVLRQRALFLGVLKNV

SEQ ID NO: 1637 - protein, 44 aa, Homo sapiens
  SITE (35): Xaa equals any of the naturally occurring L-amino acids
TGLGEYGRAGHQADLVNEACGNLNICKWPVREREXLALRRVWML

SEQ ID NO: 1638 - protein, 59 aa, Homo sapiens
  SITE (57): Xaa equals any of the naturally occurring L-amino acids
HIKILVQILDLHYNMRGEYNLSWISLKNWKQLRDLNSQHELGRVPHTLFLYIGYLWXYI

SEQ ID NO: 1639 - protein, 71 aa, Homo sapiens
  SITE (8): Xaa equals any of the naturally occurring L-amino acids
  SITE (39): Xaa equals any of the naturally occurring L-amino acids
EPRKSLPXRDAWPVLCCHPCGLGHMPINRGSSTSDRDKXSCCAFLAGFCGVTWEAMCYASSLHVCVKLLSW

SEQ ID NO: 1640 - protein, 55 aa, Homo sapiens
RHRAAGIWWLFLFCSFECQRTLTPERAALPYFPRRYGAHASFRYNPRERQLYAWE

SEQ ID NO: 1641 - protein, 121 aa, Homo sapiens
  SITE (1): Xaa equals any of the naturally occurring L-amino acids
  SITE (4): Xaa equals any of the naturally occurring L-amino acids
  SITE (6): Xaa equals any of the naturally occurring L-amino acids
  SITE (8): Xaa equals any of the naturally occurring L-amino acids
  SITE (10): Xaa equals any of the naturally occurring L-amino acids
  SITE (14): Xaa equals any of the naturally occurring L-amino acids
  SITE (20): Xaa equals any of the naturally occurring L-amino acids
  SITE (43): Xaa equals any of the naturally occurring L-amino acids
XLPXRXGXQXVVPXPSFFFXRLSLAVLPRMMKCSGMISAHCNXRLPGSSNSLASAHRVAGITGACHHAQLIFLFLVDTGVSTCWPGWSRTPDLKLSACLSLPKCWDYRHEPPHPTLSPFCA

SEQ ID NO: 1642 - protein, 23 aa, Homo sapiens
ARGGRMVPCPWLNREIPSSFLAC

SEQ ID NO: 1643 - protein, 82 aa, Homo sapiens
  SITE (69): Xaa equals any of the naturally occurring L-amino acids
  SITE (81): Xaa equals any of the naturally occurring L-amino acids
FLTPWRNIFGTPLLQASCFFLFLVPRPVSRDTLSLFSRYVSSGLLVLCRELCESFLDQGLWHSGTLSRXCHSGLRTGVHGXN

SEQ ID NO: 1644 - protein, 62 aa, Homo sapiens
  SITE (19): Xaa equals any of the naturally occurring L-amino acids
LFFTWVQASSSEMYVHTRXDHTGKSNLHRTVRARGRPRKALGVGLAPRYLCKPMVFTMYICR

SEQ ID NO: 1645 - protein, 90 aa, Homo sapiens
KEHRLWGRGAVRPRQHSPGELVRSNRSHWQCLGFWSLFFSPRGREKEALQEASHPEHRPSYRTDLSCVSLANPQVFLCLGFLILKKKKKK

SEQ ID NO: 1646 - protein, 60 aa, Homo sapiens
  SITE (14): Xaa equals any of the naturally occurring L-amino acids
  SITE (27): Xaa equals any of the naturally occurring L-amino acids
  SITE (31): Xaa equals any of the naturally occurring L-amino acids
  SITE (34): Xaa equals any of the naturally occurring L-amino acids
  SITE (35): Xaa equals any of the naturally occurring L-amino acids
  SITE (41): Xaa equals any of the naturally occurring L-amino acids
  SITE (49): Xaa equals any of the naturally occurring L-amino acids
  SITE (55): Xaa equals any of the naturally occurring L-amino acids
AVNIGSKQAYIHFXNFPWLLAERSPVXGYKXGLXXSLKGCXQKIVACFXMPFGEXFTSQC

SEQ ID NO: 1647 - protein, 67 aa, Homo sapiens
QTLTLILTLQSCIHSQASRSFPHIQTSIHPYIYPSLYLNTHAFIRSLIESCIENPLCAKPLLELRMQ

SEQ ID NO: 1648 - protein, 80 aa, Homo sapiens
RNYQERKNGNSNLGRWAKTGHEVSGYPAWLQQERERGVLETVDRAIRPLSQQSPGWGGLESLMWLKTSFCQQVKWALKEK

SEQ ID NO: 1649 - protein, 69 aa, Homo sapiens
ECVCVCVCVCVCVCVFETESRSVTQAGVQWHDLSSLQPLPSRHKQFSCLSLLSSWDYSTHQHTWLIFYF

SEQ ID NO: 1650 - protein, 63 aa, Homo sapiens
RWGFTMLARLVSNYGRQVVHPLRPPKVLGLQVRATVPGLFIQLSGVDRTVLSPAGCGCGPWGE

SEQ ID NO: 1651 - protein, 64 aa, Homo sapiens
SRSVAQAGVQWRDLGSLQPLPSGFKQFSHLSLLSSWDYRRPPPQPATFCIFRRDGVSPCWSGWS

SEQ ID NO: 1652 - protein, 52 aa, Homo sapiens
GAQRLSNLPDVAGLIRDEIHIPSTHPQIKHYFRFFFLTLLILEHMIMKKGTM

SEQ ID NO: 1653 - protein, 52 aa, Homo sapiens
SDECPKKRHQRASFFFLFPPLHTEKRPSEHTPRRQPSANPRRESSLDTLLVP

SEQ ID NO: 1654 - protein, 140 aa, Homo sapiens
  SITE (84): Xaa equals any of the naturally occurring L-amino acids
  SITE (129): Xaa equals any of the naturally occurring L-amino acids
  SITE (139): Xaa equals any of the naturally occurring L-amino acids
QHRLGPERHGLQLRRLSQHLPRHVQGAGGGAAQRQLHGLCHAQGPRLPLRHQRPAQGDTRVAHQDLLHLLLRGREQQWHIRGGXPDPRGHLLHLGCPTTDTALPPRGLAEAPGHHLLLGSPNKAVQGPXSQGGLSFMQXF

SEQ ID NO: 1655 - protein, 49 aa, Homo sapiens
  SITE (49): Xaa equals any of the naturally occurring L-amino acids
GEIDRSLTGYAREPALCTVGNGETSLVLGKGRRWSDFHFRISLWQQCGX

SEQ ID NO: 1656 - protein, 96 aa, Homo sapiens
FPLKAAYTHSRIGQDQSQGPEADYCLQEPGLQRRGAQGTGSLREVFFFHTIQLFSSKEAILILKSKYPFIALDLSSPLSRKWKSKLSLTNHLNKVN

SEQ ID NO: 1657 - protein, 143 aa, Homo sapiens
  SITE (74): Xaa equals any of the naturally occurring L-amino acids
  SITE (93): Xaa equals any of the naturally occurring L-amino acids
  SITE (134): Xaa equals any of the naturally occurring L-amino acids
  SITE (138): Xaa equals any of the naturally occurring L-amino acids
  SITE (139): Xaa equals any of the naturally occurring L-amino acids
PWVYVCGSIGVALFHPKSWVMVSSCFSCWSQWLPSASSSHGRSTRGQDKLAGICKASACIMSTRMFQWPTQVMXTNSTSIRQRHILCLPLWAXLKSNMAKGIILLKGGDEELGTIDVYPMARPAPNVAGAGSGXWTHXXPQPH

SEQ ID NO: 1658 - protein, 84 aa, Homo sapiens
  SITE (39): Xaa equals any of the naturally occurring L-amino acids
TCLWGAERIGMGRHSGATHLRQEVRPLFCWQWTSSVSSXGHSPEPMMLHAAAWMESIRGDLLATSIMLTVPAQTEGLLVASFLR

SEQ ID NO: 1659 - protein, 45 aa, Homo sapiens
NLTKGNLKLWWNIPNEQHCTLGSTYKNEVSQFSIIQGWLLKFRSF

SEQ ID NO: 1660 - protein, 50 aa, Homo sapiens
IVQLQMFKMVNFMLCIFLKNQHIRPSLCLQNHPLFFSLSSEMAADLTLLE

SEQ ID NO: 1661 - protein, 45 aa, Homo sapiens
  SITE (40): Xaa equals any of the naturally occurring L-amino acids
  SITE (43): Xaa equals any of the naturally occurring L-amino acids
PVDVDKAESFTGNQACKGFGICLQRHKDLRLESQVLLFLXCEXPG

SEQ ID NO: 1662 - protein, 57 aa, Homo sapiens
  SITE (47): Xaa equals any of the naturally occurring L-amino acids
  SITE (55): Xaa equals any of the naturally occurring L-amino acids
  SITE (57): Xaa equals any of the naturally occurring L-amino acids
KRFEASVSKNGRVKTHHAFSQLSPDMYNLVNLSREGRLGRQTFLMLXCEGTVISXGX

SEQ ID NO: 1663 - protein, 37 aa, Homo sapiens
GTSKNIKTKLQTSHNSFYFCRIFGDAPCFILNIVICT

SEQ ID NO: 1664 - protein, 119 aa, Homo sapiens
  SITE (69): Xaa equals any of the naturally occurring L-amino acids
  SITE (105): Xaa equals any of the naturally occurring L-amino acids
VPWRQVSVEALVMALFKLLNTHAKFSLLSEVRGTISPQDLERFDHLVLRREIESMKARQPPGPGAGDTXSMVSYSDTGSSTGSHGTSTTVSFGQEHSGPGGNWRXCPRQYQRPRRCVRG

SEQ ID NO: 1665 - protein, 57 aa, Homo sapiens
RSKTTWGRTDCFTVRQLEPYKELMMGLGFCPLFSTLNLAHCCCEVCCCEVHHCLFSM

SEQ ID NO: 1666 - protein, 112 aa, Homo sapiens
PHLEGVQLRASGAQLSSPGLDPHPPNPGRLRIPSSRAHLIPGGREELPSRKQTGCRDRRHQGHPPPQLRLDLLREEEALGVFIVPSRPQRETEVLRGRRQVSYPLWASNIYP

SEQ ID NO: 1667 - protein, 134 aa, Homo sapiens
  SITE (86): Xaa equals any of the naturally occurring L-amino acids
  SITE (119): Xaa equals any of the naturally occurring L-amino acids
  SITE (126): Xaa equals any of the naturally occurring L-amino acids
GTRNCPGTADRQTDTLPWTAERQTDTLPRTADRQTRCPGQQTEKLPRTADRQTNCPRQQTDKLPRKADSKLPQTADRQTHFPRQQXDRHPAPDSRQAAWTAAHLPATVHAPQGEAFFFXQGVQPFXLPWAMLRK

SEQ ID NO: 1668 - protein, 86 aa, Homo sapiens
  SITE (7): Xaa equals any of the naturally occurring L-amino acids
  SITE (16): Xaa equals any of the naturally occurring L-amino acids
  SITE (65): Xaa equals any of the naturally occurring L-amino acids
SLIPSTXSADDPPSFXSDSSPGREGGSEERVSPPELFLQGQKAPAPIVASNSWHYQRTLIHESAXSDQVVTEKMFILVSWVFMYYT

SEQ ID NO: 1669 - protein, 91 aa, Homo sapiens
  SITE (12): Xaa equals any of the naturally occurring L-amino acids
  SITE (15): Xaa equals any of the naturally occurring L-amino acids
VTSHPAFPSLPXDVXSAKRPFLLLRPLLTKIFVTLFFLFVSNPVYWTFDRQELFTRGRKTRGGPIPSKAPLFPWTGRSDLLQCLHCCYRSS

SEQ ID NO: 1670 - protein, 66 aa, Homo sapiens
  SITE (1): Xaa equals any of the naturally occurring L-amino acids
  SITE (41): Xaa equals any of the naturally occurring L-amino acids
XKTKTPPKKKKKKKSIPCTQLARLSNFVLVGDLVATLPYEXRRGQSLWDPSWSFLMCKMAQGAFWW

SEQ ID NO: 1671 - protein, 46 aa, Homo sapiens
  SITE (46): Xaa equals any of the naturally occurring L-amino acids
SLLVWHYDNCRPHRPRAVSSSPIFTIALVVYTAIESTNSKEELWKX

SEQ ID NO: 1672 - protein, 86 aa, Homo sapiens
  SITE (29): Xaa equals any of the naturally occurring L-amino acids
MNKIGHLGDDYKITCYDGLGAWRMYHQMXQTISIPFVFFVFVFVFVFAFVGDTVSICCPSWSAVVWILAHCSFNFLGSSDPLTSAY

SEQ ID NO: 1673 - protein, 123 aa, Homo sapiens
  SITE (105): Xaa equals any of the naturally occurring L-amino acids
  SITE (113): Xaa equals any of the naturally occurring L-amino acids
  SITE (123): Xaa equals any of the naturally occurring L-amino acids
PSIYTEFPDETLRSGELLNMIVAVIDSAQLQELVCHVMMGNLVMFRKDSVLNILIQSLDWETFEQYCAWQLFLAHNIPLETIIPILQHLKLQGAPRGPVPGLLAXNFRKEEKXPGEGRWVEGX

SEQ ID NO: 1674 - protein, 63 aa, Homo sapiens
APALGISVKPSCGTDSADIRTFRGSSLLLRVPAVWESLPSPSPGCSSSHPSSSGPAPGMCLRT

SEQ ID NO: 1675 - protein, 83 aa, Homo sapiens
  SITE (28): Xaa equals any of the naturally occurring L-amino acids
  SITE (29): Xaa equals any of the naturally occurring L-amino acids
  SITE (30): Xaa equals any of the naturally occurring L-amino acids
  SITE (37): Xaa equals any of the naturally occurring L-amino acids
  SITE (39): Xaa equals any of the naturally occurring L-amino acids
  SITE (65): Xaa equals any of the naturally occurring L-amino acids
  SITE (72): Xaa equals any of the naturally occurring L-amino acids
HISDQPTVLLPGLPWRKHFVNRGAVTKXXXAASLVPXFXGNVDFLTVFSPSHLIDFLFSLDHSHXQPPRFPXPLCGMHLCMCV

SEQ ID NO: 1676 - protein, 89 aa, Homo sapiens
  SITE (82): Xaa equals any of the naturally occurring L-amino acids
  SITE (83): Xaa equals any of the naturally occurring L-amino acids
TTATTLLADMATTIMETTTTMATTTTRRGRSPTLRGSTTQNTDDLLVASAECPSDDEDLEECEPSTGGELILPIITEDFLEXXSVANRF

SEQ ID NO: 1677 - protein, 113 aa, Homo sapiens
  SITE (67): Xaa equals any of the naturally occurring L-amino acids
  SITE (73): Xaa equals any of the naturally occurring L-amino acids
GASACGTQRSGTHPRCTAARRASGSCPSANACAVPATRSGGMPVWPVSWASTSQPLGTSCVPAALPXSQLRKXQPPQSLANCDLQLTNRCKPLGTRRSSSLQPGPTLRQPVET

SEQ ID NO: 1678 - protein, 59 aa, Homo sapiens
  SITE (20): Xaa equals any of the naturally occurring L-amino acids
  SITE (36): Xaa equals any of the naturally occurring L-amino acids
VKSNGSSLREGECSNLITTXVQHRVCSRYCARPLGXCKGVRHGACSTAESGNRTGILKR

SEQ ID NO: 1679 - protein, 78 aa, Homo sapiens
  SITE (13): Xaa equals any of the naturally occurring L-amino acids
  SITE (65): Xaa equals any of the naturally occurring L-amino acids
NPIYTKNTKISRXQWVTLVIPALWEAEASGSPEVRSPRPACLANVVKPVSTKNTKISRARRHAPXSPSYSGGCGGRTA

SEQ ID NO: 1680 - protein, 73 aa, Homo sapiens
  SITE (43): Xaa equals any of the naturally occurring L-amino acids
  SITE (58): Xaa equals any of the naturally occurring L-amino acids
RMNWKASKNVALNSSVKYFQERPWRPAGSGMGKLGKNSFLKLXVLEKNRQPVPTTQRXPKPCLFWEGQGMGGC

SEQ ID NO: 1681 - protein, 83 aa, Homo sapiens
  SITE (5): Xaa equals any of the naturally occurring L-amino acids
  SITE (8): Xaa equals any of the naturally occurring L-amino acids
  SITE (51): Xaa equals any of the naturally occurring L-amino acids
  SITE (52): Xaa equals any of the naturally occurring L-amino acids
  SITE (53): Xaa equals any of the naturally occurring L-amino acids
  SITE (56): Xaa equals any of the naturally occurring L-amino acids
  SITE (63): Xaa equals any of the naturally occurring L-amino acids
  SITE (66): Xaa equals any of the naturally occurring L-amino acids
KFFCXFVXFLRRSLAVSPRLEYGGAILAHCKLCLLGSCHSPASASRVAGTXXXRHXSWLIFFXFLXETGFHRVSQDGLDLLTS

SEQ ID NO: 1682 - protein, 52 aa, Homo sapiens
DRARLSLKKKKGELVKGTILQKIVEYSSHSLLTLPTPIYSHFLNGFNEIPDY

SEQ ID NO: 1683 - protein, 103 aa, Homo sapiens
  SITE (79): Xaa equals any of the naturally occurring L-amino acids
LTVSFCRPFFSLKDWLVLTLQSTSWDKIPSVSPGRLPLCVAPALGMMEPSDRGFSCCPFCKSSLVYPPHAREELIGQCXTLSPKGWGCGAHLGQGFWLGGQGY

SEQ ID NO: 1684 - protein, 96 aa, Homo sapiens
  SITE (4): Xaa equals any of the naturally occurring L-amino acids
  SITE (11): Xaa equals any of the naturally occurring L-amino acids
  SITE (21): Xaa equals any of the naturally occurring L-amino acids
  SITE (23): Xaa equals any of the naturally occurring L-amino acids
  SITE (25): Xaa equals any of the naturally occurring L-amino acids
  SITE (42): Xaa equals any of the naturally occurring L-amino acids
  SITE (43): Xaa equals any of the naturally occurring L-amino acids
  SITE (45): Xaa equals any of the naturally occurring L-amino acids
  SITE (58): Xaa equals any of the naturally occurring L-amino acids
  SITE (63): Xaa equals any of the naturally occurring L-amino acids
  SITE (64): Xaa equals any of the naturally occurring L-amino acids
  SITE (72): Xaa equals any of the naturally occurring L-amino acids
DLTXSLHFWGXGLKGQHHPKXGXLXKPPPQLWGPLPQERGGXXPXQQSLDPSAFLGTXRAWLXXYYTWGWRXQQLFCLVPFREGQGLACGHTATVT

SEQ ID NO: 1685 - protein, 76 aa, Homo sapiens
  SITE (42): Xaa equals any of the naturally occurring L-amino acids
  SITE (52): Xaa equals any of the naturally occurring L-amino acids
APCGCRPPALLSPHQVPQRRKREPAQLSGHQAPRVERGPSAXCLGNPFPCEXLPHRRLKCPTGTACWAWSATSPSG

SEQ ID NO: 1686 - protein, 57 aa, Homo sapiens
KIINGVYNSVLMHSIFCMYIYIVCQILYILMNCLYLSLLNILCQGSMKNKLCLKKLR

SEQ ID NO: 1687 - protein, 150 aa, Homo sapiens
VIHGCFSKMCLPSPSKPTSLHPCQAMVACYPGNGLGYVRHVDNPHGDGRCITCIYYLNQNWDVKVHGGLLQIFPEGRPVVANIEPLFDRLLIFWSDRRNPHEVKPAYATRYAITVWYFDAKERAAAKDKYQLASGQKGVQVPVSQPPTPT

SEQ ID NO: 1688 - protein, 71 aa, Homo sapiens
KCGISLMFLFSHSKVIIDSRHCFHDNACDCHRRQSMISSNNTCCRREGTNVCLESGFTTYHLCDFGQVTAN

SEQ ID NO: 1689 - protein, 64 aa, Homo sapiens
GIIYTQKNTQNRNVQFFECLYMSIHLYITCVYTPPLIPSPPNPHAHCWSVTYVFNNHYFGFWLP

SEQ ID NO: 1690 - protein, 62 aa, Homo sapiens
  SITE (30): Xaa equals any of the naturally occurring L-amino acids
  SITE (31): Xaa equals any of the naturally occurring L-amino acids
  SITE (52): Xaa equals any of the naturally occurring L-amino acids
KRKHRQKQMLQLSVISCHLWNMKCILSLMXXLKPQRNECFVWAKDSRSQWGXNMLMGLAGKF

SEQ ID NO: 1691 - protein, 32 aa, Homo sapiens
CSCHSGVSHPFSIFNDLKSWPVFYIWYLEMWT

SEQ ID NO: 1692 - protein, 73 aa, Homo sapiens
  SITE (25): Xaa equals any of the naturally occurring L-amino acids
FGTRWIFSSCVFLFTVSVLLSVAEXYWRSSSPTIALPMLLQALALSKEYRLQYLASETVLNLAFAQVSRSLFL

SEQ ID NO: 1693 - protein, 45 aa, Homo sapiens
NSARDKWETGYRGIHEVSESNCFFFAGELNVFLHQILMLTIKKKK

SEQ ID NO: 1694 - protein, 92 aa, Homo sapiens
  SITE (82): Xaa equals any of the naturally occurring L-amino acids
  SITE (84): Xaa equals any of the naturally occurring L-amino acids
  SITE (90): Xaa equals any of the naturally occurring L-amino acids
ASPKGRPFPSPEGCNPSRGCGSFLISLPPTALPVSLGYQGEASASTPQVGWGRDFWALELELLCLGCLSLKVGRRGWRLQSXWXQFLEDXQT

SEQ ID NO: 1695 - protein, 60 aa, Homo sapiens
  SITE (2): Xaa equals any of the naturally occurring L-amino acids
  SITE (13): Xaa equals any of the naturally occurring L-amino acids
  SITE (52): Xaa equals any of the naturally occurring L-amino acids
  SITE (58): Xaa equals any of the naturally occurring L-amino acids
  SITE (59): Xaa equals any of the naturally occurring L-amino acids
RXMNYCPFFFTLXHIYVKHLPVQTYLVVQPQWKGCLLSLSYQPSFPCTPGEXPVLFQXXE

SEQ ID NO: 1696 - protein, 38 aa, Homo sapiens
  SITE (17): Xaa equals any of the naturally occurring L-amino acids
  SITE (25): Xaa equals any of the naturally occurring L-amino acids
HCFQNGQKFFPKRILTXWNQNHNHXQTFFSMYLSLYSF

SEQ ID NO: 1697 - protein, 70 aa, Homo sapiens
  SITE (42): Xaa equals any of the naturally occurring L-amino acids
RCPRAVAVRKTKQNKKQTGSEAAPGENRCWRVAMKWTLGAWXAETCDGGGWPWQSQITGVWETPLGNSRV

SEQ ID NO: 1698 - protein, 62 aa, Homo sapiens
PAKVHPVTTPSPDPASPMDEHISTLLHRACFCISQDRPGCIVVAVGTPKPSCCQESRHRGPE

SEQ ID NO: 1699 - protein, 40 aa, Homo sapiens
FGTRVHTHLTDEEAEDRGLGQMLMTSRSSRAAAGRGGSRL

SEQ ID NO: 1700 - protein, 66 aa, Homo sapiens
INLVDDIMLNEISQAQRTAWFYLCDMSRVVKIMGNKRILVVRDLGKEEKRNCLIDIKFQFCKMKKF

SEQ ID NO: 1701 - protein, 84 aa, Homo sapiens
ILVHSLCDFITFEHFSSCPPFCGIKTTLLQILWYLIISERYFEVLLCTSKFLYFSDSQPWLSIEFKCEVFFKMLKLGLTPPSCF

SEQ ID NO: 1702 - protein, 54 aa, Homo sapiens
IRHEVPILPSWNLTSIPFLKKKTGLLRDNSCIIQFTHLKSKASLFKLYFSRQMA

SEQ ID NO: 1703 - protein, 48 aa, Homo sapiens
  SITE (13): Xaa equals any of the naturally occurring L-amino acids
  SITE (47): Xaa equals any of the naturally occurring L-amino acids
FGRENLKKRKKNXHTLFGFFFVLVWLSFIPNSQKELGYINIMYLSIXC

SEQ ID NO: 1704 - protein, 48 aa, Homo sapiens
IRHEKKLTLLELVIKFLMPLFLGIKAVSRFSVFKPSTRELMLVGQMTV

SEQ ID NO: 1705 - protein, 43 aa, Homo sapiens
WLPFFPHSSVPFLHEIHSKTSMLKEYSFIHISKRIAPNLSLLL

SEQ ID NO: 1706 - protein, 108 aa, Homo sapiens
IRHEKKLNDCYQILNRCVTEAGLRIAQDKIQQTTPVQYLGMVVDKQCIQPQKVQIRRDSLKTLNDFQKLLGNINYLRPTLGIPTYTLSNLFSMLRGDSDLRSPRAFDP

SEQ ID NO: 1707 - protein, 36 aa, Homo sapiens
  SITE (27): Xaa equals any of the naturally occurring L-amino acids
  SITE (29): Xaa equals any of the naturally occurring L-amino acids
PSLSVLMVSYLQDLSITKDVAPCKGLXGXIFWPFLP

SEQ ID NO: 1708 - protein, 108 aa, Homo sapiens
  SITE (107): Xaa equals any of the naturally occurring L-amino acids
FGTSLPAPGPRAAVRSPNGRRCRPRAGSVSGRGSGVPFLGSARLLASDSSDRARVRGLAARRSVSLLPSTRASRSPSPPLGFVDFFPPVKLGFLELALALWPLECNXL

SEQ ID NO: 1709 - protein, 58 aa, Homo sapiens
NSARGNVCWPDFPGLRPSGNQWGSVTWRNLLLGCGPGKLGQQATFASCYLLSIKSFIF

SEQ ID NO: 1710 - protein, 33 aa, Homo sapiens
VRRPMVTNSKRRHVSSIPMTAKIPSYRRACLHL

SEQ ID NO: 1711 - protein, 148 aa, Homo sapiens
  SITE (95): Xaa equals any of the naturally occurring L-amino acids
  SITE (105): Xaa equals any of the naturally occurring L-amino acids
  SITE (116): Xaa equals any of the naturally occurring L-amino acids
FGTRKTSLPNTASAPQLSRPAPALSAPAAPLSPRARPSLWVPTTAGACLAWVLDTLLALGPSLVPPTLNLWPSHRRDSRVNWKWRWCSLWTCVGXQRPWRDKALXGVTGHGTCWPXGKRSSWKPLLSVPGCSGASQLESSTSRRCLCE

SEQ ID NO: 1712 - protein, 83 aa, Homo sapiens
FGTSLRLPGSRDPTTSASRGCSWDYRHATHHAQIIFVFFVETGFHHVGQAGLEFLTSGNPSSSAFQSAGIIGVTRALGPRRCF

SEQ ID NO: 1713 - protein, 242 aa, Homo sapiens
  SITE (207): Xaa equals any of the naturally occurring L-amino acids
MSKSRLTVFSFVRRFLLRLMVVLAVFWGGGIALFSVAPVPFSAVMVERQVSAWLHGNFRYVAHSDWVSMDQISPWMGLAVIAAEDQKFPEHWGFDVASIEKALAHNERNENRIRGASTISQQTAKNLFLWDGRSWVRKGLEAGLTLGIETVWSKKRILTVYLNIAEFGDGVFGVEAAAQRYFHKPASKLTRSEAALLAAVLPNPLRXKVSSPSGYVRSRQAWILRQMYQLGGEPFMQQHQLD

SEQ ID NO: 1714 - protein, 68 aa, Homo sapiens
  SITE (32): Xaa equals any of the naturally occurring L-amino acids
  SITE (35): Xaa equals any of the naturally occurring L-amino acids
  SITE (36): Xaa equals any of the naturally occurring L-amino acids
  SITE (43): Xaa equals any of the naturally occurring L-amino acids
  SITE (57): Xaa equals any of the naturally occurring L-amino acids
SYSGSSQVFFCVFLLIVYAYKKVESFSLIFFXCFXXLHSIFCXSINCVSAVFLIDTXSVIQNMRFNKL

SEQ ID NO: 1715 - protein, 74 aa, Homo sapiens
DQPLVRHQNPEKLRKWLYLHMHRNTHTCLQINRILSNMVCTKLLTIASSGEWNLVSEGTSILFLTLYNKHVLLF

SEQ ID NO: 1716 - protein, 88 aa, Homo sapiens
  SITE (68): Xaa equals any of the naturally occurring L-amino acids
KKILYHYLKPWLYIYKYRLQKHPITKKSSSTYRLESSHMPLAESVPILGHNDSSPTFSFSVLEHWNPXSLGNHRNNLNQTEWGCKCLC

SEQ ID NO: 1717 - protein, 173 aa, Homo sapiens
  SITE (91): Xaa equals any of the naturally occurring L-amino acids
VFVWLMLFSYFSVPAALQRRVLVYGVLGAIVLRTIMIFTGSWLISQFDWILYIFGAFLLFTGVKMALAHEDESGIGDKPLVRWLRGHLRMXDTIDNEHFFVRKNGLLYATPLMLVLILVELSDVIFAVDSIPAIFAVTTGPVHCADLKPVCDPRPACDVFPAGGRKERFSMLK

SEQ ID NO: 1718 - protein, 287 aa, Homo sapiens
WIPWALWNTAHNVGGALIPIVMAAAALHYGWRAGMMIAGCMAIVVGIFLCWRLRDRPQALGLPAVGEWRHDALEIAQQQEGAGLTRKEILTKYVLLNPYIWLLSFCYVLVYVVRAAINDWGNLYMSETLGVDLVTANTAVTMFELGGFIGALVAGWGSDKLFNGNRGPMNLIFAAGILLSVGSLWLMPFASYVMQATCFFTIGFFVFGPQMLIGMAAAECSHKEAAGAATGFVGLFAYLGASLAGWPLAKVLDTWHWSGFFVVISIAAGISALLLLPFLNAQTPREA

SEQ ID NO: 1719 - protein, 169 aa, Homo sapiens
  SITE (7): Xaa equals any of the naturally occurring L-amino acids
  SITE (41): Xaa equals any of the naturally occurring L-amino acids
  SITE (75): Xaa equals any of the naturally occurring L-amino acids
VSDVPQXNWEEKVTFQGLTIYLSIYLQETLSKIFVFSLQFXLTSCALHPCVADGQHQERSQAATVQEMTFPALLXSEAFVHKRCCYPSTKDLLSMCTTDHDSGLSCCWPLWSYRNRLGSRSPSPRCLPLPRVWKRARTLPFLCTMESCSPLTPAWQLCTAYPCLQLHHF

SEQ ID NO: 1720 - protein, 62 aa, Homo sapiens
IFFQVNWVFPSPSHRWFLSSRQTDILSGYFLLQCLMCIMPELFFYYSFSLFLFNMRFRIIFV

SEQ ID NO: 1721 - protein, 53 aa, Homo sapiens
  SITE (39): Xaa equals any of the naturally occurring L-amino acids
  SITE (41): Xaa equals any of the naturally occurring L-amino acids
  SITE (43): Xaa equals any of the naturally occurring L-amino acids
YWAIERNKVLVPTPTWVKPGKSVLSGNSPGTKPHGLRFXSXDXPGEADPRDRK

SEQ ID NO: 1722 - protein, 108 aa, Homo sapiens
  SITE (46): Xaa equals any of the naturally occurring L-amino acids
  SITE (73): Xaa equals any of the naturally occurring L-amino acids
  SITE (78): Xaa equals any of the naturally occurring L-amino acids
  SITE (88): Xaa equals any of the naturally occurring L-amino acids
  SITE (94): Xaa equals any of the naturally occurring L-amino acids
LRPGARHSCSYFYPLSWALLPCLALPAPASYPKTGMALLCVNSAPXSFIASTKDCYLEIRNLGLLGASVQDSXHPVCXNALFVPATCXSQALSXISSFLSTVGSLYLL

SEQ ID NO: 1723 - protein, 69 aa, Homo sapiens
  SITE (18): Xaa equals any of the naturally occurring L-amino acids
  SITE (25): Xaa equals any of the naturally occurring L-amino acids
  SITE (56): Xaa equals any of the naturally occurring L-amino acids
  SITE (68): Xaa equals any of the naturally occurring L-amino acids
NKAIKRSWLLDHEEKPRXIVICMSXLFPEEQPSVEWCSWREIAQIGYLGFLKIISXLAWHLGTADLRXV

SEQ ID NO: 1724 - protein, 83 aa, Homo sapiens
  SITE (65): Xaa equals any of the naturally occurring L-amino acids
  SITE (82): Xaa equals any of the naturally occurring L-amino acids
DAGPVASSRRVKRKAVSSVALRSVDNTQNGVSLWMLHGILPGGNSVRSSRHILYGRHGGYTQSGXQQYLLLLHSFGHRYRSXS

SEQ ID NO: 1725 - protein, 321 aa, Homo sapiens
  SITE (270): Xaa equals any of the naturally occurring L-amino acids
REQKLELHRGGGRSRTSGSPGLQAWDAAIFHLMTHAFFKALLFLASGSVILACHHEQNIFKMGGLRKSIPLVYLCFLVGGAALSALPLVTAGFFSKDEILAGAMANGHINLMVAGLVGAFMTSLYTFRMIFIVFHGKEQIHAHAVKGVTHSLPLIVLLILSTFVGALIVPPLQGVLPQTTELAHGSMLTLEITSGVVAVVGILLAAWLWLGKRTLVTSIANSAPGRLLGTWWYNAWGFDWLYDKVFVKPFLGIAWLLKRDPLNSMMNIPXVLSRFAGKGLLLSENGYLRWYVASMSIGAVVVLALLMVCVELRIVGLPLGI

SEQ ID NO: 1726 - protein, 43 aa, Homo sapiens
GHLKERLFFPQNFGAEGTFYIILTSCSSVILFYLFIFNSKGES

SEQ ID NO: 1727 - protein, 57 aa, Homo sapiens
  SITE (1): Xaa equals any of the naturally occurring L-amino acids
  SITE (7): Xaa equals any of the naturally occurring L-amino acids
  SITE (36): Xaa equals any of the naturally occurring L-amino acids
XKNTENXQLGLLGVGPHLYPALGYDHQQLEGGGYIXTEGFSLERSRLKDTTREKKPK

SEQ ID NO: 1728 - protein, 61 aa, Homo sapiens
  SITE (57): Xaa equals any of the naturally occurring L-amino acids
IHAYYFNRKKMSRTIGEGKEVGHRESKQLSQGILTIQGKGNNIWIHMVGLNIRLGYXSGTL

SEQ ID NO: 1729 - protein, 91 aa, Homo sapiens
  SITE (22): Xaa equals any of the naturally occurring L-amino acids
  SITE (23): Xaa equals any of the naturally occurring L-amino acids
WEVSKPETTALDLGCAISCLAXXLSTAFTQRGREEWKLKRLVTTCNCSTREMGSSVCFSQSQYLKLGLLFSWRHPTNGTLTKGEGHRCYLR

SEQ ID NO: 1730 - protein, 73 aa, Homo sapiens
  SITE (38): Xaa equals any of the naturally occurring L-amino acids
  SITE (65): Xaa equals any of the naturally occurring L-amino acids
  SITE (72): Xaa equals any of the naturally occurring L-amino acids
QLKCDEDSVKQDNVRKMPVWKLNVKMPMGWKFSPNVLXPPLLILKWELNHFMDGELFTRASMAGXKSFPKTXY

SEQ ID NO: 1731 - protein, 143 aa, Homo sapiens
  SITE (2): Xaa equals any of the naturally occurring L-amino acids
  SITE (101): Xaa equals any of the naturally occurring L-amino acids
  SITE (127): Xaa equals any of the naturally occurring L-amino acids
  SITE (135): Xaa equals any of the naturally occurring L-amino acids
EXKLKSLSVLLKAQQVESERAQSDIEHLFQHNRKLESVAEEHEILTKSYMELLQRNESTEKKNKDLQITCDSLNKQIETVKKLNESLKEQNEKSIAQLIEXEEQRKEVQNQLVDREHKLANLHQKNXSYQEDKFXNLTKRKRE

SEQ ID NO: 1732 - protein, 52 aa, Homo sapiens
SLSKLLCPMAQVSIFGLRLIILALALKIKPSVTFPAKTLLGSGSIGTLLATS

SEQ ID NO: 1733 - protein, 88 aa, Homo sapiens
  SITE (77): Xaa equals any of the naturally occurring L-amino acids
  SITE (84): Xaa equals any of the naturally occurring L-amino acids
VPSTWYFLIVLPVLLVIVIFAAVGVTRHKSKELSRKQSQQLELLESELRKEIRDGFAELQMDKLDVVDSFGTVPFLXYKHFALXNFLP

SEQ ID NO: 1734 - protein, 75 aa, Homo sapiens
  SITE (29): Xaa equals any of the naturally occurring L-amino acids
LRKMADPQSIQESQNLSMFLANHNRITQXLHQQLEVIPGYEELLADIVNICVDYYENKMYLTPSEKHMLLKVKLP

SEQ ID NO: 1735 - protein, 62 aa, Homo sapiens
  SITE (8): Xaa equals any of the naturally occurring L-amino acids
  SITE (10): Xaa equals any of the naturally occurring L-amino acids
  SITE (58): Xaa equals any of the naturally occurring L-amino acids
  SITE (62): Xaa equals any of the naturally occurring L-amino acids
HLVCCSKXLXTSGTFISVQVSVEGPTGQSSVLVDSEGELGDSYPVTCSEGASRGVLLXIGTX

SEQ ID NO: 1736 - protein, 56 aa, Homo sapiens
TLFVLDISVCFTVKFHYRGLLGREMQIVVGHILKFELFTYQYLQIGVYFPTKLQNI

SEQ ID NO: 1737 - protein, 111 aa, Homo sapiens
  SITE (104): Xaa equals any of the naturally occurring L-amino acids
  SITE (106): Xaa equals any of the naturally occurring L-amino acids
  SITE (109): Xaa equals any of the naturally occurring L-amino acids
TESIPLFALSVLFWKVFFNYIFNYCFSFDCSRFFFRNITLRLNLYSWVFHSYRLLFKVLYFIESKASICCKEGTIIICTTKGRKKCCPIKLWTIMPWITVPVEXGXGGXTP

SEQ ID NO: 1738 - protein, 60 aa, Homo sapiens
QGIRSVVCCFFLQQVFSKGLFNNLIVTRNYILFTLLSTYNVSSYIFSFYVLYLSPIPSCF

SEQ ID NO: 1739 - protein, 69 aa, Homo sapiens
  SITE (4): Xaa equals any of the naturally occurring L-amino acids
  SITE (32): Xaa equals any of the naturally occurring L-amino acids
KAPXSPRGRKNKLNPPWTCVFTLGWFPRILPXSLKQYDHVVKLLPLYPVSTVQPNMFFFVPNFCHLSNL

SEQ ID NO: 1740 - protein, 57 aa, Homo sapiens
SCCQQIYFGFLVRVCVTRDNILPSDQYCTLNPQIPPAQSYIFLNKSPSLFAIIYKEH

SEQ ID NO: 1741 - protein, 55 aa, Homo sapiens
  SITE (1): Xaa equals any of the naturally occurring L-amino acids
  SITE (5): Xaa equals any of the naturally occurring L-amino acids
XSLPXGVFPSPRGCPLPSLKPAPVNCAWIFSSLTVSDVNNLSQKFLYNLPQSVSL

SEQ ID NO: 1742 - protein, 42 aa, Homo sapiens
  SITE (17): Xaa equals any of the naturally occurring L-amino acids
DEEGHEERTAKDYRETXGSDLYIHHLDCGDCFVSQNVSNYMF

SEQ ID NO: 1743 - protein, 50 aa, Homo sapiens
ECAVAEGITYITCFQVAHRQMKKATFLCIHRKTNIIPLLKTFLNSAEYTQ

SEQ ID NO: 1744 - protein, 66 aa, Homo sapiens
AVLKKVWGPTRRPRSSHWGGESSGEAGTQGLKKKNSSIWKHLQNSRRKTFKSSPLPSKRTNMHTHN

SEQ ID NO: 1745 - protein, 174 aa, Homo sapiens
NPRAALILGINCGQAIINADDEVGRRWLAKLPDAVAVSMEDHINPNCHGRWLKATEVNYHDSGATIRFSSSWGDGEIESHLMGAFNVSNLLLALATLLALGYPLADLLKTAARLQPVCGRMEVFTAPGKPTVVVDYAHTPDALEKPYRRRVCTVRASCGVSLAVVAIAIKVSVH

SEQ ID NO: 1746 - protein, 89 aa, Homo sapiens
YLLKCIDDSCEPKRAVVVIPRRNKNAFVYHLRLPVISVPVAFIPENGLILQKKMMILEVGFPNKLCGGEGRRGFYSSRLSSSYSITIRF

SEQ ID NO: 1747 - protein, 154 aa, Homo sapiens
  SITE (142): Xaa equals any of the naturally occurring L-amino acids
EYRRGYKFSTYATWWIRQAITRSIADQARTIRIPVHMIETINKLNRISRQMLQEMGREPTPEELAERMLMPEDKIRKVLKIAKEPISMETPIGDDEDSHLGDFIEDTTLELPLDSATTESLRAATHDVLAGLDRALKQNSCXCFSKGGGPGTQF

SEQ ID NO: 1748 - protein, 55 aa, Homo sapiens
  SITE (45): Xaa equals any of the naturally occurring L-amino acids
  SITE (46): Xaa equals any of the naturally occurring L-amino acids
VKIQRLQGLTTSNTTSPMRITFQRSSSQADAPETTRLGRNCSIFXXAGTTLLEIT

SEQ ID NO: 1749 - protein, 76 aa, Homo sapiens
MPLNFSSLVQWDCGTRGTWDCVLKQPRGAWPSLIPLHFSPFPESSVRELANLPSASLVSRRKFPASSSIFACTWCI

SEQ ID NO: 1750 - protein, 63 aa, Homo sapiens
LMALRFLLLSIGPVPSLGNIAAAGSDEKCKLAMQRGAQSSVNYSQGSLKDAPGMGGQDCGGGI

SEQ ID NO: 1751 - protein, 53 aa, Homo sapiens
  SITE (53): Xaa equals any of the naturally occurring L-amino acids
FIFSFYIEQSVFLMFLLRIFLLYFHRSDHHVIFLSCTVLCHVGIKALLTSQKX

SEQ ID NO: 1752 - protein, 59 aa, Homo sapiens
PCFMFIHLLMFGLIEDCWILTYASAFILLQYVVLTEVYEENGHSHRHVLEKEDLNGFFK

SEQ ID NO: 1753 - protein, 226 aa, Homo sapiens
  SITE (85): Xaa equals any of the naturally occurring L-amino acids
  SITE (95): Xaa equals any of the naturally occurring L-amino acids
  SITE (96): Xaa equals any of the naturally occurring L-amino acids
  SITE (142): Xaa equals any of the naturally occurring L-amino acids
  SITE (223): Xaa equals any of the naturally occurring L-amino acids
AATVAVAAFTSISAPDMKVNDRVAAERQHVLAFALAGGVLLLMAVVVALSFGRDAHGWTWASGALLEDLMPWRWPRIMAALFAGXMLAVAGCIIXXLTGNPMASPEVLGISSGAAFGVVLMLFLVPGNAFGWLLPAGSLGAXVTLLIIMIAAGRGGFSPHRMLLAGMALSTAFTMLLMMLQASGDPRMAQVLTWISGSTYNATDAQVWRTGIVWYFAAITPLXRAG

SEQ ID NO: 1754 - protein, 41 aa, Homo sapiens
EHPGKAETTGKHVAQDTFMAEQRRKVTNSGTNVKWLTTLRW

SEQ ID NO: 1755 - protein, 50 aa, Homo sapiens
  SITE (43): Xaa equals any of the naturally occurring L-amino acids
  SITE (47): Xaa equals any of the naturally occurring L-amino acids
RRAQPSDIGLLATLFYITYGVSKFVSGIVSDRSNARYFMGIGXIATXHYQ

SEQ ID NO: 1756 - protein, 71 aa, Homo sapiens
  SITE (31): Xaa equals any of the naturally occurring L-amino acids
  SITE (56): Xaa equals any of the naturally occurring L-amino acids
  SITE (59): Xaa equals any of the naturally occurring L-amino acids
  SITE (69): Xaa equals any of the naturally occurring L-amino acids
YSIVWIYHIWFKHSSVGGHLGCFHFLTINNXTAGQAWWLMPVIPALWEGPGGQITXSGXRDPSWVNMVXPP

SEQ ID NO: 1757 - protein, 27 aa, Homo sapiens
LDHCTPALVTEQDPVCKNKIMKKKIFF

SEQ ID NO: 1758 - protein, 142 aa, Homo sapiens
  SITE (136): Xaa equals any of the naturally occurring L-amino acids
FDDTLGSLTARPGFLRLYGNDSLNSTFTQSTVARRWQHFAFRAETRMEFSPVHFQQSAGLTCYYNSKNWSYCFVDYEEGQGRTIKVIQLDHNVPSWPLHEQPIPVPEHAESVWLRVDVDTLVLPLQLFVLMARRGXTCRWTY

SEQ ID NO: 1759 - protein, 121 aa, Homo sapiens
GGGGLTWGSHLPEGVLPTALRQNRMIRALRGSALSLPQPEGTCSPPISATLPTSVPTKRGRCSPGARSPYRILLTKTERNRLFDSNIKKKRAAFCLQKKCTQAAGRKFWKMIKEKKKKKTR

SEQ ID NO: 1760 - protein, 75 aa, Homo sapiens
  SITE (28): Xaa equals any of the naturally occurring L-amino acids
  SITE (65): Xaa equals any of the naturally occurring L-amino acids
  SITE (71): Xaa equals any of the naturally occurring L-amino acids
TPLYFSFKIYPPTVIPKLNSTLKGRWRXFSLPPRPKPSSSRLLDTSVHPQHKGSCWPLNRGAALXQAHRDXSRPM

SEQ ID NO: 1761 - protein, 55 aa, Homo sapiens
TSLGRSGNTWDPNQRDLYRDVMLENYRNLVFTGEDIPFLKPVVVGFTGSEEKSPG

SEQ ID NO: 1762 - protein, 298 aa, Homo sapiens
PVYSQSWHKFWFRWQRRWLQPDKRGKVVGTIMSGLLLGILLARTVAGLLANLGGWRTVFWVASVLMALMALALWRGLPQMKSETHLNYPQLLGSVFSMFISDKILRTRALLGCLTFANFSILWTSMAFLLAAPPFNYSDGVIGLFGLAGAAGALGARPAGGFADKGKSHHTTTFGLLLLLLSWLAIWFGHTSVLALIIGILVLDLTVQGVHITNQTVIYRIHPDARNRLTAGYMTSYFIGGAAGSLISASAWQHGGWAGVVWLARRLPCLTYWSGGEVFIVRKPQIKQSATVFVALHL

SEQ ID NO: 1763 - protein, 144 aa, Homo sapiens
  SITE (133): Xaa equals any of the naturally occurring L-amino acids
ADIKESMENPQAKWLKSPTTPIDPEKQWNLASPSEETLNEGEILEYTKSIEKLNSSLHFLQQEMQRLSLQQEMLMQMREQQSWVISPPQPSPQKQIRDFKPSKQAGLSSAIAPFSSDFPSVLLTHLPQVFLTXKSASFSWLKSK

SEQ ID NO: 1764 - protein, 87 aa, Homo sapiens
  SITE (59): Xaa equals any of the naturally occurring L-amino acids
  SITE (63): Xaa equals any of the naturally occurring L-amino acids
VDSKWWLCRWPLSNKFNKPEITGYLVSNQFFQMFYFSSNYVWVIGPSDHCQVIFSHFQXIRLXPESTSPLKNSYFIFDSTLTCCLQY

SEQ ID NO: 1765 - protein, 98 aa, Homo sapiens
  SITE (30): Xaa equals any of the naturally occurring L-amino acids
  SITE (31): Xaa equals any of the naturally occurring L-amino acids
AGIRHRRNGNSRLCRGKQIYFVLFCFLRRXXPCGWAGVQWRDLGSLQPPPPGFRGFSCLSLLSSWDYKHAPPRPANFCSFSRDGVSPCWPDDLNLLTS

SEQ ID NO: 1766 - protein, 56 aa, Homo sapiens
  SITE (5): Xaa equals any of the naturally occurring L-amino acids
  SITE (9): Xaa equals any of the naturally occurring L-amino acids
  SITE (45): Xaa equals any of the naturally occurring L-amino acids
PLSYXSRWXTGPPVLLGEHMPPFGLHIALWLLWALRVVATETPMXPEGLKYLIYGL

SEQ ID NO: 1767 - protein, 52 aa, Homo sapiens
RTTKTSDRFQRVKFTKEIKGLKVEITHCGQMKRKYRVCNVTRRPASHQTFPL

SEQ ID NO: 1768 - protein, 116 aa, Homo sapiens
KWMHLELEMAQDDPSYNGAITVCCNEKNYSFSLACNAKRLNCFPVLMDIVSNGLLGMVKPSVHIRTERSTFLEVNIYNLTIPDSPLSGISQITLLSAGILFLLSKPLHNKLTFGLI

SEQ ID NO: 1769 - protein, 68 aa, Homo sapiens
SLTEDFKQYLNVLRLCLDIPAASFHSFQVILQLAMGCLIAIRSLLPSSAQVRRIDEEQKFLCEMWIPE

SEQ ID NO: 1770 - protein, 44 aa, Homo sapiens
PLHIHLRHCIHMFLIHLHFTHQHLLGKHPVTSKFYELCLLGCNS

SEQ ID NO: 1771 - protein, 45 aa, Homo sapiens
  SITE (33): Xaa equals any of the naturally occurring L-amino acids
YSKYYYKPIIICNLEKWTNVPFTKDAIKAVNEXLSHIPRNPEMPN

SEQ ID NO: 1772 - protein, 57 aa, Homo sapiens
  SITE (10): Xaa equals any of the naturally occurring L-amino acids
LFRKELFARXQVEVLYFAKSAEITGVRSETISVASRNKSVAAVEGDRNSDIRGLGGC

SEQ ID NO: 1773 - protein, 35 aa, Homo sapiens
LTGIFVHLYFYPEWGYFQREVSFNKPFFVLSVLGK

SEQ ID NO: 1774 - protein, 111 aa, Homo sapiens
  SITE (57): Xaa equals any of the naturally occurring L-amino acids
GVQSRPIICAREVLKALGAVRLNPQTHKKIPEASLTFADGASLKGKFKVQLGAAALXVETCGCGYEGASSAMPLAPGEAVPVTLCQSNGEAAVVRPDQIKPNQANHGEWRH

SEQ ID NO: 1775 - protein, 234 aa, Homo sapiens
ARGIIKIVHKNRAQMLTRDRAFESTLKSWEDKQKCDSGKPVLRTHLYIHHAIDLATEEVSQMQLCSQAAEELITRICDAATIHCLLEQELAHAVNACSHALNKANPRCPESLTRDTATEIAINVKALYNETESLLVGRVPLQLESPHEERVSNALHSVEVELQKLTEIPWLYYILHPNEDEEPPMDCTKRNNRSTVFRIVPKFKKEKVQKQKTSSQPGSGDTESGSCEANSPGN

SEQ ID NO: 1776 - protein, 53 aa, Homo sapiens
  SITE (33): Xaa equals any of the naturally occurring L-amino acids
  SITE (37): Xaa equals any of the naturally occurring L-amino acids
NKLSFLDHNVIMKHINSVYFLKKTSTMIKFGMXVSSXSQAGHFDPPCLEVGGP

SEQ ID NO: 1777 - protein, 154 aa, Homo sapiens
  SITE (78): Xaa equals any of the naturally occurring L-amino acids
  SITE (89): Xaa equals any of the naturally occurring L-amino acids
  SITE (94): Xaa equals any of the naturally occurring L-amino acids
  SITE (100): Xaa equals any of the naturally occurring L-amino acids
  SITE (101): Xaa equals any of the naturally occurring L-amino acids
  SITE (104): Xaa equals any of the naturally occurring L-amino acids
  SITE (107): Xaa equals any of the naturally occurring L-amino acids
  SITE (108): Xaa equals any of the naturally occurring L-amino acids
  SITE (111): Xaa equals any of the naturally occurring L-amino acids
IGDAWLVERMDCLPALEKLDWHLVFLLGWIRDVMSSQLIDYGKLGDTNERAMRMADFWLTEKDLIPKLFQVLAPRYKXQTGGYTRMLQXPNRSXDRAKMXXIEXKGXXLPXLPLPRRDSHLTLLNQLLQGLRQDLRQSQEASNHSSHTAQTPGI

SEQ ID NO: 1778 - protein, 62 aa, Homo sapiens
LTSYWIVALKFISKLLFALLKRLPKECMIASGGSSSTLRRYVPIVAYLLCNLAMIRSLLHLT

SEQ ID NO: 1779 - protein, 60 aa, Homo sapiens
  SITE (57): Xaa equals any of the naturally occurring L-amino acids
EQLTKIEPGELYNGTKVTKMEDDIKKLLGRYGYAYPRVQSMPEINDADKTVKLRVKXGCG

SEQ ID NO: 1780 - protein, 51 aa, Homo sapiens
GLLPHEYTITPFLGLGIVIIPLKSNLAVSIKSHKMSISCNVLCFENSEVQF

SEQ ID NO: 1781 - protein, 32 aa, Homo sapiens
  SITE (21): Xaa equals any of the naturally occurring L-amino acids
RKGSVRSVMGYDETILSLCSXPSSKVHVNLMV

SEQ ID NO: 1782 - protein, 56 aa, Homo sapiens
  SITE (51): Xaa equals any of the naturally occurring L-amino acids
  SITE (56): Xaa equals any of the naturally occurring L-amino acids
FLLILNIHSLFWCELNYNHNSFSTFNLDWNFLFHFLSLVEGSSTSSMDVCXTLDVX

SEQ ID NO: 1783 - protein, 59 aa, Homo sapiens
LSPGEEINCGIFIQWNTKKKKRKIFILLYINIHIKASTIFSVIGSNNASLLKSMSEDLC

SEQ ID NO: 1784 - protein, 64 aa, Homo sapiens
  SITE (42): Xaa equals any of the naturally occurring L-amino acids
  SITE (45): Xaa equals any of the naturally occurring L-amino acids
STRSRFWLIQFLVRGAIHIKCSHFRGVKINQPYLINSSSTLXTLXAQEAATLGVKGSRQYFFRG

SEQ ID NO: 1785 - protein, 50 aa, Homo sapiens
VTSKKYLHSNIYAFICQTTGHRMLAKLTHKINCHSMGLDEITQELMYLEK

SEQ ID NO: 1786 - protein, 54 aa, Homo sapiens
  SITE (38): Xaa equals any of the naturally occurring L-amino acids
MNFPLKRPPPQLTANCSNTSGFQPCFLPARRCHVILFXENKTETKQNRANTFFN

SEQ ID NO: 1787 - protein, 43 aa, Homo sapiens
GKPKPGNNASTGSLGAHWGKTIGVLLRTWPPDGCVFPVFSPCS

SEQ ID NO: 1788 - protein, 138 aa, Homo sapiens
TVYMYVCVHIYIYIFIITIFVKFISINGELGKLRKFDRNLSSVIVLHNLFPFCFANLSSVMVLHNLFPFCFALCLVSLNIYVTGYILVILLKSRQLMSTIFFTNCITMRVHITLSLLQTSQIRQHIEFHCSLVPKHFL

SEQ ID NO: 1789 - protein, 97 aa, Homo sapiens
  SITE (1): Xaa equals any of the naturally occurring L-amino acids
  SITE (18): Xaa equals any of the naturally occurring L-amino acids
XASMKAQCPGMVLPVLSXGSGHLALDQQPQFLPPSYVVSFSHPPLSLSSSWPPQVSGGRLKGEGLSQPHPPSYCIPKGSFAPTPGHKEINMASLGSS

SEQ ID NO: 1790 - protein, 88 aa, Homo sapiens
ICGAAIFLFSLVSQVLRTVSNQENYVSLFTEHEYLDKISGIIFEVHIFVIFKDYLVLTFNGFLNFLQLLAAGYYGSIFFNHQWKFYSS

SEQ ID NO: 1791 - protein, 77 aa, Homo sapiens
  SITE (16): Xaa equals any of the naturally occurring L-amino acids
  SITE (70): Xaa equals any of the naturally occurring L-amino acids
TLKCKEKKNQQWKEKXTKSNPLASSFDWDHSTGSAGRLVEPGPWQPGVPQTSPFHLQVPSIPWGPFNLTXHFGLLIS

SEQ ID NO: 1792 - protein, 38 aa, Homo sapiens
YSNILVEMSSTALFPVVGKLPLICKDLIQNGQSEFEQV

SEQ ID NO: 1793 - protein, 47 aa, Homo sapiens
RKSEHNPTLTHIPLCKNHDPNASVDTGLWTAGKASGAFALLSDLPLD

SEQ ID NO: 1794 - protein, 57 aa, Homo sapiens
  SITE (45): Xaa equals any of the naturally occurring L-amino acids
  SITE (52): Xaa equals any of the naturally occurring L-amino acids
  SITE (54): Xaa equals any of the naturally occurring L-amino acids
  SITE (57): Xaa equals any of the naturally occurring L-amino acids
KEDGSCKTSKTFSRTPDWWHVAWQKEIAPFSGCRETTLKAQKASXAPGATLXDXRPX

SEQ ID NO: 1795 - protein, 68 aa, Homo sapiens
HTSPKTRHCFTNQWYHYYNQKDKIVVMYYPILNVYSHFVNCTQNSFLTIFPKPESKAKFNMLCFVKSS

SEQ ID NO: 1796 - protein, 83 aa, Homo sapiens
  SITE (10): Xaa equals any of the naturally occurring L-amino acids
  SITE (83): Xaa equals any of the naturally occurring L-amino acids
RGISSWDRPXGLRCDRRREVPWEPGGRRAELCGQTRGPCPPPVKPCCSRGSHEAEREECSPLCTQRLPSGPHGLPAHLGGPRX

SEQ ID NO: 1797 - protein, 38 aa, Homo sapiens
  SITE (9): Xaa equals any of the naturally occurring L-amino acids
IKKKKKNPXFFFLLYWTVNRILRLIYFIFNIFRNKVIG

SEQ ID NO: 1798 - protein, 44 aa, Homo sapiens
TFSHVNMLPPFLLSQRTQICYSLSFLLTNNITFQPSSYTYPIKT

SEQ ID NO: 1799 - protein, 66 aa, Homo sapiens
VGGITDQCHHTQLIFILLVKMAFHHVGQDSLELLASSGLPTLASQSAGITGMSHSTRPCLIFLVLL

SEQ ID NO: 1800 - protein, 78 aa, Homo sapiens
  SITE (72): Xaa equals any of the naturally occurring L-amino acids
WGQMRSLYCIKWIALRSFGLGALAISRQLTLASVPGSPLLFSAPAFIVHCVQRHGSCHVGNMLDLSILEGCXLGSGNC

SEQ ID NO: 1801 - protein, 49 aa, Homo sapiens
MPTREKLNLILHPKYQRLDKPMLIGALWLFILEAIALFRGSPGQGRLGC

SEQ ID NO: 1802 - protein, 142 aa, Homo sapiens
  SITE (51): Xaa equals any of the naturally occurring L-amino acids
  SITE (132): Xaa equals any of the naturally occurring L-amino acids
HQADSEVWMDEYKQYYYAARPFALERPFGNVESRLDLRKNLRCQSFKWYLXNIYPELSIPKESSIQKGNIRQRQKCLESQRQNNQETPNLKLSPCAKVKGEDAKSQVWAFTYTQADPPGRSCACQSSPCSLXAPVVSCSFAR

SEQ ID NO: 1803 - protein, 67 aa, Homo sapiens
  SITE (31): Xaa equals any of the naturally occurring L-amino acids
FSLSAMPIYQSAEKYLRFMVCCKFKVFIVIXGKFGSSFRAHYACVWYLYHLLDNYTLIYLYKLEDKF

SEQ ID NO: 1804 - protein, 91 aa, Homo sapiens
  SITE (3): Xaa equals any of the naturally occurring L-amino acids
  SITE (10): Xaa equals any of the naturally occurring L-amino acids
AAXLARPLPXQRLALPGASGGGWHSNPASLPPGDPQLIALIVEQLKSRGLFDSFRRDCLADVDTKPAYQNLRQKVDNFVSHIWTSRNGILR

SEQ ID NO: 1805 - protein, 60 aa, Homo sapiens
  SITE (38): Xaa equals any of the naturally occurring L-amino acids
  SITE (39): Xaa equals any of the naturally occurring L-amino acids
CLSYSLCKMGRILLALSQLSSWTGGRTIKAEQEVFMIXXFSAATTHHGHETVWFPGSRAV

SEQ ID NO: 1806 - protein, 31 aa, Homo sapiens
  SITE (5): Xaa equals any of the naturally occurring L-amino acids
LRGRXGNGGAGKWVTCRVPLEVDPGFKPRLI

SEQ ID NO: 1807 - protein, 63 aa, Homo sapiens
EFGTRIPAVSKIMSPLFKKFLTFLTLPSPIFFLNYSCRTFILLSLHIIHFGFAVSHEFVFCFH

SEQ ID NO: 1808 - protein, 63 aa, Homo sapiens
  SITE (43): Xaa equals any of the naturally occurring L-amino acids
KAMTLGICTLHCMYLFSSSELIWNHVTENDSPGPNTFKFNDWXYSNNCGYLILSHWFISIAPI

SEQ ID NO: 1809 - protein, 85 aa, Homo sapiens
  SITE (60): Xaa equals any of the naturally occurring L-amino acids
QQFTGHMEVEEHVKLHHEDTVSHIHYVGNYRAVLFSMVATNVWHFNKMKNQARCSSSCLXSQHFGRPRWVDHLRVRSSRPAWATW

SEQ ID NO: 1810 - protein, 74 aa, Homo sapiens
LGWCVYFKSEGALMLAHHTLSILGIIMALVLGESGTEVNAVLFGSELTNPLLQMRWFLRETGHYHSFTGDVVDF

SEQ ID NO: 1811 - protein, 51 aa, Homo sapiens
SQHFGRSRQADHLRSRVRDQPDQHGETPSLIKIQNEPGVVAYACNPSYSGG

SEQ ID NO: 1812 - protein, 65 aa, Homo sapiens
  SITE (23): Xaa equals any of the naturally occurring L-amino acids
  SITE (33): Xaa equals any of the naturally occurring L-amino acids
  SITE (47): Xaa equals any of the naturally occurring L-amino acids
GFLGNGFLNGIHSPGFRLSWVLXRFVLKKKKLXPKNSTKQLGGRQGXNKLDTEKRRQNKITYKLY

SEQ ID NO: 1813 - protein, 68 aa, Homo sapiens
IVSKWTRNRKLLDVSLPGFHILPFVFAANRGSGAAGQLPDWRCSGESTCFGEEILTLDSICTIVKGEL

SEQ ID NO: 1814 - protein, 125 aa, Homo sapiens
  SITE (72): Xaa equals any of the naturally occurring L-amino acids
  SITE (121): Xaa equals any of the naturally occurring L-amino acids
GGADAQGPAVPPEDERLLHFPSLGASPDSPSSWPHLHSEPGTILNSGEVTVNQTGRAPWPTRTFHYRRGGRXELVPTEAPTGACTAPGHSSSQCFKALTLLSRGLSPKSYVWNPWVPSRVXVVIG

SEQ ID NO: 1815 - protein, 45 aa, Homo sapiens
AMFMPLHSSLGNRARPSLNVFLKILFYLYLYFINFFSRLGTDNYS

SEQ ID NO: 1816 - protein, 50 aa, Homo sapiens
  SITE (4): Xaa equals any of the naturally occurring L-amino acids
  SITE (39): Xaa equals any of the naturally occurring L-amino acids
VIEXGGINGLQSLGPGIKRIASSTSFLSELALGPSWHVXRKLKQPLEKAK

SEQ ID NO: 1817 - protein, 92 aa, Homo sapiens
  SITE (46): Xaa equals any of the naturally occurring L-amino acids
NSAGHKPSSNRESSKQSAAKEKDLLPSPAGPVPSKDPKTEHGSRKXTISQSSSLKSSSNSNKETSGSSKNSSSTSKQKKTEGRLPVAPRRLR

SEQ ID NO: 1818 - protein, 144 aa, Homo sapiens
LILKAISEAQESVTKTTNYSTVPQKQTLPVAPRTRTSQEELLAEVVQGQSRTPRISPPIKEEETKGDSVEKNQGTQQRQLLSRLQIDPVMAETLQMSQAEMSELSVAQKPEKLLERCKYWPACKNGDECAYHHPISPCKAFPNC

SEQ ID NO: 1819 - protein, 64 aa, Homo sapiens
FIGLNTCFTVIYETGISTMKTYLTDFLRDEEMSKIANQAFFSPEIKVLMNTFINTSAATTLSRI

SEQ ID NO: 1820 - protein, 54 aa, Homo sapiens
KLKAYRNKGYLRKGVGILEYYELERTITLVQVHLNAGTFPEKVLCFSNICLYPL

SEQ ID NO: 1821 - protein, 45 aa, Homo sapiens
  SITE (5): Xaa equals any of the naturally occurring L-amino acids
  SITE (39): Xaa equals any of the naturally occurring L-amino acids
  SITE (44): Xaa equals any of the naturally occurring L-amino acids
MRGSXNTRGAFGGNLKIKVTWIQCILGGTNMGQLKLLWXGGKSXE

SEQ ID NO: 1822 - protein, 40 aa, Homo sapiens
MLFEAQKYASFTFCIYLQPFSKGRLLLSADGETEALRIND

SEQ ID NO: 1823 - protein, 72 aa, Homo sapiens
MVFDESWPSYPETKTSEWIAEEELPPFPTAVGGSLLVNISNCNNILTEGGVKQRHQPAVDHREKLSRKTKRM

SEQ ID NO: 1824 - protein, 63 aa, Homo sapiens
  SITE (52): Xaa equals any of the naturally occurring L-amino acids
  SITE (55): Xaa equals any of the naturally occurring L-amino acids
MKCGDDIQFRMLMLVEREKKYQVEAEDRIIGRDLRNCRFIHFSTLISMACTXIRXLEWTCVEF

SEQ ID NO: 1825 - protein, 88 aa, Homo sapiens
  SITE (1): Xaa equals any of the naturally occurring L-amino acids
  SITE (16): Xaa equals any of the naturally occurring L-amino acids
  SITE (22): Xaa equals any of the naturally occurring L-amino acids
  SITE (29): Xaa equals any of the naturally occurring L-amino acids
  SITE (32): Xaa equals any of the naturally occurring L-amino acids
  SITE (33): Xaa equals any of the naturally occurring L-amino acids
  SITE (35): Xaa equals any of the naturally occurring L-amino acids
XRYSVGKSKRTTKLHXGISTPXSTILVAXSRXXSXARNFLSTSSCFLNSASIVFVARLILPNAMSSYEIATDISQLWILFASFLYQSV

SEQ ID NO: 1826 - protein, 63 aa, Homo sapiens
NYLVNHKSVSLHCPLLFPTTNSTSRKESFKVRLGFICGFYGRHNKGTLGIALLRGAQYREASS

SEQ ID NO: 1827 - protein, 67 aa, Homo sapiens
  SITE (32): Xaa equals any of the naturally occurring L-amino acids
  SITE (41): Xaa equals any of the naturally occurring L-amino acids
  SITE (58): Xaa equals any of the naturally occurring L-amino acids
  SITE (63): Xaa equals any of the naturally occurring L-amino acids
RVYEQFDVAENLFRKKHHGIEERGPDSSPGEXWTAFGGGGXSWERLDGWIHVFLPLHXLLLAXVPAS

SEQ ID NO: 1828 - protein, 56 aa, Homo sapiens
  SITE (53): Xaa equals any of the naturally occurring L-amino acids
SDRWSSGGNGHLPAVHLLCGRVPNRSWTGTICGPRVGDPCLNGTCFSLKLKIXVAF

SEQ ID NO: 1829 - protein, 100 aa, Homo sapiens
WLLARVFFGLQLYHFNLCRCLHMSFFSVCILVSKFPSPYEDTTYWLIQDMCPDNKGLVILKGENRFCGTIAVSVTSTISLIVIFYFICWQDLGGCNVACS

SEQ ID NO: 1830 - protein, 196 aa, Homo sapiens
  SITE (18): Xaa equals any of the naturally occurring L-amino acids
  SITE (50): Xaa equals any of the naturally occurring L-amino acids
  SITE (51): Xaa equals any of the naturally occurring L-amino acids
  SITE (154): Xaa equals any of the naturally occurring L-amino acids
  SITE (171): Xaa equals any of the naturally occurring L-amino acids
  SITE (183): Xaa equals any of the naturally occurring L-amino acids
  SITE (192): Xaa equals any of the naturally occurring L-amino acids
HTGLDNPEQKSSQRTGKXLLKTLTASEMLPLLDHWNTQTKKVSLREIMSXXIALQEKHNLKRETLMFEKDCATKLKEKQLFKIFPAINQNFLVDIFKDHNYSLEHTVQFLNCVLEGDPVKTVVAQEFVHQNENVTSHTGQKSKEKKPKKLKETXETPSELSFQDFEYPDYXDYRAEAFLHQQXRMECYRRPXKLIG

SEQ ID NO: 1831 - protein, 53 aa, Homo sapiens
  SITE (3): Xaa equals any of the naturally occurring L-amino acids
  SITE (24): Xaa equals any of the naturally occurring L-amino acids
  SITE (26): Xaa equals any of the naturally occurring L-amino acids
  SITE (28): Xaa equals any of the naturally occurring L-amino acids
  SITE (30): Xaa equals any of the naturally occurring L-amino acids
  SITE (32): Xaa equals any of the naturally occurring L-amino acids
  SITE (37): Xaa equals any of the naturally occurring L-amino acids
LVXWVSVIGIIIDISGCYIFKNHXIXCXLXAXIYPRXPQCIELVVEGSSMFHL

SEQ ID NO: 1832 - protein, 82 aa, Homo sapiens
EALGEPQECRQPPAGSGAAGPWEWFICRQCGGSLGPGNPPSRWALGKKVLSTSPPCGPSPRMHKQGQLPDTFATSPHSCLWT

SEQ ID NO: 1833 - protein, 57 aa, Homo sapiens
  SITE (29): Xaa equals any of the naturally occurring L-amino acids
  SITE (56): Xaa equals any of the naturally occurring L-amino acids
SSHKSHCNNLFSTKPAVTKPQKFTVINFXFQLYRGCLEIYGQICNPETAKNFLAKXH

SEQ ID NO: 1834 - protein, 71 aa, Homo sapiens
FKNGHIKINRFAIDKGSENYGLWFKSNPLSVSAKIYWNTTTLIHLCIVYGCFHAITVKLSSCDRSHKVHKT

SEQ ID NO: 1835 - protein, 54 aa, Homo sapiens
EIHLQLQLQSMPLSHFTLIKSQLPLLHWNHKLTFQSVGLFLSKFCFLIQFNHCE

SEQ ID NO: 1836 - protein, 37 aa, Homo sapiens
  SITE (27): Xaa equals any of the naturally occurring L-amino acids
GRIYWLNASLATEERQYPTLQGKGRSXRGNMEVIKVN

SEQ ID NO: 1837 - protein, 32 aa, Homo sapiens
  SITE (15): Xaa equals any of the naturally occurring L-amino acids
HLSLYFDTKTWTQLXRGTMQYKVTIDNIYQIS

SEQ ID NO: 1838 - protein, 53 aa, Homo sapiens
  SITE (1): Xaa equals any of the naturally occurring L-amino acids
XVGYGEGTCHYTLNRHFRQRCILGAGHSRLMSLGSRLLREPEVGEPHFEPRFW

SEQ ID NO: 1839 - protein, 66 aa, Homo sapiens
KLRLIYSSSQDRTRKNKQSFQWVLTKYKEDEVQIICNSGVDITVINFQPLLAFKQRIPDHSEGCCD

SEQ ID NO: 1840 - protein, 33 aa, Homo sapiens
TPHPQKFSDLRSQRLARILEGTTRVGEVRLHTE

SEQ ID NO: 1841 - protein, 91 aa, Homo sapiens
  SITE (66): Xaa equals any of the naturally occurring L-amino acids
  SITE (71): Xaa equals any of the naturally occurring L-amino acids
MEILTLKYGTAGKSYLEIIITWRVSNITFSSLYPHFFPLKKNTHTHTTISLLFAVGIQYAIAFLIXEVHFXFLYAYFNGQFLISLNMSLLS

SEQ ID NO: 1842 - protein, 51 aa, Homo sapiens
PPHQYLTNFMYQSGFFFNGIMTVFIERVLPKKPTFGIGCSIEKKHWSFFQN

SEQ ID NO: 1843 - protein, 255 aa, Homo sapiens
  SITE (7): Xaa equals any of the naturally occurring L-amino acids
  SITE (9): Xaa equals any of the naturally occurring L-amino acids
IGANCSXFXESKGCFANTTPSGKSVSSSSSVETGPSVSEPPGLPRVSAYVDTTADLDRKLSFSHSDHSSEMSLPEVQKDKYPEEFSLLKLQTKDGHRPEWTFYPRFSSNIHTYHVGKQCFFNGVFLGNKRSLSERTVDKCFGRKKYDIDPRNGIPKLTPGDNPYMYPEQSKGFHKAGSMLPPVNFSIVPYEKKFDTFIPLEPLPQIPNLPFWVKEKANSLKNEIQEVEELDNWQPAVPLMHMLHLSGALDFPRQS

SEQ ID NO: 1844 - protein, 68 aa, Homo sapiens
VGYIRGLLRRMLILEKAEGRKNHPFPSSSQLPSAGSTWLPVPKFLSMGNCSSKVASWSCLTPPSLKIR

SEQ ID NO: 1845 - protein, 73 aa, Homo sapiens
CRSDPGIPPDLMLILTYTSGVVRCHQQRQARAPESKGGKGGREQLGGVLFAPCIKIGRLAAGHPPGLGGASPT

SEQ ID NO: 1846 - protein, 60 aa, Homo sapiens
  SITE (21): Xaa equals any of the naturally occurring L-amino acids
  SITE (24): Xaa equals any of the naturally occurring L-amino acids
  SITE (48): Xaa equals any of the naturally occurring L-amino acids
  SITE (58): Xaa equals any of the naturally occurring L-amino acids
VRGLHRLYSKINPLKMLTLSXNSXFCVYNIFHWALQFIIIPFKFIKKXSVEMLLPCFXSE

SEQ ID NO: 1847 - protein, 48 aa, Homo sapiens
SSIVLPSLLIVLRSYNQQPQKHLYFSVSVINTYSYNQEISYEINGLLI

SEQ ID NO: 1848 - protein, 77 aa, Homo sapiens
  SITE (2): Xaa equals any of the naturally occurring L-amino acids
  SITE (26): Xaa equals any of the naturally occurring L-amino acids
GXPSCLTGKSGPQCGFFPNYGETQCXSTLSFHIWLAHSLGPYLSCHNFLEELNGIFFLKNVNMQLGIILCKCIGFLL

SEQ ID NO: 1849 - protein, 53 aa, Homo sapiens
NLHKFRDHHVSGKLKNNVEESDPRTKKHENSMATDTSAHAMYLAGTKQELNQH

SEQ ID NO: 1850 - protein, 72 aa, Homo sapiens
  SITE (55): Xaa equals any of the naturally occurring L-amino acids
RGVMGPMYLTKSGDILVSLFFGQQLILQEVCDSIAVPLRYTLMFHTWVSALHSEXMFPDTSLFSPVTVTKIS

SEQ ID NO: 1851 - protein, 105 aa, Homo sapiens
SFWRKTKANVFKILRVGWARCRAGLCGMPPLRSAPTISSSNNQRISFMVVSIASLWGVAKLDSPGCLSSSGGGSGGPKPSSDLKDDGCPGDRGNEALLSDVDRWC

SEQ ID NO: 1852 - protein, 84 aa, Homo sapiens
  SITE (18): Xaa equals any of the naturally occurring L-amino acids
  SITE (19): Xaa equals any of the naturally occurring L-amino acids
  SITE (21): Xaa equals any of the naturally occurring L-amino acids
YMPTGADPLRGGDACIYXXKXSYGSFGRSLLSYLDNCGNSRANTCRRALTPFAGGMRAFIRSKPTRRGADRGRRGREFPGRRAH

SEQ ID NO: 1853 - protein, 60 aa, Homo sapiens
  SITE (20): Xaa equals any of the naturally occurring L-amino acids
  SITE (34): Xaa equals any of the naturally occurring L-amino acids
  SITE (38): Xaa equals any of the naturally occurring L-amino acids
KNFGQRGYLKIHRGQKCPCXPIQCGDLVDSCLEXDKGXSHFFHHTPRINSQMDQRSKYKK

SEQ ID NO: 1854 - protein, 52 aa, Homo sapiens
RVIFTELHAYLPSLCCYCRIIYETIRVCLHFFFFPPLCYSRRMYYLNRLNTW

SEQ ID NO: 1855 - protein, 91 aa, Homo sapiens
  SITE (67): Xaa equals any of the naturally occurring L-amino acids
  SITE (83): Xaa equals any of the naturally occurring L-amino acids
PVALCPAEPQHRGPQLMCTQPSTAALPHPLPTAWEVGRARLSSVKETGTVLSALQAVFHLMKLLYVXSALFASFSMGKQMLRXRKGLTQDY

SEQ ID NO: 1856 - protein, 58 aa, Homo sapiens
STLQISKCYFGIYITTRKHSLFVLFGNFAFTPLPDWALLGKALRFLLCLHAQAKDILT

SEQ ID NO: 1857 - protein, 158 aa, Homo sapiens
  SITE (132): Xaa equals any of the naturally occurring L-amino acids
  SITE (138): Xaa equals any of the naturally occurring L-amino acids
  SITE (146): Xaa equals any of the naturally occurring L-amino acids
  SITE (150): Xaa equals any of the naturally occurring L-amino acids
  SITE (155): Xaa equals any of the naturally occurring L-amino acids
RRVTWRLERTMTLLANCYAELSPYNLYFYSLDSSGNQNLYATYQLSHFQSISVLGNLEARMVDTVLYDNTQLQLKAESPWEALDWGQKLWEVVHAAVPGYMGRQNELTISPGLGHHDDYTQNHSFQKKTMGXCHRPCXGQSKHTKXLNQXFKGDXPKM

SEQ ID NO: 1858 - protein, 59 aa, Homo sapiens
SKSNPININSGVVKGACHPNYSYHSGNFKGLRSSVPGDEDQICIYYKSQFHSYHFLFNL

SEQ ID NO: 1859 - protein, 84 aa, Homo sapiens
  SITE (39): Xaa equals any of the naturally occurring L-amino acids
IPKSAGAQVLQLALQTADMKSALQICGFCILTIFPFLSXSFPPFLPLFSFSFFEMESCCVGQVGVQWRDLGSMQPPPPGFKQFS

SEQ ID NO: 1860 - protein, 92 aa, Homo sapiens
STGSLLTCPGSSPAGKCWARVFRLSSVCLWGMRFPSPPCCSPLAVTRNLPGLETPSSALGKFSKFLMTAAAFLKGSDNPRGRGQVRVGTVRL

SEQ ID NO: 1861 - protein, 69 aa, Homo sapiens
HSFYKELWMIFIFRKPFFICGHLLPVGPTAAWKRLKICVSFDAAVNYQDNLQQVMPFIWASLSLDLIMD

SEQ ID NO: 1862 - protein, 65 aa, Homo sapiens
NLQALMAAFSSFYLLPQCFGNDIRVQKSRNPFTKVIQQTLYGRDSPASLKATVLRGFHKIFIFKI

SEQ ID NO: 1863 - protein, 105 aa, Homo sapiens
  SITE (47): Xaa equals any of the naturally occurring L-amino acids
  SITE (68): Xaa equals any of the naturally occurring L-amino acids
  SITE (95): Xaa equals any of the naturally occurring L-amino acids
GQGNRHGVPVATPSLPELPSPGSQAPPRRPPSPLDPGSSLTRSPTSXGALAPDSPGLHSLLLLACEDXRPLSDAEGSPVPGQWVLAMDSCGVFRXSLFALGDSLF

SEQ ID NO: 1864 - protein, 45 aa, Homo sapiens
  SITE (2): Xaa equals any of the naturally occurring L-amino acids
KXVPGLIWHPSNLSIVGEGNLQDLIGNETAWNFQTKLYFQSYSGN

SEQ ID NO: 1865 - protein, 191 aa, Homo sapiens
  SITE (1): Xaa equals any of the naturally occurring L-amino acids
  SITE (68): Xaa equals any of the naturally occurring L-amino acids
  SITE (95): Xaa equals any of the naturally occurring L-amino acids
XTGGVNGLKITTPEEQFTLISSTPQEKTKWLRAISQAVDQALRGMSDLPPYGSGSSVQRQEPPISRSXKYTFYKDPRLKDATYDGRWLSGKPHGXGVLKWPDGKMYSGMFRNGLEDGYGEYRIPNKAMNKEDHYVGHWKEGKMCGQGVYSYASGEVFEGCFQDNMRSWSGLLRMGKLTSSSPSMFMAMGNG

SEQ ID NO: 1866 - protein, 71 aa, Homo sapiens
LAYKILYDFDLCLIQSVFLLYSICLLCYGLIQLFVVCGTYVLSGFLGFAETAPSAGNAHSSNSSGYLRPVP

SEQ ID NO: 1867 - protein, 120 aa, Homo sapiens
  SITE (61): Xaa equals any of the naturally occurring L-amino acids
  SITE (65): Xaa equals any of the naturally occurring L-amino acids
  SITE (78): Xaa equals any of the naturally occurring L-amino acids
  SITE (86): Xaa equals any of the naturally occurring L-amino acids
  SITE (98): Xaa equals any of the naturally occurring L-amino acids
  SITE (103): Xaa equals any of the naturally occurring L-amino acids
  SITE (106): Xaa equals any of the naturally occurring L-amino acids
  SITE (109): Xaa equals any of the naturally occurring L-amino acids
  SITE (111): Xaa equals any of the naturally occurring L-amino acids
  SITE (118): Xaa equals any of the naturally occurring L-amino acids
MIPLFLSLLKQSFLKIKLTFFSEKKKKFLVYPVHIYKNLNQRSESEYQITGISKGLCLIFXSDRXTLPSPEVYKQLIXMSNGQGGXLLFFPIENKDGXFEFNXRKXIPXHXIFLNADXFS

SEQ ID NO: 1868 - protein, 65 aa, Homo sapiens
VAGITDVFHHAWLISVFLVKMGFHHVGQAGLKLLTLSDLPILASQSAGITGVSIVLGHSVIFLFP

SEQ ID NO: 1869 - protein, 174 aa, Homo sapiens
RSPKLGPGKGHQGFGVLSVILANHAIKLLTSLFQDLQVEALHKGWETDGPPAALSIMAQSTSIQRIQRLIDSVPLMNLLLTLLSTSYRKACVLQRQRKGSMSSDASASTDSNTYYEDDFSSTEGGTAAKTMDSEPILGAMVLRETISSQLKRKAGTFRLPSPTFLPLGKFFLGV

SEQ ID NO: 1870 - protein, 206 aa, Homo sapiens
GQTILCTICSLQHSIDVPILEFRNDHNRPKGFLFGEVHVVFHICEHGRLHEKAWPLDLSSPVHQSGPFFHSSFTVLQQLFQMSLMILGPMISGSVKWITNFHLFNFFYHSCHKFVVDGFFHEQPPSSNTVLSFVEKYCSHAHSHSLVKFTVIKYYKWRLATKLKGNFLQVANSTALHDLFANRSGSSETKFADVRMFRQTLSCYAT

SEQ ID NO: 1871 - protein, 72 aa, Homo sapiens
FLTSFLVLVMVLFCVHIVAKILCSCSADTWYRILFHRLALPSFSGLFFNLRLLKHFHVLGRSSLMIHLYACV

SEQ ID NO: 1872 - protein, 73 aa, Homo sapiens
SWGQVYIFYFYVFNSICINVQYSFTMLAQDLVYLWTGREGEIYFLGRSKAGSIPQLCKLSVIIQKALHECFCM

SEQ ID NO: 1873 - protein, 67 aa, Homo sapiens
GLTLSSRLECSGMISAHCNLQVLDSSNSPASASRGAGITGACHDTRLIFVFLVETGFRQLARLVSNS

SEQ ID NO: 1874 - protein, 92 aa, Homo sapiens
  SITE (8): Xaa equals any of the naturally occurring L-amino acids
  SITE (9): Xaa equals any of the naturally occurring L-amino acids
  SITE (36): Xaa equals any of the naturally occurring L-amino acids
EAKESESXXPEAAVWEFRSGGPSPPTRTGRGFCQMXAGPRGPWRAGPGPRPGWLGPRRCPPLATSSPGRVDSEARGLVRAHCRAERRSVLWF

SEQ ID NO: 1875 - protein, 55 aa, Homo sapiens
  SITE (10): Xaa equals any of the naturally occurring L-amino acids
  SITE (15): Xaa equals any of the naturally occurring L-amino acids
  SITE (21): Xaa equals any of the naturally occurring L-amino acids
  SITE (49): Xaa equals any of the naturally occurring L-amino acids
AIIQTALYSXMGEGXVVCPMXLLCINITDAIYSRARKVKRVLIIQAAFXKTCEFV

SEQ ID NO: 1876 - protein, 246 aa, Homo sapiens
  SITE (17): Xaa equals any of the naturally occurring L-amino acids
GSRSSERFCSPGKGRAXGSAALQVGDLLFSCPAYAYVLTVNERGNHCEYCFTRKEGLSKCGRCKQAFYCNVECQKEDWPMHKLECSPMVVFGENWNPSETVRLTARILAKQKIHPERTPSEKLLAVKEFESHLDKLDNEKKDLIQSDIAALHHFYSKHLEFPDNDSLVVLFAQVNCNGFTIEDEELSHLGSAIFPDVALMNHSCCPNVIVTYKGTRAEVRAVQEIKPGEEVFTSYIDLLYPTEDRK

SEQ ID NO: 1877 - protein, 62 aa, Homo sapiens
  SITE (12): Xaa equals any of the naturally occurring L-amino acids
  SITE (39): Xaa equals any of the naturally occurring L-amino acids
SKVAEIGVEMGXSDSLQIFIANRPFYAVCFNKSWVKLRXQDMMGCSIKHSKWRGDDRAYEIH

SEQ ID NO: 1878 - protein, 154 aa, Homo sapiens
CRFRRGAQNAAAASLERGPWGATRAGRGGQHTLGPPLPAASPEDGQQRNKKMDSLAAGELNASHQPWVPEFVAYWRKTHQDHLCSLHSRAFGLLDARVTWALRRAPEPVPGKDRLLLQHSQQSIACGHRVCVCIWQSSQIYAQGSEKMCLHPSL

SEQ ID NO: 1879 - protein, 41 aa, Homo sapiens
  SITE (21): Xaa equals any of the naturally occurring L-amino acids
VQVSPKLQISSMSGLALGPRXRAEQGLSYSSGVLTSARSQG

SEQ ID NO: 1880 - protein, 50 aa, Homo sapiens
  SITE (18): Xaa equals any of the naturally occurring L-amino acids
  SITE (48): Xaa equals any of the naturally occurring L-amino acids
PMTTQVQLYFPGRMPVGXGPSKFVPFGMLKGKEMRGNFFGSSSLKEKXIC

SEQ ID NO: 1881 - protein, 55 aa, Homo sapiens
  SITE (1): Xaa equals any of the naturally occurring L-amino acids
XKLDGGRQRTECLAFGLLFNIFYDPKFYRKSQGFLCFLNGQICDIHVYIDHRAPL

SEQ ID NO: 1882 - protein, 73 aa, Homo sapiens
WTHKELLTCFRKLTWPQHFLLLLGWVRGETSSSFFLHPQLYFIGLQVCIYFVLQDPVFCSCFGHCLCQAAIRA

SEQ ID NO: 1883 - protein, 61 aa, Homo sapiens
  SITE (29): Xaa equals any of the naturally occurring L-amino acids
QTAGMYFSQFWRLKSKGWVLVRAFFQPVXCWLLVVSSPIEVGHDIHEECGNSMAACRGPGW

SEQ ID NO: 1884 - protein, 29 aa, Homo sapiens
KTGLGRPKTGPKDKRGLKGTCLRFIEGES

SEQ ID NO: 1885 - protein, 78 aa, Homo sapiens
  SITE (55): Xaa equals any of the naturally occurring L-amino acids
IPSQRPAQAALGGTPGCSCLPLLCDSKAHWRPLGFPLSCLWNDGRSVSIPPRFCXGLSFPGEVKRGFPEDPALLYLLT

SEQ ID NO: 1886 - protein, 78 aa, Homo sapiens
ISQGLPHPFAITVFEDSLYWTDWHTKSINSANKFTGKNQEIIRNKLHFPMDIHTLHPQRQPAGKNRCGDNNGGCTAPV

SEQ ID NO: 1887 - protein, 50 aa, Homo sapiens
  SITE (4): Xaa equals any of the naturally occurring L-amino acids
  SITE (8): Xaa equals any of the naturally occurring L-amino acids
ATSXLWGXWVRWQQTLSASNPTCFQAASASAVGKLLRNLGLFLQACHQEE

SEQ ID NO: 1888 - protein, 63 aa, Homo sapiens
IGGLVPVKLLQLNLSGRKTGLQGHRARPYKSRYGAELDFRDSWRMLIDTLCSVSQSSPYVGSY

SEQ ID NO: 1889 - protein, 72 aa, Homo sapiens
HVLTQMAKKISPQQLEALYVKFTKLEIRRSENSTPRKSQKTDNTKCRGPCSTSTPAQIHHEGLPQLSWKHMP

SEQ ID NO: 1890 - protein, 45 aa, Homo sapiens
REGKLEIFPISFILSCDQPKSAQLILIISPKLGFIGLKKKENVLI

SEQ ID NO: 1891 - protein, 63 aa, Homo sapiens
  SITE (29): Xaa equals any of the naturally occurring L-amino acids
LRKSGWLTWLVRLKLTYMIFMYQVQTFDXLYSSQFEVAAHVSSQLQLRQGRPIPISCCGDQVD

SEQ ID NO: 1892 - protein, 74 aa, Homo sapiens
TMRKGRHSQSANSFCFPGSPQPDFSSLIRTPHLYFLFSSCDKHPWTCHLTQEPARSSHVSQVTTMLIPCLLPPG

SEQ ID NO: 1893 - protein, 75 aa, Homo sapiens
NYLGHKLNIFFLWWYFLIPSFHLLTFWNICSNNSRNSRCAFGVKINSHLKHRPLSTFSSFQLGNGRMMFEFLRGN

SEQ ID NO: 1894 - protein, 82 aa, Homo sapiens
  SITE (71): Xaa equals any of the naturally occurring L-amino acids
TWEAGVAVSRDHTTALQPGQQSGTSSQENKTKQNKSENTAERSLPFIYYLDIVKNESYPASSNLNSVLKFXDSQNISLPKTL

SEQ ID NO: 1895 - protein, 61 aa, Homo sapiens
LFVFRGTCQWFSYYVPWSPRIPEDASRETPPFPRIPSSFKQPVCFKLLYILRFSMRFHLYK

SEQ ID NO: 1896 - protein, 78 aa, Homo sapiens
  SITE (70): Xaa equals any of the naturally occurring L-amino acids
  SITE (72): Xaa equals any of the naturally occurring L-amino acids
  SITE (77): Xaa equals any of the naturally occurring L-amino acids
KSYLKAAELSATTALSWTDEQRPGKTAWSPNFWCTPLCYLAHDPVALGLIMGSVYILFLSVFRQGLLVVXGXYNCQXP

SEQ ID NO: 1897 - protein, 132 aa, Homo sapiens
  SITE (124): Xaa equals any of the naturally occurring L-amino acids
GTRAEESGAVILEEQLAGVSAEQEVTCIDGGKTLPKQPSPQKSEPLLPSASMDEEEGDTCTICLEHGPMLGTTGSQHYAVGISLGIGAFPRGLKDKYENVPSATRKPGTVTLSSFMPEPESLDXSEQERMKR

SEQ ID NO: 1898 - protein, 45 aa, Homo sapiens
YSLWELCILLTIRGATELPEVNGANWNVLGVYKSEHYVECEWIYK

SEQ ID NO: 1899 - protein, 70 aa, Homo sapiens
ARAALRLRARTLGAHRPGPNPGSAPDWLVTLSKLLDLSKPPFPHVQSVDNNSTFLIRNVRRASEVRVHKW

SEQ ID NO: 1900 - protein, 47 aa, Homo sapiens
KAELFVTGSSKSEKAARQGPIGDFTQDHGNNKLELHGAAYGKQDVFS

SEQ ID NO: 1901 - protein, 52 aa, Homo sapiens
VYLRFPHDCITAELMLCFLTYQEAYDVDLSPLMIMSTCFILLNPQLESPQKP

SEQ ID NO: 1902 - protein, 35 aa, Homo sapiens
  SITE (32): Xaa equals any of the naturally occurring L-amino acids
ESPGLSRSLQKQEINFYCFKKKKKKKKKKKKXKKK

SEQ ID NO: 1903 - protein, 55 aa, Homo sapiens
  SITE (38): Xaa equals any of the naturally occurring L-amino acids
LLLFGNTVGTPSRSNLALIASAPEKSRNNYLFIWRLDXCISLPRGCREINWGQRE

SEQ ID NO: 1904 - protein, 144 aa, Homo sapiens
  SITE (120): Xaa equals any of the naturally occurring L-amino acids
LVGIPLNLVVLNRLGHLMQQGVNHWASRLGGTGRILTSAVAGGLWRPPLGPPALPAAATAALLPHGGLEYTEGSTSPSSPSAPWVRRLRDWNEPLPRVTHCGYKNMVFPVDPLWGWAWLXLDHQTASSPSWRTPGRVCSWLPPQ

SEQ ID NO: 1905 - protein, 62 aa, Homo sapiens
  SITE (35): Xaa equals any of the naturally occurring L-amino acids
RCVCTYYQFLKQSRFYLSLHRKNFLGLGLVAHACXPSTLMKLRQADCLSPEFKSCMCNMGKP

SEQ ID NO: 1906 - protein, 148 aa, Homo sapiens
  SITE (121): Xaa equals any of the naturally occurring L-amino acids
  SITE (127): Xaa equals any of the naturally occurring L-amino acids
  SITE (138): Xaa equals any of the naturally occurring L-amino acids
  SITE (148): Xaa equals any of the naturally occurring L-amino acids
VAARAGAWPRRLSGPSPHGHLLADPDRAPEGPSFVYFVAFLVAFHQNKQLIGDRGLLPCRVFLKNFQQYFQDRTSWEVFSYMPTILWLMDWFRHELQPGIAGSSRDWGIFVLFVTDSRGCXKHAFFXGCPVGAFLKCXWVKCGGQSSX

SEQ ID NO: 1907 - protein, 62 aa, Homo sapiens
KIKTSCCETHRKVRWLVKYLWNFYSSFPVLNYMLLGTENTGLQVYRSGHRTPVIRKCHNKAN

SEQ ID NO: 1908 - protein, 58 aa, Homo sapiens
  SITE (13): Xaa equals any of the naturally occurring L-amino acids
  SITE (32): Xaa equals any of the naturally occurring L-amino acids
  SITE (36): Xaa equals any of the naturally occurring L-amino acids
  SITE (37): Xaa equals any of the naturally occurring L-amino acids
AGDRHHGIPARGXQSEIPSPKLIKLINGIKLXGIKXXKKKKKKGAALEVPRGAQLRVL

SEQ ID NO: 1909 - protein, 59 aa, Homo sapiens
PFICTFMETAIRCYEHFLYPWSLILCFIFLQYDIMICYVVKFFTKILQHSKSLCHTVER

SEQ ID NO: 1910 - protein, 73 aa, Homo sapiens
ELGNGSASLILQEPGFKKKKKKKECLALFQLVVYTSVFPFMVPFLLDQCCGFPICKLKNSNKFALVFVQLSEN

SEQ ID NO: 1911 - protein, 64 aa, Homo sapiens
  SITE (49): Xaa equals any of the naturally occurring L-amino acids
FILCQACFDMFLSYVLICSNISFCHFIFSIYFLQWVNLTNGKGIEHWIXYRIKPLPCKGLCLPY

SEQ ID NO: 1912 - protein, 50 aa, Homo sapiens
  SITE (8): Xaa equals any of the naturally occurring L-amino acids
  SITE (11): Xaa equals any of the naturally occurring L-amino acids
  SITE (12): Xaa equals any of the naturally occurring L-amino acids
SLHTDTVXIHXXQSIENSDMGQARWLVPIIPTLREARAGRSLEVRSLRPA

SEQ ID NO: 1913 - protein, 48 aa, Homo sapiens
TLHQRKCMIENKHMKRHSGQARWLTPVIPALWEAKAGGSPEVGSLRPA

SEQ ID NO: 1914 - protein, 106 aa, Homo sapiens
  SITE (64): Xaa equals any of the naturally occurring L-amino acids
GAGPSSAAPACVWVSVGSSHFPGGRLSCLWVSMASQSSLCPSQRLQAQLRSCEKQQRGLPIPGXPCPPTPAPLPFQPFQLQLGAGPSSAAPACVWVSVGCFSFLEW

SEQ ID NO: 1915 - protein, 70 aa, Homo sapiens
  SITE (5): Xaa equals any of the naturally occurring L-amino acids
  SITE (20): Xaa equals any of the naturally occurring L-amino acids
  SITE (26): Xaa equals any of the naturally occurring L-amino acids
  SITE (28): Xaa equals any of the naturally occurring L-amino acids
  SITE (46): Xaa equals any of the naturally occurring L-amino acids
NPVMXTNSCSFHKGSLVWRXAPSLWXHXTWTQILVAISSFRTMSRXKSLRLNFLISKVSLKRIILNTSQG

SEQ ID NO: 1916 - protein, 143 aa, Homo sapiens
VSSIGSPVGTPKGPQGALQTPIVTNHLVQLVTAASRTPQQPTHPSTRAKTRRFPGPAGILPHQSGRSLEDIMVSAPQTPTHGALAKFQTEIVASSQASVEEDFGRGPWLTMKSTLGLDERDPSCFLCTYSIVMVLRRQPEAAS

SEQ ID NO: 1917 - protein, 40 aa, Homo sapiens
VTLRCSPLLDVCACGRGQNKCMQTINKNTLPEMLTVGKSE

SEQ ID NO: 1918 - protein, 61 aa, Homo sapiens
NLLYIILDYFGPFFILACERNNKWRFPRLFCWLPLIAALPLATTRAPHYISFYLAASKVNI

SEQ ID NO: 1919 - protein, 69 aa, Homo sapiens
DIFYLKWRNSHNCDLTVIMRLKRKSNCSCFAFSSVAPLPFISTPADKIEILFVTQPLLISSVRVNELMS

SEQ ID NO: 1920 - protein, 73 aa, Homo sapiens
YEAIIFGLKLLGLQMTQTTVSRQKPEMTSHYIAQAGLELLASSNPPTSASERTGITDGATEILPQLDYKFSEG

SEQ ID NO: 1921 - protein, 52 aa, Homo sapiens
RLKVCYFRNIVLGTGDESKKIQFSRRTRDNYSRALNLVALTSSKFLSSPYKY

SEQ ID NO: 1922 - protein, 54 aa, Homo sapiens
  SITE (36): Xaa equals any of the naturally occurring L-amino acids
ERLKSHVLLAYNENTQPFYSREHDNIAQVFMIIPYXIHKFHILVKKILKTINSF

SEQ ID NO: 1923 - protein, 39 aa, Homo sapiens
  SITE (16): Xaa equals any of the naturally occurring L-amino acids
  SITE (17): Xaa equals any of the naturally occurring L-amino acids
AHFTLCTFWWEKWARXXKKLYWILTFISDDPHRIRLVQK

SEQ ID NO: 1924 - protein, 88 aa, Homo sapiens
  SITE (36): Xaa equals any of the naturally occurring L-amino acids
  SITE (72): Xaa equals any of the naturally occurring L-amino acids
  SITE (77): Xaa equals any of the naturally occurring L-amino acids
  SITE (84): Xaa equals any of the naturally occurring L-amino acids
SHSGALVPGHLLFTSDSEREPDFTLLPRWPRLSSRXRSSGCRCRWWSGPSRWQCRSRRSPGGRRSWRPGAEXSGRNXNKLERLXEAEK

SEQ ID NO: 1925 - protein, 73 aa, Homo sapiens
  SITE (31): Xaa equals any of the naturally occurring L-amino acids
RFGIDRDVRVEYLPFSSLEMPVKPVFPDLGXTLYRPPHGSCVAFGHALTLPRPSKSRVWLRDKGLCHHPFCLW

SEQ ID NO: 1926 - protein, 102 aa, Homo sapiens
  SITE (69): Xaa equals any of the naturally occurring L-amino acids
  SITE (71): Xaa equals any of the naturally occurring L-amino acids
  SITE (86): Xaa equals any of the naturally occurring L-amino acids
  SITE (89): Xaa equals any of the naturally occurring L-amino acids
KCPPYGADRVSGAAVSQRTDQVVTPSVKTSLFLALHPLQKICMSAVNFHLVPQSMLSGSSRGSQGSLNXHXVCGCPLNLPYTLPIXFHXSCSSGSKAPSIFR

SEQ ID NO: 1927 - protein, 51 aa, Homo sapiens
NFLLHKTVYRQLAISIKKLYKLKSLSYTKNCKMRVITKDVVYCFIVSTFLT

SEQ ID NO: 1928 - protein, 91 aa, Homo sapiens
  SITE (41): Xaa equals any of the naturally occurring L-amino acids
  SITE (48): Xaa equals any of the naturally occurring L-amino acids
  SITE (74): Xaa equals any of the naturally occurring L-amino acids
FETQIFWFLPPSFFFSLPQLEEESKGDCTKAFWDCLSVQLXEDPPAYXHAIKLVGEIKETLLSFLLPGHTRLRXQITEVLDLDLIKQEAEN

SEQ ID NO: 1929 - protein, 61 aa, Homo sapiens
ELAPEYTRSMFSNKFFQQLLLGEVTVSKYFWGVLCLKVLFAKTRRRIRRIIFCRVSSIASN

SEQ ID NO: 1930 - protein, 49 aa, Homo sapiens
  SITE (28): Xaa equals any of the naturally occurring L-amino acids
IVYKIYSFKVPSDWGSHRTPRIMVKAPXHRVAGETMNAGRAKCQMLIKP

SEQ ID NO: 1931 - protein, 55 aa, Homo sapiens
QKTTTLHPKDETCPMSFFPMVTFNSFDMLILAHRSQAFLGNLTFECLIKPEVVLP

SEQ ID NO: 1932 - protein, 55 aa, Homo sapiens
SLSLLPSNFESFMKSLSCSCCLVVLVVRSMLTFEINTSYTEINFLEKEDLLIQNH

SEQ ID NO: 1933 - protein, 72 aa, Homo sapiens
SWCQSFTSLGNTQRFYFLKIGHDGCCEMVFKVPVCKENFKIGSTKDKVLWDIGIFYKATIVKALRCGQMSRE

SEQ ID NO: 1934 - protein, 138 aa, Homo sapiens
STQHSSTVSHGVTLRESAELFQSDEMRPANDPKERAPIRIRMLNDILQDMEKSFLVKQAPPGFYRNILYHLDEKTSRFSILIEAWEHCKPLASNETLQEALSEVLNSINSAQVYFKAGLGCVQECLGWGRIEKTLEHF

SEQ ID NO: 1935 - protein, 51 aa, Homo sapiens
AVSTYLDLSTSLFFLLCWNFESKREQKKEFSANKGPEAYGETLRRKIISKI

SEQ ID NO: 1936 - protein, 46 aa, Homo sapiens
  SITE (24): Xaa equals any of the naturally occurring L-amino acids
WFLPSYYWKNLGDTGLVESTVEYXHKNLCAWQDGSYIFPFFHHLVL

SEQ ID NO: 1937 - protein, 86 aa, Homo sapiens
HILIKGKKLKIQIYTQMDNDYIIILTPKRTVLGINNYKLQINRSYSINTNLLYTTHNLLQILVLCYYFSKYFKLVIFFLVLQFSHL

SEQ ID NO: 1938 - protein, 58 aa, Homo sapiens
MWGTTEDSGVTQRSGGKQLQVSSCSIPQRSGLWASEEKTGLAKTGTKWGRGCARPELS

SEQ ID NO: 1939 - protein, 101 aa, Homo sapiens
  SITE (2): Xaa equals any of the naturally occurring L-amino acids
  SITE (20): Xaa equals any of the naturally occurring L-amino acids
LXRALVAFQRSPSAPCQSHXPHNHHVRRDPRAFVSYLSIFSTTSKISERGWISLCVNKKLLGLVASQGGLFCFLPGHCHSCIVRYLLNSSKVPANLSWRNS

SEQ ID NO: 1940 - protein, 53 aa, Homo sapiens
LFFSSLYVIRIFCFHNVKPLSRRRKCFQIVSNTPKMFETQKYWNQTIMHLLNI

SEQ ID NO: 1941 - protein, 52 aa, Homo sapiens
LFLPLKTQLNYIVFLASHAFRLGSYYFPPRKTTVGMPPPHFPQLWKPVIQIA

SEQ ID NO: 1942 - protein, 85 aa, Homo sapiens
WPRIPTVFVIGCQLAGLAAPVRRDHLFRAMSRPSSVSPRQPAPGGGGGGGPSPCGPGGGGRAKGLKDIRIDEEVKIAVNIALERF

SEQ ID NO: 1943 - protein, 74 aa, Homo sapiens
WKLCSYGMTKNLLFGLFQITIADGQFVLQREQQNERNVSLCGYTYTYIKLIFKFKTYGKQNIEQFEFCPSWTLK

SEQ ID NO: 1944 - protein, 107 aa, Homo sapiens
  SITE (35): Xaa equals any of the naturally occurring L-amino acids
RCPQCREWKRCPSGRRSRFRIEGSEFKPRLVPFTXHPQARQLASASGRAARVSPSRQPGNDEFHESRSSRPQQMPGLFTNDSKGPPSLSRNETFAFSLPCQPHRAAA

SEQ ID NO: 1945 - protein, 85 aa, Homo sapiens
  SITE (58): Xaa equals any of the naturally occurring L-amino acids
GALPMPHGNARSVRLAATESQCLWVLSLRKAPLRDRRGLWESVGSPFWKFQKKIFAPXGLRVRKEMPPVRPFARGGPPSGPWAKS

SEQ ID NO: 1946 - protein, 61 aa, Homo sapiens
  SITE (11): Xaa equals any of the naturally occurring L-amino acids
  SITE (15): Xaa equals any of the naturally occurring L-amino acids
LSLEFLKYIFXVCCXSLMVNSWVLCVLFINHNVELWSCVQGCREGFYLWTLFAAYVKDGSL

SEQ ID NO: 1947 - protein, 81 aa, Homo sapiens
FCHLTWDRMEAAASSSLVLSGPALLCSGVSAGASVELSLPWMFSSPPRGLKTPPKVASLSVVRHLCNQPEALPPGTTSVYP

SEQ ID NO: 1948 - protein, 169 aa, Homo sapiens
  SITE (140): Xaa equals any of the naturally occurring L-amino acids
  SITE (168): Xaa equals any of the naturally occurring L-amino acids
LINNPFKTRPRDKQFFPVSIFIDIFKKLNTSCHPVLAKIVKSKTKVFDVSLIFVSRVYYSRGPYGTHRQPVFCYLSLGEDEKEGLPAVLPFEKVQSRQERTQQKSPSPSDDHLSKGLTESPSCHSQLLASGKLSGPVYVXRNSDRKGLCKQHGNLNICCLKHFKKGYXF

SEQ ID NO: 1949 - protein, 61 aa, Homo sapiens
RTKLLMKLRWLPNCKFLTQGFEKSIVGKESLDNLGYRKKGNGFFLKLYGRWDFTGNTRVVN

SEQ ID NO: 1950 - protein, 76 aa, Homo sapiens
  SITE (19): Xaa equals any of the naturally occurring L-amino acids
  SITE (31): Xaa equals any of the naturally occurring L-amino acids
  SITE (45): Xaa equals any of the naturally occurring L-amino acids
  SITE (49): Xaa equals any of the naturally occurring L-amino acids
  SITE (55): Xaa equals any of the naturally occurring L-amino acids
  SITE (62): Xaa equals any of the naturally occurring L-amino acids
  SITE (64): Xaa equals any of the naturally occurring L-amino acids
  SITE (67): Xaa equals any of the naturally occurring L-amino acids
  SITE (70): Xaa equals any of the naturally occurring L-amino acids
KSLLEYGLINAVMLVRKSXLKTICYILALRXEVWKPWRLVKSEFXSTLXVYWLCXLRQLLNXRXLIXYLXKWRVKR

SEQ ID NO: 1951 - protein, 112 aa, Homo sapiens
  SITE (25): Xaa equals any of the naturally occurring L-amino acids
  SITE (48): Xaa equals any of the naturally occurring L-amino acids
MSGLKSCSRGHSNLQVTRDWSYRSXDLFLFLVAAAPLVPTEDARVVGXQQSGVVDAHLPQRRQPLVKLIHTLGAGRLREAEGLGSEGEVELLEGGGHEGALALGPVDEEWPL

SEQ ID NO: 1952 - protein, 58 aa, Homo sapiens
DMAGPLPFNTYLKIITMLFKSQNTLGGDRGQKKKINPFSWMVELGCFQNQHCAHRSRH

SEQ ID NO: 1953 - protein, 59 aa, Homo sapiens
GWGRTCQLCQSLGVAAGTITKAQMPAETWHSPGCDSIGPLSPVGLPGSKADLIIQVKDA

SEQ ID NO: 1954 - protein, 76 aa, Homo sapiens
VGLLHRLNEAEIIVVFSYFFCTQLSPCISKARPCTLTSLKFAVLYASIPNHSLPIKTKYHPFHFIDLIPYFCQTVI

SEQ ID NO: 1955 - protein, 85 aa, Homo sapiens
  SITE (17): Xaa equals any of the naturally occurring L-amino acids
ICYLVSSKHQPRPLGLXFSSSLSMIWEFAYLSQILHSLIILETLDTGSALVLTIESTLHHWHALQSLWLAKGISKNFVSVLADGI

SEQ ID NO: 1956 - protein, 57 aa, Homo sapiens
  SITE (5): Xaa equals any of the naturally occurring L-amino acids
LIQLXNVSTLMLYLGSKWNTVARMTTDILHIFSLPEQLDHLLPTIKETRKWTVLPGG

SEQ ID NO: 1957 - protein, 71 aa, Homo sapiens
VLTVCQAHAKFCARPWDTLSDKTLSLLTEKSDRLAYSHSFLNLTYLPELTEELVRNTDSWAKKKSLKSNFL

SEQ ID NO: 1958 - protein, 65 aa, Homo sapiens
  SITE (17): Xaa equals any of the naturally occurring L-amino acids
  SITE (63): Xaa equals any of the naturally occurring L-amino acids
QPPFQPANNKVNLGCPXGGNILMPGLQQKAHFEEAMLGLLALGESPEWREGVCNGGWKSSQQXGP

SEQ ID NO: 1959 - protein, 55 aa, Homo sapiens
  SITE (42): Xaa equals any of the naturally occurring L-amino acids
  SITE (46): Xaa equals any of the naturally occurring L-amino acids
  SITE (49): Xaa equals any of the naturally occurring L-amino acids
NYLIRGLKIIKKALKGSPSGLLGTPSKWNHLCVWEVSRRREXERSXKAXFKGLLG

SEQ ID NO: 1960 - protein, 39 aa, Homo sapiens
ENDKKNVVTGIMRNFQTAQHRKVGFKVLENVTGNELPLL

SEQ ID NO: 1961 - protein, 46 aa, Homo sapiens
  SITE (3): Xaa equals any of the naturally occurring L-amino acids
TEXITILQASKDEVSNISQHGLGEKDSFVSFCIQVMQSAFLSLSSF

SEQ ID NO: 1962 - protein, 52 aa, Homo sapiens
VRLATSKVLLLFQDVVSVAESSVSCPSALSMLMIDECLKYMELQWQLLGFQW

SEQ ID NO: 1963 - protein, 83 aa, Homo sapiens
  SITE (12): Xaa equals any of the naturally occurring L-amino acids
  SITE (37): Xaa equals any of the naturally occurring L-amino acids
QFRLPRRPQPRXPERLLGVPTAPVAGRKRKRITLTRXGSGQSPRLFRAGAELWKFEEPIFVFSFQTKTAASASLTGFSWEQIN

SEQ ID NO: 1964 - protein, 103 aa, Homo sapiens
SREFGSGGKVAGRFQGLSSAPSPFPMKCPCLTGCGAELRDHSHSLEGSRCLQLQCIKGARNRPCPLSAAPVAVHGGRGRSLPEFPVLAPQIRIKGLLASGLRK

SEQ ID NO: 1965 - protein, 38 aa, Homo sapiens
QDCNYLFQGQDTSFFLSLEPKMASFTKIKLCLKIKIYT

SEQ ID NO: 1966 - protein, 41 aa, Homo sapiens
CLKLWHFKNIFIYKLLKGLLMLFSDTLAFYNFAHGLFEIKK

SEQ ID NO: 1967 - protein, 77 aa, Homo sapiens
KLSSLTDPTPTQKSAVALELWALGKSLSSLRSVFRPFQGRGQNGHSLRSIYIACIQEATHQQTVKENGDTGSWAWSC

SEQ ID NO: 1968 - protein, 69 aa, Homo sapiens
TVRSDSRVDPRVRSSLKGILRLLLPSKPSNTIFLLTSNFCRWVLKLAYILTTKIEKQVVLLCLMAPEMS

SEQ ID NO: 1969 - protein, 68 aa, Homo sapiens
  SITE (6): Xaa equals any of the naturally occurring L-amino acids
  SITE (8): Xaa equals any of the naturally occurring L-amino acids
  SITE (14): Xaa equals any of the naturally occurring L-amino acids
  SITE (21): Xaa equals any of the naturally occurring L-amino acids
  SITE (33): Xaa equals any of the naturally occurring L-amino acids
  SITE (36): Xaa equals any of the naturally occurring L-amino acids
VPINPXPXELASGXGFGPGVXVLRWITCAGVWXLMXAEHVLHWVLMSNIIYIYTHTCYPEINLVHMNY

SEQ ID NO: 1970 - protein, 73 aa, Homo sapiens
  SITE (50): Xaa equals any of the naturally occurring L-amino acids
  SITE (73): Xaa equals any of the naturally occurring L-amino acids
LSFNSPSQNFVLIIHLLKRCEESAFSFLAVVYFGSEEIGTPVSNLVFIIXDKTKTLQAVLFIVLSQVAHRHSX

SEQ ID NO: 1971 - protein, 41 aa, Homo sapiens
  SITE (38): Xaa equals any of the naturally occurring L-amino acids
PHLNFYVFVSSIDCHDIFLPRPITSLMAWQQDLSFDCXLKI

SEQ ID NO: 1972 - protein, 105 aa, Homo sapiens
HCQAVLKQLNEQRLSNQFCDVTLLIEGEEYKAHKSVLSANSEYFRDLFIEKGAVSSHEAVVDLSGKGFVLLLLFVCNDILEEGDMYVFHTRTLCQSKRSPLTTVD

SEQ ID NO: 1973 - protein, 72 aa, Homo sapiens
SREAVRSEGHCFIFIGDEACFYLQFPWTGLSPEKDELTLPLYIKHYQTSPCRYYVIKMSPVCEIILSCYIVH

SEQ ID NO: 1974 - protein, 85 aa, Homo sapiens
  SITE (62): Xaa equals any of the naturally occurring L-amino acids
  SITE (69): Xaa equals any of the naturally occurring L-amino acids
  SITE (76): Xaa equals any of the naturally occurring L-amino acids
  SITE (82): Xaa equals any of the naturally occurring L-amino acids
RGLICISLMTNDIRHMYLLFICMSSLDLSQKAEKQYICISSLEKCLLRSLAHFKIGLSFYYXLRKFFIXYSSSYTXYPNYTXVYD

SEQ ID NO: 1975 - protein, 72 aa, Homo sapiens
  SITE (16): Xaa equals any of the naturally occurring L-amino acids
IGCIYYHGMEFDCESXLETLRESLPGDPEHQICYAGLELCPILLQMCLSAMKRCFRCLFQKLISANNPQWDL

SEQ ID NO: 1976 - protein, 52 aa, Homo sapiens
  SITE (20): Xaa equals any of the naturally occurring L-amino acids
CFCRCPGVVTTDWARLLGHXCRTVVLFPLTVIFDSLACYAYKMVMAYGRLLN

SEQ ID NO: 1977 - protein, 93 aa, Homo sapiens
  SITE (19): Xaa equals any of the naturally occurring L-amino acids
DHDLLYPCLPLPPLFFSLXSLSDPLPLPPDPFPPPLIFPLSLRSSSFPTPPFLLSPPLLPLPLSSVSFHRLPCLPVFQSLFFSPVSLSVSLPS

SEQ ID NO: 1978 - protein, 47 aa, Homo sapiens
PTRPRSLASLTLQVLRTLSSLQLSSHLTQNLFYSKVLNISSNLLMFH

SEQ ID NO: 1979 - protein, 70 aa, Homo sapiens
  SITE (18): Xaa equals any of the naturally occurring L-amino acids
  SITE (27): Xaa equals any of the naturally occurring L-amino acids
VEGGEGPALVDSRHPGGXGEVFSLSGXGHQAGVSRQGPGARKHSVCASARGSSTVTCLHAITDRREVTGF

SEQ ID NO: 1980 - protein, 106 aa, Homo sapiens
  SITE (94): Xaa equals any of the naturally occurring L-amino acids
AKIAPPHSTLGDRERLSPKKKKMYLTSFVLLVGCKTPFQEGFFPLSRRKESRQASLGFPTQSMSIRSCPSCPVLFLLSCAYFVEPKHKNSFPCXFGVLNSEGSFVM

SEQ ID NO: 1981 - protein, 68 aa, Homo sapiens
  SITE (18): Xaa equals any of the naturally occurring L-amino acids
FWENFFCSYSMYVFRKCXFIKLSIIQKLSFLSSKFNITNCAKKYVTLISFILELLYQVIISPLELFLK

SEQ ID NO: 1982 - protein, 82 aa, Homo sapiens
NHKIINLKIFGPISIQCLLKYNLPLFYHEPLPQFPPTNVLPPLAPACLSVTKEFFQSTNNISYFCTSRMTVRAIVTTKTPSH

SEQ ID NO: 1983 - protein, 53 aa, Homo sapiens
SGFRHVEQAGLELLTSGDQLASASQSAGITGMSHHGLAKNLINNPLLISGQLN

SEQ ID NO: 1984 - protein, 50 aa, Homo sapiens
IQLLGRLKWEDRHCTPETKKKKKSLVRFGDAAKPFCCCGLNIQSNEQGDH

SEQ ID NO: 1985 - protein, 84 aa, Homo sapiens
  SITE (17): Xaa equals any of the naturally occurring L-amino acids
FFLRLVANIGRTRIRIXVSRAVSLSPKVVKSRDSGARLPESKSQPFCLSAMSFSSICTKQAILSNYLIGITELISKGLSAVPEI

SEQ ID NO: 1986 - protein, 126 aa, Homo sapiens
  SITE (5): Xaa equals any of the naturally occurring L-amino acids
RSYIXNVQDDRLREPLQKLKLAVSNVMPEQLFKYQEDCQARSQAKCAKLQTDEEREKNGSEEDDDEKPGKRVIGPRKKFHWDDTIRTLLCNLVEIKLGCYELEPNKSQSAEDYLKSFMETEVKPLW

SEQ ID NO: 1987 - protein, 61 aa, Homo sapiens
  SITE (25): Xaa equals any of the naturally occurring L-amino acids
SKSSEPKSDLGLLLFSKFWSWLCLXLLLWDPQGSYPPPSPHLNEMISEVLSSPDSKPHKEE

SEQ ID NO: 1988 - protein, 43 aa, Homo sapiens
  SITE (10): Xaa equals any of the naturally occurring L-amino acids
  SITE (12): Xaa equals any of the naturally occurring L-amino acids
  SITE (21): Xaa equals any of the naturally occurring L-amino acids
  SITE (22): Xaa equals any of the naturally occurring L-amino acids
  SITE (24): Xaa equals any of the naturally occurring L-amino acids
  SITE (33): Xaa equals any of the naturally occurring L-amino acids
AMSDLTQKRXPXAKSPHSGEXXDXRAPRAFDTXGHLPCIAATL

SEQ ID NO: 1989 - protein, 93 aa, Homo sapiens
KNPGKQNGQSRKGPKHVLEMWRGLRKPRQVRTDAAQQFLASPDKPAQLKLRVGASHGQWSEGRAVSGTQNLTPTTCFPPEEPPIPSKPLAKVC

SEQ ID NO: 1990 - protein, 56 aa, Homo sapiens
DEKWSCHYSFQVTLKPPKQRCKFDPNLNCRIESACVLCLNFQLTFNKSQKKKKKGR

SEQ ID NO: 1991 - protein, 95 aa, Homo sapiens
  SITE (60): Xaa equals any of the naturally occurring L-amino acids
CLTIKDVAFNICWEGNVQTFQISYYMFPFFVYIGNNVYSRVYSGGLQQEVYIFKRIFNGXTIFVNHFQASAAVDSHCESLACSCISVFAIPNIQV

SEQ ID NO: 1992 - protein, 52 aa, Homo sapiens
  SITE (42): Xaa equals any of the naturally occurring L-amino acids
  SITE (46): Xaa equals any of the naturally occurring L-amino acids
  SITE (47): Xaa equals any of the naturally occurring L-amino acids
  SITE (48): Xaa equals any of the naturally occurring L-amino acids
  SITE (49): Xaa equals any of the naturally occurring L-amino acids
  SITE (50): Xaa equals any of the naturally occurring L-amino acids
SLSDSALDEKQIRGAQAYKRQVKVNAAGTHVVFLTNILCFWXFNSXXXXXQI

SEQ ID NO: 1993 - protein, 116 aa, Homo sapiens
  SITE (108): Xaa equals any of the naturally occurring L-amino acids
  SITE (109): Xaa equals any of the naturally occurring L-amino acids
SNTTHYRESWYACRYRSGIPGSTHASGQLQPPPPPEPGLWAHLAPLWRPAHHAASADRLGVSGAPRLRLSSFLSGSQGSPHPRSVQNSTDLFVVPPTPVYCTSMCLVXXLRSRPCL

SEQ ID NO: 1994 - protein, 90 aa, Homo sapiens
WHDSEVHPTLTLGGSLARAHSRGPQQLSSFPGCLPHHLSVIPGISSRINDLHPNPCLRVCFWGHTEEDSNPVLRFCTSEPEGPPGTGSQG

SEQ ID NO: 1995 - protein, 63 aa, Homo sapiens
  SITE (11): Xaa equals any of the naturally occurring L-amino acids
  SITE (30): Xaa equals any of the naturally occurring L-amino acids
  SITE (42): Xaa equals any of the naturally occurring L-amino acids
  SITE (55): Xaa equals any of the naturally occurring L-amino acids
  SITE (61): Xaa equals any of the naturally occurring L-amino acids
FFSTHNTARTXGSNCPRWCLNPLGAHDLLXKPVRQNHTGHNXMLNCDLDRRQKYXKRKGNXCE

SEQ ID NO: 1996 - protein, 78 aa, Homo sapiens
LYGIYIHTIKLRYSGVIIRVSDESLLDHSWRKSGAKVSGQVQLTEIQELRHHFQRWPWRKTAMLGHCIRAKSMLALWN

SEQ ID NO: 1997 - protein, 93 aa, Homo sapiens
SQHFGWPRQADHLRLGVRDQPDQHGETPSPLKHTKLAGHGGVCLQSQLLRRLRQENRLNLGGGGCGEPRSCHCTLAWSTRVKLHLKKKKKGRP

SEQ ID NO: 1998 - protein, 175 aa, Homo sapiens
  SITE (30): Xaa equals any of the naturally occurring L-amino acids
  SITE (168): Xaa equals any of the naturally occurring L-amino acids
AAGPWCWRSGPGGAGLGALHPLEDLLRPRXRARLGPGRGLVGRGGCPPPRVGRVGPRGRGGRGAGAGGAGTREVLVLGLDGAGKSTFLRVLSGKPPLEGHIPTWGFNSVRLPTKDFEVDLLEIGGSQNLRFYWKEFVSEVDVLVFVVDSADRLRLPWARQELHKLLDXDPDLPVV

SEQ ID NO: 1999 - protein, 90 aa, Homo sapiens
SSDISQCMIYVQNTQQVFYHVQHIQHWYTSYQQAFKMHLCLLICFVQGFSKTYNVLYFLTYFIRNIKDHLVVSHIEKWLSLLMWLMPKSG

SEQ ID NO: 2000 - protein, 60 aa, Homo sapiens
  SITE (1): Xaa equals any of the naturally occurring L-amino acids
  SITE (7): Xaa equals any of the naturally occurring L-amino acids
  SITE (19): Xaa equals any of the naturally occurring L-amino acids
  SITE (23): Xaa equals any of the naturally occurring L-amino acids
  SITE (35): Xaa equals any of the naturally occurring L-amino acids
  SITE (44): Xaa equals any of the naturally occurring L-amino acids
XNLKDSXDCCLIRPIRCAXQLFXLTKLMVWLQYGXAGKIRFTGXTCLMALQRFFLFPEWY

SEQ ID NO: 2001 - protein, 103 aa, Homo sapiens
  SITE (8): Xaa equals any of the naturally occurring L-amino acids
  SITE (55): Xaa equals any of the naturally occurring L-amino acids
  SITE (56): Xaa equals any of the naturally occurring L-amino acids
SCSQNKRXTAHSECLPEELAPGTEGEEGGWMETDGGRRGQGKARAGGHPPRGWFXXMSASLWPSGLPACPGECVFDTLMTRSPSVRQEQDPGRAVVVAPVQCV

SEQ ID NO: 2002 - protein, 38 aa, Homo sapiens
  SITE (10): Xaa equals any of the naturally occurring L-amino acids
PLCYWSGQIXIKGNSAGLQPVNSVEVQVSKGSEVESVI

SEQ ID NO: 2003 - protein, 60 aa, Homo sapiens
  SITE (38): Xaa equals any of the naturally occurring L-amino acids
AKEHDFLSLLKRVALTHPWIWWGKGTTPDLLFHFETTXFVRYLGRYTVEFATGCDSVYTY

SEQ ID NO: 2004 - protein, 53 aa, Homo sapiens
  SITE (33): Xaa equals any of the naturally occurring L-amino acids
NVLLKYLRFIEKATIYNFQPELCNVLILYMIIXLTWCCSGKNQRMEGLTHFIR

SEQ ID NO: 2005 - protein, 78 aa, Homo sapiens
  SITE (20): Xaa equals any of the naturally occurring L-amino acids
  SITE (22): Xaa equals any of the naturally occurring L-amino acids
  SITE (60): Xaa equals any of the naturally occurring L-amino acids
  SITE (67): Xaa equals any of the naturally occurring L-amino acids
  SITE (71): Xaa equals any of the naturally occurring L-amino acids
EEALPPPLHCTWVPFPSFEXLXEMSKGTSTEFRVLTFIIMIYNSQKSEKHMNAQNRRLKXKPQNIHXMEYXAVIKIFS

SEQ ID NO: 2006 - protein, 118 aa, Homo sapiens
NSVSTKNTKIRQAWWWAPVVPATWEAEAGELLEPGRRRLHSEPRLHHCTPGWATECDSVSKKQKQKQLLPPPQTPPWSPLVIHLMDLPRPPLPLLCVVLFGDLWLACIVLGAPKGCGI

SEQ ID NO: 2007 - protein, 44 aa, Homo sapiens
DTVSTKIKAQKKISRAWWHATVVPAASEAEVGSIGPGRQACSEP

SEQ ID NO: 2008 - protein, 112 aa, Homo sapiens
QMKAVRKRNETSVIDQIGEDLLTWFSGPGEEKLKHAAATFCSNQPFALEMIKSRQKKDSRFQTFVQDAESNPLCRRLQLKDIIPTQMQRLTKYPFCWIILPNTQNGQQKGRR

SEQ ID NO: 2009 - protein, 176 aa, Homo sapiens
  SITE (133): Xaa equals any of the naturally occurring L-amino acids
AQIYSVAIFLGINLAAFIIIVFSYGSMFYSVHQSAITATEIRNQVKKEMILAKRFFFIVFTDALCWIPIFVVKFLSLLQVEIPGTITSWVVIFILPINSALNPILYTLTTRPFKEMIHRFWYNYRQRKSMDSXGQKTYAPSFIWVEMWPLQEMPPELMKPDLFTYPCEMSLISQST

SEQ ID NO: 2010 - protein, 146 aa, Homo sapiens
  SITE (116): Xaa equals any of the naturally occurring L-amino acids
  SITE (137): Xaa equals any of the naturally occurring L-amino acids
  SITE (145): Xaa equals any of the naturally occurring L-amino acids
VTEQPPRGLQFTLGTKNKPAVVDTIVMAHHGYFQLKANPGAWILRLHQGKSEDIYQIVGHEGTDSQADLEDIIVVLNSFKSKILKVKVKKETDKIKEDILTDEDEKTKGLWDSIKXFTVSLHKENKKEKDVLNIFSXASGIYMNXF

SEQ ID NO: 2011 - protein, 167 aa, Homo sapiens
  SITE (134): Xaa equals any of the naturally occurring L-amino acids
  SITE (137): Xaa equals any of the naturally occurring L-amino acids
  SITE (153): Xaa equals any of the naturally occurring L-amino acids
  SITE (165): Xaa equals any of the naturally occurring L-amino acids
  SITE (167): Xaa equals any of the naturally occurring L-amino acids
SFVMLYAWVYDVSNPKSFEYCARIFKQHFMDSRIPCLIVAAKSDLHEVKQEYSISPTDFCRKHKMPPPQAFTCNTADAPSKDIFVKLTTMAMYPHVTQADLKSSTFWLRGKFWVLLFLAVLGLCYVQSIIGNSXGYXKNTCPYPKTITFMVHXDGFRFWLGFLGXFX

SEQ ID NO: 2012 - protein, 46 aa, Homo sapiens
  SITE (14): Xaa equals any of the naturally occurring L-amino acids
LVWFLEQHKFWLIXDPDFTGYCINCFTKIKVHGFTAFLSVANSVVL

SEQ ID NO: 2013 - protein, 85 aa, Homo sapiens
  SITE (12): Xaa equals any of the naturally occurring L-amino acids
SGGTLQDSPTKXSCLFPGGLDLPGLDVKSLVSSPSLIPAVHSNKLQLFSWSKFRNLVPTMLWGSLFISAYEDTQRNLMAIQKDES

SEQ ID NO: 2014 - protein, 59 aa, Homo sapiens
  SITE (52): Xaa equals any of the naturally occurring L-amino acids
  SITE (56): Xaa equals any of the naturally occurring L-amino acids
FCLLLNSRTFKSTHPVHTPLGLVCFVQHYVQEIHPFAYVHYSSSFSLMHRIXGHPXHME

SEQ ID NO: 2015 - protein, 145 aa, Homo sapiens
  SITE (23): Xaa equals any of the naturally occurring L-amino acids
GKLVRLQVPVPEFPGRPTRPPTXLQALRMVQRLTYRRRLSYNTASNKTRLSRTPGNRIVYLYTKKVGKAPKSACGVCPGRLRGVRAVRPKVLMRLSKTKKHVSRAYGGSMCAKCVRDRIKRAFLIEEQKIVVKVLKAQAQSQKAK

SEQ ID NO: 2016 - protein, 42 aa, Homo sapiens
  SITE (35): Xaa equals any of the naturally occurring L-amino acids
LQSVIDTAKFHSNISKLSHRISEKKVFPITDFINXRQYYFST

SEQ ID NO: 2017 - protein, 48 aa, Homo sapiens
  SITE (4): Xaa equals any of the naturally occurring L-amino acids
  SITE (12): Xaa equals any of the naturally occurring L-amino acids
FLLXMLVCQQLXKAGRRVAQACNPSIWEAEEGGSLRSGVSRPAWANMV

SEQ ID NO: 2018 - protein, 42 aa, Homo sapiens
GGEGCSKLVPTQPGGSPRNFRSKRMDFGLQEKYLVVSGKEIH

SEQ ID NO: 2019 - protein, 106 aa, Homo sapiens
  SITE (75): Xaa equals any of the naturally occurring L-amino acids
LPKMLLEYRWYTTYTDLDLYHFPPLPTLTCSILKELETSKCLRFTLPHRSLGLCGREKGSHLSAARPGHTLLAPXTLCPRPSPAILLSLHLESTGNIVVTKEGRVV

SEQ ID NO: 2020 - protein, 93 aa, Homo sapiens
  SITE (48): Xaa equals any of the naturally occurring L-amino acids
  SITE (69): Xaa equals any of the naturally occurring L-amino acids
SICPFRSVAWDTSYPAIRRPGLAQQLHPPLLFTHDTSLPTRHCWLTCXTPGSSDARQVLLVCVSRGLQXTRASRGHTHLCIWRKRSMRRNLLL

SEQ ID NO: 2021 - protein, 72 aa, Homo sapiens
  SITE (8): Xaa equals any of the naturally occurring L-amino acids
PPINKGKXEKKEALRWGITKKLSLQNILGKNVPVFPLTVLRPQGLLPRTGWSPGHTTTHTNNCHRVGGRIKW

SEQ ID NO: 2022 - protein, 77 aa, Homo sapiens
CGTLDSILSKKKSALLANNRRLLITALVFISFATPKTSHVLFYFSGSLQAAGAKTWWVGNLTSSQRIKNACEYDRRE

SEQ ID NO: 2023 - protein, 86 aa, Homo sapiens
  SITE (3): Xaa equals any of the naturally occurring L-amino acids
  SITE (62): Xaa equals any of the naturally occurring L-amino acids
  SITE (69): Xaa equals any of the naturally occurring L-amino acids
WSXLWLVTPAANSVGPSALFSILPIMGDPQDHTCSPSKATSTLWVLCILAPDGNEESHSPTXRCTGCKXKYVRGLETKFFLGGNPR

SEQ ID NO: 2024 - protein, 55 aa, Homo sapiens
  SITE (34): Xaa equals any of the naturally occurring L-amino acids
  SITE (43): Xaa equals any of the naturally occurring L-amino acids
GKALQKMQTMKWASGRLENWERPRMCQIKGKEGXWRQGEGRTXQAVNTGISLFKF

SEQ ID NO: 2025 - protein, 59 aa, Homo sapiens
SGRRPSKELSGQVQWLTPVIPALWEATARGSPEVRSLRPAWPTWRNPVSTKNTKISQVW

SEQ ID NO: 2026 - protein, 86 aa, Homo sapiens
  SITE (44): Xaa equals any of the naturally occurring L-amino acids
QKTTAAHGGPYQTQDRDHSISTQVLIAFPPPSPSILCTVGPRGXKVIFSLPGHLGAQTTSWRNDAERADEKAEILQVEMTRPRSQV

SEQ ID NO: 2027 - protein, 48 aa, Homo sapiens
SNCLSTFLDVWKIFKRHREGTYAMEIVFIYICIIATEILNRPKGRKIL

SEQ ID NO: 2028 - protein, 41 aa, Homo sapiens
  SITE (38): Xaa equals any of the naturally occurring L-amino acids
RTCSRSKLVSNGARTSTRQPGLSVQALHQHTTLPLPVXTAF

SEQ ID NO: 2029 - protein, 82 aa, Homo sapiens
VTPLTSTSDAWRINVSTDRLELGDVELECGFPTEVDGSRVWMALHAEEITSCTLAFLVREGRRVYKMSKGVLTLVLHHSRAD

SEQ ID NO: 2030 - protein, 68 aa, Homo sapiens
CPRDYFKQCLSMKSFHSPNISRNILLYSTLQKGKLRNGEVKWKLSGRIQIIDLSFYWYAIARAMIVLR

SEQ ID NO: 2031 - protein, 145 aa, Homo sapiens
  SITE (121): Xaa equals any of the naturally occurring L-amino acids
  SITE (124): Xaa equals any of the naturally occurring L-amino acids
FGTKVEKQKRIKRNQQLEAIAKEHYERVLLRKKGLEPWKRLRMQSKQNIQVAEEHYSLFLQRKYMLTWFQRSQESLARKMAQADQFYSQILLKRVIQSWLQYVIDLQEEVRKFCVHFLQKXIFXAWFNMVREVKIDSQGKHEIAA

SEQ ID NO: 2032 - protein, 177 aa, Homo sapiens
  SITE (32): Xaa equals any of the naturally occurring L-amino acids
  SITE (155): Xaa equals any of the naturally occurring L-amino acids
WFPGARAVLGMEAVAQVKMACRSLLTGLRPAXQQAVVTSEWAEGTQDMSAPALSVQHDFPDEAFLSQGLSKLLAQLSVVIPLPQVSLVPCPTPARLHTRQSSVAVIHLSPGQESVLSPYLSALSAAPHSFSGYACPGTLSFPAFFPCLHTLLMLXPSPPLLFLHLLCRRRWSSPEEP

SEQ ID NO: 2033 - protein, 122 aa, Homo sapiens
EVLTHPFPKEHRCWPSEDTLERMGLFTVCQAQSPLIQPLRVSAARCPQGRRVGSTRQAGKCVLKTLLLPSALPIATLCVNSNGFEWGSGCMGKLLCGPLGHRNLGLTGRGSILKAPSCQLCY

SEQ ID NO: 2034 - protein, 32 aa, Homo sapiens
KIIETAWYMTRRKKSRHREEYFLDDKDFILLL

SEQ ID NO: 2035 - protein, 127 aa, Homo sapiens
  SITE (109): Xaa equals any of the naturally occurring L-amino acids
  SITE (112): Xaa equals any of the naturally occurring L-amino acids
PQADWQSHWVAYVMGQTPEAQCVAAAGGTICLWEKWFREADHRGQRLSMLTPIYQDLESHPDPTTTASLAVPGVHRGTEAEALPRGHIQVGGPRSGFRRMSHLGLCPKXGGXPQVFPAPCAPRIEKY

SEQ ID NO: 2036 - protein, 57 aa, Homo sapiens
  SITE (42): Xaa equals any of the naturally occurring L-amino acids
HCLGTRRLSQDPFINSTNVAEALPLTRPSVGTKVPERVPDLXKFLFWSVRQLRSKNS

SEQ ID NO: 2037 - protein, 57 aa, Homo sapiens; identical to SEQ ID NO: 1665

SEQ ID NO: 2038 - protein, 43 aa, Homo sapiens
PTWRNPVSTKKNTKLAGRGGGRLSSQLLGRLRQENSLNPGGGG

SEQ ID NO: 2039 - protein, 301 aa, Homo sapiens
  SITE (118): Xaa equals any of the naturally occurring L-amino acids
  SITE (123): Xaa equals any of the naturally occurring L-amino acids
  SITE (129): Xaa equals any of the naturally occurring L-amino acids
  SITE (147): Xaa equals any of the naturally occurring L-amino acids
  SITE (156): Xaa equals any of the naturally occurring L-amino acids
  SITE (182): Xaa equals any of the naturally occurring L-amino acids
  SITE (185): Xaa equals any of the naturally occurring L-amino acids
  SITE (191): Xaa equals any of the naturally occurring L-amino acids
  SITE (196): Xaa equals any of the naturally occurring L-amino acids
  SITE (202): Xaa equals any of the naturally occurring L-amino acids
  SITE (204): Xaa equals any of the naturally occurring L-amino acids
  SITE (289): Xaa equals any of the naturally occurring L-amino acids
  SITE (291): Xaa equals any of the naturally occurring L-amino acids
  SITE (293): Xaa equals any of the naturally occurring L-amino acids
  SITE (294): Xaa equals any of the naturally occurring L-amino acids
  SITE (299): Xaa equals any of the naturally occurring L-amino acids
TPPPDCLDDLTGGMLITASSQSLAMMILGTALTGLFSVVAQILVPLAATLASPDKRGKVVGTIMSGLLLGILLARTVAGLLANLGGWRTVFWVASVLMALMALALWRGLPQMKSETHXNYPQXLGSVFXMFISDKILRTRALLGCLXFANFSILWXSMAFLLAAPPFNYSDGVIGLFGLAGXAGXLGARPXGGFAXKGKSHXTXTFGLLLLLLSWLAIWFGHTSVLALIIGILVLDLTVQGVHITNQTVIYRIHPDARNRLTAGYMTSYFIGGAAGSLISASAWQHGGXGXFXXWSDDXPA

SEQ ID NO: 2040 - protein, 110 aa, Homo sapiens
  SITE (90): Xaa equals any of the naturally occurring L-amino acids
  SITE (108): Xaa equals any of the naturally occurring L-amino acids
  SITE (110): Xaa equals any of the naturally occurring L-amino acids
YIFIITIFVKFISINGELGKLRKFDRNLSSVIVLHNLFPFCFANLSSVMVLHNLFPFCFALCLVSLNIYVTGYILVILLKSRQLMSTIFXTNWITREIIKEFCLYSPXPX

SEQ ID NO: 2041 - protein, 57 aa, Homo sapiens
  SITE (4): Xaa equals any of the naturally occurring L-amino acids
GPIXKKKNKKKTKKHNNNKKHDIRNYFWPDGVSRSLLPQIPTLVLKNFNSDTISILL

SEQ ID NO: 2042 - protein, 51 aa, Homo sapiens
YLATKFVLFRAELWFVNNLSQAGFYAYLCNSWIYRSYPFSLNILRYREKVS

SEQ ID NO: 2043 - protein, 74 aa, Homo sapiens
  SITE (65): Xaa equals any of the naturally occurring L-amino acids
  SITE (71): Xaa equals any of the naturally occurring L-amino acids
AIYVKKMFHWAENGQGQLEKVGRCQGRDSRSQEQDLLLAGMVEVRFKYGQQKRRAEKIAQAKLYXSKVKGXPSH

SEQ ID NO: 2044 - protein, 40 aa, Homo sapiens
  SITE (1): Xaa equals any of the naturally occurring L-amino acids
  SITE (3): Xaa equals any of the naturally occurring L-amino acids
  SITE (6): Xaa equals any of the naturally occurring L-amino acids
  SITE (7): Xaa equals any of the naturally occurring L-amino acids
  SITE (9): Xaa equals any of the naturally occurring L-amino acids
  SITE (13): Xaa equals any of the naturally occurring L-amino acids
  SITE (15): Xaa equals any of the naturally occurring L-amino acids
  SITE (17): Xaa equals any of the naturally occurring L-amino acids
XEXAVXXKXSVIXIXGXSQNYKIPLKTCTFHIFKSILTKN

SEQ ID NO: 2045 - protein, 99 aa, Homo sapiens
  SITE (6): Xaa equals any of the naturally occurring L-amino acids
  SITE (7): Xaa equals any of the naturally occurring L-amino acids
  SITE (10): Xaa equals any of the naturally occurring L-amino acids
  SITE (33): Xaa equals any of the naturally occurring L-amino acids
  SITE (34): Xaa equals any of the naturally occurring L-amino acids
  SITE (37): Xaa equals any of the naturally occurring L-amino acids
  SITE (38): Xaa equals any of the naturally occurring L-amino acids
  SITE (60): Xaa equals any of the naturally occurring L-amino acids
  SITE (77): Xaa equals any of the naturally occurring L-amino acids
FLPVPXXPGXSAHASPAQGSVQEWEWRGTQQGXXVRXXPGPVAQALNLGLPHLHTGDRWXRKNSNGPSPSYCLPFCXACWCSHNTLRLLLALGTPHCAS

SEQ ID NO: 2046 - protein, 81 aa, Homo sapiens
ARAPGKQGPASAPPALRLGAALLCSQLGLSLGHYCLVRALSSQGTFPTSHFQSNLPPWQPSSSQRGLGDDRKETFPECQRK

SEQ ID NO: 2047 - protein, 43 aa, Homo sapiens
PITGVVDSDCVVKVVLVSIHCCKVTIFSFPFKERFYFLSSQTG

SEQ ID NO: 2048 - protein, 70 aa, Homo sapiens
  SITE (22): Xaa equals any of the naturally occurring L-amino acids
SARLGLPKCWDYRHEPLCWACXVFLFVCFSNQKPNKDSIGMIKSYFLSRLPKRQRKTYCSVTASTYGKPI

SEQ ID NO: 2049 - protein, 74 aa, Homo sapiens
  SITE (37): Xaa equals any of the naturally occurring L-amino acids
  SITE (39): Xaa equals any of the naturally occurring L-amino acids
LCTHGSVGFCHFFDGLALDPPFRKLEHRGPIFLCSQXQXVSFSILVWNCEHPYYSVALFAEVAIDFLSKEALAN

SEQ ID NO: 2050 - protein, 53 aa, Homo sapiens
KMAIVQGKGVLFFGQLARPSWDILLSIFLPIGSAVHWLCDLGQDSNLISQSLG

SEQ ID NO: 2051 - protein, 63 aa, Homo sapiens
LYHHINLVIICPEGTTNVLNVLTIQAMQSYHIEMNLETAAISNRHVRPEWDGWKVEWTWVREG

SEQ ID NO: 2052 - protein, 172 aa, Homo sapiens
  SITE (126): Xaa equals any of the naturally occurring L-amino acids
  SITE (128): Xaa equals any of the naturally occurring L-amino acids
  SITE (131): Xaa equals any of the naturally occurring L-amino acids
  SITE (141): Xaa equals any of the naturally occurring L-amino acids
  SITE (146): Xaa equals any of the naturally occurring L-amino acids
  SITE (169): Xaa equals any of the naturally occurring L-amino acids
RMFRPLMNLSHIYFKKFQYCGYAPHVRSCKPNTDGISSLENLLASIIQRVFVWVVSAVTCFGNIFVICMRPYIRSENKLYAMSIISLCCADCLMGIYLFVIGGFDLKFRGEYNKHAQLVDGEYSLXAXKDXLAILSTEVSXLLVTXLTLEKNICIGHPFRRGGDREKGXTNY

SEQ ID NO: 2053 - protein, 281 aa, Homo sapiens
  SITE (198): Xaa equals any of the naturally occurring L-amino acids
  SITE (199): Xaa equals any of the naturally occurring L-amino acids
  SITE (230): Xaa equals any of the naturally occurring L-amino acids
  SITE (233): Xaa equals any of the naturally occurring L-amino acids
  SITE (245): Xaa equals any of the naturally occurring L-amino acids
  SITE (248): Xaa equals any of the naturally occurring L-amino acids
GRPTRPVDDEVGRFVNLSCVTSGIQNAQCWHGGTHIDICEDISDHVEQIHALLETEFSLKLLSYSVNVIVDIHAVQLLWHQLRVSVLVLRERILQGLQDANGNYTRQTDILQAFSEETKEGRLDSLTEVDDSGQLTIKCSQNYLSLDCGITAFELSDYSPSEDLLSGLGDMTSSQVKTKPFDSWSYSEMEKEFPELIXXVGLLTVAADSISTNGSEAVTEEVSQVSLSVXDKXGCEEDNASAVEXQPXLTLGVSSSSGEALTNAAQPSSETVHKNPFLLPS

SEQ ID NO: 2054 - protein, 148 aa, Homo sapiens
  SITE (2): Xaa equals any of the naturally occurring L-amino acids
GXLVRLQVPVRNSRVDPRVRAPSPSFGALCSPLFATMRLLSSRAARVSGPSGSLCALLALLLLTPPGPLASAGPVAAVVRELRCVCLTTTPGIHPKTVSDLQVIAAGPQCSKVEVIATLKNGREVCLDPEAPLIKKIVQKILDSGKNN

SEQ ID NO: 2055 - protein, 132 aa, Homo sapiens
PRVRAPSPSFGALCSPLFATMRLLSSRAARVSGPSGSLCALLALLLLTPPGPLASAGPVAAVVRELRCVCLTTTPGIHPKTVSDLQVIAAGPQCSKVEVIATLKNGREVCLDPEAPLIKKIVQKILDSGKNN

SEQ ID NO: 2056 - protein, 59 aa, Homo sapiens; identical to SEQ ID NO: 2025

SEQ ID NO: 2057 - DNA, 333 bp, Homo sapiens
ccatctcagaaaatagattttctgtgtatagatacagaggcacttagcttcaaactgcttagtaaatattagggagttactttgccatcagctttggtaattatcaaatgtcatttataagaatgttataatagtgaccttctctaacagtctgtggcctggtataatataggtgtattagaattatgggtgttattattgacaaagatatggttgagtttaagtgtagttatgatattattgcttaatagacataaactgaaacagcaaacttctttcctaccaaagaaaggaattaaatgtgaatttacaatgtattaagattttttaaat

SEQ ID NO: 2058 - DNA, 333 bp, Homo sapiens; identical to SEQ ID NO: 2057

SEQ ID NO: 2059 - DNA, 467 bp, Homo sapiens
ctataccagtgactcttactgaaaatagcattgaagagtcagaaagtaagctttgaagcccaaaataatttttttttaaatatgagtataactgttataaagcccaaatttcaattttttaaaaataccaatttttataaatgtcattttattttagatttgggggtacatgtgcatgtttattgcatggatatattggtttattgcatggatatattggtatattgcttaattgtggggattgggcttctaatgtacccattacccaaatagttaacattgtacttgataggttatttttcaaccctgcccccccttcgctggcttttggagttttcatcgtgtattatttctatccgtatgtccatgtgtacccattgtttagctcccacttataagtgagaatatgtggtaatgaatttcctgcttctgagttagttcacttaggttagtggcctatgagctcc

SEQ ID NO: 2060 - DNA, 467 bp, Homo sapiens; identical to SEQ ID NO: 2059

SEQ ID NO: 2061 - DNA, 446 bp, Homo sapiens
caggaatgcctggaatagggttggccgggagaaggggaagacttaagggagaatttcagcagacactgtgaacaagataacctagtatcccttcctttcttccttagcttgtttccacagtaaagctaaactctgtggaataaaatcctgtggtcccacaacgcaccccacaataacacattcacaagcaagggatggctcccatgctctgcccagctcccgtctgtgggctgaagtttttttcttcttcagaaggaagggtgtgtaactaggaagtgactttgagactttctcagtttagtggatggccagctgaataagtgttttagtattgttacataacagtacatatggacttaaaaatataatttttgttcaactcaaatcaatgcaaccctacatcctgtgcaattaacattttagacctcactaaatatattatggca

SEQ ID NO: 2062 - DNA, 330 bp, Homo sapiens
tttttttttctttttcattttctcagctaagcttaacttgactgaataaataaactgtgttttcctaaaatgcattgagaaaggcgactatcagaaagggcttattcaaagatgaggtctgatgttggtggcccttgatctaacctaagtggctaattaaagcgcttacccctgcatccacacccctgtgacagtttgaacttcatttgcgggggagggtcataaacatccatcttccttttgtacagaggtggaagttcagtttcctggaacctgatattcatgcagtagcagtttctttgctacctctggaaaattaccaaaaaaaaa

SEQ ID NO: 2063 - DNA, 167 bp, Homo sapiens
ctttatcacttttaaagatataaaaggttgcactgcactctggagaaaatgtcaagagcagcttcaaagaaattctgacgagtaatccacacagttggggaggggagaagttgcatgtatttttaatgaaaaaaaaaaaaaacctcatttggatatatatgtcccat

SEQ ID NO: 2064 - DNA, 2115 bp, Homo sapiens
aaatcgattaagggctatttatatccccaaagttttattatctacttagaatgatggcagctccaagagttatcaagcttcagttggggtggagagataactgtgaatgtgtacgtcattggaactcctggtccacaaaagtttagtggaagggataatggttgtaacatttggcttagatacctaacaagtaagattgtaaaggtcaatttattctcgaacaatcactgaatgatctccagatttcccttcaactaagatgcaaaatttagagatgcacatttatagctatgtcatatagaaggaatgtcaatcacacattagaaattatcccatgccttttccttcaaaaattaaattttaaaaattatatgcaaataaaacaatttttttatttgtagtagtcagatcactcaatattcttttttatcctcatacttaccagtgtctccactgttaactcttcttctaggaatagctttaactcgtgcaggtaaaatggagtgttgtttatcatattcggaagcaacaactgagtatgatctttggaagacagttctctttgcaagatcagtatcagttatgggactggtttctaaactgtacatggaacaatgcaacagatacaaactcagaagagctgaatgaaatgtaactatacttataatgatgcaaaatatgtgactcaatatttcatgtggagaaacaaaatcaaagccaaattgataatctctctttaaatcataatttgatcttttcaaatgcagtaacattttgactgatttcagcattgtaccttaaaacttatggttttcttaaatctactttgtattttaaatgaaaaagaagaaaggtttccaagctccttttagaatcaaaagcactggggtggaattcatgtatcataatattcaggaaaaacagtcagatataatcgtaagtgcaccaaatagaaagaaaatggatatgtacacatgaaaacctaataaaacaggaagcaaaatttggttccaaagttttcttttggtgtcttcagtgttctgtgaggtttctcactcttgggaaatgttgcccaaagcccttggaggatggctgcatcaaggtgtcatgagaggtaacaaactgatttttggcaccagtgttgtatttacactctataaaagaacttaatggttttattcaggcttaagtaaactaacagcttttctatttattaaagcaacatttaaaaatacttacaaagttattaagagagctatacaatttcctttattgacacattttataaaaaaagagaaatcccttctctttcttatttctctaaaacaaatttagaaactattcttttcgtgagctccttttctgtcacctgaattcaaattggaatatttttgctcaccgttggttctggagttttttccatcattcaagccaggtttgaaatcctgtgtcccttggtaaaattatctattttctaatagacggctaactgcctaggtgttttctttactcaccacttctctaagcttatgtacattcttgtttgaatagactataaatactgtacataactgattggcagtaaatgtccctgggtgttagtataggttgcttggttccagaatgactagaatacagggaaacattaacttaattcactttatatatggtgttactataaagcacagacatttgttctgttttcagaggaagttttctactaacttaaaaaaaattacacaaatttaaaaagtgactttttaccaaaaaaaaaaaaaaattgcttgtgaaagaattcaagcaacacaagaaaatccaaagaagaaagcaaagatgacatctttaattgaatggctaccctgagccaggtaattccttgttaggctgtcttgcctcctgtaggatggttagcaacatccctggcctcaactcactaggatgcccactcaactagcccagttgtgacaaagttatttccaaatatttccagatgtcaacagagaggcaaatatcaccctcaattgagaaccactgatttaatgaattcatttattcatcaactttttttttttaaatagaaggggtcttgctctgtcacctaggctgaagtgcagt

SEQ ID NO: 2065 - DNA, 119 bp, Homo sapiens
  SITE (110): n equals a,t,g, or c
cacaatgtttaaaaaaaaagaaaagaaaacagaaaacaaaacaaaaaaaaaccacaaggtattcaggcaacaaaatagcacggtgaatagaatagtacctcacatctcantactaacat

SEQ ID NO: 2066 - DNA, 119 bp, Homo sapiens
cacaatgtttaaaaaaaaagaaaagaaaacagaaaacaaaacaaaaaaaaaccacaaggtattcaggcaacaaaatagcacggtgaatagaatagtacctcacatctcaatactaacat

SEQ ID NO: 2067 - DNA, 202 bp, Homo sapiens
ccaggcgcggtggctcacgcctgtaatcccagcactttgggaggctgaggcgggtggatcacaaggtcaggagatcaagaccatcctggctaacatggtgaaaccctgtctctactaaaaaatacataaaattagccaagcgtggtggtgggcgcctgtagtgccagctacttggaaggctgaggtaggagaatggcgtgaa

SEQ ID NO: 2068 - DNA, 187 bp, Homo sapiens
cacgcctgtaatcccagcactttgggaggctgaggcgggtggatcacaaggtcaggagatcaagaccatcctggctaacatggtgaaaccctgtctctactaaaaaatacataaaattagccaagcgtggtggtgggcgcctgtagtgccagctacttggaaggctgaggtaggagaatggcgtgaa

SEQ ID NO: 2069 - DNA, 408 bp, Homo sapiens
ctcactcttcactaggctaagtgcccttcatttcaacttacaagattttcatcacccactaattcaatgtccatgtgccttactgaagtgtatgttccagtaaggtctagatcttgtctaccttattcaccaccatactcccattcccggcttctgcctagatgctcaataaatatttataaagttagaatttaaccaaagcatgtgctcagatcagctgtcactgaagtcatctgcctcacttatgctattctgctacatcttttcttgctgacttaaggtgaaggagttaatcaagctcactaatagactttggctttggccagaggagaagcactcgttctgaaatgttataagcactgtactgtccatagatctacttttctcactgctgagttagaattctgt

SEQ ID NO: 2070 - DNA, 272 bp, Homo sapiens
ttgccttttctaccaagagatgaaatagtcaagcatggctttcattgaatgccaaactggattttccttattcatgcaggtttgttacactggtctagattcagattagttggggtggcaactcaggaggtaagaaatgagccttgataatttaatgaagtagagaattttaattcagttgttattttgcagtagttggtgtatgtgtcataacagaatgcctgacttttctgaagaggcctaagtacaaaaataaaagaaagaaaactaac

SEQ ID NO: 2071 - DNA, 1714 bp, Homo sapiens
aataataaaattatgtctaatgaaattccaaattaaggcaaaataaacaacagaagaatgacagcaaaccaaactagtgtactggttatcactatcaataattaacagaggtctggaagtttgaaatgctacaagttttaactgtatacagttgataatattgctttctttaggaatcaactgaaaacatactaaaattaattggtatgactaagagagcagaaataagactaaaaataaaaacacaatggatttcttctatgtaaagagcactcagagactatgatgaaaatattacataccaatgacagtagaagtagaaaaaaacaccaaaataatagtgtgaaaagtttaattggaattcttaacaagaacatgtaagattttcatgactaaattttatataaataaaaacttgtataaataagttgtgacacaattttctgaatgagaaaagagagatgaaatattgtctttctatttgcatatagatttactatcaatctgaaagtcttaactgaatctttcttggatcgtcacaaaaatatacaaaaaaaactcatcttaaaataaaaatcagctaagaactagtggaacagcaagtttagtaattttcctaccaaattttaatgtacattttaaagccctactaaatattttaatattttatatattgctataatagaacaaattgtatatagcatgcttcctgaattggatagattttaatatcatgagagtagatagatatactaacagaaataaattcattttactaataagtgcttggcatataaaaacaatactttggggggatagaataggaggcatgaaaatttgggctaatacaatttccttctaaatttactgaaaaatgagaaggatcttcaactttcttgcagagtcattcactcaagatacctttgcaataaaataaacttcccaacatctgacatggcccatacttaaaaggatgcttttcataccttttaaggaatcttttctgtgatttactagagggaatgtagattttttttattatcaggtgctttctatgacatctaatcagagtattaacactgtggccatgacaagtgtttaaaatttaaaagtacttttgtaatacttaatcctcttaagttgatttttatttttaccgaagttatacttgcacatggcctaaatcatgctataaagttttgttaagaaaaacagaagttcactttattttccaagtccacagattcctttgcagttcagtggttctactgcctattcctctctccagaaatgttctagtaatattccctggggtggaagccagctttccacacttcttccagaggtactaccacctgcctccatgggagaactggctctggacaaccgctctagtcttgctttgtctactgctcctgcctatctcccttaaaagcattagcttctctcccttctcctgtgacatacatagcgtattcctcactccatgacattgtcataggactgaaagaagccaggaagggaagttgtgtacaagtaagctctgttttctgttttaaagcgcaatcatccactgaaagaaaaaatagcacagagacctgtctagctgcttagaatggggagaagaaaattaagagaaaaaaaatgataaatagcttttcttttccttattctattaaagtaaaaaaaaaaaaaaagcaaaacaaaacaaaac

SEQ ID NO: 2072 - DNA, 1714 bp, Homo sapiens; identical to SEQ ID NO: 2071

SEQ ID NO: 2073 - DNA, 255 bp, Homo sapiens
gacctatgaagtcgcttatttgacttaaaacaatcattactaaatccaattgattgaaatacactaaaactttttcagtaaattaaataactatgaaatgtttgggatattatctaaacatattcaagattaggcagaaaaaccacattagttaaattccaaaaagttttcgcttcttacttagtgtatttttcattttaaataattgttcatcacagaaaaattagcttttaaaatactaaacaaaataaaaaa

SEQ ID NO: 2074 - DNA, 616 bp, Homo sapiens
gaaggttagagtggtaaggcaatttcttaaaataaaacaacaataaggtttgacacattgattgattattcttttcctgaaaatttctgtgcgatttctgtttgatgaaattttatccacagtagaactgctttaaaaattaaagtcaatcctctgatacccttccattgctttatcaactaaatttatgtaatattctaaatcctttgtgattatttcagcaatcttcacagggctaggcacagtgacttatgcctataatcccaggacttcgagaggccaaggtgtgaggattgcttgaggccaggagttcaagaccaccgtgggcaacatagcaagaccttgattctgcaaaaaattcaaaacaaacaaaaaataaaagcaaaataaaaacattggtcactgtatcttcaccaggagtagatttcagcttaagaaatcattttatttgctccaccataagaatcaactccctatccattaagtttgatgatgagattacagtgattcactcacatctttaggctctacttatagttatcttgctatttttaccatatctgcacttacttccaccactgaagtcttgaatgtctcaaagtcatctataaagttt

SEQ ID NO: 2075 - DNA, 469 bp, Homo sapiens
aaaaaaaagaagttcagtccaaggattcagagaataatactaatttaggacagggaaccaagaagaagtgactatgaactcagaatcacatgagaattattctcacttaggagagagagacaatctagtagtcagaaaaaatgttacccattaacaaagagaacagaaagaagagacgtctatccagagagtcagaaaagagagctaataagtgacttacagctcaggtgccagggaataaactccatttcataagagagcaagaacgaaggtctttcaaatcaaaaagtgagagaataattgttactcaaggaagagatctggaaagacatgacgtccaatcaggaaaataatttcttttatgaaacagagccaggaaaaacaggttttcactccaggagtgaggaaatctctacacaggaaatagacccaggaatttttttttcctgcttagcaaataaggccagaa

SEQ ID NO: 2076 - DNA, 123 bp, Homo sapiens
aagaagagactgtgagctcagaatcacatgagaattattctcacttaggagagagagacaatctagtagtcagaaaaaatgttacccattaacaaagagaagagaaagaagagatatctatcc

SEQ ID NO: 2077 - DNA, 469 bp, Homo sapiens
aaaaaaaagaagttcagtccaaggattcagagaataatactaatttaggacagggaaccaagaagaagtgactatgaactcagaatcacatgagaattattctcacttaggagagagagacaatctagtagtcagaaaaaatgttacccattaacaaagagaacagaaagaagagatgtctatccagagagtcagaaaagagagctaataagtgacttacagctcaggtgccagggaataaactccatttcataagagagcaagaacgaaggtctttcaaatcaaaaagtgagagaataattgttactcaaggaagagatctggaaagacatgacgtccaatcaggaaaataatttcttttatgaaacagagccaggaaaaacaggttttcactccaggagtgaggaaatctctacacaggaaatagacccaggaatttttttttcctgcttagcaaataaggccagaa

SEQ ID NO: 2078 - DNA, 123 bp, Homo sapiens; identical to SEQ ID NO: 2076

SEQ ID NO: 2079 - DNA, 469 bp, Homo sapiens; identical to SEQ ID NO: 2077

SEQ ID NO: 2080 - DNA, 469 bp, Homo sapiens; identical to SEQ ID NO: 2077

SEQ ID NO: 2081 - DNA, 399 bp, Homo sapiens
aggctaggacagaaaaggtagagagactttcactcaatgagtcagggaataattcctaccaaaaggcgacagcaaaaaaaaaaaaaaaaaaaaaagacactttaagctcagagagttagggaatagtccctattgggaaaacaaagcaaaagaaaaaaacattttatcctatgaagttagaaaataattccctactcagggatatcagaaagtcaggacttcctgacttaagcccagtcagccagaaaataatttctcctagcagaagagtcaggaagaatagatatccaacctacatgcaaggaaatgggttttctataaagaaagacaaccatgaagaagagagtttcagatgaggagtaaaggtctaatgttcactaaaaaaaaaaaaaaaaaaaa

SEQ ID NO: 2082 - DNA, 399 bp, Homo sapiens; identical to SEQ ID NO: 2081

SEQ ID NO: 2083 - DNA, 374 bp, Homo sapiens
atcttttcagctttgaaaacctttagtggtttcctgttgtctgaagaggaatgcctcaaatacatggatggtattcagcatcttcccacgtggccctagccttccttcccaaaccatcttctgccttgaccacccactgggttgcagcccaagtaggccacacagttttattttgctaccttggcttgttgtcttccttctgtctagaattcctgctgtgggcctcacctcctcatcaccccacaacctgaagaaacaactgtctatgggaaactcaaagatttctcttctttctaggcagaatttttggttcctgttcattcatctctttttagcatttattatgatatcaaaggtaattctatatgtcttgc

SEQ ID NO: 2084 - DNA, 147 bp, Homo sapiens
ccgggtgtggtggtgcacgcctgtaatcccaggtactcgggaggctgaggcaggagaatcacttgaacccaggaggtggaggttgcggtgagccgagatcgcgccattgcactccggcctgggcaacaagagcgaaactccatctca

SEQ ID NO: 2085 - DNA, 378 bp, Homo sapiens
atttgtgacctcattcacctcctccaccaggaaagtttttcattctgttcatttgcccatataattgatgggtgatgactaaattaacaacacgtttccaaagcccagatacctatatagaaataaatacataaaacatttctgcactatttcatgttatgatttacaaccccatcagacagacaagcttaggcccatttttatagaacagaagactgaatttaaaagagggtaagtaacttgggacaaactggctctcttcatccatttttttagcgagttatttttgaactagtgtgtaccactgagactcgaagaattcaaagactatcttggctttgttgtacaagtgaacgtgttaaccatgcaggattcccc

SEQ ID NO: 2086 - DNA, 509 bp, Homo sapiens
aatatctcggttatgttcaaagaatacaaaacgtctttgaagtctactttttgttctactttaaatctgttattaaaaaaaaaagaaaaagaaaagtcttgaaacactgcacatttttgctaccaattttttaatggatgacttagaggataatatattgtaaaatcttttgtttttattatctcaattacattttctcacatttcacaccattttccccggctccaacaatcagctctgggttgccaataacttgcttcccagataaatggttggaggaaagagggaacagaaattgcatttttttttgaagtaacaattacccaacaaaactcggtgagaattctaagttctatctaaggtctcaattgcttggcttctttctaacaagtctaaaatttccctcttatgtattcaagatttttacaccatcaaagatggttcctggcagatgcccatgacatgatgagcagggaacaggagtccacagtccttggagaagattgtta

SEQ ID NO: 2087 - DNA, 440 bp, Homo sapiens
gttccaggttctctaaacaaatgttaggaatttggttaagtgggatttattcacaaattgggtcttactattctcctgtatctaagtgaattaaatagtttagaaagagaagagaatatgtggcaatcaagggttaaagtaaagaatttgtgtttcatggactgtaaaagggtagaggggggcatgtcaaggagaaccaacgtaaacatgaatgttatgtggcctgctgtggcatgagggataaaatcctttgtgtctaatccaggaatcgtgtgtcttctaccggaatccatgaatctgaggctaacatgctagcttgcaatcagggtaaaatcttagattcttcattgttcttgacataagaatttttctttttattcttagctctgatttccaaattctcccaaggcgtaaggcatcattaattgtaataattctat

SEQ ID NO: 2088 - DNA, 457 bp, Homo sapiens
ctattatgtgagaaaaaaacttggtgtagaacagtatgtatcttatgcttcctttttcataagaaaggtgacaaaatgtcttcatgaaacaaccactggaagggcacataaaaagctgatcacatggtttatgtatggaaagaggggaatagaaactctcagctcacatggcaaagatggaggtagacttttcactggatacttctatttatttaccaagtgaatgtattctcaatttaaaataagtcaatgaaactgacaaatttgtttctttgaacttctttttcagctcaaattttgaaatattatttattcgttaggggcccttttagtcatttttttctgaatgcaagtaggtcccatctgccaatttttacattggctggagtcatgccatggtgactcattacagtgtcaccttagcatgccatggttgcaatcccatggactagctaag

SEQ ID NO: 2089 - DNA, 457 bp, Homo sapiens; identical to SEQ ID NO: 2088

SEQ ID NO: 2090 - DNA, 457 bp, Homo sapiens; identical to SEQ ID NO: 2088

SEQ ID NO: 2091 - DNA, 409 bp, Homo sapiens
caacttgactatttcatactgggataggaatatctgtcatttcctctgccagagggagaaacagccaggaccatagataattttttcccccagtgtatagtaagaagataaatggatggtttcttcttgattcttcctgggagaattaagtataattagtacttccaatacatgcaatgttaatgaggtaaagaaaatatagtaattaagaatgcatcattggcttcagtttcaggtgataacttcatacatgtctgttatgtattttatgataaaggaataattctgtgaataacttagtttcgtaacttcatgtagtgaggcgtagttttggaaaaactatgataatatactgtaacaaaattaaagtaataaggaacctctagcattttaacctttagaatgaaaa

SEQ ID NO: 2092 - DNA, 409 bp, Homo sapiens; identical to SEQ ID NO: 2091

SEQ ID NO: 2093 - DNA, 464 bp, Homo sapiens
attaagtgggggtaattaggctaaattaattttaaaattgtagtagtgcattctggatcaacaatagcgtagataatttccggggctaatgatcttgcagctggggtcctttctgttagatggactctgttcttgacattattggccattttctctgctttacccattctatttaggtaacctggggggtatagtttaaaactggaattcccacccatttagctaggctgccaaaacagatcaaagaacaagcgattctcatcaaggaaaagtggcgttttgtgaaaagacatcacaggatatttcttcatctatttgtatatctgttcatctgcctagccaagatatgaatactattactactaataataaatagtattagtatataattttcaaagaatttaatataggtcttggtactgtactatgtcacatacattatcttgttaatttaaaaacaaaaa

SEQ ID NO: 2094 - DNA, 316 bp, Homo sapiens
gcctcacctatgctgtcgccctgtcagcacctaattcagcttcccatggagaaaggcctccctgttgacagggccgtgctgggactcagggctgccaaagtcagtcttctcgcataaaaggctcagtgagtcctggagacacttggaagccagacagaatggaatttctccctattttctttacagctgagaaaacacacacaaacacaagagcatatttattgcgatatttctatcccaaagtttgtctttaaaaaaaaaaaagaaataaaattagtttctctgcccactccacccctatccccctacccccact

SEQ ID NO: 2095 - DNA, 316 bp, Homo sapiens; identical to SEQ ID NO: 2094

SEQ ID NO: 2096 - DNA, 5238 bp, Homo sapiens
cgtcacagcccgacgcgccacccagctgtttttgtgctcccagctctagcgaaaagccgccggtatttctccatctggctctcctctacctccaggcaggctcacccgagatccccgccccgaaccccccctgcacactcggcccagcgctgttgcccccggagcggacgtttctgcagctattctgagcacaccttgacgtcggctgagggagcgggacagggtcagcggcgaaggaggcaggccccgcgcggggatctcggaagccctgcggtgcatcatgaagttccagtacaaggaggaccatccctttgagtatcggaaaaaggaaggagaaaagatccggaagaaatatccggacagggtccccgtgagtgtagaggagcggaggggatgggaggggaagggcccgcgggggcgggggcgggtagtcgagatggcttccctggggcgcccaggcggctctggagaagggaggttccgagaattacttaatcctgaacgcccttcagtgccagagccaatggacgtccagactgtagagcttttaaaaccccgtatgcctgggccccgaaccccacttcagggctgacggcgttttgggggccgagccgccgtcttcagtgactcagcaacccacacacggtctcagcagctgagaccgtgtgtgggttgcggtgcacaaaatagggcccctgtgggcgagactggttagatcggggccatggattggctgcctttaagaacgcagggacattgtgctgtgcggtgaggtttgcgcaaacccagtcgatttctgccttggctggttctcctttaatgaagttgactttggctctcatatcattggtcttgggacgaaaaggttcagaagctattcagtaattttcttgcattacagggggttaggggagcacaagacagtcctggcctggaaaacaaggtcacgttctctgcccaacagccctcttgcctcatcgttctaggctccggggcttgtgtggggacagccagcctcctcgtgttgatttctgatcacctggtacctggtcgcgataaggcaggactgagacgttttttctccgttttggacaccggcttaagtagttaaaactaccgcaggcagtgagtaggaacagaaaagtattaggtatctttcagcatccgggcgttttccccattaccccctcccccgcccacttgcctggtgtttctctaatgcaggctgcgcagccgaattggagggcagaatatggcttaagtggtagggggaccagcagctgttggattttggaaatggaggagcggagattttaaaattgtgctctttatcttcaggtaggaacattagtattacgtgtcacataatggtaaaataattgctgttatctgatgtcttttcttgactcacagccactctgggtttcttctctaatccttacctaacgttcgtggttttatagctaccagaagccaccagggccttagcccagcagtagaaacctcttgtaacccttttcctttaaaaagaaaaaaaagtcattagggctcttcattccccaggaattacaaaaaggttttcagcttatagaggggtgagctaatcccttactcgggaaaggatcctttacaaattactttcctggtttctggaccttggatacctgaaaattttgcccagttctggtgataccaatcttttgagcaatgatatttaaaaaatacaatcaagttttattgatagtttaccctagcggtattataagtactcagtctgtaatcattgacttacttccttacacgattacccgttctacagatggagtattcaaagcacaaagaaatgcagtaacttcctaaaggtttcacattgctgatctgtggttgagctggaattccaaccctgtctgaaggactgtggagctctcgggtatcttaacctccatgccatattgtttctcagtttctaatatagttgtattaaccagaattaatgacgtgctgtggactttacactgttaagtattggaaatagataaatatttatgtgcattcactctgaatattttagagcattctgttcttttcctgctcatagtttggtgttaaatgttttactcctgtgataatttttaagccattaagcctgtcactcagatttcagctttcctagggttatgttttaaccagtggtgagctgctcccaaggtgaccagtctgtgaccttctttctagttatgacgcaggttccttgatttggttctagttctgggaattcattgcatccttgggcagaactcttaatcgtgctgtgctagagtgtcttgtttacagaaaagagggttagagtaatgattcctgaagcccattccagcttgaccattggtgttattaaagcaatggcgtaccctgactgctcgcataaccagaacttagccccaccaatatttcttcagagccagcgttgaaaagaagaggtgtgcttgtgccttcagagaggaagggttggtgggatcttgaaattatcttcaaagatacaacatatcaaaaaaactgttaggaacagattgtctattttaaaaattcataaccctactgagtattagtcacattttacaaatgaggaaaactgagacccaaagaggcaaagcatctagcccaggggtctaccatagtgaggagtagagctgggattcctggaaacttaaccttggtactgggaaaccaatattttaatgattacccctcccccttctcttcctctccaaacccctcccttccctccaggtattgccctctgctttatcactttctttatctgtcttcctttgtggtttttatctcttactgctaggtgtccgagttcctttggggcacaatgctagcctctttctgccttttccttttaattcctggcttacgttaccctatttcagtttttatttttaaatttaaaatgtgatcatgtccctctggtcttcctggttcaggattttttctacaagaacacaaaacaactttttgttttgttttgtttttgtttttgttgtttttttttttactaattttaatttgttccttttaatttaaaaagttcaaactcccccccaagttaattatgttagataattctttataatttatgaagcattttcctgtaaaatgttatttattactcacattcacatcatatcaataccatgactttgttaaagacgtgttagaaagttttcttttcaagctgggcacggtggctcacacctgtaatcgcagtacttccggaggctgaggcgggtggagcacttgaggtcaggagttcgaaaccagcctggcatcatggtgaaaccccatctctactaaaaaatacaaaaattagccgggcgtggtggcatgcgcctgtaatccctgctactccggaggctgaggcaggagaatcgcttgagcccaggaggtggaggttgcagtgatccgagatcaggccactgcacgccagcccgggcgacacatgtgacactcgacctcaaaaaaaaaagttactggaatactgaagctgagagagaggttacgtgacctgttgaagatcacacagccactagaagtactcatacagttttttttttttctgcgtcttcacttttttttctgcatttcccatatgttctaactaaaatgactatattttcttttctttttttttttttttttttgagaccgagttttgctcttgttgcccaggctggagtgtagtggcacgatcttggctcaccgcaacctctgcctcccaggttcatgcgattctcctgcctcagccttcctgagtagctgggattataggcatgcatcacaatgcctggctaattttgtatttttagtagagatggggtttctctatgttggtcaggctggtctcgaactcccgacctcagatgatccgcccgcctcgacctcccaaagtgctgggattacaggcatgagccattgcgcccggcaatgattatattttctaaactaaaagtctaaagctcatgattttacaatagatattttctgtttggtaagttttagtgtattaaaaaaatcttttatatttttatagatctagtacagaaatacatgatctttattagaagtatataatgtggacattgaaaatcccttaaagtcctaacataatcaatatctataaatggcttgttgtgctgacatcatattataggatatcattgtcagacttgttttaacactgtttcttttccatttaataatgtttgaacaatctttacagttcttggaaattttgacaaagatttaaaccacgttattggtacctttaataaatggtatttatgagaaataataacttacaggtgatcaggaccatatgagaaaacccagttttcttgatgctctaattaaataccagaaggtggccaggcacggtagctcacatctgtaatcccagcactttgggaggccaaggcaggcagatcacttgaagtcaggagtttgagaccagcctgcccaacatggtgaaaccgcatctctcttaaaaatacaaatacttagccaggcgttgtggcatgtgcctgtaatcccagttactcaggaggctgaggcaggagaattgcttgaatccgggaggtggagattgcagtgagctgagagggagccattgcactccagccttggtgacagtgagacttcatctcaaagataaataataaataaataaataccaataggtatatgtcctatagtagatcttacaggtaacctgtaattacttaaaatcaaagttctttttacttttcatcatatacaatctctagtttatttttattttagtaatgcagctataacctcatgaagcctattttttttgtataattttataaggggtggggggataagaaatgaaacaggtgtcctgggcctagacagattcatttccagtagtaactaggcaactctagggtgtagaaggaaaaatactagattgccttctgtagttttcattcctactctcctcctcttcttccaggtgattgtagagaaggctccaaaagccagggtgcctgatctggacaagaggaagtacctagtgccctctgaccttactggtaatgctctttgccttccctgacccttcctccggtgaaaaaactctctagatcctcattacatgcatgagattgtgagattgagaggcagtacatacttgaaggaagtgagtgggat

SEQ ID NO: 2097 - DNA, 1601 bp, Homo sapiens
ggcgttttgggggccgagccgccgtcttcagtgactcagaaacccacacacggtctcagcagctgagaccgtgtgtgggtttcggtgcacaaaatagggcccctgtgggcgagactggttagatcggggccatggattggctgcctttaagaacgcagggacattgtgctgtgcggtgaggtttgcgcaaacccagtcgatttctgccttggctggttctcctttaatgaagttgactttggctctcatatcactggtcttgggacgaaaaggttcagaagctattcagtaattttcttgcattacagggggttaggggagcacaagacagtcctggcctggaaaacaaggtcacgttctctgcccaacagccctcttgcctcatcgttctaggctccggggcttgtgtggggacagccagcctcctcgtgttgatttctgatcacctggtacctggtcgcgataaggcaggactgagacgttttttctccgttttggacaccggcttaagtagttaaaactaccgcaggcagtgagtaggaacagaaaagtattaggtatctttcagcatccgggcgttttccccattaccccctcccccgcccacttgcctggtgtttctctaatgcaggctgcgcagccgaattggagggcagaatatggcttaagtggtagggggaccagcagctgttggattttggaaatggaggagcggagattttaaaattgtgctctttatcttcaggtaggaacattagtattacgtgtcacataatggtaaaataattgctgttatctgatgtcttttcttgactcacagccactctgggtttcttctctaatccttacctaatgttcgtggttttatagctaccagaagccaccagggccttagcccagcagtagaaacctcttgtaacccttttcctttaaaaagaaaaaaaagtcattagggctcttcattccccaggaattacaaaaaggttttcagcttatagaggggtgagctaatcccttactcgggaaaggatcctttacaaattactttcctggtttctggaccttggatacctgaaaattttgcccagttctggtgataccaatcttttgagcaatgatatttaaaaaatacaatcaagttttattgatagtttaccctagcggtattataagtactcagtctgtaatcattgacttacttccttacacgattacccgttctacagatggagtattcaaagcacaaagaaatgcagtaacttcctaaaggtttcacattgctgatctgtggttgagctggaattccaaccctgtctgaaggactgtggagctctcgggtatcttaacctccatgccatattgtttctcagtttctaatatagttgtattaaccagaattaatgacgtgctgtggactttacactgttaagtattggaaatagataaatatttatgtgcattcactctgaatattttagagcattctgttcttttcctgctcatagtttggtgttaaatgttttactcctgtgataatttttaagccattaagcctgtcactcagatttcagctttcctagggttatgttttaaccagtggt

SEQ ID NO: 2098 - DNA, 379 bp, Homo sapiens
cgtcacagcccgacgcgccacccagctgtttttgtgctcccagctctagcgaaaagccgccggtatttctccatctggctctcctctacctccaggcaggctcacccgagatccccgccccgaacgccccctgcacactcggcccagcgctgttgcccccggagcggacgtttctgcagctattctgagcacaccttgacgtcggctgagggagcgggacagggtcagcggcgaaggaggcaggccccgcgcggggatctcggaagccctgcggtgcatcatgaagttccagtacaaggaggaccatccctttgagtatcggaaaaaggaaggagaaaagatccggaagaaatatccggacagggtccccgtgagtgta

SEQ ID NO: 2099 - DNA, 437 bp, Homo sapiens
ctttttcacatttggttagtttttttgtgactctctggctaagcattccctctacgatttgccacataacctgtcagctttgtttcttccagaagataaccctcttgatctatctttggccccaaaccttgagccatctacctcccactccattctgggatgtttgtcttctggtctggctggcacagcagtttccctgggacttgcttttgtagtcatccagtaattcctcttctgagtttgttcccatgttattttctttctgggtttattttattgtttgagcacagaacttttttccatagtatagaaagtaaatgttatgagattatacaagtctggaagtgttttcatttcctcttttattaaaagataatttcactgggtgtagaaatccaagtcaagaagcgtgatgccactttttgattcttattatt

SEQ ID NO: 2100 - DNA, 437 bp, Homo sapiens; identical to SEQ ID NO: 2099

SEQ ID NO: 2101 - DNA, 382 bp, Homo sapiens
aaaaaacaacaaaagcaaagaactatatacttcttttagattttatcctttttgaatcaaaacaccttgatgataaatctcagcggtaaaaatttagaagaaaactgtattgataatggtgggaaattcaattaatgaatcattggcattctatataacttttaagagaacaagggattatattttggaattcatcacacttacctccattttcttctccatgggcatttgcctcggccatatctgtaccatccaattcagattcacagactaaatccaacgtgccatctgctgggcatgacgactcctctttctgtattattttgaaaagtgatgatttatggagaagatgtattagcaactaaaaacattcaaaatactt

SEQ ID NO: 2102 - DNA, 417 bp, Homo sapiens
gtcttataccttagaaactgaatttatgagagtacagataaactctgataaactttaatacagcttgttagagcttctgcctctatcagtagaagaccaccttgatgaaagtagacaaaataaggacaaaaccagcactggaactaggactttgtgtgaagagtgactgctcattagaagagaatcctacatgagaagtaagtggttgtcattaattatgtatgtgtttacatcaatcattttagaaaatcgccatatataatcctctatagcattttttcttccaaagtttattcttttaatgtttttctctgaaattaactgttatccttttcttttaaaaatattttttatttaaataatttttgaggtaaaagtggtttttggatacataaattctttagtggtgatttctga

SEQ ID NO: 2103 - DNA, 417 bp, Homo sapiens; identical to SEQ ID NO: 2102

SEQ ID NO: 2104 - DNA, 549 bp, Homo sapiens
gttgcttctcctagaattaaggtgactaacactcccaggttgcctagaactctcctggtttttagcaatgcaagtccggtgtgccaggaaatccctcagttccaggtaaccaagacagttgatccccttacctagaattgaaaatacgttctccagctgaagccaagaggcatctataaatcaaaatgagatctatgttaatatattttaaaagattttactttgttttgtaaggtagtatagcacttgtaaacttcaaaacagaattttgttaggaagaagaattattgggacgctagatttctatagtgtcaagcatgctaaaagtctaactgaatgcagaaagggttattttcagtagagcttcatgtccaattttataatataaaccaattggaaagtaaaattcattctgaattccattttgcacctaactttctggcaacattcctgttttccaaaaaagcagctatcataaatcacaacacaattttctattgttccaggaaaataaataaatatatttttagaattttaatttgtgtattt

SEQ ID NO: 2105 - DNA, 481 bp, Homo sapiens
gaaaaccactagcgcatgcctgaatgcatcatcctatttaaaaaggaaaagcacacgtcacaaagtcaaacatcagccatttggaaacctttgcttcctgtaattagaattatgttccatctttttatgtttttgggaatttgaaataccaatttcgagatgcagaataaaaaaaaaaaaacaaaacagcgaaacagcagcatgacacaaagaacctgggttctgatttggagtcaggttctctgggtttgagccccaactgtgccaactatgaatgcatgatttgaacatgttgcttaattttccaagtttttgcacagatatatcatctgcctccctgggagtcataaggattaagtgaaatgtttagtgcaggggtcacaaacttatttcatagagttagagtacatttttaggcttttcaagccatacagtctctatcacagctactcaactctgccactgtagcacgaaagtggcc

SEQ ID NO: 2106 - DNA, 348 bp, Homo sapiens
attcctcccttgtttgtccatcaccatccatctacctactctccatctacccatcatcccttcaccccccgtccatcatgatccatccatcagtttctttacctgtctatccatcatccattgtccacccacccaccaaccatccatccattaaacaaattgaacacattttatgtgccaggcacagtctttggctctgaaaacagcggtgagcagaatagactaaggcgtccagatgttctgtcttcatggaacttaggtttctgtttgtcaaagagatgacagtgtgggatgaatgagtaaaaacaggctgttagattgtgatacgtatttaggagaaaaaataaa

SEQ ID NO: 2107 - DNA, 332 bp, Homo sapiens
attcctcccttgtttgtccatcaccatccatctacctactctccatctacccatcatcccttcaccccccgtccatcatgatccatccatcagtttctttacctgtctatccatcatccattgtccacccacccaccaaccatccatccattaaacaaattgaacacattttatgtgccaggcacagtctttggctctgaaaacagcggtgagcagaatagactaaggcgtccagatgttctgtcttcatggaacttaggtttctgtttgtcaaagagatgacagtgtgggatgaatgagtaaaaacaggctgttagattgtgatacgtatt

SEQ ID NO: 2108 - DNA, 348 bp, Homo sapiens; identical to SEQ ID NO: 2106

SEQ ID NO: 2109 - DNA, 348 bp, Homo sapiens; identical to SEQ ID NO: 2106

SEQ ID NO: 2110 - DNA, 887 bp, Homo sapiens
  SITE (578): n equals a,t,g, or c
agaacactatggctatgcatcctccaacgtcagccccgccctgccgctccccacggcgcactccaccctgccggccccgtgccacaaccttcagacctccacaccgggcatcatcccgccggcggatcacccctcggggtacggagcagctttggacggtgggcccgcgggctacttcctctcctccggccacaccaggcctgatggggcccctgccctggagagtcctcgcatcgagataacctcgtgcttgggcctgtaccacaacaataaccagtttttccacgatgtggaggtggaagacgtcctccctagctccaaacggtccccctccacggccacgctgagtctgcccagcctggaggcctacagagacccctcgtgcctgagcccggccagcagcctgtcctcccggagctgcaactcagaggcctcctcctacgagtccaactactcgtacccgtacgcgtccccccagacgtcgccatggcagtctccctgcgtgtctcccaagaccacggaccccgaggagggctttccccgcgggctgggggcctgcacactgctgggttccccgnggcactccccctccacctcgccccgcgccagcgtcactgaggagagctggctgggtgcccgctcctccagacccgcgtccccttgcaacaagaggaagtacagcctcaacggccggcagccgccctactcaccccaccactcgcccacgccgtccccgcacggctccccgcgggtcagcgtgaccgacgactcgtggttgggcaacaccacccagtacaccagctcggccatcgtggccgccatcaacgcgctgaccaccgacagcagcctggacctgggagatggcgtccctgtcaagtcccgcaaga

SEQ ID NO: 2111 - DNA, 921 bp, Homo sapiens
ctctctagaacactatggctatgcatcctccaacgtcagccccgccctgccgctccccacggcgcactccaccctgccggccccgtgccacaaccttcagacctccacaccgggcatcatcccgccggcggatcacccctcggggtacggagcagctttggacggtgggcccgcgggctacttcctctcctccggccacaccaggcctgatggggccctgcactggagagtcctcgcatcgagataacctcgtgcgtgggcctgtaccacaacaataaccagtttttccacgatgtggaggtggaagacgtcctccctagctccaaacggtccccctccacggccacgctgagtctgcccagcctggaggcctacagagacccctcgtgcctgagcccggccagcagcctgtcctcccggagctgcaactcagaggcctcctcctacgagtccaactactcgtacccgtacgcgtccccccagacgtcgccatggcagtctccctgcgtgtctcccaagaccacggaccccgaggagggctttccccgcgggctgggggcctgcacactgctgggttccccgcggcactccccctccacctcgccccgcgccagcgtcactgaggagagctggctgggtgcccgctcctccagacccgcgtccccttgcaacaagaggaagtacagcctcaacggccggcagccgccctactcaccccaccactcgcccacgccgtccccgcacggctccccgcgggtcagcgtgaccgacgactcgtggttgggcaacaccacccagtacaccagctcggccatcgtggccgccatcaacgcgctgaccaccgacagcagcctggacctgggagatggcgtccctgtcaagtcccgcaagaccagcctggagcagccgccctcagtggcg

SEQ ID NO: 2112 - DNA, 887 bp, Homo sapiens
agaacactatggctatgcatcctccaacgtcagccccgccctgccgctccccacggcgcactccaccctgccggccccgtgccacaaccttcagacctccacaccgggcatcatcccgccggcggatcacccctcggggtacggagcagctttggacggtgggcccgcgggctacttcctctcctccggccacaccaggcctgatggggcccctgccctggagagtcctcgcatcgagataacctcgtgcttgggcctgtaccacaacaataaccagtttttccacgatgtggaggtggaagacgtcctccctagctccaaacggtccccctccacggccacgctgagtctgcccagcctggaggcctacagagacccctcgtgcctgagcccggccagcagcctgtcctcccggagctgcaactcagaggcctcctcctacgagtccaactactcgtacccgtacgcgtccccccagacgtcgccatggcagtctccctgcgtgtctcccaagaccacggaccccgaggagggctttccccgcgggctgggggcctgcacactgctgggttccccgcggcactccccctccacctcgccccgcgccagcgtcactgaggagagctggctgggtgcccgctcctccagacccgcgtccccttgcaacaagaggaagtacagcctcaacggccggcagccgccctactcaccccaccactcgcccacgccgtccccgcacggctccccgcgggtcagcgtgaccgacgactcgtggttgggcaacaccacccagtacaccagctcggccatcgtggccgccatcaacgcgctgaccaccgacagcagcctggacctgggagatggcgtccctgtcaagtcccgcaaga

SEQ ID NO: 2113 - DNA, 516 bp, Homo sapiens
gttacttttaaataccattaccaaaactattttattgctttaaattttgctactaaataccaacctcttaaattaatcaaatattttatttcagtagattgcattttattgttctgaaacaaaaggttggatataactttattttttttttggttactccctcacttctatgtttatttttaccaatttgatttagttcatatgctatacgtattcagaaacaactctcgaagtgaacctactactgtaaaatattgcagagtgctcacatgggaaaattactattctaggaaaataaatcttatagtaatttagtattcattattataatggatacttcagtgaatatttcaacatcagctttttgctaatgacctatatgcttcaaccctttctcaagaactttcattttttgaattaagacttaacatagattacctcccagtgagataaagtctccccaggaagatccaaataataataaaaaatagttcataataatggaaatcttttaaa

SEQ ID NO: 2114 - DNA, 478 bp, Homo sapiens
tttttttcttttttgagagatcaggtgggggtcaaaagctaaagagatgcattcaaaaaaacaaatatttactctttagcagtttctctcttttaataaagagagttaaaagagaaagataagccattcctaatatctatgacattcagtgggacatcttactttaaccgctttgtaggtttatttaagataaatattgctgaaatataaaatggatgtgtctatgtctttctttatcttgagtaagaaaaataggctgaaaaaatcattgaagaaaatcgagacaaatggcaagcatgagaaaagaatggagcacaacaaagcctcggatattagacagtcaagaaagaaataagataagttacaaagaaaacatcattcaaaaaaaactacatttaaaagtaattggctctgatcaaaatacttgaaatactgtgaaaagaaaaataaaactactgtgagagtgaaaaacttttgt

SEQ ID NO: 2115 - DNA, 345 bp, Homo sapiens
tgtcacttcaaccttctaatggcttgaagcaactttgctcattgcccatcaacaccagtctgaatcttactttctagggaaagcgcttggctgcaggctgacttgaatttgtgttggggatcagctgtaatcacatgggcgtgatttattggttttctatctagtgctttctgtttgtactgaaaatatgcaatttgttttccttctgaaacaatcaaagtgaattattttaaattgatgcctgcttaactcatacgggtggctcaacctgtcaatgatcaaaaagtcacttaaaagcataacgcatggcagccccctccccgcccaccaagtatttggtctaga

SEQ ID NO: 2116 - DNA, 368 bp, Homo sapiens
cctcacctatgaaaattctggccaaaggtgccaagaaacttccccagattcacctagatagtacattatgagtcaaaggtatgaattcaggttgtgttcttaagatacccaccttctagtgtaccatgttatctcccaagaggcttgagaagaggctattcaggaaactgcatagagactgggtccaaagtggacctcagagagaggatgaagaacagcgtatctcttgtcccaacaggtccaagtcaaagaggtattactagcagggacatagatcagtgagtgaagggaatcacgacagagaggccagagaggggagagattgatgtcatcttttcaagtatttctgtactacacgtcctaaaccc

SEQ ID NO: 2117 - DNA, 368 bp, Homo sapiens; identical to SEQ ID NO: 2116

SEQ ID NO: 2118 - DNA, 536 bp, Homo sapiens
cccaacactttgggaggccgaggcaggcagaccacgagatcaggagatcaagaccatcctggctaacacagtgaaaccccgtctctactaaaaatacaaaaaattagccaggcgtggtggcgggcacctgtagtcccagctactcaggaggctgaggcaggagaatggcgtgaacccaggaggcggagcttgcagtaagccaagattgcgccactgcactcccgggtgacagagcgagactccgtctcaaaaaaaaaaacaacaacaacaacaaaaagattaacactccttctacttccaaacctaatacaaagggacattgcctagtgattaagagaattcattcattcaacaaatacttgttgagcacctactatgtgccaagcactgttctaggcaccggaaatacagcagtgagaaaaaccaaaaaaactccctgccctcatggggtgtatattcaagtagctgaaacagacagtgaacaaacaaaaaaggacaataatttcaaataataatgatgctatcggccaggtgtg

SEQ ID NO: 2119 - DNA, 1138 bp, Homo sapiens
tatagtaaatccttaacactaacatttatgccaggatggcaagaatgttgtgcttcatcacttgattttaaaagcagaatttttaaaaattccaggaaacaaagatagtacatttgaaatggtctcttttattcagtaaaatggaatgttgcagtgctctcttttcaaagcaaaaagtgagtttctttttattttaaaactgtacaggctgggcacgatggctcacacctgtaatcccagcactttgggaggccgaggcaggcggatcacgaggtcaggagatcgagatcatcctggctgacacagtgaaaccccgtctctactaaaaatacaaaaaaaaattatccgggcgtggtggcaggcacctgtagtcccagctactcgggaggctgaggcaggagaatggcgtgaacccgggaggtggagcttgcagtgagccgagattgcgccactgcactccagcctgggcaacagagtaagactctgtctcaaaaaaaaaaaaaaaaaaaaaacaaaactgttcaaggggattccgcccccccatgcttattcttttgagctctaagtaagacttaaagttctttttgcaagcaaaatttcctcacttttatagggtttaaatgtgcaaggaaagttgcagaaaataaaggagttaagtatttatgcctgtaaagttggaaaaaacattgtattttacaaccattgccacattggtgtctttaccttcaaaagtagtttttaaaatagtaatatcttggcggaagtcaatatctgatttttctgtggttcttataaattatgtaacatggttatcatcaattattttccttcctttctctcagtttatttccagagtcctaaaaatgccatattttccctccaaaaagttgctacagcctttgttttaaaatctttcctctagtttttgtttgttggttggtggtttgctaaacagtagaaaaacatgtaaggtcagaagtataattcaggatctaggttctttagcctggttatcctattggccttcaagtattagaaagctttaataaccagtttttattttccctttggttgtcttaaaactcaaccaagaaaaagcaaataaactcacttcaggaattaaagaaaaaaggaaaac

SEQ ID NO: 2120 - DNA, 319 bp, Homo sapiens
gtgcctcagcctcctgagtaactgagattacaggcatgtgccatcatgcgcagccaatttttttgtaattttagtagagacagggttttgccatgttgtccaggctggtctcaaactcctggtctcaagtgatctgcccacctcagcctcccatagtgctgggattacaagggcaagccaccgcatccggctctacttttatttttacctttgtttttatattagttttggtattcctctgtattgacttcattctccaagtgaaattttattctttcttcttttattctatcccttccctcctgcccttttttctccc

SEQ ID NO: 2121 - DNA, 455 bp, Homo sapiens
gccacttttaaaatccaaaaaaaggaaaaaaacacagtagtttcttttctttttcattgaataaagaaaatttacagattttcaaattgtttctttttgctttcttaaagtacaagtacttcactatgttaattgttaatgttttttccactggtttttttttttgtgtgtgtgtgtgtagagtctaattctttacactgggatagtttttgctgttttacctttcatgatgactgagtttgctggtatatttctactgaaaattcttattccggatgttggggctaagagaattgggaacttcttattccccctggtttgaatttcctcatttggctaacctataactcttttaaaaatgggggttttgtatttgtttagagacaagtgactgatactgctttatgatttgcatgttttcatctactcttgaattttttcattgagttataaga

SEQ ID NO: 2122 - DNA, 788 bp, Homo sapiens
acattctactatgtaaaccccatgtggacacaatcttgttttatttgctgctatactctgagcaactggaaaagaacctggcactcagtagatgttcaataatttgactttctgacataatagttgcctatgagaaaagatacagagaagttgaagaggaacaactgatgttacttaggtaattgccaagacaattttagagcagaaaaataaaaaacaaaacaaaatgctacaaggtgaatggggggagcaaaatgcagcaattgacagtaaagactaagtatgaacagttaagagtttcccaaacactggatcagcaaagtttaggacgccttcagaactgagcccagaaagaatggtagggtttataggagccaaagtagataaataccatgtgcgacaccagagaagggtagatacacgaagtataggaagggtgttcattgtatacagcatcaccttaaagaatagttaaaagatggtctagtgagactggaaaaagctgataaaactttaaatagacttctttcatgcaagacttcctgttaattgtaatataatattaatctctatgagaagaagtacaatatgcagtatttccctgcattaatcacagagtcatttttttttgttaatcatgtgtatgtcattgcacacacggcttagcttcacttttgtcactagcatattgttatccattgttatattttgttgtgatatatgcctattaaattaacatagtaagaataaaagactcttttcattattatatttaaaccaagtctgaa

SEQ ID NO: 2123 - DNA, 317 bp, Homo sapiens
tctggaatgacaccaagtagccattaagatgtcatatagtagacatcataacttttaccctatgttcaacagcgtacagccaatggctaatcaatattatctctggaaaccaatgagaatacctgtcaaaacttttatcagcccactccttgttcccctttgcctttaaaaacctgcttgtaccaaacagagtactccccaaggcaacctgaaatgggtccctggcagctgttctcactttggctcaagtaaactctttcgaaattatattttgtgcctcagcttcttccctttaggttgacatacactcaaggaca

SEQ ID NO: 2124 - DNA, 6845 bp, Homo sapiens
  SITE (2311): n equals a,t,g, or c
  SITE (2312): n equals a,t,g, or c
  SITE (2314): n equals a,t,g, or c
  SITE (2316): n equals a,t,g, or c
  SITE (2318): n equals a,t,g, or c
tcaagtgtaaaagctagagatttattgttattttatgattaataaattgtcaaattagttatgacactatcccacactgaataccaccatttgccagtacagaagtttttaaaccaaactgaggcataaagcagaaagagcaaagacacatgaatacccttcttaacaatctcttctacttatgcctccaccgtaacctttgtacttgttttcctcctggggaaagtgtcagaacagtgcaaggactggtgggtaacctggcctcttaacctttttaatagcaagcaacatacagaagtaatgcaatcaacttgtatttcccttgattttattggtctgaattcattttaggttactttaacattttaatttcctgtaactgtacatgagagaatataatcacctaagagaatactgaaccagagtcagccaaatgtatcactgaccctcaattatgttttaattggtcctaaaggaatgtaccaccccaacagtttgggagttaggcaaacagaattctttgggggagggaagaaaaaggctataaaacagccaaatgtactcaacatcattaaaacggctctttgtttttcacccctgaatgatacttctttactacactatatgcacagaaatcctaacagaatcttggttgccagtattatttaagctggccccatccaggacagattccgctgccccacccccccaccccgtccccctttctctgaggctctgaaaagcacaatatttaactatttcttaatagaactaccaaaacacttcagaaacaattggctcacaactcattttaaatttgtgtattgcctgtgcatgagaaaacagataaacccaaaagatagttctatttttttatggcgattaaaaataactgaaacatcaagacactttttcagtgaaagcaacatttcaattacaaattttaatgcctgttaaactacctatgggagaagctgagaagtcctaggcaaatgcactttggggtatactacagtgttccttcagtctgcacaaagattaaggtaatttacagtcaatctgtgaatgaatgttgagacaatgttacattatgtgtctgtacaattaattgtccttaaagagataaccagaatcagcttttctactgtattttcaacaaacctgactaaccggcacttttgctgggagatgtttgtcaaagatgctgtaagattctatacaattaggaaatactcagctttaagagtattttcttatcttcacttttttagttacaggtgttttgctcagagagcctattgcagtatgtttccagaaatgcagtcccaaatgtgcatactctatattgtatacaaataaaacaaaattatcagtagtataaatcttacagcattgtttgcaaaaatgcatgccaaagtcacaataagcaatactgtaccacaaattatagagtgcaaatgatttgcttctttttaatgcttttattctacataaattactaccataggctaatgtttaaaaagcaaataaactggacagatgcaggacaaaatctggtcacccaactataaaaggtgatgtttttaaaaaattacaataaatgcagaagtgatgcatgcagtagccttaattcccactgttccagaaaagaaaaatacagaaaaacccacacatcttactgtactccaccttaaaatgcatcatattgggtttgtttataacagcacagaattccaagagtcaaaatgaaataaagcaggtattttaaagtttaagagccgttatcaaaaataaattacattttttcaagatacagaaatgctgctatgatggctgggagcccagtaacctttcaatagctgcattgatatcacctcctgttgctattagagcttgcaagtttgcttcacggttcaaaaatcccattgcactgagttgttccagttgttgctgaaatctgacttctggattctgtagctattaaagaaaaaaaaaattaatccaactctaaaggaagccagtccctgccacacatgacttttaaaattttttaattgcttttttataacatatgctgatctactgagctttaaaaacactgcccacctcttgaaactatccaacatatttaaaagtccattagcagtttattttaaatagtctagtttgtacctaaataattatgtcaaatagatcacgactctactttatggggagggggggaaaagcttattaaacactaaccattattttagaggatcacgtacatgcagaaaaacccgcacgaagaaaaaatatatacttccccttnntnananacacacacacacacacacacacacacacacacacagatagttcagaattagatgatttgtgtagctactgaccaattgagtaactataaaagctggtatcctcatgtataaaattctaaagcttcaatgattcttcgaatgaatgtgagtttaatttttgcactggacagtcaattcttagaaaagagcttcagtttcaggcccaaaattatactcttaattctgacatttcagcagcatcaaatcttttcttcagaaatgaagttaaaaaaaaaaatctccatataaatgaccaatcaatcctaggcctacctgataatttggaggcttgtaagttaacttatgtcacaattaattctaatactccaaatccttctttcttatttattccatgaatatttactgagtacctaccaagagccagaaactatgctacgctagcttatcaggaatacagatatgtatgagacagaaccctaccctatttattatatttagtaaggcttgaaaacagaaagcaggccaggctcacgcctgtaatcccagcactttgggaggccaaggcgggtgagatcgcttgagctcaggagtttgagaccaacctgggcaacacggttgaaaccccagctctacaaaaaatacaaaaattagccaggtgtggtggtctgcgcctgtaatcccagctactccagaggctaaggtgggaggattgctgcagcccaggaggtgcaggtcgcagtgagctgtgattgcatccagcctgggcactttgtcaaaagggaaagggaaagaaaaaaaaaaaagggaaaggcaaagaggggaaagaggaaaaaggggaaagggggaaggggaagaggaaagggaaaagggaaaggggaagaggaaggaggaaaaggaaaggggaaaggagaaagggaaagaaaaaagaaacccagaaaagaaaacagaaagcacctaacagaccttgagacattaagaagtttggggacaacctaataaaacaggtttaaactggcgatcatctttatataatggcacattattagtaaaaccaatgtatgtttgtagatgcaaccacattattagggggtccatattctttagccatatttacgagatatatatatatgtaacacaagctaccgcaggaggtggtgtcatgggtggagttaaggtagttaggacttttttccagtcaaaagacagactagaatacagctgccctggaggtacttgggataatcaagtttccattcctccctaagaacttttttaaagcaaaatctatttcaaatgattttcaaataggaacaaaaaaaatgcatttttaaaggcaatttctaaaaaataagactttaggttgtagcatgtcttctctacaaccgtaacaacgtttcctttagtgtctcagcaccaaagtcaacaatttttgtaatgcctgttttcttactcaatatccttaagactgtatttttcattaatctaaacacctaagaactactgctttccttttttctccctttttccttctttttggaaatttctaaatttccaacattaaggaatacaaaacttgaatggaaaagaactgatacctgaggatttactccagcaagagcctgcagcatctgctgaataaactgctgatgtccaggttcagtggttcctgctgtgggacttgtgttttcactaggtgtggcgttagatccattagttcccgaagagcctccagtgcttcctaatgcccccaagccaggagtaaacctacagaaagcacaaataggaaatatcctaaggtcctgcaaaaccagaagccagtccgtaaatcagttacattttaatataagctaagccatcttcttaaaataagcccttttggcctggtgcagtggctcattctgggagaccgatgatcccagcagcccaggaatttgagatcagcttaggcaacattgttgagacttcatctctacaaaaaataaaaacaaaattagctgggtgtgctggtgcacacctgtagtatcagttacttggcaggctgaggtaagaggattgctttagcccaggaggtagaggctgaagtgagctgagatcgcgccactgcactccagtctgctcgatggagtgagactatctctaaaaggaatttaaaaaataataataatcatttttaactttgaaaaccctgacttaaaaacaatcatagccaggcactgtgtcccaactactggggaggctgaggtgggaggatcacctgagcttagaagttcaagttcagccagggtaaaagagcaaaaaccgatctcttaataaataaataagtaaataaataaataaaaacggtgggggagaaccaggtgctatggctcatgtctctgatcccactttgggaggccaaatctcttgagcccagaagtttgagaccagcctggataacatggcaaagctccatctctaaaaacagtaacaacaacaaattatatatataaattagctaggtgtggtggtgcacacctgtagtcccagctacttgggaggctgaggtgagagaatcccttgagcccgagaggtcgaggctgcagtgagccacaactgcgcccccacactcatagcctaggcgaagggcgagaccctgtatcccaccaaaaaaaaaaaaaaaaaaaaaaaggcaggcagaataatactaaatctgaaattctcagagaaagtaaccattatacactttcattatcttccccaaataagcctaccctgggatgaggcccggggcttccgttgctaatgtctgtaaaccctgctgaatctgtaacaaggcctgcattgctctagggtttgacattgctgatagtgtatcaggattctgcatctaaggaagaaagaaaactagtggttacaaaggaattaaaatcagtgaacgtaaatttttaaatcttttctctgttatgcttctggagaaaatctaaaaccttactcctggacactggtaatccataatttctttcccaaaataaacgcaagtatctcctctttgacagcaaacctagtgtgcaaattattacttgacctcctcctaagtccatcatgaaagccatttccataatggaagaaaatcaggagctactttggaagccacaactattccccttctccaacagaagataaagtattacttctaagacacaacctccaaaggcacaattcttacgacgtggatatggtaaaaagccacatattccacctaaccaagtgttatctgttactaatataacaattttaccagtaaggtacactctaaaacaacagttccaaatttgacgttaatacatgtatcctgagtttagctttactacttccaaatatacaccacctgactaaccaaagataggcttacatcattacaatagatcaaggacaccaaccttggaaaatggtttacaggtctgagagtcatttgcataatacatgaggccctagaactaccagtttcaaaacaccaagactgacttctcttttgtcgttttaaataataaaataccatggcaatctcaagtactcgtttatactataaccttccttacttccttatatgacaacactgactattttaatcttactaatcccgagtttgaggaaatgagatctaccccttggggaaaaaaagccttctactaatttggaagaaaacctataaaatagaatagggtagctctttcctgttactcaaaattagttaaaccataaagcgtaacatgacacaaggaagcacttcaaagttagtacaatgaaaggaaatggtttatggtattaacaaagcattcaaaatcctaggtcctcaaaagcaaaaacaaaatgttctttcctcagaatgtatgtttaagaaacataagcaaaaggtcagcagtgaaatgggactcagtgaagatcaagctgaattctctacgaattgacagcattattggtctctattctatgttttgctatcagccagagaagagcaaggaaaaatgtttatcatcaaattttttcaagcaaatcattacccaagatagctaacatcttgtcttactcacttgttggaggaaagttgggagctgttgtctcatttgttcttgaagctgaggatttccagcaaataggggattattcagcatcatctatggggcaagtgttcaaacaattttaactggaaatatctgaaacaagtaatgtaccttgttttattctatcttcccccaagtgcctcagctggcacttaaaagggaggaaggtagaacataaataaaaaaaggaaaagggaagatactgtccacaagagggatctccagaagaacaaaaacaaaaaaatgaggcatattctctctcaatgagaatggtggttatgataatgacatgcaatatcctaaaaaataaaagcaatcattttcttaggcttttccttgaacaaacgtgaatatatgccattgaaagaaaaatgggagtaactggcattcatgaagatatattttctactacactggcagaataaac

SEQ ID NO: 2125 - DNA, 1739 bp, Homo sapiens
agtcaccatgctcggcccaacatccacatgtttaaagcaaaacctgtggacccatgacgttgatttgccctatcccagttatagttaccatcaagtcccactcggagaagagacttgttggtaaaacagttctatttttataatagtagaagaaattccagctagcaatgtaatcctctttcttaaatgtaattgtacaactaacagtcatcacacatatgagggtagccagcaacgtgagagacaaaattcaagattaagttccaaaatcaacatggaggacaatttagtaaagagactagacctcttttataaaattataattactatgtagcagaaaggagccaggacaagaatgaataaacagattacaaatattgttgctgaaataaaaatgttcaataggaggattaaagtccaaaaagaaaacttccccaatacaaaaagagatagaagacatagagaaccaattcagactattaggaatctagaaagaagaaaatggagaaggaaatgctatcatgtggaagaggatttcctagggatgaataaaattcattgaatgcccagcaacagtgactgacaaaatactcactaagatacttcatagtaatactgtatcatatcaaggagagggagaaagagtgtcagtgattttagagaagccaaagaaccatattttcagtgcagcctttagtacatggggagacacacacacaaagctatcatttgtttagctttgtgatggcggtattagaagtttaggtggaaaatttggtgtattctggactgcgactttctcctctttgcatcctgattatattcatgaaatttgttaaaatcactatgagggattttctcatcctcagtcttttcctattctctataaatctttaattaatctcacactctcaagaggtcagagcatttgaaataaaaatcttaacagtattgaatattggtatatttcatccatacaatcaggaacaaatttaatagtaggaaaggaaataggtacattatatgtgtttctgtatatttatgtttatgtttttatttacatatgtatactgaatatatatttgttactgcttatagatcacatactatgtttcatcaactttaagatttcattaactataaaaatgtcattttatgaaacattaaagaaaaatattgcaaattaactcatgaccttataaagtacatctggatttcagagatgttaagtgtgaaaaaatatcttagaattcattagatatgcttagcaatatatgatactatgcagtagattccattgttttcttgaatagaggcttcagttttctaaataattttccacttataaagattaaaaattagttctgttaaaaatatgtatcatcttctatttggagatagttcagggaactattagaaaatatttacatatacctgaatttttaaaatctgtagctatatatgtcaaggtgctcactgtgttcatctctacatgaatgagattatgaatattaaatgttttattttgcttgtctttgttacttttctgtaataagcattataattcctgttcttaaaataataagttcatttaaggaaaagggggtgaaaggaaaaatctgcagaatttaggtctgagataataccatttcaaagcactgtgatacaaattacttatatatgttatatactgtgtgtgtgttaactacttttatttgggggcttgttttgcatacatg

SEQ ID NO: 2126 - DNA, 1738 bp, Homo sapiens
agtcaccatgctcggcccaacatccacatgtttaaagcaaaacctgtggacccatgacgttgatttgccctatcccagttatagttaccatcaagtcccactcggagaagagacttgttggtaaaacagttctatttttataatagtagaagaaattccagctagcaatgtaatcctctttcttaaatgtaattgtacaactaacagtcatcacacatatgagggtagccagcaacgtgagagacaaaattcaagattaagttccaaaatcaacatggaggacaatttagtaaagagactagacctcttttataaaattataattactatgtagcagaaaggagccaggacaagaatgaataaacagattacaaatattgttgctgaaataaaaatgttcaataggaggattaaagtccaaaaagaaaacttccccaatacaaaaagagatagaagacatagagaaccaattcagactattaggaatctagaaagaagaaaatggagaaggaaatgctatcatgtggaagaggatttcctagggatgaataaaattcattgaatgcccagcaacagtgactgacaaaatactcactaagatacttcatagtaatactgtatcatatcaaggagagggagaaagagtgtcagtgattttagagaagccaaagaaccatattttcagtgcagcctttagtacatggggagacacacacacaaagctatcatttgtttagctttgtgatggcggtattagaagtttaggtggaaaatttggtgtattctggactgcgactttctcctctttgcatcctgattatattcatgaaatttgttaaaatcactatgagggattttctcatcctcagtcttttcctattctctataaatctttaataaatctcacactctcaagaggtcagagcatttgaaataaaaatcttaacagtattgaatattggtatatttcatccatacaatcaggaacaaatttaatagtaggaaaggaaataggtacattatatgtgtttctgtatatttatgtttatgtttttatttacatatgtatactgaatatatatttgttactgcttatagatcacatactatgtttcatcaactttaagatttcattaactataaaaatgtcattttatgaaacattaaagaaaaatattgcaaattaactcatgaccttataaagtacatctggatttcagagatgttaagtgtgaaaaaatatcttagaattcattagatatgcttagcaatatatgatactatgcagtagattccattgttttcttgaatagaggcttcagttttctaaataattttccacttataaagattaaaaattagttctgttaaaaatatgtatcatcttctatttggagatagttcagggaactattagaaaatatttacatatacctgaatttttaaaatctgtagctatatatgtcaaggtgctcactgtgttcatctctacatgaatgagattatgaatattaaatgttttattttgcttgtctttgttacttttctgtaataagcattataattcctgttcttaaaataataagttcatttaaggaaaagggggtgaaaggaaaaatctgcagaatttaggtctgagataataccattcaaagcactgtgatacaaattacttatatatgttatatactgtgtgtgtgttaactacttttatttgggggcttgttttgcatacatg

SEQ ID NO: 2127 - DNA, 4394 bp, Homo sapiens
agtcaccatgctcggcccaacatccacatgtttaaagcaaaacctgtggacccatgacgttgatttgccctatcccagttatagttaccatcaagtcccactcggagaagagacttgttggtaaaacagttctatttttataatagtagaagaaattccagctagcaatgtaatcctctttcttaaatgtaattgtacaactaacagtcatcacacatatgagggtagccagcaacgtgagagacaaaattcaagattaagttccaaaatcaacatggaggacaatttagtaaagagactagacctcttttataaaattataattactatgtagcagaaaggagccaggacaagaatgaataaacagattacaaatattgttgctgaaataaaaatgttcaataggaggattaaagtccaaaaagaaaacttccccaatacaaaaagagatagaagacatagagaaccaattcagactattaggaatctagaaagaagaaaatggagaaggaaatgctatcatgtggaagaggatttcctagggatgaataaaattcattgaatgcccagcaacagtgactgacaaatactcactaagatacttcatagtaatactgtatcatatcaaggagagggagaaagagtgtcagtgattttagagaagccaaagaaccatattttcagtgcagcctttagtacatggggagacacacacacaaagctatcatttgtttagctttgtgatggcggtattagaagtttaggtggaaaatttggtgtattctggactgcgactttctcctctttgcatcctgattatattcatgaaatttgttaaaatcactatgagggattttctcatcctcagtcttttcctattctctataaatctttaataaatctcacactctcaagaggtcagagcatttgaaataaaaatcttaacagtattgaatattggtatatttcatccatacaatcaggaacaaatttaatagtaggaaaggaaataggtacattatatgtgtttctgtatatttatgtttatgtttttatttacatatgtatactgaatatatatttgttactgcttatagatcacatactatgtttcatcaactttaagatttcattaactataaaaatgtcattttatgaaacattaaagaaaaatattgcaaattaactcatgaccttataaagtacatctggatttcagagatgttaagtgtgaaaaaatatcttagaattcattagatatgcttagcaatatatgatactatgcagtagattccattgttttcttgaatagaggcttcagttttctaaataattttccacttataaagattaaaaattagttctgttaaaaatatgtatcatcttctatttggagatagttcagggaactattagaaaatatttacatatacctgaatttttaaaatctgtagctatatatgtcaaggtgctcactgtgttcatctctacatgaatgagattatgaatattaaatgttttattttgcttgtctttgttacttttctgtaataagcattataattcctgttcttaaaataataagttcatttaaggaaaagggggtgaaaggaaaaatctgcagaatttaggtctgagataataccatttcaaagcactgtgatacaaattacttatatatgttatatactgtgtgtgtgttaactacttttatttgggggcttgttttgcatacatgtgaaggaaatgattatatataaggatttaattaaatctgtttataccaagaattatatttaaaagaatatggtttcattggatatttaagcattcaggtgtgatgagggaattcagggaaaggaaacctttggtacataaaacttttttttctttcccctttgaccaggattataaccaaaacagatgtatgagaggtgacagagagaagaggccattggtctcagtaagaatgccctgctttctgcatctctgtttcagaagaccagagggtgacttaccagactgagtatttctggggacaatacaagtacctgggcatgaatttccatttcgattcagatgggactggaaacaaccattcaattttatgaatcttactggacattatggatttactggaattattccagacattatgccctttggttgtcactaccttgcaaatgtgtaagaggaaaatgtgctaatgtggcagtgactgtaaaactggcacatggcatttattaatcctgaagaaaagtacatgtactatttttcagtataaatataatgaacatgtcagaactatttcttgaaaacctttttattacttttgcgtgaatttatttaacaaagatgttttgtcttttgtgtaagggaggttctagaggctagatgtttaattgtaaatatgtgaggaaactcaatgcagaattcaggataaaaattttaaaagcacaggtatttgggaattgaaatgttaagataccctgatctacattcaatctctgtgtgtactcgtgtcagtggtagcatttctcatttcgcaagacttatcctgtgtgtgtgtgtgtgtgtgtatatatatatatatatatataaatatatatatataaaatattcagcagcaccaagttttataactattgtttgtttgactttattaatactagaatatgtagtctcagccttaattttacatttacattattttgtaattttttattactatttttaaggggttaaagagaacatacattctcacattagtgtactttctggtagaaagttgctgcaaaaacatttgaaatgtatattaacctaatgtatgtcatatatatgtctttgtgtaagttcaagactattgatctgtgaagttattttgtaaggacatacatttggtaagtaagtttgtgtcccaggaaatgtatgtgtttttaaaccctttctaaatatgcaggccattaataaataagattgtttcttccctactgaatagataagtgtttttcttttttaaaattggaagcttcataaaagttatcttgttaaaaaacgatgatgatgttaacctatctttataattggaaattatttaaactgtttgttgttacagaagaaacaaaatggtaattacagaattagctgtggggaagataggctcccatggtactacaggttgagtatcccttattcaaaatggttgggacctgaagtgtttggatttggttttttgtggggtttttaaattattattttggaatatttgcattatatttaccaatttagcatccctaatccaaaaatctttcattagaaattggaaatgcttcaatgagcatttcccttatgtgtcatatctgcgctcaaatgttttgaattttggaacatttcttgtttctgacttttagattagggatactcaccccgtaccaatatttggagtccttagacattagattatatgaaaatgattgattgataggtaagaaaggttcaagagaaataactttttaggaactagacttgaacgtataattaatatgtggaactagtttgcttttataattcattgtatcaagaaggagtcatgttttaaatccaaggcattgagactatctagaagcaaaaaagttggttttaaaaattctttttattagaagtgtgtttaaaaacatgtctttttttcccttgagcgacagtggcctcactacattgcccaggctagtcttgaactcctgggttcaagcagtcttcctgccttggcctcctaagtagcagggattacaggcatgcacccacatgccaatttttattgcttaaaatggcgagttctatggatattatctagccccaagcccatatctgtacacttttgttcattttataataccagaaagaatgttctatcagtaaaagaaggttttaagtatgaatctccatttttgtggagtttttctaccctgtaaaaattaactttgtggttcccagtaattacagtaaggagtttttctatattttcacagttggatttatctaaggatatttctcagcatattaaggaatccttttctacatttgagcaaatactgaggttcatgttgtaccaaataataataaattgcttttgtgtttaatatgtaacacgtaagaacaattgaaattttcttctaagatttaatactagtcttttagtataaaggaatgtaactggagaaaaaaattaatgctacagccatttatcctgtgttatgtgttatataatctgaaatttgtcacaatgttacaatcaggaagttttttttctggtttcttcttccaaaggaaaataatagcctacttgtattttgaagtaactgaaataaaactctctccaagcctttttgcacattacg

SEQ ID NO: 2128 - DNA, 4400 bp, Homo sapiens
agtcaccatgctcggcccaacatccacatgtttaaagcaaaacctgtggacccatgacgttgatttgccctatcccagttatagttaccatcaagtcccactcggagaagagacttgttggtaaaacagttctatttttataatagtagaagaaattccagctagcaatgtaatcctctttcttaaatgtaattgtacaactaacagtcatcacacatatgagggtagccagcaacgtgagagacaaaattcaagattaagttccaaaatcaacatggaggacaatttagtaaagagactagacctcttttataaaattataattactatgtagcagaaaggagccaggacaagaatgaataaacagattacaaatattgttgctgaaataaaaatgttcaataggaggattaaagtccaaaaagaaaacttccccaatacaaaaagagatagaagacatagagaaccaattcagactattaggaatctagaaagaagaaaatggagaaggaaatgctatcatgtggaagaggatttcctagggatgaataaaattcattgaatgcccagcaacagtgactgacaaaatactcactaagatacttcatagtaatactgtatcatatcaaggagagggagaaagagtgtcagtgattttagagaagccaaagaaccatattttcagtgcagcctttagtacatggggagacacacacacaaagctatcatttgtttagctttgtgatggcggtattagaagtttaggtggaaaatttggtgtattctggactgcgactttctcctctttgcatcctgattatattcatgaaatttgttaaaatcactatgagggattttctcatcctcagtcttttcctattctctataaatctttaataaatctcacactctcaagaggtcagagcatttgaaataaaaatcttaacagtattgaatattggtatatttcatccatacaatcaggaacaaatttaatagtaggaaaggaaataggtacattatatgtgtttctgtatatttatgtttatgtttttatttacatatgtatactgaatatatatttgttactgcttatagatcacatactatgtttcatcaactttaagatttcattaactataaaaatgtcattttatgaaacattaaagaaaaatattgcaaattaactcatgaccttataaagtacatctggatttcagagatgttaagtgtgaaaaaatatcttagaattcattagatatgcttagcaatatatgatactatgcagtagattccattgttttcttgaatagaggcttcagttttctaaataattttccacttataaagattaaaaattagttctgttaaaaatatgtatcatcttctatttggagatagttcagggaactattagaaaatatttacatatacctgaatttttaaaatctgtagctatatatgtcaaggtgctcactgtgttcatctctacatgaatgagattatgaatattaaatgttttattttgcttgtctttgttacttttctgtaataagcattataattcctgttcttaaaataataagttcatttaaggaaaagggggtgaaaggaaaaatctgcagaatttaggtctgagataataccatttcaaagcactgtgatacaaattacttatatatgttatatactgtgtgtgtgttaactacttttatttgggggcttgttttgcatacatgtgaaggaaatgattatatataaggatttaattaaatctgtttataccaagaattatatttaaaagaatatggtttcattggatatttaagcattcaggtgtgatgagggaattcagggaaaggaaacctttggtacataaaacttttttttctttcccctttgaccaggattataaccaaaacagatgtatgagaggtgacagagagaagaggccattggtctcagtaagaatgccctgctttctgcatctctgtttcagaagaccaagagggtgacttaccagactgagtatttctggggacaatacaagtacctgggcatgaatttccatttcgattcagatgggactggaaacaaccattcaattttatgaatcttactggacattatggatttactggaattattccagacattatgccctttggttgtcactaccttgcaaatgtgtaagaggaaaatgtgctaatgtggcagtgactgtaaaactggcacatggcatttattaatcctgaagaaaagtacatgtactatttttcagtataaatataatgaacatgtcagaactatttcttgaaaacctttttattacttttgcgtgaatttatttaacaaagatgttttgtcttttgtgtaagggaggttctagaggctagatgtttaattgtaaatatgtgaggaaactcaatgcagaattcacgataaaaattttaaaagcacaggtatttgggaattgaaatgttaagatacccagaacaacattaaatcaatgagtgaacttgtgacagtggtagcatttcaaatttcaaaagacttatcctgtgtgtgtgtgtgtgtgtatatatatatatatatataaatatatatatataaaatattcagcagcaccaagttttataactattgtttgtttgactttattaatactagaatatgtagtctcagccttaattttacatttacattattttgtaattttttattactatttttaaggggttaaagagaacatacattctcacattagtgtactttctggtagaaagttgctgcaaaaacatttgaaatgtatattaacctaatgtatgtcatatatatgtctttgtgtaagttcaagactattgatctgtgaagttattttgtaaggacatacatttggtaagtaagtttgtgtcccaggaaatgtatgtgtttttaaaccctttctaaatatgcaggccattaataaataagattgtttcttccctactgaatagataagtgtttttcttttttaaaattggaagcttcataaaagttatcttgttaaaaaacgatgatgatgttaacctatctatctttataattggaaattatttaaactgtttgttgttacagaagaaacaaaatggtaattacagaattagctgtggggaagattggctcccatggtactacaggttgagtatcccttattcaaaatggttgggacctgaagtgttttggattttggttttttgtggggtttttaaattattattttggaatatttgcattatatttaccaatttagcatccctaatcccaaaaatctttcattagaaattggaaatgcttcaatgagcatttcccttatgtgtcatatctgcgctcaaatgttttgaattttggaacatttcttgtttctgacttttagattagggatactcaccccgtaccaatatttggagtccttagacattagattatatgaaaatgattgattgataggtaagaaaggttaaagagaaatgactttttaggaactagacttgaacgtataattaatatgtggaactagtttgcttttataattcattgtatcaagaaggagtcatgttttaaatccaaggcattgagactatctagaagcaaaaaagttggttttaaaaattctttttattagaagtgtgtttaaaaacatgtctttttttcccttgagcgacagtggcctcactacattgcccaggctagtcttgaactcctgggttcaagcagtcttcctgccttggcctcctaagtagcagggattacaggcatgcacccacatgccaatttttattgcttaaaatggcgagttctatggatattatctagccccaagcccatatctgtacacttttgttcattttataataccagaaagaatgttctatcagtaaaagaaggtttttaagtatgaatctccatttttgtggagtttttctaccctgtaaaaattaactttgtggttcccagtaattacagtaaggagtttttctatattttcacagttggatttatctaaggatatttctcagcatattaaggaatccttttctacatttgagcaaatactgaggttcatgttgtaccaaataataataaattgcttttgtgtttaatatgtaacacgtaagaacaattgaaattttcttctaagatttaatactagtcttttagtataaaggaatgtaactggagaaaaaaattaatgctacagccatttatcctgtgttatgtgttatataatctgaaatttgtcacaatgttacaatcaggaagttttttttctggtttcttcttccaaaggaaaataatagcctacttgtattttgaagtaactgaaataaaactctctccaagcctttttgcacattacg

SEQ ID NO: 2129 - DNA, 874 bp, Homo sapiens
aaagaagtattttatgaacagtgggattattttttagagagaccagaacccacttcccactaaggaaattcctcaaggtgcagttctaggctaagatgtaaggtacatgtttttgtgccacagtctcagcactaaatttgccctagaccttccagttactacagcgctactgtggacattgatttggaacttgttaattaagattttgtagcaattcagagggagtttatgttttagtttataatattgttagtagtataatgatcatcggtcatatgtgtatatatcaaatggtatagatttacagtgttgtactatacgtgagtcacatatataattttaaattctctagaagccatattaaaaaggaaaaaaggaacagtgagattaattttaataatagatattattgaacccaatatccaaaatatttctacatgtaaacaacgttaaaaatgattaatgagctattttacattctttttttttaaatacaaagtcttcacaattcagaagacagcaaatctcaattaggactagctacgttgcaagtactctggagccacacacatggctggtggctaccgttttggactgcacaggtatagaaagagctgatgatcgtaaaatcttgtatcctatgcatccttacccctattccatccttcagaggcaacctttgttttaactgttaatttttagttactctattgttgcctccacttttaaaagttacattattatgactatgtaaatattgttcaggcaaatattgtactaagcaaacttgtgtgctagaattacacttccttctctatatgggtctaatgtcatgactcttacttaggccaccagttagtgctccaaacatcag

SEQ ID NO: 2130 - DNA, 874 bp, Homo sapiens; identical to SEQ ID NO: 2129

SEQ ID NO: 2131 - DNA, 874 bp, Homo sapiens; identical to SEQ ID NO: 2129

SEQ ID NO: 2132 - DNA, 665 bp, Homo sapiens
aaatctgtttataccaagaattatatttaaaagaatatggtttcattggatatttaagcattcaggtgtgatgagggaattcagggaaaggaaacctttggtacataaaacttttttttctttcccctttgaccaggattataaccaaaacagatgtatgagaggtgacagagagaagaggccattggtctcagtaagaatgccctgctttctgcatctctgtttcagaagaccaagagggtgacttaccagactgagtatttctggggacaatacaagtacctgggcatgaatttccatttcgattcagatgggactggaaacaaccattcaattttatgaatcttactggacattatggatttactggaattattccagacattatgccctttggttgtcactaccttgcaaatgtgtaagaggaaaatgtgctaatgtggcagtgactgtaaaactggcacatggcatttattaatcctgaagaaaagtacatgtactattttctcagtgataaatataatgaacatgtcagaactatttcttgaaaacctttttattactttgttgcgtgaatttatttaacaaagatgttttgtcttttgtgtaagggaggttctagaggctagatgtttaattgtaaatatgtgaggaaactcaatgca

SEQ ID NO: 2133 - DNA, 873 bp, Homo sapiens
aaagaagtattttatgaacagtgggattatttttagagagaccagaacccacttcccactaagtaaattcctcaaggtgcagttctaggctaagatgtaaggtacatgtttttgtgccacagtctcagcactaaatttgccctagaccttccagttactacagcgctactgtggacattgatttggaacttgttaattaagattttgtagcaattcagagggagtttatgttttagtttataatattgttagtagtataatgatcatcggtcatatgtgtatatatcaaatggtatagatttacagtgttgtactatacgtgagtcacatatataattttaaattctctagaagccatattaaaaaggaaaaaaggaacagtgagattaattttaataatagatattattgaacccaatatccaaaatatttctacatgtaaacaacgttaaaaatgattaatgagctattttacattctttttttttaaatacaaagtcttcacaattcagaagacagcaaatctcaattaggactagctacgttgcaagtactctggagccacacacatggctggtggctaccgttttggactgcacaggtatagaaagagctgatgatcgtaaaatcttgtatcctatgcatccttacccctattccatccttcagaggcaacctttgttttaactgttaatttttagttactctattgttgcctccacttttaaaagttacattattatgactatgtaaatattgttcaggcaaatattgtactaagcaaacttgtgtgctagaattacacttccttctctatatgggtctaatgtcatgactcttacttaggccaccagttagtgctccaaacatcag

SEQ ID NO: 2134 - DNA, 15287 bp, Homo sapiens
catatgctcatttgtctttttatatttaatacaaacattgttgcccgcctttcctaagatgtatgtgtgttcggtgtatctgcatgtctagattcaccatgaaaagttcattttaggagcccatctattgtcaaattggacattttagccacgtaagaaatgtgaccttacagagccctgttgagtcactgtttatagtgagttttctgataatacctttgttaagttcatgttttgtttttcttacagtatttcactggccttgaatgtggacataagttttgtatgcagtgctggagtgaatatttaactaccaaaataatggaagaaggcatgggtcaggtaaagatatcaagttgtttttcagtttttgttgaatttcctatagtgttaagacccttgcacaaatttgcacaaataaaaacaggtgaagctttatgtgtcatgattctagattcaaacaactaaagataataggctttttcctaaagtaatgtggcattccagttaaagagccactccaggtaacgttttctcagccggcatcaatattggtatatgttaacttaaacttgttgcacgattttgtcagattatctcgcttttgcctttaaaattgtgtgtttaaaaaccaattagtcaggttagcaagtctagttactttatggtgataaacatactctcacacacatttcctttaaggagaaagggaaggattgagatcctgtaaacattaaggtattcccagaacctagcaaagtgcctggcgatggtaagcattcattaaatatttgttgaatgaagacagtttaaatttcaatctttttcagactatttcgtgtcctgctcatggttgtgatatcttagtggatgacaacacagttatgtaagtatttttgatagattctgcatgtgaatattggttagttggttaaaccaaattaatttttacttagtacctcaaaggaagtgaaactttttaaagtctgaagaaactttttaatctgcgttccttagtagtagtacaaaagcccatttgtaacttggttaaatgcctgatcactattcttacaaacttagaaatgcatggtagctagattttgataaaccttgggattggagattagaatgtgtgtatgtgttagttgaggtgttcttggaagcagatcccaagatagaataaaaggtgaaactgacttattgtggaatagcatctgtgcaaggtaaacagcaggagcagatagacattgatataggcctgacatctgttaaaagacaaagaaggaagattcaataggaagagactttatatgatacagctatgagagtctttggcagccctgatgggggaacttcagtgcatagattgcccatagaggaatacctcaataagtagaaagagctgggcccagtacacttgatatgctcagttgttggctgggactacccagggagtcatggtctttgctgaaacactgctgctgatttcagatacactacagctggatgctttcagctaacagctcttcttgtgaaaggttctttcttttttttcttttaacttttaggttcaggtatacatgtgcaggtttgttacatgggtaaattccttgtccgtgaggtttggtgtacaaatgatcccatcacccaggtagtgagaacaatacctgatagtttttcaactcttgccgtcccaccctacccactctagtagtccccagtctaaatagtcttttattctcatcttcatgtgtactcactatttagctctcacttataaatgagaacatgtggtattgagtatttctgtgttaattcatttaggatgatgacctctagctgcatttgtattgctgcaaaggacatgattgtgctcacttttttttatgactgcatagtgtttcatggtgtccatgtgccacattttgtttatccagtccactgttgatgggcatctaggttgatttcgtgtgtttgctattgtgaataatgccacagtgaacatactagtgaatgtgtctttttggtagaatgatttattttccctgtgatctcaccaacatctgttatttttttactttttaaaattattttttgtttaatttttttttactttttaataatattccttatgactggtgtgagatgatgtggtacatcattacggttttgatttgcatttctctagtgattagtggtgttgagcatttttttgtacctgttggctgcgtatatgtcttcttgagaaatgtcttttcatgtactttgccctttttctttcttttttttaagtgaaagcaagtttattagagaagtaaagaaacaaaagaatggctacttcgttgacaaagcagcctgctcatttttaaatggggttatttgttttttgcttgtttgattaagttccttatagattctggatatgaggcttttgttgggtgtataatttttaaatattttctctcattctgtaggttgtctgtttactctgttaatagtttcttcagctgtacagaagctcattagtttaattaagtcccacttgtcaatttttgcttttgttgcagttgcgtttggggacttagtcataaattctttgccaaggctgatgtctagaatggtatttcctggattttcttttaagatttttatagattgagctcttacattaaagtatttaatcctttagttaatttttgtatatggtgaaagatataggggtcaagtttcattcttctgcatgtggctagctagttatcccaacaaccatttatgtgtgtgtggctattatcgataggattgcattattaatttggcgcttaccttgaatgttattggtatatattaaatgctactgaattttgtacattgattttgtatcctgaaattttactgactttgtcagctctaggagccttttggcagagtctttagggttatttctaggtatagaatcatcatcagtgaagattgatagtttgacttcttttcttatttagatacattttatttctttctcttgcctgattgctctggccaggacttccagtactatgttgaataggagtggtgagtgtgggcatccttttcctaagtggaatgcttccagcctttgcctgttcagtatgatgttggctatgggtttgtcatatcatagatggctcttaatgttttgaggtatgttccttcaaagcctagtttgttgatagtttttatcatgaagagatgttggactttattgaaagctttttctgtgtcatttgagatgatcgtatggtttttaattctgtttatgtggtgaattacatttattggtttgcccaggctggagtacaagtggcaccatatcggctcactgcaacctctgcctcccgggttcaagcaattctcctgcctcagcctcctgagtagctgagattacaggtgtacaccatcacgtccggataagttttgtatttttagtagagacagagtttcgtcatgttggccaggctgttctcgaactcctgacctcaggcgatctgcccgccttggccttccaaagtgctaggattacaggcgtgagccaccaagcctggccaataactattttcaatttgtgatggtaacaaatctttgtcaagagaattgtcttattaatgaccagagtgacacttgctgccaccttcttgagaatgcctattcttgaagatggatgctcactttcttttacttccttatcaatatcagataaactaagggtggaaccttgtcctaataactgttggctgatgtttgctctcacgtcctggtggtccatgccaggtttagatagctttttaggctaaggccagctatcagaaatcattagggtttgtctaccagaaaagcttatgggtaatacatgtgtaaataagatgtgtgtgtttggcaatcaaggcatctgacttttggcctgatacattccttattattatttattgatataaaatctgtaatataaaactcattttaattacagttatccttagtatactggggattggttctaggacccacgtcctccaccctgaatataccaaaatctgcgcatgctcatgtcagcccagcagaacccatgtatacaaaaatttgaccgtccatatatgcaggtttcacatcccacaaataactatttttgatccctgtttggttgaaaaatattcataaataagtggacccatgcagttcaaacctgtgttgtttaagaagcaatggggttttttttgttttttgtttttttaagatggaatctctctctgttgcccagagtggagtgcagtagtggcatgatctcggctcactgcaacctctacctcctaggttcaagtgattctcctgcctcagcctcctgagtagctgggattacaggtgcctgccaccatgctcgggctaatttttttgtatttttagtagagacgaggtttcaccatgttggccaggctggttttgaactcctgaccccaagtgatcacccacctctgcctcccaaagtgctaagattacgggcgtgagcaaccgcacatggccagcaactgtatttttaagtatattatccagtggcttttagtatatacataatattattctacaaacatcacctaattgcagactattttaatcaccttatatccgttaagcagtcattcgctattcctttctccccctagaccctagcaaccactcatctgctttctgtctttgtggattagcctattctagacatttcatataaagggaatcatgtaatatgttgccttttgtgattggcttctttaatgttttcaagattcatccatgttgtatcatgaatcatcactttactccttttcattgctgaataatggttccattatatggacatttccattttttacggaaatgtcttatgtgaacatatgaacatttgtgtacaagtttttcattgaacatctgtttttaattctcttaagtatatatatttcaaaggagaattcctgggtcttgtggtaatgctatgtttaactttttgaggaaccatcaaatacacaaattatttttagaccgcaggttccacttctgtgaaatatggagatttactcatttaaaaaatattaattgaacactttctacaggcgtactggacacctggggatcctttcatggggttgggaggagaaagacagatattaaacaaatgattatacagataactgtctaattaaaattatgataatttctataaagtagatgtttaaggtgccatgagaactgagagggtatctatatccaaacgagtgtggaaactcaggaaaggcttccttgagtaatactttattgtaactgagtgaagtaatacagtaatagcgtctaatatttattgagtgcttactatctgccaggcactattctagtctcacaaccatgtttctgatatctattttacagattagtaactgagaaatggagagttcaaagaatttaccttcaattcatagctagtgagttgtgaggctggcattcaaacctaggctgtcccaccttagagctccattacaatattcttgtctttccaagggaggcagccttatgcacagcctctgaggaagggtggtacttactgttttgaggaaatacaagaatacgaatgtgataggagtgcactgaaagtgccacaggacagggtgggatcttgtggaaggagagaggcctatgaagctcaagagtcaaatgaggccagattggttcatttaaaagattttaatggggttgaactacatgcatgttcttcatgtctttctcagtgggaatacactcagaggagtatttaccatagaactaatgaaacttaaacttcaggattcctcactacgtgggatcctgtgaattctggaaattcttgtgagttatagtgttcagaagaggccaggatgcagtcagtgagcatttctggttaatttctaagagctctcagaagaagaaggctcttaaaattgtatcagctttaggtatcacaaaacctggatccatttcttaacatttctggcaacaatatctgtctcatttcgcatactgatttgggtggggtgtctgaaggaaggtggctgagaattgctgtcttaaggcatgatatgatatcagagtcaaaagaccctgaaatgcgcttatacttggcactagttggtaagtcattaggctgtaataaaaactgggtaaaagtagactatttaaaaaataagaaccatggaaaaaaagtctatgaaaataaaactatacaaactttgaaattattgttctgatcagtacagttatatttgttgatagcctatgtgcatttcagtatttacagcttagggcataaacatgtagccgtagcataaacagcttttgaaactatgttttataaatgtggaaaatactcttgactggaaactttctaatctatttttattcttggtttcaggcgcctgatcacagattcaaaagttaaattaaagtatcagcatttaataacaaatagctttgtagaggtaagtgatttgttttccttcttgtaagaaggaattctgtttattaatagaaatactattttaaaaattataatttattgacagtaaaaaacatctttaacatatttatgaagcatgccaaaatacctttattctcaaaagagtatgacaggccaggtgtggtggctcatgcctgtaatcccagcactaagggaggccgaggcgggtggatcacctgagatcaggagttcaagaccaacatggcgaaaccctgtctcttctaaaaatacacaaattagctgggcacagtggcacaagcctgtaatccgagctactcgggaggctgaggcaggagaatcgcttgaaccctggaggcagaggttgcagtgagccgagatggcgccactgcactccagcctgggtgacagagcgagactccctcttaataaaaaataaaataaaataaaataaaagagtatgagaaaccagtaagtacatctctccatagatcttgaccttggataataaaattatttttactgtattcttcctttacttttctttatccctagctgagaattgtagtagattactaatcgtgtcatgtttaatcatgtttgagattctaaccctgctatttctctgctcgttttaggtttcattaccagtaaatcttgttaataaagaatgctatcctttattggaccatgcctttgcccatttgttctatgactcctttgtgctacagtggcagagttgagtagttgctacagagactgttctggcctgcaaaaccaaaattctttaccctcttggcttgttacagaggagtttttcagcccctgtatgacaacatcagtaacttggtcttttaattctagaaagtaattatttctgttagagattaaacctggaaacagcctattttagaaatagtgtattatttgaaatggtcaatggacttctgaattctggtgcagagtgtttttttttcataatactataaaagttatatttccttttgaggaactaaaatgcaatctttgcctgtggtttaggaactgggttttttgtttgtttttttttttccttcttacaagagctttttatgggagaagttgtatgtatatcctttagcctatcttgaactattctgtagcttctaaacaccttccttgataaagagtatatctgattttcttgtgtcttttgaaaattgttctgaaatagaactgtaaataaattagtggtttttaatggtcacatacatgatatttaattaaagttattcagtgggattttgaagatagaacaagaggtgattcatgtattttataaaaccaggtcttcagggatcagtcatctttaaaaaaaaaaaaaaaaggcacatctgaagtgttgctatagaagaccacagcaagttttcataagcttgtgtaattatcccccatttgccccttgtaccagagaagcaatataaatagcttgatgtactaggaaatcttgcatcatgacctaatttaatttgctgtctttttttgaggcagggcctcattctaacacccaggctggagtgcagcagatgatcacagctctctgcagcctctacttcctgggctcaagtgatcctcttgcctcagcctcctgtgtagtcgggactacaggcacataccaccatgcctggctaaattcttttttcttttttttaaggtagagacaaggtcttgctatgttgcccgggctggtctggagtgcttgacctcaaacagtcctcccgccttggcctccctaagttctgggattataggtgtgagccactgtgcccagccagctgtcattttttattttctaacttgtatttcagtgcaatcgactgttaaagtggtgtcctgccccagattgccaccatgttgttaaagtccaatatcctgatgctaaacctgttcgctgcaaatgtgggcgccaattttggtaagcaagtgatttcctaaattgaaatagtgcacaaagcgtttccatttctcctgtttattcttggtagtaaaatagcagaaaaaaagtgtttaccttaggcagggagatgtttgatactggtttaaaatagtatatatctctttcagaattgaatgaaaaggtcacatcttaaaaaaatttttcctctttccttgatgttctaacttttttgaatttttttttatggagaaaatatacaactctaatcatatcttcctgtatgctccactgtaacttaatgggagcaaacttgtagatctgggactatacgtttttctttactctgccaaattttaaccttacttatgcaaaggaaatgtgcaggtaaattctgctgatggtctcctttttaactaagagttttcctgtggctcctctcgcccagctttcttggtaacttgggcttttggagttctatagtatactcttcagcctctgaattctagatttgaactgccaggaagtttccagtgccacatattaggggatgtcttaatcagttcaggctcctttataggtgttctagttttttccaaagtggataggctgaaaatttttcaaatttttgacttcttatttccttttgatgaacagtttatctctaggtcattcatctcttcttgcattttctataaacattcaagagaagctaagctgcgtcttcaacactttgcttagtaatttcctcaaccagatattcagtttcatttctctaccttccacaaaacaattcagccaacttctttgccactttatagcaaggatggcctttcctctagtttctaacagcatgttcctcattttcatctgagacctcatcataatggcctttactgtccatatttctaacaacattctgttcatggccatttatttaggttttctctatgattgaggcattccctgcacttctgtctttctgaatcctcaccagaattacccttaacaattcagttcattcacagtgatctaggctttttctagcttgcacttccaagctcttccagcctctacttactacctagtttcaaatcggctttcacatttttggttttgttagaacagcaccctcacttcttggtaccattttctgtcttaatgttcaggcttttataacaaaagaccataaactgggcggcttctaaacaacataaatttatttcttacagttcttaagggtgagaagtccaagatcaaggtgccaaaagatttgttgtctggcgagggcctgcttttctggttcatagatggtgcctacttgctgggtcctcatatggtggaaaggacaaggcagctctctgggccccttttttttttaaaaaggatgccaattccattcacctcctaaaggctccacatcctaatactgtcacattggttattaagttttaacatacacattttagggggacacaaacatttatatcctgctagaagttaagatgattttctgttcctttgagggtcttgaggagtaagaagccaatcaagtcaaggggctctagacccagcaaatagattttttgttttgttttgttttgagagagggtctcactccatcacccaggctggagtgcagtggcacgatctcgcactgtaacctttgcttctcaggttcaagtgattcttgtgcctcttgagtagctgggattacaggcgtgtgccaccacgcctggctaatttttatttatttatttatttgtttatttatttatgtatttatttttaatagagacagcatttcaccttgttggccaggctggtcttgaactcctggcctcaagtaatccacctgcctcggccctccctaagtgctgggattacaggtgagaagcaccatggccagccagattttcttttttgctgcggggtggtttggagggggaaatattttattggtattccatacctttctttttttcctccaaacatctatagaattacacttaacacatcattaataataaatatttccaaaaagagcaggtaagctcacagagattaagtatgtgtaaaatacatactgtttcgataaagattaattatgtattgttattttagagaaaaggtggataatacctactttccaatgtatttttagcgtgacacatttcaaacataaaagtatagagaatacagcagtgaatacctatatagctacaatccagttaaatcaaaattagtattttgtttttcttcattaagagataaaacatgacacatatatttgaagctccttggttccctgctccttcccattccccatctttcttttcagaaataaccatttatcttaacctgatttaaatcaatagtagtttgtttctgtctttagcaaaggactttttgccattcgtaaattacttaattagctaattaatctgtcattttattatttttttcttaagcatttgtgtttgttaattatacttcttttacaagtgtatatgtcatgaacttagaaaacaaaagtgaattactgattaacacatgtttagtgagtatttagtctttttgttttataccttgcccagtaccatttccctctacagggcggaggttcatttgtttaaataatgcaaagatgtgacctatttgcttcccatatattgtttactgtgtattagtactaaattatataagtaacctacaaagtcagccttttattcttcatttagggtgttaagtaaaagattaaaaatgcactgatgaagcatgggttgaaacttctcaatatagtctgaggcaccttagcaacaattattatgaaattgtcatcaaagcgtgtcttcatgcttatagtcattcttcacacatattgagtacccactatgtgctagttctactactaaattctaggtaattaactgtaaagcagacatgggttctctccttgtatttgccagtcactagaaactagtgacaatactgtggaactataaggcatgaaatgattggcttatttacttgcttacagtaggtaggccttaattctattaactctttgtgtcacttaacagctttaactgtggagaaaattggcatgatcctgttaaatgtaaggtgagtttgtctgacatttcaatttttaaataatggcacacttctaagacttagtgactaaaaatcatagctgatgattttgttatctatctattgatagatttttttttatccttttaatttcagatgatcattacatgtattcagaggtaattccttaggataagccaagtcagctcctgattgttattaggataaccatggctaaggcacctctttgtcaggctttgtaattaggggaatacacaccttgcagttgggcttctcttcaagctctaggttccccactcagcttctgccaaagaaaatcctgctttggttgattttatatatactggacattgtagctatgggatttccctggcttaagaggatgtgagcctagtgataatcttattcattggcttttacatttaagcttgactatagttaagtgctaaagtaatttgctatttttaaaagtcttttgttgtatcctaaccgttgttattttcaaacagtggttaaagaaatggattaaaaagtgtgatgatgacagtgaaacctccaattggattgcagccaacacaaaggttggtgttttccttcagtaactcttggtaataaaaatgataaggattggtactttggcattagcaaaagcaatgaggtgacctacttacaggctttgtttcatctttttctccattgagtctttttttttttttcccagaatgtttgcctgttatttcctttttctctttgagtttattttagagtattgagtactgtagtacagcatccacagttctctgccttaggtttcttctactggaaaaaaaattagtgttctgtagaggaaaaagctgataatttttcaagtgtgggatttgtgcttggctgccatttagtatacaaatgcattggagtttactccgcctagcttggttctgttaggctaatttacatttttgtttctaattttttgttttgaagtacattgctcttgatactagtttcaaaattcaatttcaaaattcactttcttaaccccagacaaatgtcttagaagtgtttaaatcttgagtacccttctcctcgatcactaatctaatgagcaagcatttgaatgccaaccgtgtacccagctagtcttttaatacaaagtcgtattatccatcctttatgtaattcagtcctatcctatccccatagtgagtgacttgggtaatgaatggtaggttggttcatgggctattcatttttagtattattttgtacatgtaaagatgatgctttaaagaatgctgagttgtttgacccatagtatataaagctatctttgaactgttgcctcagtcatcacaggacaatgagattaagaagtgtgtaaacaatgaaggccgacgcaggttgtctgtgtgtgtttaaatatacatcttacatacttatatataaaacatgaatttatatttctgtctcccagaaagtagtgaaacagtgaatcttgccacataaaacaaatgcccaagtctttaaggaatatatggtagaaattaatattttttgttccctccaaaaccatcacgataagcataactcacgtcaatcaaagaaaaccttactataaatatactgtaatgtcagaaagtggttacttgttttgttattaaaaaaaaattcttagccaagcattctttttttgaaaattgaagattttcccacaagaaatgttccttaagtcccagaattctttaatatgctctgaaaaactaatatttagaataaggcaattatattttcactaaattgtttaattaaatggtagccttttttctacatctagagaaattcctacttgtaagccccaaagatgtttaaaatagggagtacaggcttgaatatgtttggcttagtttagattgtagattaccaaggaagaatggcaatttgtaaaacaaatttagctgctcagtatttttgagagaaaactgaagagtttttctcttgaggttttagaagcttttaagattattagctccctaaacagatatgcatattgtcagtgatatcctaacattttggaggtttaatactattaggttaattataaccaagaaatgtagaatgtagaatgacgcatattttatgcctgaaatttgcttgtttggaaaaaatgtaaaatttcttatgtgggtgatttcaaaaatttgatttgaaatatataattaaaaagttgctatattggcctattttaaattgctatcattgatgggcagcatagtcaatttcacaaagaaggccaaattgtgcaaatactaatatagtgggtgatccctccttgggagagttacaaacctcaatcacaaatgcaaaaacaaaaaatccataggcctacagagcagtaattttggcttactagcaaccaagaatatgatatgaggccaggtgcagtggctcacacctgtaatcctaacactttgggaggccgaggtaggcagattgcttgagcttgagagattgagaccaacctgggcaacatggtgaaaccccacctcaacaaaaaattcaaaaattagccgagcatggtggcatgcacctgtagtcccactacttgggagactgaggcaggaggatgacttgaacccttgaggtcaaagctgcagtgagccatgattgcactgctgcactccagcctggtcgacggtgagaccctgtctcaaaaagaaaaagaaaatgatttggacttggaaaaaaacaatctaacacgatctctgtagcatacttgttaaggagtacaatgaaaagaatttaaaacatggttatttggtaggagaaagttggaaaatccagtagccacaaaatgaatttaccaatcaaggtctgatttcctagttacctgacactgaagtcagattgcttggatttggatcctgacttgacttatgtgaccttggactagcttctttataatttttctctcccttagtttattcatctgacaaatggaaataggaatagcaccactataagaattatgagttgatgcatataaaacactgagaacggtacatgggatatgggaagtactcaattatttctagatgacactagagagtatagtatatttatatgaatagaatgcttttatctcctatagtactgttattactatatatatgactaaaagtacttaaaatgatttgtctctcagccctacttaaaaagaaatcctaggaaggctgaagtggaaagatcacttgactccagaagtttaaggctttagtgacctatgattgggcctctgaatagccactgcactacagcctaggcaatgtagtgagactctgtttctaagtttaaaaaaacaagtccttaaattgttgtatgtcttaaaagccagtggtaataatggtaacagctcattttaaatagtgcttaagtgttcaacactgttctaagtgctttatatgtattaaccacaataaataaaatgtttaaaaacaaaccaaatctagaactggcttttccttaatgttagtaatgcaacctagtgtagcattgacaccaactttatagtttctcttcataggaatgtcccaaatgccatgtcacaattgagaaggatggtggttgtaatcacatggtctgtcgtaaccagaattgtaaagcagagttttgctgggtgtgtcttggcccatgggaaccacatggatctgcctggta

SEQ ID NO: 2135 - DNA, 691 bp, Homo sapiens
aatgctatcctttattggaccatgcctttgcccatttgttctatgactccttttgtgctacagtggcagagttgagtagttgctacagagactgttctggcctgcaaaaccaaaattctttaccctcttggcttgttacagaggagtttttcagcccctgtatgacaacatcagtaacttggtcttttaattctagaaagtaattatttctgttagagattaaacctggaaacagcctattttagaaatagtgtattatttgaaatggtcaatggacttctgaattctggtgcagagtgtttttttttcataatactataaaagttatatttccttttgaggaactaaaatgcaatctttgcctgtggtttaggaactgggttttttgtttgtttttttttttccttcttacaagagctttttatgggagaagttgtatgtatatcctttagcctatcttgaactattctgtagcttctaaacaccttccttgataaagagtatatctgattttcttgtgtcttttgaaaattgttctgaaatagaactgtaaataaattagtggtttttaatggtcacatacatgatatttaattaaagttattcagtgggattttgaagatagaacaagaggtgattcatgtattttataaaaccaggtcttcagggatcagtcatctttaaaaaaaaa

SEQ ID NO: 2136 - DNA, 258 bp, Homo sapiens
acacctgtaatcccggcaatttgggaggccgaggtgggtggatcacctgaggtcgggagttcaagaccagccctgaccaacatggagaaaccccgtctctactaaaaatacaaaattagccaggcgtggtggcgcatgcctgtaatcccagctactcgggaggctgaggcaggagaatcacttgaactcgggaggtggaggttgcactgaaccaagatcgccccattgcactccagcctgggcaacaagagtgaaact

SEQ ID NO: 2137 - DNA, 6931 bp, Homo sapiens
aacttgtatttcagtgcaatcgactgttaaagtggtgtcctgccccagattgccaccatgttgttaaagtccaatatcctgatgctaaacctgttcgctgcaaatgtgggcgccaattttggtaagcaagtgatttcctaaattgaaatagtgcacaaagcgtttccatttctcctgtttattcttggtagtaaaatagcagaaaaaaagtgtttaccttaggcagggagatgtttgatactggtttaaaatagtatatatctctttcagaattgaatgaaaaggtcacatcttaaaaaaatttttcctctttccttgatgttctaacttttttgaatttttttttatggagaaaatatacaactctaatcatatcttcctgtatgctccactgtaacttaatgggagcaaacttgtagatctgggactatacgtttttctttactctgccaaattttaaccttacttatgcaaaggaaatgtgcaggtaaattctgctgatggtctcctttttaactaagagttttcctgtggctcctctcgcccagctttcttggtaacttgggcttttggagttctatagtatactcttcagcctctgaattctagatttgaactgccaggaagtttccagtgccacatattaggggatgtcttaatcagttcaggctcctttataggtgttctagttttttccaaagtggataggctgaaaatttttcaaatttttgacttcttatttccttttgatgaacagtttatctctaggtcattcatctcttcttgcattttctataaacattcaagagaagctaagctgcgtcttcaacactttgcttagtaatttcctcaaccagatattcagtttcatttctctaccttccacaaaacaattcagccaacttctttgccactttatagcaaggatggcctttcctctagtttctaacagcatgttcctcattttcatctgagacctcatcataatggcctttactgtccatatttctaacaacattctgttcatggccatttatttaggttttctctatgattgaggcattccctgcacttctgtctttctgaatcctcaccagaattacccttaacaattcagttcattcacagtgatctaggctttttctagcttgcacttccaagctcttccagcctctacttactacctagtttcaaatcggctttcacatttttggttttgttagaacagcaccctcacttcttggtaccattttctgtcttaatgttcaggcttttataacaaaagaccataaactgggcggcttctaaacaacataaatttatttcttacagttcttaagggtgagaagtccaagatcaaggtgccaaaagatttgttgtctggcgagggcctgcttttctggttcatagatggtgcctacttgctgggtcctcatatggtggaaaggacaaggcagctctctgggccccttttttttttaaaaaggatgccaattccattcacctcctaaaggctccacatcctaatactgtcacattggttattaagttttaacatacacattttagggggacacaaacatttatatcctgctagaagttaagatgattttctgttcctttgagggtcttgaggagtaagaagccaatcaagtcaaggggctctagacccagcaaatagattttttgttttgttttgttttgagagagggtctcactccatcacccaggctggagtgcagtggcacgatctcgcactgtaacctttgcttctcaggttcaagtgattcttgtgcctcttgagtagctgggattacaggcgtgtgccaccacgcctggctaatttttatttatttatttatttgtttatttatttatgtatttatttttaatagagacagcatttcaccttgttggccaggctggtcttgaactcctggcctcaagtaatccacctgcctcggccctccctaagtgctgggattacaggtgagaagcaccatggccagccagattttcttttttgctgcggggtggtttggagggggaaatattttattggtattccatacctttctttttttcctccaaacatctatagaattacacttaacacatcattaataataaatatttccaaaaagagcaggtaagctcacagagattaagtatgtgtaaaatacatactgtttcgataaagattaattatgtattgttattttagagaaaaggtggataatacctactttccaatgtatttttagcgtgacacatttcaaacataaaagtatagagaatacagcagtgaatacctatatagctacaatccagttaaatcaaaattagtattttgtttttcttcattaagagataaaacatgacacatatatttgaagctccttggttccctgctccttcccattccccatctttcttttcagaaataaccatttatcttaacctgatttaaatcaatagtagtttgtttctgtctttagcaaaggactttttgccattcgtaaattacttaattagctaattaatctgtcattttattatttttttcttaagcatttgtgtttgttaattatacttcttttacaagtgtatatgtcatgaacttagaaaacaaaagtgaattactgattaacacatgtttagtgagtatttagtctttttgttttataccttgcccagtaccatttccctctacagggcggaggttcatttgtttaaataatgcaaagatgtgacctatttgcttcccatatattgtttactgtgtattagtactaaattatataagtaacctacaaagtcagccttttattcttcatttagggtgttaagtaaaagattaaaaatgcactgatgaagcatgggttgaaacttctcaatatagtctgaggcaccttagcaacaattattatgaaattgtcatcaaagcgtgtcttcatgcttatagtcattcttcacacatattgagtacccactatgtgctagttctactactaaattctaggtaattaactgtaaagcagacatgggttctctccttgtatttgccagtcactagaaactagtgacaatactgtggaactataaggcatgaaatgattggcttatttacttgcttacagtaggtaggccttaattctattaactctttgtgtcacttaacagctttaactgtggagaaaattggcatgatcctgttaaatgtaaggtgagtttgtctgacatttcaatttttaaataatggcacacttctaagacttagtgactaaaaatcatagctgatgattttgttatctatctattgatagatttttttttatccttttaatttcagatgatcattacatgtattcagaggtaattccttaggataagccaagtcagctcctgattgttattaggataaccatggctaaggcacctctttgtcaggctttgtaattaggggaatacacaccttgcagttgggcttctcttcaagctctaggttccccactcagcttctgccaaagaaaatcctgctttggttgattttatatatactggacattgtagctatgggatttccctggcttaagaggatgtgagcctagtgataatcttattcattggcttttacatttaagcttgactatagttaagtgctaaagtaatttgctatttttaaaagtcttttgttgtatcctaaccgttgttattttcaaacagtggttaaagaaatggattaaaaagtgtgatgatgacagtgaaacctccaattggattgcagccaacacaaaggttggtgttttccttcagtaactcttggtaataaaaatgataaggattggtactttggcattagcaaaagcaatgaggtgacctacttacaggctttgtttcatctttttctccattgagtctttttttttttttcccagaatgtttgcctgttatttcctttttctctttgagtttattttagagtattgagtactgtagtacagcatccacagttctctgccttaggtttcttctactggaaaaaaaattagtgttctgtagaggaaaaagctgataatttttcaagtgtgggatttgtgcttggctgccatttagtatacaaatgcattggagtttactccgcctagcttggttctgttaggctaatttacatttttgtttctaattttttgttttgaagtacattgctcttgatactagtttcaaaattcaatttcaaaattcactttcttaaccccagacaaatgtcttagaagtgtttaaatcttgagtacccttctcctcgatcactaatctaatgagcaagcatttgaatgccaaccgtgtacccagctagtcttttaatacaaagtcgtattatccatcctttatgtaattcagtcctatcctatccccatagtgagtgacttgggtaatgaatggtaggttggttcatgggctattcatttttagtattattttgtacatgtaaagatgatgctttaaagaatgctgagttgtttgacccatagtatataaagctatctttgaactgttgcctcagtcatcacaggacaatgagattaagaagtgtgtaaacaatgaaggccgacgcaggttgtctgtgtgtgtttaaatatacatcttacatacttatatataaaacatgaatttatatttctgtctcccagaaagtagtgaaacagtgaatcttgccacataaaacaaatgcccaagtctttaaggaatatatggtagaaattaatattttttgttccctccaaaaccatcacgataagcataactcacgtcaatcaaagaaaaccttactataaatatactgtaatgtcagaaagtggttacttgttttgttattaaaaaaaaattcttagccaagcattctttttttgaaaattgaagattttcccacaagaaatgttccttaagtcccagaattctttaatatgctctgaaaaactaatatttagaataaggcaattatattttcactaaattgtttaattaaatggtagccttttttctacatctagagaaattcctacttgtaagccccaaagatgtttaaaatagggagtacaggcttgaatatgtttggcttagtttagattgtagattaccaaggaagaatggcaatttgtaaaacaaatttagctgctcagtatttttgagagaaaactgaagagtttttctcttgaggttttagaagcttttaagattattagctccctaaacagatatgcatattgtcagtgatatcctaacattttggaggtttaatactattaggttaattataaccaagaaatgtagaatgtagaatgacgcatattttatgcctgaaatttgcttgtttggaaaaaatgtaaaatttcttatgtgggtgatttcaaaaatttgatttgaaatatataattaaaaagttgctatattggcctattttaaattgctatcattgatgggcagcatagtcaatttcacaaagaaggccaaattgtgcaaatactaatatagtgggtgatccctccttgggagagttacaaacctcaatcacaaatgcaaaaacaaaaaatccataggcctacagagcagtaattttggcttactagcaaccaagaatatgatatgaggccaggtgcagtggctcacacctgtaatcctaacactttgggaggccgaggtaggcagattgcttgagcttgagagattgagaccaacctgggcaacatggtgaaaccccacctcaacaaaaaattcaaaaattagccgagcatggtggcatgcacctgtagtcccactacttgggagactgaggcaggaggatgacttgaacccttgaggtcaaagctgcagtgagccatgattgcactgctgcactccagcctggtcgacggtgagaccctgtctcaaaaagaaaaagaaaatgatttggacttggaaaaaaacaatctaacacgatctctgtagcatacttgttaaggagtacaatgaaaagaatttaaaacatggttatttggtaggagaaagttggaaaatccagtagccacaaaatgaatttaccaatcaaggtctgatttcctagttacctgacactgaagtcagattgcttggatttggatcctgacttgacttatgtgaccttggactagcttctttataatttttctctcccttagtttattcatctgacaaatggaaataggaatagcaccactataagaattatgagttgatgcatataaaacactgagaacggtacatgggatatgggaagtactcaattatttctagatgacactagagagtatagtatatttatatgaatagaatgcttttatctcctatagtactgttattactatatatatgactaaaagtacttaaaatgatttgtctctcagccctacttaaaaagaaatcctaggaaggctgaagtggaaagatcacttgactccagaagtttaaggctttagtgacctatgattgggcctctgaatagccactgcactacagcctaggcaatgtagtgagactctgtttctaagtttaaaaaaacaagtccttaaattgttgtatgtcttaaaagccagtggtaataatggtaacagctcattttaaatagtgcttaagtgttcaacactgttctaagtgctttatatgtattaaccacaataaataaaatgtttaaaaacaaaccaaatctagaactggcttttccttaatgttagtaatgcaacctagtgtagcattgacaccaactttatagtttctcttcataggaatgtcccaaatgccatgtcacaattgagaaggatggtggttgtaatcacatggtctgtcgtaaccagaattgtaaagcagagttttgctgggtgtgtcttggcccatgggaaccacatggatctgcctggta

SEQ ID NO: 2138 - DNA, 392 bp, Homo sapiens
ctttattctcaaaagagtatgacaggccaggtgtggtggctcatgcctgtaatcccagcactaagggaggccgaggcgggtggatcacctgagatcaggagttcaagaccaacatggcgaaaccctgtctcttctaaaaatacacaaattagctgggcacagtggcacaagcctgtaatccgagctactcgggaggctgaggcaggagaatcgcttgaaccctggaggcagaggttgcagtgagccgagatggcgccactgcactccagcctgggtgacagagcgagactccctcttaataaaaaataaaataaaataaaataaaagagtatgagaaaccagtaagtacatctctccatagatcttgaccttggataataaaattattttta

SEQ ID NO: 2139 - DNA, 349 bp, Homo sapiens
ttaaacatctgagtggccacttgtctgcaagtactgtcataagtactcattaaatcctattcctgtccacaaggattgcaagggcgcaaacagatgataagaatcagtgatcactcactgattgtgtccttgcagtctctgggtggctgcagggcacaaaggatagcatgaacctcgccattggctgcagggcacaaaggatagcatgaacctcgccatcctcaactacatcattggcttaagcaggattttataagacagtctggatacctcactgccaagttccaaatagcagattttgctcactataaaattaatgtgtctgctagaaaaatggaaacacagagaa

SEQ ID NO: 2140 - DNA, 425 bp, Homo sapiens
ccgatttctgtcctgctttctttacttaaaattataccataagcaacttctcatttttaaaacacatttttctaaatatatattttaagaatgtatttacttgttctctaatgagttagtattttttactcttacagtgttcaaacaactgtcacatagtttcttggcatccataaattttctattttttttaacgctctctcagcagaatcaatattcttttcaaaatactgcctctaacttttgatctgaacccttgttgttctcaaagtgtaagtcaggtgccaccaaacccttccagattcttctcagacctggttacttttgatttttcagcagtactttaaatacatctcctattagccgggcgtcgtagcatgtgcctgtagtcccagctattcaggaggctgaggtgagaggattga

SEQ ID NO: 2141 - DNA, 433 bp, Homo sapiens
gctcgaacagctggttgatgcgcccttgcaggcgatcctgttcaaacattagcgcatgaccagtgaggatgcgggtcaggccaggattacgctcaccaaaaccgagaagcagcaacacaatcagacgcaggcgcgctgtggtgtctttctcatctttcagaatcaggttgatgcgagtaatcaggctatcttcgataaactcaatcaggctatcgaacatgcgggtcttactggggaagtggcgatacagtgccgcttcggaaacgccgacagaggcggccagttttgccgtcgtgatacgttggcttccatcgctggattccagcatcagcgccagagactgaagtatttcctcgcgacggttccttttcgcagtttgtttttctgccatgttacaaaatacccctgaaaataagcacttgccaggcggcac

SEQ ID NO: 2142 - DNA, 125 bp, Homo sapiens
gatgggcctgattgcaaacctgcgcggtttcacggcccgtgtcatggtattaatcgcctttcccctcatggggagggattattccacgatgaacagcggcttaccagtcatctcttgcgggattt

SEQ ID NO: 2143 - DNA, 380 bp, Homo sapiens
gatgggcctgattgcaaacctgcgcggtttcacggcccgtgtcatggtattaatcgcctttcccctcatggggagggattattccacgatgaacagcggcttaccagtcatctcttgcgggatttccatacccatcagcgacaacatggtcggcgcgatgtcagaaagtttgccgccttcaaccgctttcacgttcttatcaccaacgtaaatcagcggaactggcaggttggtgtgtgccgtgtgtgcctgacccgttgccggatcgcgcatctgctcagcgttaccgtggtcagcggtgatcagcagttgtccacccacggactcaaccgctttcgcgacttcttccacgcagtgatccagcgcttcaaccgctttaa

SEQ ID NO: 2144 - DNA, 420 bp, Homo sapiens
atgggcctgattgcaaacctgcgcggtttcacggcccgtgtcatggtattaatcgcctttcccctcatggggagggattattccacgatgaacagcggcttaccagtcatctcttgcgggatttccatacccatcagcgacaacatggtcggcgcgatgtcagaaagtttgccgccttcaaccgctttcacgttcttatcaccaacgtaaatcagcggaactggcaggttggtgtgtgccgtgtgtgcctgacccgttgccggatcgcgcatctgctcagcgttaccgtggtcagcggtgatcagcagttgtccacccacggactcaaccgctttcgcgacttcttccacgcagtgatccagcgcttcaaccgctttaaccgccgcttccatcaccccggtgtgacctaccatgtcggcc

SEQ ID NO: 2145 - DNA, 490 bp, Homo sapiens
ggcaggaagtacattcacattattgtgtaaccaatcttcagaactcttcatcttgcaaaactgagattctatcctaattcaacagtaaccctcctcggccccctccccagctctgggcaacctccattctactttgtaactctacaaattggactacttgagatacctcaaaagagtggaatcatacagcgtttgtacttttgtaattggcgtatttcactgagcgtgtcttcatagtttaacaatgtagtagcaggtgtcagaatttccttcctttttaaggctgagtcactttccagtgaatgtctaggccacatcttgtgtatccgttcgtcagctgatggacacttgcgttgcttccacctttgggttcttgtgactaacgctgctatgaacgtgagtgtgcaaatatctgagtccttgtttttggttctttggggtatatacccagaagtggaattgctggatcatacagaaatttgatttttga

SEQ ID NO: 2146 - DNA, 22609 bp, Homo sapiens
acacttgcagcttatagtgatttaggatactacattatcaataaactgcaccatgtggacgagtcggtggggagcaagacgagaagggccttcctgtacctcgccgcctttcctttcatggacgcaatggtgagtagagaagatcgttggctttctttctttttctttaactggtggtaaaatatacataatataaaatctaccattttagctatttttgtgtgtacagcttaatggcaggaagtacattcacattattgtgtaaccaatcttcagaactcttcatcttgcaaaactgagattctatcctaattcaacagtaaccctcctcggccccctccccagctctgggcaacctccattctactttgtaactctacaaattggactacttgagatacctcaaaagagtggaatcatacagcgtttgtacttttgtaattggcgtatttcactgagcgtgtcttcagagtttaacaatgtagtagcaggtgtcagaatttccttcctttttaaggctgagtcactttccagtgaatgtctaggccacatcttgtgtatccgttcgtcagctgatggacacttgcgttgcttccacctttgggttcttgtgactaacgctgctatgaacgtgagtgtgcaaatatctgagtccttgtttttggttctttggggtatatacccagaagtggaattgctggatcatacagaaatttgatttttgattttttgaggaattagcagactgatcttcgtagcagctataccaccatcagagtactcaggttccaattgtctgttgacttttaaccagtccatcttgtcaatttatttaattttgccacaagttctggtaggtggcaggaaagcccatttgaaaattttgatgcagataaacagttcttttctgatatactcaggatcaaaggatcagaatcactttctgataaacttaccacttgtgtggcacagacacccagagttttagagtaagaatctgttgaacatactggtagggtttcattattttaataaccaacttcaccccattagctcagggctgcccacttccataaattctttgtcatgattctgaggagtgcttaaacagtgcttttcattctcttctgctgtcttataaatataaaaaagacttagcaaaaaaaataaaaaaaaaatatatatatatatatatgttccaataaggtccaatgctggaaagtaaaccctttcctttggctccatttcgaattattcttggaaggagacttaaaaatatgttagtctgtatagttttttttaccacccccacctcaagtttatatgcagttagatgcatgatgtaagtgcataactggcttccctgcggtgcctgagctagcccatggtggtagcccagttagagaactgaaggaggtggcctttctgacatccctaaagagtcaaagcccagcttcctggacaggtccgtgtcattcctctgaggtctgtcctcccatctgtgttgaagtgggaatctacacagcatagaagaattacagttatacggtgaattccaggaactcaggactgttagtaaaagtgaattgcagattcttaaggacctggtattccatgtccctttagctatatttatttgccataagagagtttctgaaatcaaatagaacaccagaacatttgtaattggtactcttttcttccatgtttcttctgtaagttcccccagagaccctggtataacagcaagagatggcttataaaaatgaaaataatgaacatttataaggaccagatcaactcctccctccccaccccctcacccctggcagcttggcgctgatatattggttggagagagaatatttaaagccagcaagcttattgtatggtggctttcagacaacaaagccagcccacagctgtgtttgcagatgggcagggaattagctgttgctgtacaaaatcttgacatggacctggggaatagaccctgcttgcctcattgtgcgtagctcagatgaagtgtcatttctgtgtcagtccaaatcaaccttgaaggtaagaaggatgatccttaaacagagcccgtcatgaacttgaaaccttctccagacctgctgttcctcgggcttttcgtctgctcccctcgtagcatcttcctcctcatctcccaaagtgtcaggtcagatcctgcccaaacttgaaggcaagaaaacagtaggccctaatcagtcagtgagcaccggtaatgactgtaataactcagacccaaatgagagccctcattatgatctgcatcacgtgggaaggatgctactttgggactgagacgcttgagagacagagattgtgtttcttccattcttggtattccttcagctttcctgccaggcatacaaacctaatagcgcactagtctacatacaattggtactaaataaatacctgcgtgcagtccttcactccactgtaaactctaacatggagccagccaccagatcaagttacagtaattttaccaaccaaagatttatcagacctgggctgctaaggctttgagggggtataaagtgtatttcaggaatgcccagtaaatctcaacaaccagaaacagcataatcctgaaggtgtatctcatgccaaattcttttctttctggcaggcatggacccatgctggcattctcttaaaacacaaatacagtttcctggtgggatgtgcctcaatctcagatgtcatagctcaggtaaatatggtctgtgtgtcaatcagagctcctcagagtccccttctggcgtgtgtaactgatgtgtgatttatattcattcactgtgcagtacactctgcattcgacctggttttgccagcaccgttacatcacatagagacctcaataaatatttgctaaatgaatgagaaaagggaatgccctgtaataacagtatgtataatcttgctagaatatgggttgtaagaatttaaatttaaataaaggggttttgacctttatttttaaagagcatgcacatgagatgagcataaagtcatacctagtacctttcggcatgtcttagggtcactgtttacttgcctgggtgccctctgcgtggcctatcactatgaagtctgtcactctgtcctagagggaaggctcttaggaattattcttcaatgttcttataatcctctgttgttaccatgcagggctgccattcacaggtcacttccccacatttagaaggaaccaggaagtggattcagctacctttccacgcggtctgagaagaaggcctacatcccactttctgttgggtccaattctctgagccctggcactcagccctggctttctgtcctttcttcttctaccaaggatagcgcatgaacaattttagtggaaaaatagattgaattcttatgatttataaattagactaagttcctacagtcagggatttgggagaatgatttcttcatagaggaagaggttagactatatctctaaatgcctttccaaattctcatgtctttttttttttttttttgagacagagtttcgctcttgtcgaatggcacaatctcggctcactgcaacctccactacccaggttcaagtgattctcctgcctcagcctcctgagtagctgggattataggcatctgccaccatgcctggctaatttttgtatttttagtagagatggggcttcttcatattggcgaggttggtctcaaactcctgacctcaggtgatctgcccacctcggcctcccaaagtgctgggattacaggcatgagccaccacgcccagtctcatttctattctatgaatatttccatacatttttcctttcttgtacaccctgctctcttagccaccttcttgaaataatcgactgttgaactgttagtacttccctgaagaccaataatttccagattaatcgtgtttactccgtggatcactattataagtaatttaaatggatttctactaactgtgtgtgtgtgtgtaaatactagcaatactagcaaccaccattctttggtatgtctttgttaattttcttaagagttagtagagaattttgtcccagtcttactttctgtatcctatgggagatgaactaaactgccttattcactctaatcacttcatttgaaattcagtaagcctctctaatttcaaacactggcatcagcaagtcggtgagcatttgtgagcacacatttgtagatgtgtgtttttttaaaggcaaaaaaaaaaaaaaaactcttaactttgcctaaaataaacatagtacccatccaaggacagaagaagaaaagcctatctctgaaaaagactttgccaatacacctacagccattttccttctctattttaaacctgatcctggcccttgcctgttgagggaaggcctgcaagtttagaataaacagatctggttagtgggagcgtggaagccgagttcagatgccatctggcttcaggctgtgcctggtggagtagttattttaaaccttgttgcttgagttcctgccacaatttggctgggggaataaattctctttttaagtcttttaccctcaggcttcctctcattacctgaaaacgtttgttaggtatgaaaacatacctaagttggtagtgagcaaatggattccatgcaaagtactttgaaatatcaccttggcataaatagcacataatcaccaatcaccaatgataaaatggaaatcatttataatgcctcaaatttcaatggcaattctcgaggggggttttttgttttgttttgttttgttttcagattttactaagttaatgggcttcacacaataatacaaaaacctcttggtttgttgcaaccatgcagtgcttttctttgccgtcattattttaacagtgatatgttccagtcaatcattgccaagggattcgtggaaacatattgctgtttttgttttgttccctggtcatctggaccttcttagcttgcttgatatcaaggtgagaattgtcaaggttgtttgctgtctttggactttccatcctgtcactcctctgctatcatcagccctcgcctttcaaggtcagctgacatcccaaggctggtcagatcataatgtgacatcccccgcattcctgtaaattcccttaatctcctgccttttcatctcagccttctgagaaaattcctctgaaccaaccttattgtttaaccaacatcttcctccaattgcgcggtgcttctgcaaaaggttacacaacagaataaactaatcgaactgtaaatgcacaatctcatccttcacctctgctaactctgtagcaactatttcagagagtttctctacctctcaccttccaacataagacctcatttcccacctcacagagtcaactgcagcaaccaaattcgtcaccttccagccaacaaacctacacacttactttccaaccctgcatcctcccaattctcttctcattgtaggggaggaggtgtccctcctcccatccagggccactcctctgggtcctggcctatgctgcttcctcaggaacctgttccctgctttctcgtgcatcgtttcccttgtcctgtcacactcacatgtctgccatgttaacacagcaacgagaagcttcctgtgtatttcacctaactctttagctacagttctatcactttatagccaaacttcttgggagggtggcttctactcactgtctttttcacttctctttcattctctacctacttgaggctgacttccacccccatcagtccacccagatgattcttactaatgactttcctgccattaaacgcagcaggcagctttcctgatctttgctctgttgactacccgctcctcagtcacacactctttcccaccagccctctccccgctgcagtcctggtttttacatgtttcagcttgtttttccattggtatttggccattaaggttgatgtagctcaggaatatgcattgtcctgcttttgttctcagtatgcttctgaggtctttggaatgagtggatcccaggaggactctagacaaaggctgggctgattctctgatttctgcagtacagggaggttaatacagttaagcttgatttagagactgtaccattgaatagagatataaacattattgtaatttcattctctcactctggttatttcaacctattctagttttataggttagtattttaaatgttaatgtaagttgttttataattattactgttggtgttttttggcagcatttttagtgacttttttttgagatagggtctcactgtcacccaggctggagtgcagtggcacgatcaaaactcactgtaacctcaaactcctgagctcaagtgaacctcccacgtcagctaccaaagtagctaggactacgggtgtgcaccacgacacctggctcatttttaaaaatcttttacagagatggggtctcactaagttgcccaggttggtctggaactgctggtctccaacagtcctccagcctcagcctcccaaagcactgagatcacaggtgtgagccatggcacccagcccatttttagtgccttctatcctataaacattaatgtctattttcctgtatatgttatttatcactactgtttttttctttgttaaatgtagcctagtcctcagatgtgtgttacatacacatctgagtgtccagcctcgagagggaaaggctacattaagttggtaatgagtaaatagattccatgcaaagtactttgaaatgccaccttggcataaatagcaagtaatcaccaagcaccaatggtaaaatggaaattatttataatgcctccaatgtcagtggcaattcttgaggggtgtttttttgtttgtttttttgttgttgttttgtttttcaaattttactaagttaatgggtttcacacaatggtacaaaaaatctctcggtttggtgcacacatgcagtgcttctctgtgccgtcattatttgaatagttatatgttccagtaaatcattgccaagggattcctgaaaacatattgcataaatttttttaaagtaataaccttaaaaaagatgccttgaaagatttttgtagttgcttaaaagaattttcatggtgggtataacaaaatgatccatgttcctccagtgaatcccaaacatctgcacatgaattacatgagagcgacattgggtcatcatccaatttttggttctgtttgcataaaagtcaagatctttgctcagaggtctgtctcaggttcaagagcgtgcccctgtgcttctgtcagtcggttcccgcttctcccctctgacctgttcccgttctcccttctctcaggttgtttttgtagccattttgcttcacagtcacctggaatgccgggagcccctgctcatcccgatcctctccttgtacatgggcgcacttgtgcgctgcaccaccctgtgcctgggctactacaagaacattcacgacatcatccctgacagaagtggcccggagctgggggtacgtctaccaacccaacagcagtctgtctgagactcagagtagaataaaactgtattccacctctatgtaaaatgagaaatcagtgacatcaaaacatgaagttggccaggatgtcatacccagaggccaagtgctagatgtctgcagggaaagacagttggaggattaatgaactctaacagatggatgtgatctgagatgtcactgtccagcctccttatcccataggaggagacagaggcacagagaatctgtggccaaggaatagatacgacattcatggtttttcttgctcttataagttattctgcagtcagcaaaggttttaggacccacgatacctttgagtttatatttcattgtgtttgattttacagcagggatccaggctttgtttatgctttcttcaatggccaatcccagtcccttattcaggtgcctcctggggaccaagcacaacgttaggtaccatagggcaacacagaatattttaagatatggtcgctaccctcaagcagcatcatatcccatctggcagatcagaacaatacagaagcaacaattaaacagtcatctgagacagcacatcacctgcatgaggatataggagccacgaacactgggagaaggaacatagtgatgtagtgtaagatgcctccttggaggaggtagatcttgctgtgccctgaaagttgaataagaaacaagtaggaatgagatagagaaccttatagagatgaccaaagcattctgtttgttgtaagtataaacattatctgatttctgtgtgtgctaattttccctacccataggtatgagacatcattaggtttctctgcatttagctgtaaggcatctatagccctgaattcatcccctcacctcaccctgatccctacttgggccgcacattactttgtcgtatcaagcagtaattgttttgaccacttacctccatctgaggtcagactgtcagtaaaatcctatctagttatcccatcactaggccaaccacaaattggtcttgacagtaacaatccatctcttaacatttagccaccagcaaatggaaataaagtgaccaagatggttccatgatgtaactctcacccttgtgaacaatcaaaaccaaaattgcataatgaaagccaggctttaaagatattccacacctttgccacagaagtcttaggaatcccttgttctttacatgcctttattttgattatgcttttgaacagtttacatgatgtctgtgagagctccgagaataagaacctctgtagtcagtttctacactgccagaataattaggcacatttttgtgagctgactgattccaaataacttttttatttctaagagttacctcttcctgacgtggcttccagccagtccatttgatgagattaacaaagacttaatttcaaacctgtttctcaggctcgagatgtgggttctaccttggttagagattccccgagtctcagtatggaaaagagtggttgggatccattaaacttcagtgtgtgttttaatttcacagcagcttgccagctgtctcggttaatttctattaggactgaacattttattttaattcaacttggcttgtctacagacacttttccttatattactttcaagtatagtgaattggcttgtgattaacatacgaaggaaaagctttgattctgaatcgttttttccattctgcttctagagttcaggtaacttttatcttcgtttcttaacacagggagatgcaacaataagaaagatgctgagcttctggtggcctttggctctaattctggccacacagagaatcagtcggcctattgtcaacctctttgtttcccgggaccttggtggcagttctgcagccacagaggtgggccatgctttggggatgtggggcttatgatcaccttggtggggcaggggggtgctgaaactgatttccagttcttctcgagagctcaagtaattccccaatattaaattacatgacagtcacactaggaagccataaagatctcgttcggtgacttatagtcatgtaattgtatatttttatgattatgggagaaaacctgtcatgcatgtcgtacatccttcttgtttatcatatgaggaactgaggcacagaaagaaaaggttaaagacacagaactagctggaagctgggctagtgttagaatccaggttttctgactcccactcagttttccatgtccacggaatcagcactggcctcttcaccgtggtggcagaggatgatggagcatgcatgccacatggcagcagagtgggacacacccagtggctgcaggggcgctgcctccgtgttgacccggcctgccctcacctgcccttcaccatcctgcatgtgccacctgacccgtcaccaccacacccgtgcctggcatgcccacctcagatggggagctccttgattgaacaaactttatctggaaactggcagccactccaaagaaagagttgactcatttttccctctttcaagttgggtttgaacaaatagaattacttcattggcttcctcctccactgccctctggagaattaattccatctctggaactgctggtcccaaggaaggctcatggctgcccacgagggccccctgtccaggcactgccttgaggggagcggcccggagcccttactgcgctgtcagcatgtctccagccagagtgcctgccagtttccatgtcctgggaagctgctcatgttctcctggaaaaagaagcacataaatcaaaagcagaacgctttctcttgcttcatgtgttcctggattttgttttttgaatcataaacatcatcttgggtggctactgtaacacacaggttttgttcttgaatacttcagttcaagtttctcacaaaaagtatgggacccccaccacctgtgtgctagaattccatccacccctttaaaaaaaaagaaaaaggacaaattatacattagagccatttgaaaattgctctcgatggcatataggaacagcacgtggggtacagcactggcatttattggtcatctgctcatgtgccaggcatttatgtacatttccttgactccccagtaaccctatgggatggatattattgttcttactattccaccagagcagcaagaaggggagccgtgggagaggtggtgcttcgcacagctggggagcgatgaggtgaaggtttggatccaggtccgcccgatcccaatgctcctttttgttctagcacagcacgccacaccacactttcttcacattgctggggatttgcctcatgttcctggaacctctggacattgccgttttgttaattaaaacagatgaagctcgttctcctccttcgcaggctaggcagagggttgaacactgccaggatgtaggtttagatgctttgttttcgcttttcttccttttcattcacatagggaagaaactgtcattttattttttcttctttaagaggtggggtcttgctttgtcacccaggtaggagagcagtggtggcacgatcacagctcactgcagcctcaatctcctgggctcaagcgatcctcctgcctcagcctcctaagccaccatgcccaactaatatttgaatttcttttgtagagacggtgtctcgctttgttgtccaggctggtctcgaactcccaggctcaagcaattctccaaccttggcctcccaaagtgctgggattataggcttaagctaccatggctggtcagaaactcatgttttcatggaaacacattgatagctttctgcacaaaatatgtatttaattttcttaaattaaaaatctaaattgggccatactgaccaaattatggtcagaaatcccatacagactgggagtgagttgggttgtaaggagagtagcacggagccatcaacaaccacgcaaaatgtcagcatccctgaaggacggagtggaggcttagaggtgggtcccaaggaagagaccctccagagagcagggagggctcgcagttgcattttgagaatccaaaataaatagagctagactagagggttctgtgtggctcaatggaatgagcaaggattctggagtcaggtggacctgggttgaaatcttggcttctcagagcaatggatggtcttttcccatcttcatagcctacacttgattaaggtgtaataaaacccaaagggagggattgaaaccgtctttgcaaaaatatgactgagacagtgaaagagatctaacttaactgactccatcttgcttccaacctccaagctgtccttgttcattcctgggtgtaggctgaactgactttgggagaaacttacagtttatagtttaaacaaagatggtaacagcactttcccaaagcagacctccttcttgcctggggactagattgcctttgtaggactaacattagccacaagattagaaattatgttttaggaatcatgcagctgggggctacaacattctgatcctccctaaactgctccaaagttcagtgcttattttgcagatcctgcacttgatggatcagctggccccacgcagatcattaaactggctcacctgatcttgttgtggcccctacccaggaactgactgagcacaagaagacagctccgacttcctataatttcatctctgaccccaatgctcggggagactgatatgagtaataataaactctggtctccctcaaaaattaaaagaaagagagaaggaaaaaaaaaaaaaaggaatcttggcttcccagccagtggtctgcacctgtttctcattggatctgcgtaaaatgtgacgcatccccctcgtttcacgtccactttgttggctggctcattgcactcccagggatgaggcagagtacctgcccctaggagcccaatttgctgtcagttccccccgtcctgggccgtcctgtgcttgcctgatgtttgtcacccagtgtagcgggctctgtcctcagtggctgcacctgagtcggcgtgcttcgtcacctactgtagctcctggaggacttcctgctggtaccctgctaactctgccacctcttcctgttgcaggcagtggcgattttgacagccacataccctgtgggtcacatgccatacggctggttgacggaaatccgtgctgtgtatcctgctttcgacaaggtgagaacccgtgcggtgtcgtgtctgaaacatgcttttgaaatgacttcttgatagacagggctctctgatgagggacactttgttgcttctcagtcctgcttccctttgtaaggttaatgtgacgttgggggcattgaaggaatattttcctcagaaaataacaggggcaagttgaagcttacctttgacgctgatcccaggatgcttttccaaagtgatcagcctgtggttactttcaggttattcccattgagaaatgatttgtttgcgaaagggaaaataaacttcccccaaaatcaatttatgggattttatttctgtggtttgtttctttaaacgaatgctttgctgaccccataccagatggctaaggtgtaggcaggaagccgtgcgtggctgtctttctgtgggctggcctacctacatgctcaggttggccacaggcaagacctgggtccagtgttttgatattgcagacgtattccagtggaaagcctgttgacagctgctctgtctccccagccatgggagtcacataacccttctgccctgtaacttgtgacccagtcagcactgtcctgctgtcattcaattaaagtctattttatagcgttatcatttaaacctatagactttttttaatactctaaaacaaatggctggtgaaacatactccaaaaatagtctacagtgttttaaaatgatacacaggaaggaagcaaacagactgctacttcttaccgtgaagggcacctgttgtgccttgaatgtctgcagaactagcagccactgccagcatcacactgtcttatcccagccagagcctgtgaagtgaggagaggaagcctcctggccaggggtgtccacagcgctcagctctggcagaatgggcagcttggccttggaccctgggtaatgctggcccctccctctttcccccaccgccggcctgacctctcctgggcacgggaagccctgggaagccacacaacaaggctaggccacaggctgcaggcctctctccttccttcacgtggccaccagcttccaaaatgcccccctgagaccgtttgtgggttctgagaggggcgaggcctgcggagcagggacctggggaccccctctcccccaccacaccttacagcctggcccaagggcatccccccaggcatctctgaaagtgtgaggtggagacggaggatcaagcctggagtgatcacccacatctgccctcctcctcctctgctcctgcagttcccgagcagtttctctgtgaatgcatgcttgtgcaaacacacacacgtccacctccacacacagcctgctcccacttccccatcagggtattcttccactgccagcccccaggccactcttccctgtctctatcacctgtctcctctatttcccttacccatggtcacgtgggaaagggtaaaccacctgaaaaccagtgagggattcccctgcctaagctaatgggcgatagacccagaaccctgtactgagtgtggaacttcctcagtggaccattagttaggacccaccacctactggactgtgagttaggactcaccacctactgggaatattcagttgcagcatcaggatgcagagcatctcctaagaaatgcttttggttcctgcttcacaggcctttgagagtggactcagaaggcatgagtcacttgctggagagagcagacactgtgtttgagtgggtttaattcagtctatagatagaaatcattgttttcatttcaaggcacgtgtgtatagaagtaaatcctagaaaaccagcatgaatgtatgtcttcttgctaaatttcagttctagctcctgattaataaggtgatcatctgatgaaactgatgagaagggcaagtgctgaagtgttagaacctcctggctgcttaggtctcatctgagattatttttggccaccttgaaatcataaaatttaacaatacaacactgtatggtttcagtaagagcatccaagaaaaacattgttttattcttgatcacagaggctaggagctataaaaaaattcctttaacgagcatacctctcaccagaacttcgagttactccaaatccttttaaaacctcgcccattgtttccaagcattccagcgagctacaccagccatttatatgaatgccgtctattcaccaaaatcttaggcacctccatatggacttccagaatttgctgcattgacagttgaaatcctgagcttctttgtgggctccagaatcagagatttaaaatttctcacataccttccgggagttctagctaagcatgagctgagaaaggtttccactagtgcagatgctctctaatgttcagttacctgcaaaaaaggatgcttctgagccaattgggcaaacaaactgaaactccagtgctaatctaacaatacctgctggtttattttcacgatcttcatgtgaatatgtgccattttgcaaatcacagtgcccctgaaggagctgtggtacgttgctgtccccatggcagtatgtgtgttttgctgaggttccctaattctttccaacataggcctcctcatcgtacccagcagggcagtgctcttacagaatgcagtcctctaacagatccagggtgaatggagacggaggtctccaaccactgggacttgtactttgccatagagcagtctagaaaacagatatgttttagagactagaattaagaaaacgtatactcattcagaggttggtgctggtggtggaagggatttgagaaatgaccttagcctcccagtaaaggaaaagcacaagctcttttccaggtggatcctgtagtagctgtgggtgtgtgtttcacgcggctggatgcggagccaggtgttcagggtttgtttttgtgagtcgactctgggactaattgggtccataatgaggtcagggttatttttctctgccagttttcgtggtctgggggccaggccctcgttttgcaggggtgaggagcacgcttagcagtgcagctggagagcctcggcaggcgcctttgactgtcaagctgggtgacatctgagccccctgcagtcctgcttgaaatgcagtgcagcaggtgttcttggggcatcttttctacgcagatgttgtgctgagtgattcaaggggagacacgcagggcgttatctcagcaagcacagcctcaccggggttggacgcatgacaggacatgatgcctgccctcagagagctccagggtcatcaggctttacaggaggtggggcccagcttggaggtcaaaggtcagagaggctttagggaacagatgagcagtgaagatgatgggccttagaaagagggatgtttttgaaaatcaggattcaatggcaggaggaacaaaagcaccaggtgtgtcaggggaagagcaggaagtcccatctgggctagaagtggagaagtcatggctggaaagtgagtctgtgtcagattgcacaaggccttgaatgcccagtggaatttatagtccatttggtagagaggagaggagccctggaggacactgagcagggccatggcatttagggagatgccgatggtggccaggcacagggtctgctgggaccaggagcggggtgcatggggcaggagcaggcttcagagccaaagccccaggactgggcaagatgggctgcccaggcagaggggaggtgactgagttggaagagctgcagggcattgagtcgagaattcactcaggttaatgatcctgtacagggacctgacagctgcccgagagacactcaacatgacagccgcctggcaaactgtcacttgaaacctctaattcagacacatcagataaaacaaaagcaagatgctcttcaagatcccccggtgggttcagccaaggataagccgggcccattcatgactgtggttttctttccccagaataaccccagcaacaaactggtgagcacgagcaacacagtcacggcagcccacatcaagaagttcaccttcgtctgcatggctctgtcactcacggtaaggacagaggctctctctgcctcttctctctgtttggtttttgtaaaggggcaagttgctattttaaagggggaaatcttattttccacaatgtaatgtgatgctggattaattagcaatctcttcaatacactttcttcttcaaatgtgaacgattgttattcaaggaggcccttgagtctaggaataaaggacccacttcaggcatttcttgggacttctcaaatgctgcagaaaggaagaggttgcctttaattggaatagtacacttgtcttgctgaaaaatttctagcccactttttaaacatcgaaagtcaactttacaaccacccctgtctcttttccaaatttaatccgcgttacttcagtgttccccagtaaaatttcctttccagttatgtttgtgctgacatagcttacttacgtggccatcacgtgcccataggcattgagcccctgcgggatcccaggcccatctgtctgctgaggatacagctgtgagcaagcgtgtgtgacactgtgtcagcagcaaagcctgtctgtatttctatgcgcaaccttaaataaacaacacgcatccttcgttatgaagcccatgtgtgtaattcggatgtgtgcgaacactgataatgttcaaaaaacatggataaaataggtacatgctttatagtccaaaggacgtggtatataatttaaggtttttttagagcgtttatcaacagtggcaaaaaacttaccgtttataaacagccttccgttggagactgtgccctttgggttataaagatggagatgaaaaagacgataagaagaaataagagtcttttgaactcggttctgttttccttgtttattgttgtcacaacacatgtcctattaaatccggtagaaacttactttcgcatatacaatagaaatatttgcagaaatgtcgagatgtgtgcagttgtcattgtcaataactaataaagaggaccggaggccgtgaaggtgttggagtatgccaataacgggagcacaggggctgggtccttcttaccgtcatcacaagaaccgtggagcttgatgagctctgttagtgggccattaaactcaaggcctgcgtacattttaaacctttaatggacattttgaaagcctgcagcttagtatttgatccgttgatccaacacctaattagattgtcacaagggcagtgcccatcacagaagacctctgacactgccgagtcatgacctcgtgtcctcagctgcccttgtcaccaccaacacagccccttttgccagcctgtccctgtggaacacgggggcgttgggaacctattccagcactgcctcactgcagaagaattgctgatagcaatgcctgtttgagcggggccggttccccaggcagccatgctcccctgttagcatgatttctctctgtggtgcccaagcttttccatagttccctaaaacattagcaaaacactgagcaactttgaaaccatttaagagcattttaggcagaacagagcaggtttcttttccaggaaaagacctcagcatttggagactgtgttaaatggctggaaatccaaggttgaattaactctgctgtgaggccctgtgacttggacctcatctgcatataaagctgacaacgcctggctgccgctggctctgcggtccagaaactcacctcctctgtcttctttcatactgtttaacatctttccgctgctagagttgaatctgatggagagctttaccggattgggcttaaggacattcacctctctttcagttcacaggcaataatttatacttctaaaaaaaatattctgcaagtttattttgaaatgataatgacttataatctgggaaaatgcttacatttcccaggtagaggctttatttattattctaatcctctatctaaaaaccatctgtgacttgaagtttctcagggtaaattttcaccttctagaaatagagattcagaaccctttgtcagacaggaacttggagatgaactagtcaaaacccataatttttcagaaaaggaaatgattcacaccggacaagtgacttgtccaagtatccagtaatagaaccggctacagcccagccttcagggcatgctctccagggccctgtgctctgaaccacactgttcccagagagtaggaacaaatattggcccttaggcctccagattggggcgcttgccaccatgcctgaaacagtgattttttgcccattaaaaaccatagtatttgagtttgtggcttaggaagggtctcatgtacaccatccttatgatgattcaatcaattgatccaacatcttggctaaaggagttttcactgaaagacacatagaaaaaaatataaagggagatttttctcttttttttcttttttgagacaaagtctcactccgtcgcccaggctggagtgcaggcgcatgatctcggctcactgcaacctctgcttcccaggttcaaatgattcttctgcctcagcctaccaagtagctgggattacaagcacccgccaccacacccggctgatttttgtgtttttagtagagatggggtttcactatatcggccaggctggtctcgaactcctgacctcaagtgatctgcccgcctcggcctcccaaagtgctgggattacaggcatgagccactgcgcccagccggagatttttctttctaaattaaacattaaactgtccctgtaatgagtactcaccttattctgtctcttactgtattcattcttgtacatcttttgctgctcttgggccccaaacttcatgaggcagggtctgcaatgtcatcttttatccccagggcttagcatcctgcttgacactgagaaaggtcacagtaacaagttaacaaacacaggaatcaactaatccttaattatgagacaccggtcagtaaggtaccgacagcattcacccttgtgaatggcaatcttctcatttatgctcagtctgtattatcgtaaaagcttttaaaaggctcttgattttctagtctattttctttttccttggttttgggtttttttttttaactgtttgtatagaaggggtctcactatgttgctcaggctgatgtcgaattcctggcctcctaaaatgctgggattagaggcatgagccactgcccctggcctgtttttgtttttttgaattttgaaacttcgtaatatcaggaaattaatgtagcagaggtcattgaaacgcttgagagcagcacacttggtgtttatttcagcagatgattctgtgtatacagtaggagctgcgtgatgatgccacagccctccacgcattggccaacgttagcacgctttcccacactccgctgctttgggaaaatcagctttatccctgagtcttttgagaagagctgacccccaggatcctgtagacacccaatgactcagtgattcaaaggaaaacgtatactgtccagaatcaaaatgcatccttccctcagaacagccccctttccaggccctgacatttgagttcaacaccgcctttgcctgtgaaaaataccgcggtgtcactgctgacagttagtaagaggctcatttcagcatgttacaatgacgtgtttgtttattccctattacacattttctatttaaatttagagtatctgtcctactccagaagttggttctgcccttgtactcttatccagcagttttgttgatcactgggttttaagaaaagcagcagatgtcttctgcccagtgtggaagaggggctgaagtcagaggggtgtagagtaggaaaatggaaatgttcgccatttccgttagcatcttgctttcagtccttcagagctgcggttaggcatgcttagccggaggttgattgatctctctaaaccatctgatgggcatgaggatgagaaagggggtacctttagttgatccaaaagattggcttcaaaacagtagaactgtcagatgaaacggaatccccttgatagcaacgagggagcagacacagtgcaaacccaggttagcaaggcgcctgctgactgacaagcagctgtttggggtgaagggaagcacatttcaaaaatatatgtggcataaagccatttggaagaacagcttcagagggtctgctttcacgtggaagcgtgcagggttgcagccacgcaaaggagactgcgtcgcagcctcgccatgcaaggtgtctccactggtgctggagtcagagccagtggtcgccttgccctgagccttcctggacagctgcggtctctgtcgctcatgtgactggctgtagaacacagtgacagtgagtgtgccctaaaaggctgtgcttctctaggtagacactcctggagccacaggctgaggcagcagtgagctcacaagagaggagcaggcaccacagtccttcctcttacgtggggaaggcagctgcagtgctgaacttacagaaacccagcctcctacaaacccctggggcctatcatggtgccctcctggactctagaagtggggataagatagaaaccactcaccggcatgggctgtatcttccaacagtccttttggtggggaagaaatgtcccaaaagagtgacggacctccctattcctgcatgccaggccaagtggtgaaagccagcccatcgggctgctaagtttaccaaatttgccaatttacccaaaacatgactttttaaaactgtttctgaagtccatagccaatcatattttaataaacagaagtttttaacacctttggatgcttttagttgactagtttccattttgatttcacaatggcattttcagaacatctgctgtttatcttctcaagctccctgctctgctgtactttggggagttagtgccaagagagggggaccctctgcttcaggagacatagagaagaatccatgcaaagcacaggcttggcctctgctaagcctccccaaaccattagcacacaatggaaatgggatctctccagatggatcttggcaagcagagccagccaggcacttttgtgcagtgcacgaactacacgactatacccagcacccctgggatgccacattcagagaaagtcagagaagggggagaacaaggatcagggaaaggagagtgactgaatgtcagagaggtggagtagcgtgaaggtcagaaggagaagggagagagactggtcagaaaaagaggggaggtgacgactcagagaaaactggagcagaatggcagaggtggggttacagacagggaaaatggaggccccagagaccctggggccctcccagcccttgggaccctgccaatccttcctgtaaaaaatggctataaactttagaagagtttaaaagagacaagatcttaaaactcagaaaatttgacaatttgttggttggccaaattggttatccaccggttgatttttggcgagctgacctgtttcaagatggcaggtgtggatgggactctgtccagggctggccccacacacccacattctgatgacgcagaggtcatgggactgtgccagggcgccccagactacatccactggtccccaaataactggtttcactggcttcaacacatggaggctgcttgatgtggtgggggtagggaggtgttgctgtcacttgaggcagagagagaaggaagcctggccacgctggcacagtgtgccaatcaaaccacgtggcctcatgcaatagagtgcaagggtatccgaggtcaatggctgtttgtatttaaggatctgattctttaaaaaaaaaaaaaaaaaaaaaaaaaaaaaaaa

SEQ ID NO: 2147 - DNA, 32193 bp, Homo sapiens
agcttatagtgatttaggatactacattatcaataaactgcaccatgtggacgagtcggtggggagcaagacgagaagggccttcctgtacctcgccgcctttcctttcatggacgcaatggtgagtagagaagatcgttggctttctttctttttctttaactggtggtaaaatatacataatataaaatctaccattttagctatttttgtgtgtacagcttaatggcaggaagtacattcacattattgtgtaaccaatcttcagaactcttcatcttgcaaaactgagattctatcctaattcaacagtaaccctcctcggccccctccccagctctgggcaacctccattctactttgtaactctacaaattggactacttgagatacctcaaaagagtggaatcatacagcgtttgtacttttgtaattggcgtatttcactgagcgtgtcttcagagtttaacaatgtagtagcaggtgtcagaatttccttcctttttaaggctgagtcactttccagtgaatgtctaggccacatcttgtgtatccgttcgtcagctgatggacacttgcgttgcttccacctttgggttcttgtgactaacgctgctatgaacgtgagtgtgcaaatatctgagtccttgtttttggttctttggggtatatacccagaagtggaattgctggatcatacagaaatttgatttttgattttttgaggaattagcagactgatcttcgtagcagctataccaccatcagagtactcaggttccaattgtctgttgacttttaaccagtccatcttgtcaatttatttaattttgccacaagttctggtaggtggcaggaaagcccatttgaaaattttgatgcagataaacagttcttttctgatatactcaggatcaaaggatcagaatcactttctgataaacttaccacttgtgtggcacagacacccagagttttagagtaagaatctgttgaacatactggtagggtttcattattttaataaccaacttcaccccattagctcagggctgcccacttccataaattctttgtcatgattctgaggagtgcttaaacagtgcttttcattctcttctgctgtcttataaatataaaaaagacttagcaaaaaaaaaaaaaaaaaatatatatatatatatatgttccaataaggtccaatgctggaaagtaaaccctttcctttggctccatttcgaattattcttggaaggagacttaaaaatatgttagtctgtatagttttttttaccacccccacctcaagtttatatgcagttagatgcatgatgtaagtgcataactggcttccctgcggtgcctgagctagcccatggtggtagcccagttagagaactgaaggaggtggcctttctgacatccctaaagagtcaaagcccagcttcctggacaggtccgtgtcattcctctgaggtctgtcctcccatctgtgttgaagtgggaatctacacacatagaagaattacagttatacggtgaattccaggaactcaggactgttagtaaaagtgaattgcagattcttaaggacctggtattccatgtccctttagctatatttatttgccataagagagtttctgaaatcaaatagaacaccagaacatttgtaattggtactcttttcttccatgtttcttctgtaagttcccccagagaccctggtataacagcaagagatggcttataaaaatgaaaataatgaacatttataaggaccagatcaactcctccctccccaccccctcacccctggcagcttggcgctgatatattggttggagagagaatatttaaagccagcaagcttattgtatggtggctttcagacaacaaagccagcccacagctgtgtttgcagatgggcagggaattagctgttgctgtacaaaatcttgacatggacctggggaatagaccctgcttgcctcattgtgcgtagctcagatgaagtgtcatttctgtgtcagtccaaatcaaccttgaaggtaagaaggatgatccttaaacagagcccgtcatgaacttgaaaccttctccagacctgctgttcctcgggcttttcgtctgctcccctcgtagcatcttcctcctcatctcccaaagtgtcaggtcagatcctgcccaaacttgaaggcaagaaaacagtaggccctaatcagtcagtgagcaccggtaatgactgtaataactcagacccaaatgagagccctcattatgatctgcatcacgtgggaaggatgctactttgggactgagacgcttgagagacagagattgtgtttcttccattcttggtattccttcagctttcctgccaggcatacaaacctaatagcgcactagtctacatacaattggtactaaataaatacctgcgtgcagtccttcactccactgtaaactctaacatggagccagccaccagatcaagttacagtaattttaccaaccaaagatttatcagacctgggctgctaaggctttgagggggtataaagtgtatttcaggaatgcccagtaaatctcaacaaccagaaacagcataatcctgaaggtgtatctcatgccaaattcttttctttctggcaggcatggacccatgctggcattctcttaaaacacaaatacagtttcctggtgggatgtgcctcaatctcagatgtcatagctcaggtaaatatggtctgtgtgtcaatcagagctcctcagagtccccttctggcgtgtgtaactgatgtgtgatttatattcattcactgtgcagtacactctgcattcgacctggttttgccagcaccgttacatcacatagagacctcaataaatatttgctaaatgaatgagaaaagggaatgccctgtaataacagtatgtataatcttgctagaatatgggttgtaagaatttaaatttaaataaaggggttttgacctttatttttaaagagcatgcacatgagatgagcataaagtcatacctagtacctttcggcatgtcttagggtcactgtttacttgcctgggtgccctctgcgtggcctatcactatgaagtctgtcactctgtcctagagggaaggctcttaggaattattcttcaatgttcttataatcctctgttgttaccatgcagggctgccattcacaggtcacttccccacatttagaaggaaccaggaagtggattcagctacctttccacgcggtctgagaagaaggcctacatcccactttctgttgggtccaattctctgagccctggcactcagccctggctttctgtcctttcttcttctaccaaggatagcgcatgaacaattttagtggaaaaatagattgaattcttatgatttataaattagactaagttcctacagtcagggatttgggagaatgatttcttcatagaggaagaggttagactatatctctaaatgcctttccaaattctcatgtctttttttttttttttttgagacagagtttcgctcttgtcgaatggcacaatctcggctcactgcaacctccactacccaggttcaagtgattctcctgcctcagcctcctgagtagctgggattataggcatctgccaccatgcctggctaatttttgtatttttagtagagatggggcttcttcatattggcgaggttggtctcaaactcctgacctcaggtgatctgcccacctcggcctcccaaagtgctgggattacaggcatgagccaccacgcccagtctcatttctattctatgaatatttccatacatttttcctttcttgtacaccctgctctcttagccaccttcttgaaataatcgactgttgaactgttagtacttccctgaagaccaataatttccagattaatcgtgtttactccgtggatcactattataagtaatttaaatggatttctactaactgtgtgtgtgtgtgtaaatactagcaatactagcaaccaccattctttggtatgtctttgttaattttcttaagagttagtagagaattttgtcccagtcttactttctgtatcctatgggagatgaactaaactgccttattcactctaatcacttcatttgaaattcagtaagcctctctaatttcaaacactggcatcagcaagtcggtgagcatttgtgagcacacatttgtagatgtgtgtttttttaaaggcaaaaaaaaaaaaaaaactcttaactttgcctaaaataaacatagtacccatccaaggacagaagaagaaaagcctatctctgaaaaagactttgccaatacacctacagccattttccttctctattttaaacctgatcctggcccttgcctgttgagggaaggcctgcaagtttagaataaacagatctggttagtgggagcgtggaagccgagttcagatgccatctggcttcaggctgtgcctggtggagtagttattttaaaccttgttgcttgagttcctgccacaatttggctgggggaataaattctctttttaagtcttttaccctcaggcttcctctcattacctgaaaacgtttgttaggtatgaaaacatacctaagttggtagtgagcaaatggattccatgcaaagtactttgaaatatcaccttggcataaatagcacataatcaccaatcaccaatgataaaatggaaatcatttataatgcctcaaatttcaatggcaattctcgaggggggttttttgttttgttttgttttgttttcagattttactaagttaatgggcttcacacaataatacaaaaacctcttggtttgttgcaaccatgcagtgcttttctttgccgtcattattttaacagtgatatgttccagtcaatcattgccaagggattcgtggaaacatattgctgtttttgttttgttccctggtcatctggaccttcttagcttgcttgatatcaaggtgagaattgtcaaggttgtttgctgtctttggactttccatcctgtcactcctctgctatcatcagccctcgcctttcaaggtcagctgacatcccaaggctggtcagatcataatgtgtacatcccccgcattcctgtaaattcccttatctcctgccttttcatctcagccttctgagaaaattcctctgaaccaaccttatgttacacatcttcctccaattgcgcggtgcttctgcaaaaggttacacaacagaataaactaatcgaactgtaaatgcacaatctcatccttcacctctgctaactctgtagcaactatttcagagagtttctctacctctcaccttccaacataagacctcatttcccacctcacagagtcaactgcagcaaccaaattcgtcaccttccagccaacaaacctacacacttactttccaaccctgcatcctcccaattctcttctcattgtaggggaggaggtgtccctcctcccatccagggccactcctctgggtcctggcctatgctgcttcctcaggaacctgttccctgctttctcgtgcatcgtttcccttgtcctgtcacactcacatgtctgccatgttaacacagcaacgagaagcttcctgtgtatttcacctaactctttagctacagttctatcactttatagccaaacttcttgggagggtggcttctactcactgtctttttcacttctctttcattctctacctacttgaggctgacttccacccccatcagtccacccagatgattcttactaatgactttcctgccattaaacgcagcaggcagctttcctgatctttgctctgttgactacccgctcctcagtcacacactctttcccaccagccctctccccgctgcagtcctggtttttacatgtttcagcttgtttttccattggtatttggccattaaggttgatgtagctcaggaatatgcattgtcctgcttttgttctcagtatgcttctgaggtctttggaatgagtggatcccaggaggactctagacaaaggctgggctgattctctgatttctgcagtacagggaggttaatacagttaagcttgatttagagactgtaccattgaatagagatataaacattattgtaatttcattctctcactctggttatttcaacctattctagttttataggttagtattttaaatgttaatgtaagttgttttataattattactgttggtgttttttggcagcatttttagtgacttttttttgagatagggtctcactgtcacccaggctggagtgcagtggcacgatcaaaactcactgtaacctcaaactcctgagctcaagtgaacctcccacgtcagctaccaaagtagctaggactacgggtgtgcaccacgacacctggctcatttttaaaaatcttttacagagatggggtctcactaagttgcccaggttggtctggaactgctggtctccaacagtcctccagcctcagcctcccaaagcactgagatcacaggtgtgagccatggcacccagcccatttttagtgccttctatcctataaacattaatgtctattttcctgtatatgttatttatcactactgtttttttctttgttaaatgtagcctagtcctcagatgtgtgttacatacacatctgagtgtccagcctcgagagggaaaggctacattaagttggtaatgagtaaatagattccatgcaaagtactttgaaatgccaccttggcataaatagcaagtaatcaccaagcaccaatggtaaaatggaaattatttataatgcctccaatgtcagtggcaattcttgaggggtgtttttttgtttgtttttttgttgttgttttgtttttcaaattttactaagttaatgggtttcacacaatggtacaaaaaatctctcggtttggtgcacacatgcagtgcttctctgtgccgtcattatttgaatagttatatgttccagtaaatcattgccaagggattcctgaaaacatattgcataaatttttttaaagtaataaccttaaaaaagatgccttgaaagatttttgtagttgcttaaaagaattttcatggtgggtataacaaaatgatccatgttcctccagtgaatcccaaacatctgcacatgaattacatgagagcgacattgggtcatcatccaatttttggttctgtttgcataaaagtcaagatctttgctcagaggtctgtctcaggttcaagagcgtgcccctgtgcttctgtcagtcggttcccgcttctcccctctgacctgttcccgttctcccttctctcaggttgtttttgtagccattttgcttcacagtcacctggaatgccgggagcccctgctcatcccgatcctctccttgtacatgggcgcacttgtgcgctgcaccaccctgtgcctgggctactacaagaacattcacgacatcatccctgacagaagtggcccggagctgggggtacgtctaccaacccaacagcagtctgtctgagactcagagtagaataaaactgtattccacctctatgtaaaatgagaaatcagtgacatcaaaacatgaagttggccaggatgtcatacccagaggccaagtgctagatgtctgcagggaaagacagttggaggattaatgaactctaacagatggatgtgatctgagatgtcactgtccagcctccttatcccataggaggagacagaggcacagagaatctgtggccaaggaatagatacgacattcatggtttttcttgctcttataagttattctgcagtcagcaaaggttttaggacccacgatacctttgagtttgtatttcattgtgtttgattttacagcagggatccaggctttgtttatgctttcttcaatggccaatcccagtcccttattcaggtgcctcctggggaccaagcacaacgttaggtaccatagggcaacacagaatattttaagatatggtcgctaccctcaagcagcatcatatcccatctggcagatcagaacaatacagaagcaacaattaaacagtcatctgagacagcacatcacctgcatgaggatataggagccacgaacactgggagaaggaacatagtgatgtagtgtaagatgcctccttggaggaggtagatcttgctgtgccctgaaagttgaataagaaacaagtaggaatgagatagagaaccttatagagatgaccaaagcattctgtttgttgtaagtataaacattatctgatttctgtgtgtgctaattttccctacccataggtatgagacatcattaggtttctctgcatttagctgtaaggcatctatagccctgaattcatcccctcacctcaccctgatccctacttgggccgcacattactttgtcgtatcaagcagtaattgttttgaccacttacctccatctgaggtcagactgtcagtaaaatcctatctagttatcccatcactaggccaaccacaaattggtcttgacagtaacaatccatctcttaacatttagccaccagcaaatggaaataaagtgaccaagatggttccatgatgtaactctcacccttgtgaacaatcaaaaccaaaattgcataatgaaagccaggctttaaagatattccacacctttgccacagaagtcttaggaatcccttgttctttacatgcctttattttgattatgcttttgaacagtttacatgatgtctgtgagagctccgagaataagaacctctgtagtcagtttctacactgccagaataattaggcacatttttgtgagctgactgattccaaataacttttttatttctaagagttacctcttcctgacgtggcttccagccagtccatttgatgagattaacaaagacttaatttcaaacctgtttctcaggctcgagatgtgggttctaccttggttagagattccccgagtctcagtatggaaaagagtggttgggatccattaaacttcagtgtgtgttttaatttcacagcagcttgccagctgtctcggttaatttctattaggactgaacattttattttaattcaacttggcttgtctacagacacttttccttatattactttcaagtatagtgaattggcttgtgattaacatacgaaggaaaagctttgattctgaatcgttttttccattctgcttctagagttcaggtaacttttatcttcgtttcttaacacagggagatgcaacaataagaaagatgctgagcttctggtggcctttggctctaattctggccacacagagaatcagtcggcctattgtcaacctctttgtttcccgggaccttggtggcagttctgcagccacagaggtgggccatgctttggggatgtggggcttatgatcaccttggtggggcaggggggtgctgaaactgatttccagttcttctcgagagctcaagtaattccccaatattaaattacatgacagtcacactaggaagccataaagatctcgttcggtgacttatagtcatgtaattgtatatttttatgattatgggagaaaacctgtcatgcatgtcgtacatccttcttgtttatcatatgaggaactgaggcacagaaagaaaaggttaaagacacagaactagctggaagctgggctagtgttagaatccaggttttctgactcccactcagttttccatgtccacggaatcagcactggcctcttcaccgtggtggcagaggatgatggagcatgcatgccacatggcagcagagtgggacacacccagtggctgcaggggcgctgcctccgtgttgacccggcctgccctcacctgcccttcaccatcctgcatgtgccacctgacccgtcaccaccacacccgtgcctggcatgcccacctcagatggggagctccttgattgaacaaactttatctggaaactggcagccactccaaagaaagagttgactcatttttccctctttcaagttgggtttgaacaaatagaattacttcattggcttcctcctccactgccctctggagaattaattccatctctggaactgctggtcccaaggaaggctcatggctgcccacgagggccccctgtccaggcactgccttgaggggagcggcccggagcccttactgcgctgtcagcatgtctccagccagagtgcctgccagtttccatgtcctgggaagctgctcatgttctcctggaaaaagaagcacataaatcaaaagcagaacgctttctcttgcttcatgtgttcctggattttgttttttgaatcataaacatcatcttgggtggctactgtaacacacaggttttgttcttgaatacttcagttcaagtttctcacaaaaagtatgggacccccaccacctgtgtgctagaattccatccacccctttaaaaaaaaagaaaaaggacaaattatacattagagccatttgaaaattgctctcgatggcatataggaacagcacgtggggtacagcactggcatttattggtcatctgctcatgtgccaggcatttatgtacatttccttgactccccagtaaccctatgggatggatattattgttcttactattccaccagagcagcaagaaggggagccgtgggagaggtggtgcttcgcacagctggggagcgatgaggtgaaggtttggatccaggtccgcccgatcccaatgctcctttttgttctagcacagcacgccacaccacactttcttcacattgctggggatttgcctcatgttcctggaacctctggacattgccgttttgttaattaaaacagatgaagctcgttctcctccttcgcaggctaggcagagggttgaacactgccaggatgtaggtttagatgctttgttttcgcttttcttccttttcattcacatagggaagaaactgtcattttattttttcttctttaagaggtggggtcttgctttgtcacccaggtaggagagcagtggtggcacgatcacagctcactgcagcctcaatctcctgggctcaagcgatcctcctgcctcagcctcctaagccaccatgcccaactaatatttgaatttcttttgtagagacggtgtctcgctttgttgtccaggctggtctcgaactcccaggctcaagcaattctccaaccttggcctcccaaagtgctgggattataggcttaagctaccatggctggtcagaaactcatgttttcatggaaacacattgatagctttctgcacaaaatatgtatttaattttcttaaattaaaaatctaaattgggccatactgaccaaattatggtcagaaatcccatacagactgggagtgagttgggttgtaaggagagtagcacggagccatcaacaaccacgcaaaatgtcagcatccctgaaggacggagtggaggcttagaggtgggtcccaaggaagagaccctccagagagcagggagggctcgcagttgcattttgagaatccaaaataaatagagctagactagagggttctgtgtggctcaatggaatgagcaaggattctggagtcaggtggacctgggttgaaatcttggcttctcagagcaatggatggtcttttcccatcttcatagcctacacttgattaaggtgtaataaaacccaaagggagggattgaaaccgtctttgcaaaaatatgactgagacagtgaaagagatctaacttaactgactccatcttgcttccaacctccaagctgtccttgttcattcctgggtgtaggctgaactgactttgggagaaacttacagtttatagtttaaacaaagatggtaacagcactttcccaaagcagacctccttcttgcctggggactagattgcctttgtaggactaacattagccacaagattagaaattatgttttaggaatcatgcagctgggggctacaacattctgatcctccctaaactgctccaaagttcagtgcttattttgcagatcctgcacttgatggatcagctggccccacgcagatcattaaactggctcacctgatcttgttgtggcccctacccaggaactgactgagcacaagaagacagctccgacttcctataatttcatctctgaccccaatgctcggggagactgatatgagtaataataaactctggtctccctcaaaaattaaaagaaagagagaaggaaaaaaaaaaaaaaggaatcttggcttcccagccagtggtctgcacctgtttctcattggatctgcgtaaaatgtgacgcatccccctcgtttcacgtccactttgttggctggctcattgcactcccagggatgaggcagagtacctgcccctaggagcccaatttgctgtcagttccccccgtcctgggccgtcctgtgcttgcctgatgtttgtcacccagtgtagcgggctctgtcctcagtggctgcacctgagtcggcgtgcttcgtcacctactgtagctcctggaggacttcctgctggtaccctgctaactctgccacctcttcctgttgcaggcagtggcgattttgacagccacataccctgtgggtcacatgccatacggctggttgacggaaatccgtgctgtgtatcctgctttcgacaaggtgagaacccgtgcggtgtcgtgtctgaaacatgcttttgaaatgacttcttgatagacagggctctctgatgagggacactttgttgcttctcagtcctgcttccctttgtaaggttaatgtgacgttgggggcattgaaggaatattttcctcagaaaataacaggggcaagttgaagcttacctttgacgctgatcccaggatgcttttccaaagtgatcagcctgtggttactttcaggttattcccattgagaaatgatttgtttgcgaaagggaaaataaacttcccccaaaatcaatttatgggattttatttctgtggtttgtttctttaaacgaatgctttgctgaccccataccagatggctaaggtgtaggcaggaagccgtgcgtggctgtctttctgtgggctggcctacctacatgctcaggttggccacaggcaagacctgggtccagtgttttgatattgcagacgtattccagtggaaagcctgttgacagctgctctgtctccccagccatgggagtcacataacccttctgccctgtaacttgtgacccagtcagcactgtcctgctgtcattcaattaaagtctattttatagcgttatcatttaaacctatagactttttttaatactctaaaacaaatggctggtgaaacatactccaaaaatagtctacagtgttttaaaatgatacacaggaaggaagcaaacagactgctacttcttaccgtgaagggcacctgttgtgccttgaatgtctgcagaactagcagccactgccagcatcacactgtcttatcccagccagagcctgtgaagtgaggagaggaagcctcctggccaggggtgtccacagcgctcagctctggcagaatgggcagcttggccttggaccctgggtaatgctggcccctccctctttcccccaccgccggcctgacctctcctgggcacgggaagccctgggaagccacacaacaaggctaggccacaggctgcaggcctctctccttccttcacgtggccaccagcttccaaaatgcccccctgagaccgtttgtgggttctgagaggggcgaggcctgcggagcagggacctggggaccccctctcccccaccacaccttacagcctggcccaagggcatccccccaggcatctctgaaagtgtgaggtggagacggaggatcaagcctggagtgatcacccacatctgccctcctcctcctctgctcctgcagttcccgagcagtttctctgtgaatgcatgcttgtgcaaacacacacacgtccacctccacacacagcctgctcccacttccccatcagggtattcttccactgccagcccccaggccactcttccctgtctctatcacctgtctcctctatttcccttacccatggtcacgtgggaaagggtaaaccacctgaaaaccagtgagggattcccctgcctaagctaatgggcgatagacccagaaccctgtactgagtgtggaacttcctcagtggaccattagttaggacccaccacctactggactgtgagttaggactcaccacctactgggaatattcagttgcagcatcaggatgcagagcatctcctaagaaatgcttttggttcctgcttcacaggcctttgagagtggactcagaaggcatgagtcacttgctggagagagcagacactgtgtttgagtgggtttaattcagtctatagatagaaatcattgttttcatttcaaggcacgtgtgtatagaagtaaatcctagaaaaccagcatgaatgtatgtcttcttgctaaatttcagttctagctcctgattaataaggtgatcatctgatgaaactgatgagaagggcaagtgctgaagtgttagaacctcctggctgcttaggtctcatctgagattatttttggccaccttgaaatcataaaatttaacaatacaacactgtatggtttcagtaagagcatccaagaaaaacattgttttattcttgatcacagaggctaggagctataaaaaaattcctttaacgagcatacctctcaccagaacttcgagttactccaaatccttttaaaacctcgcccattgtttccaagcattccagcgagctacaccagccatttatatgaatgccgtctattcaccaaaatcttaggcacctccatatggacttccagaatttgctgcattgacagttgaaatcctgagcttctttgtgggctccagaatcagagatttaaaatttctcacataccttccgggagttctagctaagcatgagctgagaaaggtttccactagtgcagatgctctctaatgttcagttacctgcaaaaaaggatgcttctgagccaattgggcaaacaaactgaaactccagtgctaatctaacaatacctgctggtttattttcacgatcttcatgtgaatatgtgccattttgcaaatcacagtgcccctgaaggagctgtggtacgttgctgtccccatggcagtatgtgtgttttgctgaggttccctaattctttccaacataggcctcctcatcgtacccagcagggcagtgctcttacagaatgcagtcctctaacagatccagggtgaatggagacggaggtctccaaccactgggacttgtactttgccatagagcagtctagaaaacagatatgttttagagactagaattaagaaaacgtatactcattcagaggttggtgctggtggtggaagggatttgagaaatgaccttagcctcccagtaaaggaaaagcacaagctcttttccaggtggatcctgtagtagctgtgggtgtgtgtttcacgcggctggatgcggagccaggtgttcagggtttgtttttgtgagtcgactctgggactaattgggtccataatgaggtcagggttatttttctctgccagttttcgtggtctgggggccaggccctcgttttgcaggggtgaggagcacgcttagcagtgcagctggagagcctcggcaggcgcctttgactgtcaagctgggtgacatctgagccccctgcagtcctgcttgaaatgcagtgcagcaggtgttcttggggcatcttttctacgcagatgttgtgctgagtgattcaaggggagacacgcagggcgttatctcagcaagcacagcctcaccggggttggacgcatgacaggacatgatgcctgccctcagagagctccagggtcatcaggctttacaggaggtggggcccagcttggaggtcaaaggtcagagaggctttagggaacagatgagcagtgaagatgatgggccttagaaagagggatgtttttgaaaatcaggattcaatggcaggaggaacaaaagcaccaggtgtgtcaggggaagagcaggaagtcccatctgggctagaagtggagaagtcatggctggaaagtgagtctgtgtcagattgcacaaggccttgaatgcccagtggaatttatagtccatttggtagagaggagaggagccctggaggacactgagcagggccatggcatttagggagatgccgatggtggccaggcacagggtctgctgggaccaggagcggggtgcatggggcaggagcaggcttcagagccaaagccccaggactgggcaagatgggctgcccaggcagaggggaggtgactgagttggaagagctgcagggcattgagtcgagaattcactcaggttaatgatcctgtacagggacctgacagctgcccgagagacactcaacatgacagccgcctggcaaactgtcacttgaaacctctaattcagacacatcagataaaacaaaagcaagatgctcttcaagatcccccggtgggttcagccaaggataagccgggcccattcatgactgtggttttctttccccagaataaccccagcaacaaactggtgagcacgagcaacacagtcacggcagcccacatcaagaagttcaccttcgtctgcatggctctgtcactcacggtaaggacagaggctctctctgcctcttctctctgtttggtttttgtaaaggggcaagttgctattttaaagggggaaatcttattttccacaatgtaatgtgatgctggattaattagcaatctcttcaatacactttcttcttcaaatgtgaacgattgttattcaaggaggcccttgagtctaggaataaaggacccacttcaggcatttcttgggacttctcaaatgctgcagaaaggaagaggttgcctttaattggaatagtacacttgtcttgctgaaaaatttctagcccactttttaaacatcgaaagtcaactttacaaccacccctgtctcttttccaaatttaatccgcgttacttcagtgttccccagtaaaatttcctttccagttatgtttgtgctgacatagcttacttacgtggccatcacgtgcccataggcattgagcccctgcgggatcccaggcccatctgtctgctgaggatacagctgtgagcaagcgtgtgtgacactgtgtcagcagcaaagcctgtctgtatttctatgcgcaaccttaaataaacaacacgcatccttcgttatgaagcccatgtgtgtaattcggatgtgtgcgaacactgataatgttcaaaaaacatggataaaataggtacatgctttatagtccaaaggacgtggtatataatttaaggtttttttagagcgtttatcaacagtggcaaaaaacttaccgtttataaacagccttccgttggagactgtgccctttgggttataaagatggagatgaaaaagacgataagaagaaataagagtcttttgaactcggttctgttttccttgtttattgttgtcacaacacatgtcctattaaatccggtagaaacttactttcgcatatacaatagaaatatttgcagaaatgtcgagatgtgtgcagttgtcattgtcaataactaataaagaggaccggaggccgtgaaggtgttggagtatgccaataacgggagcacaggggctgggtccttcttaccgtcatcacaagaaccgtggagcttgatgagctctgttagtgggccattaaactcaaggcctgcgtacattttaaacctttaatggacattttgaaagcctgcagcttagtatttgatccgttgatccaacacctaattagattgtcacaagggcagtgcccatcacagaagacctctgacactgccgagtcatgacctcgtgtcctcagctgcccttgtcaccaccaacacagccccttttgccagcctgtccctgtggaacacgggggcgttgggaacctattccagcactgcctcactgcagaagaattgctgatagcaatgcctgtttgagcggggccggttccccaggcagccatgctcccctgttagcatgatttctctctgtggtgcccaagcttttccatagttccctaaaacattagcaaaacactgagcaactttgaaaccatttaagagcattttaggcagaacagagcaggtttcttttccaggaaaagacctcagcatttggagactgtgttaaatggctggaaatccaaggttgaattaactctgctgtgaggccctgtgacttggacctcatctgcatataaagctgacaacgcctggctgccgctggctctgcggtccagaaactcacctcctctgtcttctttcatactgtttaacatctttccgctgctagagttgaatctgatggagagctttaccggattgggcttaaggacattcacctctctttcagttcacaggcaataatttatacttctaaaaaaaatattctgcaagtttattttgaaatgataatgacttataatctgggaaaatgcttacatttcccaggtagaggctttatttattattctaatcctctatctaaaaaccatctgtgacttgaagtttctcagggtaaattttcaccttctagaaatagagattcagaaccctttgtcagacaggaacttggagatgaactagtcaaaacccataatttttcagaaaaggaaatgattcacaccggacaagtgacttgtccaagtatccagtaatagaaccggctacagcccagccttcagggcatgctctccagggccctgtgctctgaaccacactgttcccagagagtaggaacaaatattggcccttaggcctccagattggggcgcttgccaccatgcctgaaacagtgattttttgcccattaaaaaccatagtatttgagtttgtggcttaggaagggtctcatgtacaccatccttatgatgattcaatcaattgatccaacatcttggctaaaggagttttcactgaaagacacatagaaaaaaatataaagggagatttttctcttttttttcttttttgagacaaagtctcactccgtcgcccaggctggagtgcaggcgcatgatctcggctcactgcaacctctgcttcccaggttcaaatgattcttctgcctcagcctaccaagtagctgggattacaagcacccgccaccacacccggctgatttttgtgtttttagtagagatggggtttcactatatcggccaggctggtctcgaactcctgacctcaagtgatctgcccgcctcggcctcccaaagtgctgggattacaggcatgagccactgcgcccagccggagatttttctttctaaattaaacattaaactgtccctgtaatgagtactcaccttattctgtctcttactgtattcattcttgtacatcttttgctgctcttgggccccaaacttcatgaggcagggtctgcaatgtcatcttttatccccagggcttagcatcctgcttgacactgagaaaggtcacagtaacaagttaacaaacacaggaatcaactaatccttaattatgagacaccggtcagtaaggtaccgacagcattcacccttgtgaatggcaatcttctcatttatgctcagtctgtattatcgtaaaagcttttaaaaggctcttgattttctagtctattttctttttccttggttttgggtttttttttttaactgtttgtatagaaggggtctcactatgttgctcaggctgatgtcgaattcctggcctcctaaaatgctgggattagaggcatgagccactgcccctggcctgtttttgtttttttgaattttgaaacttcgtaatatcaggaaattaatgtagcagaggtcattgaaacgcttgagagcagcacacttggtgtttatttcagcagatgattctgtgtatacagtaggagctgcgtgatgatgccacagccctccacgcattggccaacgttagcacgctttcccacactccgctgctttgggaaaatcagctttatccctgagtcttttgagaagagctgacccccaggatcctgtagacacccaatgactcagtgattcaaaggaaaacgtatactgtccagaatcaaaatgcatccttccctcagaacagccccctttccaggccctgacatttgagttcaacaccgcctttgcctgtgaaaaataccgcggtgtcactgctgacagttagtaagaggctcatttcagcatgttacaatgacgtgtttgtttattccctattacacattttctatttaaatttagagtatctgtcctactccagaagttggttctgcccttgtactcttatccagcagttttgttgatcactgggttttaagaaaagcagcagatgtcttctgcccagtgtggaagaggggctgaagtcagaggggtgtagagtaggaaaatggaaatgttcgccatttccgttagcatcttgctttcagtccttcagagctgcggttaggcatgcttagccggaggttgattgatctctctaaaccatctgatgggcatgaggatgagaaagggggtacctttagttgatccaaaagattggcttcaaaacagtagaactgtcagatgaaacggaatccccttgatagcaacgagggagcagacacagtgcaaacccaggttagcaaggcgcctgctgactgacaagcagctgtttggggtgaagggaagcacatttcaaaaatatatgtggcataaagccatttggaagaacagcttcagagggtctgctttcacgtggaagcgtgcagggttgcagccacgcaaaggagactgcgtcgcagcctcgccatgcaaggtgtctccactggtgctggagtcagagccagtggtcgccttgccctgagccttcctggacagctgcggtctctgtcgctcatgtgactggctgtagaacacagtgacagtgagtgtgccctaaaaggctgtgcttctctaggtagacactcctggagccacaggctgaggcagcagtgagctcacaagagaggagcaggcaccacagtccttcctcttacgtggggaaggcagctgcagtgctgaacttacagaaacccagcctcctacaaacccctggggcctatcatggtgccctcctggactctagaagtggggataagatagaaaccactcaccggcatgggctgtatcttccaacagtccttttggtggggaagaaatgtcccaaaagagtgacggacctccctattcctgcatgccaggccaagtggtgaaagccagcccatcgggctgctaagtttaccaaatttgccaatttacccaaaacatgactttttaaaactgtttctgaagtccatagccaatcatattttaataaacagaagtttttaacacctttggatgcttttagttgactagtttccattttgatttcacaatggcattttcagaacatctgctgttatcttctcaagctccctgctctgctgtactttggggagttagtgccaagagagggggaccctctgcttcaggagacatagagaagaatccatgcaaagcacaggcttggcctctgctaagcctccccaaaccattagcacacaatggaaatgggatctctccagatggatcttggcaagcagagccagccaggcacttttgtgcagtgcacgaactacacgactatacccagcacccctgggatgccacattcagagaaagtcagagaagggggagaacaaggatcagggaaaggagagtgactgaatgtcagagaggtggagtagcgtgaaggtcagaaggagaagggagagagactggtcagaaaaagaggggaggtgacgactcagagaaaactggagcagaatggcagaggtggggttacagacagggaaaatggaggccccagagaccctggggccctcccagcccttgggaccctgccaatccttcctgtaaaaaatggctataaactttagaagagtttaaaagagacaagatcttaaaactcagaaaatttgacaatttgttggttggccaaattggttatccaccggttgatttttggcgagctgacctgtttcaagatggcaggtgtggatgggactctgtccagggctggccccacacacccacattctgatgacgcagaggtcatgggactgtgccagggcccccagactacatccactggtccccaaataactggtttcactggcttcaacacatggaggctgcttgatgtggtgggggtagggaggtgttgctgtcacttgaggcagagagagaaggaagcctggccacgctggcacagtgtgccaatcaaaccacgtggcctcatgcaatagagtgcaagggtatccgaggtcaatggctgtttgtatttaaggatctgattctttaaaaaaaaaaaaaaaaaaaaaaaaaaaaaaaagttaggtttttactctggatctttctgagccttgctttttgtagtcagtggggggttaaagggagaccgtgaaactgcattcaacccggaaccttctattttattgttatgggttgaataggattcgccaaaccttcttatgttaaagtcctaacccccagtacctcagaatgtgaccttacttggaaatagggttaagatgaggttctggtaggtgagtagggtgggcccataatcccctatgactggtgcctttttagaggaagaaatttgggcacagacatgcacacaggggaagcaccacatgtaggctggagttttgctgcctcagcccaggagctaccagaagccaggaaaggcctggaacagacccttccctagcaccttcagagggcatgtgcctctgctcacaccttgatttcagtctccagaactgtggggcagtaattttctgttgctcagagtcacccagtttgtgttattttgttttgggtgcctggcaagctaacaactatgatttctgaaaggaaggaatcttctcgtcacttaaggctacatggattgatgaaccagacttctaactattcaactcacttgtttttgttttttgttagattctgtctccttttagtttcatgagacatctctattattttatttccagattctccatgtgagtaggggatttgcttagaaatatagtactttatgcagtgtggccctgtgtctgcattttttagtttaatttttattttttgtgggtacctagtaggtgtacatatttatggggaacatgagccattttgatacaggtaacctgtgccagtacttacatgcttaatgatatttttgccaaaggtttctctggggacaggggatattgacaccgtagctactgatagaagtaccaggactagatttaagttactttgcttcttgtttttcttctgctttttattcattgaataatgcagtgcccctcaacaaggtctttgcagagtccaggactaacctgggccactacaaacattcaaaaactgaaatatttttccaattttcaggaaacaataagttgctagaattttattcatttgtatttcttcacccccagattgcctcaaaatcttgatctcttcttctatttaccacttgaaccttataaagggtaattgatttggcacaaaattataaaaattactcatttttcagttgaacgtatcaatacacacccgtgttctgccaagaacccacgtggggcccaccacctgaatgagtttgaaagcaacagggaagacacgttgtttataccctgggcctgcagacacgcactgctcaccagcccctctgagcccttaaggaagtaaagcctgggccccacggatccctgcacctgccgagtgctgcctgacccgagttccacctcaaagaggcaggtgcccagcccggctctttcggttttcactgctgtggaagcagagctatcatagtgttataaggtttcagtgccacaaaagacatagtactcgaatataaaattttctttttaattctcagcaaggcaatgtacttctatagaaggatgcgcccttacagatggagcaatggtgagcgcacacatggacaagggaggggaaggggttcttatccctgacgcacgtggcccctgctgctgtgttgtttccctattggctagggttagactgcacgggctaaactaattccgattggctaatttaaagagagtgacgggggtgagtggtttggggggaaaaatgattacggcagagcaggaaatcggaatgagtcagggtggagcaggtaatcagaaaaggttgctttacgaggaagttaagtttaaaagtagaaggcaaagaattgaacatattgacatactgattctttgaagagaaatttagaacgcatatctagcaatagggagaggtcagtcaggaactgccatcccacacaaatggtgaagtcactcagtagggcttcattgatcgacttccatgattaataccttatgattccctacaggttttttaaaaattggttttcttagtctcagcttaaagacagtgtacagaaaccagacatcagcctgacggggcgcttagtccagacactcccgacacgcatgcgccatcaacgtggagaaagcaaagatgtggcgcctctggcctcttggctttccgagcccagcaccagctcggaggctgtgaggcacacggggctccgcacacgagcactttccccgtggcctgaaactcccgatgaccggccattcacttaggtgcagcaggcagggagcccagcaaagcccatgtaaatgatctcaaaatacctcaaaaattaccaaatagaggtaattacatgaagcagtgtgtgaaatgagcacgatgaggatctaaaacagctgattgcatgctaaatggccattttgtaagtttaatgaagtaacatatcatttgacacaggaacaaaagaaaacaatcaaaaaacactctgggcacaggagagacttcactggcttccctctcccaggcctgggtgtctcctgcacctacgggcagtgcttgtgaagtgcttttagctagtctgtggtctttgctcaaaagggtcttcattttctcttaaaggctgactactgtgtccccagctctgggtcggatgtcccacttgctcgggcacagtaaggtaaatgggttttaatggtgccatgaaattcttctggggtctttttgtatcttctgagcccagtacaaggctaaaagaaccacaaagcgctgccaagaaacagcacatatggcaaacaacagtgcctcgaaacctgctcactatgaatccggtgccagacagttttcagtggcctgtagtcctccctggagatggctcttaactgatgtggcttgaagaatgaactgattgttaccaaaaaagaagtttccagagggccagggtgcacgaactggagctgacaccactgatctcttacaagttccctcctttgaaactggagatgggttcagctgggggggctgtctgtcacgcctgtggctctcatgacatctaactgccctgtatgtgtctgttgatttaatgagggaagagggatggaggcagagggatttaggtcaagctggaattggctacatagcttggtgcttatagctgtgggccctggagccacagggcttgggttcaaatccaggctccaccactcactagccaagtggcttcaggaaagtcactcaaaactgccatcttcagtttccccagatgccacacagaggcaacaagaattgctcaccttttaagactttaaaaggggtaaaagcttagtgaaatacctggcatgtgctatatgcaaagaatgacagctctcctcagccaccagctccaccaccgggacactcagtggtccctaacatagggaaagagggctgcacatatacataagtagctaggggtatattttatgccaaggaataattttatgaattatatatatgtatctatatcttatagataaatataaagtttatagtcttcaaatttgtgtgggttttggtggtggggggtgttgtttttttaaaagccagtctcttgatcggtagatttacacacaccttcagtagacaaaccctgccacagatgtgacccctgtatgaaccatttttctcctcggggaagctctttagttgacccgtcaccccctgctatttacagcctcccagtcccaggcacagatggtgctaccagagccccatcttcttgctaacacagagatgccagttctccatcaagctgcagtgaacacaaaaagaggggaatgaataggttgagtcctctgactagacatctgatagaaccacagacacaaccacatagtagaaaatgccagtaaggaccaatttgaagttgcacctgggcccaggaagcatgttaacattttgaagtcctcaggtgagaaagaacacccgcgtgtccacagaaacctgggtcctgtggggcacacgtgatgcttcctagggacccgtcatgacccctgttcacgtgacactcgcgcagctccctgggcctcccgtgtgtctcgtctctccccacgttgccctgtcccacacagctgtggccgtatgcattgctgaaatcatcaaacgcctaggcagtggagcagaacacgtcagcccatcactttccctagtgcagcctaaggctatacctgctttttaaattagccgcttggcactgttctcaggataaacatgagacccataagctccagtcaaggactgggcccttctaggatttccaacctcgaggctcccagcctctccctgattctctaagctttctttccaccacagatgagttcatgctgggaaccttgcacagttttatggttatcaacagaatgcttttctccctcttgtcagtgttggtcttcagatcccacttggctgggtttgctcttcctggctagttttgaggtgaccctccttggtggagaaggcagagagagagctggggtttggaaggtacccccggcccctggcagctctttcccttttcccttctttctcgtggcacattttttacagctctttttcttgatctgagcacttttactctgagcacttgggctttcacctcccgaccttgttcttatgggggttcttacgttcttatggacacattgtttggtaccaccatagaccctgccatagacatgacacttgtgtgcaccaggctgccccttcagcccgcctctccctcctagccatggccgatttggaaatgataaagatcctcaggaaatgagccctctcagtagccacccatccgccaacagccttccagatagtccttcaccactggccgctgcccccggaggacgacatggcctttcacgcccgtgttgggccgcctctccagcttcccatgcagcagtgtcccctcgctctgtgctttgccttggtggctgctgccttggcctcgagggccccgtcgggcttcttggcaggcaggtgcttccttatcaacctctccctggcacagacaggcaccgccccttttccccccgccagagcctaccccaccattgcaaagtggcaggtcacagacagtttcagtatttacagtgcccctcatcccagtggaacccgggctctggccacctcttcttggaaggcgcagctggcaagatagaggtggaggcacagggaaaggaaacgcctcctagaagtcagaggtttggggtccttctcctgcactcctggcgctcgcttcttgctggcaagtacgctgggcacatccacatacacgtcggccccatcctccaggctgcaagcccttaaaggtcgactctgcgtggggcgtcccaggacctgggtgagggagacctgcaagagactggcttccaaacccctgccctcaggtgaaggcatggatgcacgttttgctgtccccagtacccacttccacacctggggaccatgaggccttcagatgccttctgttttcctcctcgtggcctgttttctggttgttgggagagaatttgtcttctgagagtttttcagcctcttttagaatctctggtgctattagatcatattcgcctcttttccataagttttgaaatctgtttcccttaatttctttaaaaaaaataattttccctgattcctgtgaatgtgaagaaaccatggccactctctttgtcagcagcccaggatcatcccctccggcaaggctgtgagcccccctgctccagcttctggggagaaactttgtccgggagaagggattaggttggaggctgccagagaggagaggggcttagcggcctggtcaggtcccctccttgtgtgctgtttctgtagaacccagcatggtcaggtccccaccttgcgtgctgtttctgtagaacccagcatggatcacagcacagcgggctgcttctgttgggcttcactgcctgccggagggaagtaggtgccatcccagagcaggcaaccctgcggaactgaggataaaggtgtttagtatttaaaatgtcttgatcctaaagcttcagaacttcaggccgcagagagagcaactcaggagggaaagaaaacaaagagcagcggcatcagagaaggaagcagcctgaagaatccactctgtccgggtctttctcttggacacactgagctaacccctgtctgtgcacttgctgggaagtgccattcccaaagctagaaaccagaattctggctccaccccttttctccccgccagagcctaccccaccattgcaaggtggcaggtcacagacggtttcagtatttacagtgcccctcatcccagtggaacccaggctctgaccacctcttcttggaaggcacagctggcaggtagaggcggaggtacagggaaaggaaacgcctcctagaagtcagaggtttggggtcctgtctggcactgcctctcgcgtcctcaatttcctcaattagaagactttttttttttttttggtcaggcgcggtggcacaacctgtaatcccagcactttgggaggccgaggcgggcagattacctgaggtcaggagttcgagaccaacctggccaacatggtgaaaccccgtctctactaaataaaaaaaaagtagtggggcgtggtggcacacagctgtaatcccagcactttgggaggccaaggtgggcgaatcacctgaggtcgggagttcgagaccagcctgcccaacatggagaaaccccgtctctactaaaaatacaaaattagccaggcatggtggcacgtgcctgtaatcccagccactcgggaggctgaggcaggagaattacttgagcccggaaggcggaggttgcagtgagccaagatcatgccactgcactccagcctggctgacagagcaagactgtctcaaaaaaaaagaaaaaaaaggcttttttcccatcatttcagggccagttttggacgcaccttgcaggtcaggatgggctcctccactcccatttctacctactgtccatgtgtagtggagagggccttccgcgccctggtgagcttgtgctgctcctgtcttgccgctgcttgggccggcaccccaaggactccaccgtcttggttgcacaccattatttgcagctgcgtctcagtaaggcgtgtcagttctgagtccttctgtcatgtgctagaaggtagcagaatctgagcttgtagtaaaacttgccatccgacaggactttgcccggctggccctgcgttccatgttagaaattccgttcatgagaatgaccctgtctcaccttcctgtggcaaccttcccccaagccatagctgtcactcagccctcttgggcggatgctaaaggccatattccagcggtggcaccatgctgaccctttgtctggaacaaagacggcctgtttgaggctttgttaatgctgggccaccccacccccacgccgtgaggtggagactgccaccccattgttcccggctccactggaagaaaatgcctctcttgtgtatgggggatgagaaaagaaccaaaggtgaattaatggaattcaacactttctcatttggtgcccctcacagtacccttgggcctgaacagtttagcagcttagggcatcttggaaacagggagaaagcagggcttctgcggccccaaggcctggattgaactctggcccctgcctctttaccagccggtgacctggggcaagtcacacagtccctgtaggccctgtgtcctcctcagctaataaggcatctatctggggagtgtatgaagatgaaatggaatcacatatggagcgctgttggcgcatagtgagtgacttccttccctctgccttccctccgcacttctctctggaagcttcaggaatccagcatttgctcaaatccagcacgtatagcagatttgagtggttgattggtttgttttgggggaatttaggtaagatgaagacaataaaggctagtccctaaaactctacctaagccctcataataagacaccagggcagatgcacatgtgtcatttaaacaacgagcaaatgaacagagtgtgctgttataagcaggttccaaatgtttttaagatttttttaattgtagaaaaatacacatacagtgtaccaacctcaccatttttaaagggacagtgaagtccattcacattgctgcttgtcatcaccatctgcccataacgggattgcaaaactgaaaccctatacccactaaacagtcactcctcatgtccccttcccccagtcccaaacaagttccaagttgactattaatagtcaaggagaaggaaaggctaaacagaagctggagtgtggaactttatcaatagtcctcagatcctgtgagaaaaaccaggaaaggattaaagctgcagagaaaaggaataggagttggacaaccctctgcgggcttggcgcatggcgccccctgctgtttgaggtatgtcatgtctttccaccaacgcggcattactagattagtaagtcgttgggatctgaaagacactttgctttcatgtagtgtgtgcatttggcaatttcattaaacctagatgatagaagggatgatttagttttcatattcttcaaaaagctggttataaaactatatctgaaagtgttgattttttaccgtgaatatgctgtaacagttgatgattgcttcaactcctttatgaaaatattcaagatttataataattattatgattatcaacaagccagatggaaggtatcaaattctacataaacactttgtaatatgcttttccaagctccttagcttagaaaaccaagctctgtttctctcagtaatagatgtcatttttcatctattgtttgctacccctatgttagccaactagaatttttctagcctgaccttaagtaaaaactccttcccgtgtccccactgcctgtgatggtcatcatcatcatccctcctgtgaggttccctactttctcccactgagcaagacgcggatgtggaagcatccctctctcccatcatcccctcacgtgctgtatcgggaacacgtggctttgcacccttctgaggacaggtcagtcaatcccaagagcccattccttctggcagttgctacaggtatgcacaccttaagcaccgttccccagaaatgggagtcatttgctactttcacatattgcctgctttcggcaattcaccctggtgaaatggcattgtttttccttctaaattgggaatctgagagtgtgtcctgatggaattccatgtcattccatttggggtgtactgagtcatgcaaacattaggaacactcctagagaggccccatccagctcatgggacagctcacaagtgagcaggaaaccaccgtgaggacaggtcagccacgcctccagcctccctcccgtcactcttgcccagctcctgtctttcatattgtacattggttcttctcccttccccaccagtccaaacccttgccagctctcacctggatggtcacagtagccgtgacgaggatccttgattcagcccttcccctgcttgccctgcctctcctcc

SEQ ID NO: 2148 - DNA, 218 bp, Homo sapiens
tctgttgacttttaaccagtccatcttgtcaatttatttaattttgccacaagttctggtaggtggcaggaaagcccatttgaaaattttgatgcagataaacagttcttttctgatatactcaggatcaaaggatcagaatcactttctgataaacttaccacttgtgtggcacagacacccagagttttagagtaagaatctgttgaacatactgg

SEQ ID NO: 2149 - DNA, 751 bp, Homo sapiens
aacctttgctaataatatctgtcaggattcctgactaatacattaggagacctttctccttcttccctattcctatttgacacatatgcattcattcagcccgtactggctgagtgcctatgttccagtcactggtaacaaattctgatattggaaggactacaaaagcacctccgcaatgtcattttccagcggtgcaggactataccctaagttgccaccctcttcccaaaaagtgaaataaaagaactggcaagtgtgaaaaagctagctttaaagttttatggaaaggcatattaacatctagaaattttctcttagtacatagttaagaatatgtgtaaacatttagcttcaaacctagccaccaagcattcttttctagtatcaaaatgatggaaaccacctcactgtgtagcaataggagactgggcaagctgataccaagcaaactctcaaaaagaaattcagttcattgaagggaattcaaagaaataaaatgtagaagtatatcatggaaagatgttcatggtttacaaaagagtatgtggaatacaatctcgtttttacgttaaaacacagaacaataaaagaacttggtgattagaacccagagcattcattggctgtgacccactctgggtagagggatgagattgtagatgatttttttctatttgcttatctaatttttctatgacgaacaaatactacatttaaaattgtttttaagcttttgaaacaaaaagaa

SEQ ID NO: 2150 - DNA, 934 bp, Homo sapiens
gggaaagaccaggtgtgactttctccaaaactgagtgattgcttgtggatgaatacaatctaaaaatacaaggccatgaagtagtttttcatttagatgctgagaaataataggtttgggcagctcaaagcataggaaatagtaagggttttctagagctcctcctttggtggcctgtttgagtagcacaagggacgtcatcctaaatgtgcagttgccatttgttctgtagtgacttacagggatctcagtggcaaagggcgtcagtgagacaacaactgagcaaaaagaactagacgaggcttgcgcttggaaagtcacggtaggattggacctgccggccacatggctcagggagtattgacggatttgcacattggcaggaaactctcccgtttgggattctttaaatggggcacagaaggccacttgtttgcatttctgggtaaaaaacagtcatcccccatgactgcctgcatcgggtttgtcttgtgccaaagttactcttcctttgtttttactttgccttgatttttagcattagctggtagtttggcttggaaatgtcctggatagccgattccctaagaaactgaaacatttaatattggcttaggatgtatcagatggggccaaataaagcttctttacaatagtaaaagcactttatacttcactctctgagtcttcccaataaataaccttgggaggtgcagggggtggggggcccaggatggggaggcctgggagctcccagggtagtgacagagttgggctgagttctccagacgccaggatgcgtcgcagcggggccagctcaggagtgctcactcccagccctctggatctctctcctggttggaataatcattacatatcgtaactctcaaaatttattcacttatattttcagaataagaagtgtgaaatgtta

SEQ ID NO: 2151 - DNA, 341 bp, Homo sapiens
ccataacatgcagaactgtgtcagtgggagagaactagaacagaactagaactagtcagtgtctagaacaatttatttaaaccacttaaccctatgaggagaacaacctggggaaatgaaaaaatgctatgatctgccagtgtaggatggtgacttacaaccctgacttaatgcagtcattgatttagtttccctttgataatccatgggtttttaaagatagtttcaaagattctctctcttctctccttcaccggaatggtcatgccattggccaaaatggacaagtcatgccatagctgtctctgtttgggatcagcagggtttttgctagatgctac

SEQ ID NO: 2152 - DNA, 341 bp, Homo sapiens; identical to SEQ ID NO: 2151

SEQ ID NO: 2153 - DNA, 92 bp, Homo sapiens
ttgcagtgagatgagatcacaccactgcactccagcctgggcgacagagtgagactccatctcacaaaaaaaaaaaaaaaaaaaaaaaaaaa

SEQ ID NO: 2154 - DNA, 2633 bp, Homo sapiens
gctcaggctggagtgcagttgctcgatcttggctcactgcaacctctgcctcccaagttcaagcagtcctcctgcctcggccccccagtaggtgggattacaggcatgcaccaccatgccttgctaagtttttgtatttttagtagagatggggttttgccttgttggccaggtcagtctcaaactcctgaactgaggtgatccatcctcctcggcctcccagagtgctgagattgcaggcatgagccaccgcgcccagcccttatcttggatttccagactccataaccaagagaagtaaatttctgttgtttaagccaaaaaaaaaaaaaaaagaaagaaaaaagaaaagaagaagaagaatataggctatgagtggtggcatgttcctgcagtccaagctactcaggcagttgaggtgggaggatctcttgagcccaggagagattggtagaatgtattaaatgaataggtggatgacagagccttgggaaatgtaaaaaaattagttaaataaaataaaacatgatccatctatatactgtctataaatacagacttactttagatacaaagacacaatgagattgaaaacaaaagaatgaagaaatgaattccatgcaaaaagtaaccaaatgaggccaggcttagtgactcatgcctgtaatcccagcactctgggaggctgaggcgggcagatcccttgaggtcgggagttcaagaccagcctgaccaacatggagaaaccctgtctgtactaaaaatacaaaattagccaggcgtggtggtgcatgcctgtaatcccagctacacggtaggctgaggcaggagaatcgcttgaacccaggaggcagaggttgcagtgagctgagatcgtgttattgcactccagcctgggcaacaagagtgaaactctgtgtcaaaaaaaaaaaaaaaaaaaaaagtaaccaaatgacatcaggagtggccatatgttaggcaaaataggttttaagccaacaatggttatgagagacaagggaattctatactgatgaaaagtttaatccaacaagaagatataacaatttaaacatatatgcacctaacaacagagcaccaaaacatatgaagcaagaaagggtagaattgaagggaaaagaagagtttcacagtgatcattggtgacctcactacctcaactttataacaatcagagaccagatcaataggaaagagagcacttgaacaacatgataatccaactagatctaatggacatttacagatacccacccaacaacagcaaaatacacattcttttcaagagcatgtgggacattgtccagagtatatagtgtattaggctgcaaaacaagtattaatgttttaaaagattgaaagtatccaaagtgctaagtattttataatcgtcatggaatgaaactagacatcagtaaccagcaaaactcgaaaactcacaaatatatggaaagtaaacacactcttaaacaatcactggttgaagatgaaatcatacaggaaattagaaaacactttgagatgaataaaaatgaaaacacaacataccagaatttatgggatgcagttaaagcagtgctcagagggaaatgtatagctgtaagcatctacctttaaaaataagaaagccaggagtggtggctcatgtcaacatcccagcattttgggaggccgaagcgggaggatcacctgaggtcaggagttcaagaccagtctaaccaacatggcaaaagcccattgctactaaaaatacaaaaattagccaggcatggtggtgcaggcctgtaatcccagctacttgggaggctggggcaggagaattccttgaacctgggagagggaggttgcagtgagccgagattgcaccactgcattccagcctgggtgacagagtgagactccatctcaaaaaataaataaaaataaaaattaaaagaaagctctcaaatcagtcacctaactatacactttaaaggatctagaaaagaagagctaaacccaagctagcagaatacgggaaacaaagattacagtgaaaataaataaagaataggaaaagaagagaataggtagaattaaaacttttttacaggtcagcaaaatcgacaagtttttagctagatttactaagaaaaaaaaaagaaaactcaaatagccaaaatcagaatgaaaatgaggacattactgtaactttacagtaattaaagtgattataagagaatactataaacataggtacagcagcaaattgaataaccaaatgaaatggcaaatctctagaaacacaaaacctaccaagactaaatcacaaataaataaaaaatatgggtaaactggccgggcaaggctggctcacgcctataatcccagcactttgggaggccgaggtgggcagatcacctgaggtcaggagttagagaccagcctggccaacatggtgaaatcctgtctctactaaaaatgtaaaaaatagttgggcatggtggtaggcacctgcaatcccagcaactcggaggctgaggcaggagaatcacttgaacccgggaggcggaggttgcagtgaaccgagattgcaccattgcactccagcctgggggatgagagcaagactt

SEQ ID NO: 2155 - DNA, 234 bp, Homo sapiens
ccaggctatagtgcagtggcgcgatctcggctcactgcaagctccgcctcccgggttcaagccattctcctgcctcagcctcccgagtagctgggagtacaggcacccaccaccacgcctggcaaattttttatatttttagtagagacggggtttcactgtgttagccaggatggtctcgatctcctgacctcgtgatctgccagcctcagcctcccaaagtgctgagattac

SEQ ID NO: 2156 - DNA, 259 bp, Homo sapiens
aagtacatgccactaccagccctgaaggtctcctccctccaccccttttgagtatacttttttttcttttttttattttgaatacactttcaattaatcttcccaaagatcctgacgtgcttcttctgctccagaagcatagcgggctccctactgcctacagaattaagttcaaactcctggctttgtaattcaaggtcctctgtgaccatgctgcactgtgagctccctgagaactcagaggagtgctaagtcctgg

SEQ ID NO: 2157 - DNA, 274 bp, Homo sapiens
aagtacatgccactaccagccctgaaggtctcctccctccaccccttttgagtatacttttttttcttttttttattttgaatacactttcaattaatcttcccaaagatcctgacgtgcttcttctgctccagaagcatagcgggctccctactgcctacagaattaagttcaaactcctggctttgtaattcaaggtcctctgtgaccatgctgcactgtgagctccctgagaactcagaggagtgctaagtcctggactaagtactttata

SEQ ID NO: 2158 - DNA, 259 bp, Homo sapiens; identical to SEQ ID NO: 2156

SEQ ID NO: 2159 - DNA, 526 bp, Homo sapiens
atcccattactgggtatatacccaaaggattataaatcatgctgctataaagatgcatgcacacgtatgtttattgtggcactgttcacaatagcaaagacttggaaccaacccaaatgtccatcaatgatagactggattaagaaaatgtggcacatatacaccatggaatactatgcagccataaaaaaggatgagttcctgtcctttgtagggacatggatgaaactggaaaccatcattctgagcaaactatcacaagaacaaaaaaccaaatactgcatgttctcactcataggtgggaattgaacaatgagagcacttggacacaggttggggaacaccacacaccgaggcctgtcgtggggttgggggacgggggagggatagcattagaagatatacctaatgtaaatgatgagttaatgggtgcagcacaccaacatggcacatgtatacatatgtaacaaacctgcacgttgtgcacatgtaccctagaacttaaagtataataaaaaaaaaagtt

SEQ ID NO: 2160 - DNA, 526 bp, Homo sapiens; identical to SEQ ID NO: 2159

SEQ ID NO: 2161 - DNA, 496 bp, Homo sapiens
aaaaatacaaaacaaaaactaaagacccattaaaactggaattagagagttaatttaatgtcgtggatagtaatgttttattaaaaataacattgcacagttatgctggtggcttcagcattctcatgtatgcatgtgtcatgacagctgagttcctcactgctttccttattcaaactagctgaggccttcatacagcaaggaatggcctcatttgatctttgcttgagaagtgagtgtcatccacatattaagttcacctttacatgactactttgtacctctttgttcatgtaaatacaagttgtcattaagtatttttgttaacttcaaaaattattatatgaataaaaaccaaaaattaattttaaaaattcttgcagagaatttgtagtctctcagaattttttgggcaaatcttcctgcttcccaccacctctgacatgctaatgatattaatacaatgtaaataacaagatagtgaatggctaaacac

SEQ ID NO: 2162 - DNA, 496 bp, Homo sapiens
  SITE (228): n equals a,t,g, or c
aaaaatacaaaacaaaacctaaagacccattaaaactggaattagagagttaatttaatgtcgtggatagtaatgttttattaaaaataacattgcacagttatgctggtggcttcagcattctcatgtatgcatgtgtcatgacagctgagttcctcactgctttccttattcaaactagctgaggccttcatacagcagggaatggcctcatttgatcttgcttgnagaagtgagtgtcatccacatattaagttcacctttacatgactactttgtacctctttgttcatgtaaatacaagttgtcattaagtatttttgttaacttcaaaaattattatatgaataaaaaccaaaaattaattttaaaaattcttgcagagaatttgtagtctctcagaattttttgggcaaatcttcctgcttcccaccacctctgacatgctaatgatattaatacaatgtaaataacaagatagtgaatggctaaacac

SEQ ID NO: 2163 - DNA, 496 bp, Homo sapiens; identical to SEQ ID NO: 2161

SEQ ID NO: 2164 - DNA, 441 bp, Homo sapiens
ttgaaaggaaaggaaccctttgatcagggcataactgaaatccctttggttctcattatttcttaatctaatccagccaatgaaataggaataccaatttatcattaatcttgccagtggtaaggagggggtcatagaaacacatagggctaattatgagttaacagtctctactttaaatgtaaatatgaaacaccttggtggtcaagaagaatatacatatatctacatgtgagtatgtgtacatatacttacataagccttgtttgttaaggaatcagtaatgtagcatgtaagtattgaagactttaggagaaagtagcctgtattttactgctcatattttcttaaaagcttttgaaaaaatctagttcataaagtgaatgttggttccaagagatgtgtctatatatagttctatgagatataggagtttctgaa

SEQ ID NO: 2165 - DNA, 327 bp, Homo sapiens
aaattatgtaagtctcctgtattactcccagtagccctgcaattgtccctatttttttcatatttacaatgagaatatttgttgtgctttctcaagtaactaattctctgatttaacaaaaatgatctgaagtgtgtgttttatgagctttttttttgggggggtaattggagtcttgctgtggttgcatgcttctgaggaagtgagctgacaatctttggaaggtttcatgtgaatataaattcagtggggttctgtgaggtgtaaatctagcagtgctgttactatatttgttaatgtacaatttgatctgagtttgaaaaaggg

SEQ ID NO: 2166 - DNA, 483 bp, Homo sapiens
caacaagagtgtagcttatagctgcctcctaagagtgtggcgatggccattggagaggacagtgggagcttgctttcctcacctcttgggagtgccatctgacaagctgtgaggatctgagggccgtcgcctgccatcttgtggttgaaatccagcacagtgagagaaagtgctgggagccccagtccagtttattattcacaggctgtgtgtgtttcaccgccgtgctgtttggctgatgttttcagccttcagagctctctcttgaatggcaacatctgagctatcctctcctgtctgtgactggtgttttttcctgtggccctgggaggtgccccattcgagtcccttcacacacacagcctcggccctcaggagtcgcactaatgaatgaggagctgatctgagaaatccgcctgtgctcagctcttcgtgatggatgacagaggggagttattcgtccccagtttctctaactctgtt

SEQ ID NO: 2167 - DNA, 483 bp, Homo sapiens; identical to SEQ ID NO: 2166

SEQ ID NO: 2168 - DNA, 122 bp, Homo sapiens
actcaggaggctgaggcaggagaatcgcttgaactgggaggcggaggttgcagtgagccgagatcacaccactgcactccagcctgggcaacagagcaagactccatctcaaaaaaaaaaaa

SEQ ID NO: 2169 - DNA, 272 bp, Homo sapiens
tttttttttttttttttgagacggagtcttactctgtcgcccaggctggagtgcagtggcgcgatctccgctcactgcaacctccgcctcccgggttcatgcaattctcctgcctcagcctcccgagtagctgggactacaggtgcccaccaccacgcctcactaaatttttgtatattttttagtagagacggggtttcactgtgttacccaggatggtctggatctcctgaccttgtgatccgcccaccttggcctcccaaagtgctggg

SEQ ID NO: 2170 - DNA, 317 bp, Homo sapiens
gtggctaggacctgaggatggcctttaggagtgaagagtgatctctggctgacagctagcaagataacaggaacttcactcataaaactgcaaggtagcgaattctcccaacaaccagagagtttggaaaaggatcacaaggatgagaaggcatccctggatgacagcttgattttatcctggtgagatcctgagcagacgatccagacaacacgtagctggacacctgatttacagaaactgttggataataagtttgtgttgtttgaagtttgtagtaatttgtaatgcagcaatggaaaacaaatacaacttta

SEQ ID NO: 2171 - DNA, 141 bp, Homo sapiens
tctcagctcactgcaagctctgcctcccaggttcatgccattctcctgcctcagcctcccgagtagctgggactacaggcacccaccaccacgcccggctaattttttttttttttgtatttttagtaaagacagggtttc

SEQ ID NO: 2172 - DNA, 527 bp, Homo sapiens
actgaaggaggtggtacagatgttgctgcaactggagggggtggtaaaaaccaatttttatcctccctctcctgttttttgttttcaattggatctgtggggggggacaacagattctttcagatttttagactcagcctgctgcccagcagaataatgagataatggcagaacagtacgaaccagactccacgtgaagatagaagaatcaactttaagacctttttgatgagcctcttttaatccttttcctgctgtgtcccaattttccacatcaagagtgcctgcctgtggaaaccatgggccatgcatcataatctcctgcagaagcttaatgtctgtgaattaacctgagttccaggctgtctcaatagaacttgaaacaactgcacgtagtgtttttttcaacagacaagttctgccccacgttaccctgattcagaaaacttcccgttcgcagtacttcagagcaccgacctcatatcgctcccagtacctcttcagggcactgaccttatatccgctgc

SEQ ID NO: 2173 - DNA, 526 bp, Homo sapiens
actgaaggaggtggtacagatgttgctgcaactggagggggtggtaaaaaccaatttttatcctccctctcctgttttttgttttcaattggatctgtgggtgggacaacagattctttcagatttttagactcagcctgctgcccagcagaataatgagataatggcagaacagtacgaaccagactccacgtgaagatagaagaatcaactttaagacctttttgatgagcctcttttaatccttttcctgctgtgtcccaattttccacatcaagagtgcctgcctgtggaaaccatgggccatgcatcataatctcctgcagaagcttaatgtctgtgaattaacctgagttccaggctgtctcaatagaacttgaaacaactgcacgtagtgtttttttcaacagacaagttctgccccacgttaccctgattcagaaaacttcccgttcgcagtactttagagcaccgacctcatatcgctcccagtacctcttcagggcactgaccttatatccgctgc

SEQ ID NO: 2174 - DNA, 527 bp, Homo sapiens; identical to SEQ ID NO: 2172

SEQ ID NO: 2175 - DNA, 684 bp, Homo sapiens
cacgtcctcaaagtcctatgttcggaggccacttgtccgacatcctcggagtccctcttctgggtcaccagttgccacctgcacagaccttgggggactgaacaaagggggcgaacattggaataaaagacaaaggtgtgtatttggaagaagaggtcaggggcctccttctagtgaacaagggccctgagctttagagccctttgtattttattgggtaaaggagatggtggcagggggagggggtggttattggtcagcggcttgatttacaacaggtttgcaagactgcattctttgaacaatagactgtagatgtcccagtagataatttcaatgagcatggcaccagggagtgattaccttcagcaaaccttctggtgtcaggcgcagtcgtgagtttgcccacatcctgcattcatgatagtttgttgtttgatcataaagcctccagtggaatgttgagctggtcacatctcttgggccttcagcttcctacatgtgggaacactcagtccttttctggggatgtgtttcttctggcttgtggaagtaccattattaatgtctatacagctcttcttggatttctgattttccctaagaggctcatccctgcttcttcccagaagttttcagtctctgttgtatttctctgctcatagtctgtttcagatttaccca

SEQ ID NO: 2176 - DNA, 684 bp, Homo sapiens
cacgtcctcaaagtcctatgttcggaggccacttgtccgacatcctcggagtccctcttctgggtcaccagttgccacctgcacagaccttgggggactgaacgaagggggcgaacattggaataaaagacaaaggtgtatatttggaagaaggggtcagggggctccttctagtgaacaagggccctgagctttagagccctttgtattttattgggtaaaggagatggtggcagggggagggggtggttattggtcagcggcttgatttacaacaggtttgcaagactgcattctttgaacaatagactgtagatgtcccagtagataatttcaatgagcatggcaccagggagtgattaccttcagcaaaccttctggtgtcaggcgcagtcgtgagtttgcccacatcctgcattcatgatagtttgttgtttgatcataaagcctccagtggaatgttgagctggtcacatctcttgggccttcagcttcctacatgtgggaacactcagtccttttctggggatgtgtttcttctggcttgtggaagtaccattattaatgtctatacagctcttcttggatttctgattttccctaagaggctcatccctgcttcttcccagaagttttcagtctctgttgtatttctctgctcatagtctgtttcagatttaccca

SEQ ID NO: 2177 - DNA, 684 bp, Homo sapiens; identical to SEQ ID NO: 2175

SEQ ID NO: 2178 - DNA, 1550 bp, Homo sapiens
gaacagaagtacacaatttggatgcaaaagttgattcaggaaagactgtaaaactcaactctccactggaaaagataaactccttttcgccacagaaagtatgtattaatgccattgttcagttttaaagaaggaagatatggaattttctaaaccaatttttgacaaaagaggaacaatagtataatacaaaggacagtagcaacccactcagaagtcctcaatgctgtcacatctctgttactaatgtgtgagatggcaaagcctattctctctatgcctcgtttccttatttataaaataagagaattggactagagagagatctgaaagtcatttttttctgttctgtattttaatgtttgtaaattctccaactccttacagttctttcaggattcttagggcaacagttctcaaggagtagtccaaggagttctagatattgagatttttttggggagtgatctgtgaggtgaaaattatttttgtaataatattaagatgttgtaggccaggcgtggtggctcacgcctgtaatcccagcactttgggaggccaaggcgggtggatcacttgagttcacgagtttgaaaccagcctgggcaacatggcgaaaccctgattctacaaaaaatacaaaaattagccgggtgttgtggtgcacacttgtagtcccagctacttgggaggctgaggtgggaggatggcttgagcccaggaggcaaaggtgcactgagccaagattgcaccacactgcactccagcctggatgacagagtgagaccccgtctcaaaaaaaaaaaggaaaaaatacattattgccttttggattgtcttgacatttgtactggtggcgcaaaagcaagaatgggtaaaactgttggtgccttagcagaaatcaaggtattggctccaacctctctctctctctctttctctctctctctctttttctctctctctctctctatatgtatataattttttaaatttatttattttaatttttttttgagacggagtatcgctctgtcacccaggctggaagtgcggtggcgtgatctccgcccactgcaagctccgcctcctgggttcatgccattctcctgcctcaacctcccgagtagttgggactacaggcgcctgccaccacgcctggctaattttttgtatttttagtagagacggggtttcaccacgttagccaggatggtctcgatcttctgacctcgtgatccgcccaccttggcctcaacccaacctatgttaataatagttttccagcatcattagatcacagttttgaaaaaaaaccagtttcatttaagaatgtctttgatgaagcagtaaaaattactaattttatttaatctcagccgtttaggtttttaacattctgtctgaagaaatgaatagaactcataaaacacttttgcatacagaagcaggatggatgtcctggggagaagcgcctgtaggatagtttggattgtgagctgactagccactttttgtcatggaacatcatttttgcttgaaaaagagtg

SEQ ID NO: 2179 - DNA, 227 bp, Homo sapiens
agatagtttggctaagattcatgagtcactactatgttctatttcctttaagtgttgtaatgaggtgcttatttgcatttttaaaatttcttttattattgcctgttagaaatagtctttttttggatgcaggaaaaaaatacatagagctgttttggcctttgagaacaactagccagttaaacttctagttcaccttaaacttcattttggttctgtgtttacag

SEQ ID NO: 2180 - DNA, 285 bp, Homo sapiens
aactactccaaagagcctagttaatcatttggggaaactaaattaacattaatagatctcccttatgaatgctgaaaaaataatgctataatgttagtgagtaaattaaacttctaggagtacatactatatttctcaatagttattcaaagactatgagatacttgtctcttttccacataaaaagactttcttcaaattagggatccattcaatacattgctctatgccttcaatccactattgagacctacgttgaaactctacttttcatgtgtacactct

SEQ ID NO: 2181 - DNA, 285 bp, Homo sapiens; identical to SEQ ID NO: 2180

SEQ ID NO: 2182 - DNA, 136 bp, Homo sapiens
acctgtagtcccagttacttgggaggctgaggcaggagaatcgcttgaacctgggaggcggaggttgcagtgagctgacatcgtgccactgcactccagcctggtgacagagcaagactccgtctcaaaaaaaaaa

SEQ ID NO: 2183 - DNA, 297 bp, Homo sapiens
ggctgggtgcggtggctcatgccggtaatccagcactttgggaggctgaggcgggcggatcacgaggtcaggagatcgagaccatcctggctaacacggtgaaaccccgtctctaataaaaatacaaaaaaattagcagggcgtggtggcgggcgcctgtagtcccagctactcgggaggctgaggcaggagaatggcatgagcccgggaggcggagcttgcagtgagccgagatagtgccactgcactccagcctgggcaacagagtgagactctgtttcaaaaaaaaaaaaaaaa

SEQ ID NO: 2184 - DNA, 12541 bp, Homo sapiens
gttaagtcctgtatcaggcttcaaaaagaagaggaagtcattacccaattgttcatttgagaaacaaactccacatgtatcagcaatgtgctcatttcctaaacaagcctattggctgcattactagatatagaatgaaatattttgattctaggtgccccattttaagaaagattgatattgacactgtccagggacatgtagtcagaacatgtaaggatctccagatttttgtgtcctgaaggttttcaaagacttggaggagagggcaatggtttgtagggtacagaatactcttattctgtgtggttcccaaagagagaactagaaccaatgatggagttttaggatgatttctctcacaatgcaggatatttaatcagcaattagagactttcataaatcaaacataagccagatgacatctatgaagaatattgtaaatattttttgcttagcatgggagattggtctgggtagtctctgcggcctcttttttaaatctggaattttgtatcatgaatgtcaaatgaatatttctttttctttttaaataggacactgatgaaattcaagttaactatcctggaatgtttgaattgatggaagatttacaaggtaaggcactttaaagaatttttagactccattgggaaaggtaggccaaaaaaaaagaatttttagactccatttgagagaaacattttgagagccagctctttggcaggcactgggcaaagcactagggatccattgttgaggagaaagcagactgtcttcatggagcttctgatataaaatggaggaggcaggcaccaggcagctgtcacagagataagtgttaaattagaattatggtcagtgctatgaagtagaggcatatagtgctacggctgtttgtaaaaagatggcgggacttttttttgaagggtgcacttgaggatgatggaacacattggtgacttccttcagccacacttggcagctgagatacaggaatgaaggtagttgagttggtttagaagtagggttttgtcagggggaaatgtcccagtctgggagactcaaaaagaagtgttatctgaggaagtagcaattgagctgtgctctaaaaaaaaatggagatgaattaactgggtagacagagtaggcaagtgaatctgaggcaaggagaacagcatatgcaaaggccctcctgtgagaatgaacatagcaagaactgaaagaagggcattttggctggtgttcagggagtaagaaggagagagttaagtgatgaccttggtgggtcaacgtgagtcacagatcaaatgcagaagtactttataggccttgttaaaattgtttgcccttatcttaaaatgccccttgaggcatcttagagaggtaacagtatcagacttggattttgaaaagagtagattggcagataaactagtcacgagattaatttcagtatagcttgctgagagatgatggtagtttgtactaaggtggtggcaatggagatgaagagaagcagattcatcccagagatgtttaggagataaattttgcagttcctgctggtggattggctgtgggcagatgaaggagaaagacatttgaagcttaattgctgagtttctagctcacatagagagatggtgtccttcattgatagaagaaacaatagaagaataccaggtgtgggcaggtacagcccttgagtttacatttggatacattgggtttgaagtgcttttgaaatacctaagaggttatgtcaagtaggcagttgagtatgtgggtaggtagctcagaggaagctactggcttggttaaaaagttgggagtcagttgtgaataggtggcattcaaagcgtttgcctaggataagaacatggagtgagcagacaaagtggcttggtactgaggctttagcaggtgggtagtcgacgtctgagcctacaaagagactgagaaggagtagccagcaaggtgttccagaaaaacaccagaaaagtgtagaattgcctgaaccaaaggaaagaaagaatgtttcaaaacaaagggagcacttagcagcgttaaaagcaaactatgaactgaaaaggaagtccgctagatttaggaacaagaaggttattggtgaccctggtgagagctcttttgttagagtgaggagagtagaagaggagtaggttgaggagtaagtggaaagtgaggaactggagatagcagatatgtgctgttctttcaagaagtctggtggtgaagaagaggtgaaggatggaaaggttacaggtgtcagaagagaggagaggaatagaagttgagatgaggttgtttttttttttctaagacttgaatttatttaattgctgactagaagaatctaagtgctttcctagaagaggtgactctagaagagagagaaaagataattgatgatgacaggtgtctgagaaggtgggaagggtgcaatacaaaggccagtggaggggttgaccttggtaaggggagaggcaaagttatagcaggaagggagaagaggtagcaccaaaggatgtaggtgtttatgtttgaaaacaagaagttcccatcttgtgggtctattttttttgtcaaactggaagtaatatatgctaagaatgaaagggtcagagttttgagaagtgaatggaaccgtttgaaatagtcattatagggaatgagaaggtgaactgaccatcaacaggaggtggcagctcaggaccaggcacgaaaatcggatagttgaattagtttgggttgggggtttgctagttaaaagtgacaaaaagacaaaggtaaaagataattctaggagtataattgagataataggttaaagaatcttagctggaagaaaagggaagtgggaacaagaaagagtgagctgataaattgggaggaaaaagaggagctgagcacaggtggttccagtgtggtcagggatggtcacggttgaagttcctgaacacactggagggacaggagggtatggtcagaaaatgagatgtttgatgattttggaagtaaagcagttacaagtgataatggtctgggacgtgtctcaggtatcaaggcagaggtggtgtgatggagtggttgattagagatgagattttaaaatcttaacttgctgattattaacatgaagtcacccaggatggtggcagtactggagtgtagaggaaaactgagccaagtgccaaacctttcagtgaatgaggggagtgactagcctgatgtcagacagcaagcaggagttaggaggagctaacagccttctggtgtggggcctcagcagggtgaaggtgtttaatagggtagggaagtaatggcttggaagaggcttcaaggagtaagaaggatacagatcaaactctgaaagaggttagatatgcaaaatatatgcaaaaataaactattacttgaaagggatgctggagaagcagtttccttaaaagagagcttcaacttgcgtcctttgtgggaatttgtgaggtggttcttttatatatatagactgacatcaaaaatcatttcgatgaatgggggaagcaagaggggttaaaggtatgttctgtgaatccagaactacacttacctaggggagccttcatctggatcctgaaaaattgtaagatgatttaaagaaagaggattatacaaataagtatctagtctttacttacagatttatagtcttttgtgagcattgttgttcttgcttgcttaagttacgagtgagaataattagggccaaagagaacagttacctgtcaagtggcagaattagctgccaaactcatgcttcttggctctgccctggcactgtctgaactgaccctgttccttcttgtgttgcccatctgtaacaaggttcatttgacctatcgtgcagcctcctctgagtgtggagcttctgtcactctgcaaacggaaagatgcgtagctgaaatcttaccattgtcatcagttttcattcattaatagagggattggcagcctgtagcatgcatggccaagataacagaggatcagtaataagtcacacacaccccttccccagcataccccaaggacttacctgatgtaatcaaggagccactttatccaaaggcttgagagatgatggtgggctgatgatatatcactcgggctctaataataaaaatgttattcaaatacagcatttatttttgttctgctgtagaatctgtgttcatgattcatttcaagaaagaaaagagaaacatactagaaattagacctctctgttggaaaaagttacttcccactgatttcaacatatgagcagcacttaactctgtgcttagtgcaattctctgaggtttttctaataccctaattttaccggtgagcaaattgaggcatcgagaagttaagtatcttgtccatggtcacactgaatctgtagttacaatttgaattcagagtcctgtactgcatatttgatatgtatgtgattctttaaattcaggttaacatgtatattcagcgaaatgtattaatcttaaaggtacagctgcttgtattttaaccaccatcctgaacaaaatattgaacattttcagtctcccagaaggtagccttgtgctccttccaaattgataaccccctcttttcctaaaggtttcttgtttgtttgtttttcagatggagtctcactctgtcgcctaggctagagtgcagtggcacaatcttggctcactgcaacctctgcctcctgggttcaagtaattctcctgcttcagcctccctagtagctgagattacaggcatgtgccaccacacctggctaatttttgtatttttagtagagacagggtttcaccatgttggccaggctggtcttgaactcctgacctcaggtgatccacccaccttggcctcccaaagtgctgggattacaggtgtgagtctcctaaaggttttaaatagaccgtatattttcagaaactatggcctaatactttcagatgctttcgtaatgctgctttttcttaactgtaatgtctgttacagaaatcagatgtcttagtttttgatacatcttatccttaggaatattaagagaaattatttacacttataaaatgatatttaacaaaatagatataatcattaacaggttggttttatataccttcacttagcgtttattgagcatctacccatgtgccaaccacggagccagtggtggaaatacgtagttcctgatctcagggagcttatgttgtactagggaagaagaacgcaaagatagagacagactcctacattcaactgtaaaatgaaatcatttataataaagtacaaggagaaacacaggaggaaaaggccctaaatctgcttagggggtcaggaatgcttttgcaaaagaggcagcacctaaacgaaaatgagtttgcccggagaatgaaaggtgggttgaggtttaggggagctaacattgcatccacatggaggtagaataggatatgcacatccttcactctcctgattaaggaatggtaccataatccagtattccttgagtatatagaacggggagatgatgggaaatgaataggatcagaggcttctagatttttttcagattagcgttgtaatgtcttggaagaattttgcatagaggagagaaaatgagatacatttgtgtgtgttagaaagctcaccttccagcattgtttatgaggcatagtttatgaggaagggaagactagagctaacatggttaatctgtttgtttgtttttttttaatgtgtgaggaaacccaggcagaagttaagtaacttgtcccagatgttgtaattagtgagtggtagagccaggatttaaacctagtcgaacagcctgatttgtatgctgaaatcttagccattctgccttggaaaaagtcagaggcagatgagatgggaagaagcatagtcaggggatgatggaggcagggagaccgtgggagactttcaggtgtgccattctgctgactagaagatcatgttacttccaaatttgtttctgggattttacatttgtggtgtattttttttcttaatggttgtggtgtgtctcatttaagctgctattattaattcacagaacaaaagtccagaatgttgacctaattttacaaaacaagctgcatatcagctgatgaatgcatgagaaattttcaaggctttcacagtggtcttaaggtaagttcagttatttttttaaacaatactcagtattgtttttagtaaactgtaataaattaggtttatttttgataagcagttgaacttcaccttaaaaacactgtgagagtcttaaacagttaacctactagccagatttttctgttatctcaaagcccagggcgagtcggaagtcccaaagtttcagtttttcccaggtggtcttcagtagaggtcccccatgatgcattaggaggtgttactcttttgtagatggcaaaactggaattcgatagaggttgaatgactttgccccaggttatataagagttaaaactgggagtgtgatcccaaagtccagattctttccaccaccctcacactgcttctgcaagaagggagtttcagtgtggcagtgtgagtggcttgtgagggaaggctggagtgctgcacagttacgccctgtgctctgcagtagtgctcttgaatttctgtatggctgatgtaggtcagaccttcagagagtgttatgcctactaatcttaattagtatatcctaatactgattgttagaaggcattttagaatttctagtgcatcacatgtttatgtctaaaaaattaaatctcttttctactggtgttgtccataactaatgcataattaagccatagcagcgagaagttgagcagaaatgaaagcaccatacctgagccaacagactcttccaatgtgagacccagtttacctctggtcacttgatatggttaaaatgtgagcactagaagcctttacggagcatctagtctggtcactttaaagaccacagatgattggcccaaggttatccagctgcttcatgacactaagaatatgatccacctttttcttgatgataattaacctactagtttgtgtctgtcaatctgcatgaattggggttgttacacttacaggattttagtagcagagattcattattttagagagtagtagaaatcttttgagattaaagagaagaaaaaggtttaggtgcagctcatttgttgattgtttttaataagaccattgaaaatatggtagattattatttttaaactgtgaaagaatactgatattggtaagtttattcatttgttgatttgtgaaagtagaaaaacaaaactaagaaacatttgatcatgtgtaaaatttaatatagagaatacatatgaaggatttttatttctgaaattcttttaattttgcagactggcttaaaatatgctcaaagtaaatttaagtatttgtataaagaaaaatcaaatatacaacattaatcttaaatgaacaatagaataatgcttaacctagcttttcaccatcaactcgaaggaagtctaaatattttaaaacattaagagaagtacctccaaaagaatgcacataattctttcctaatgtgggattagtaaaatattgtaaatctgagagcacatagtagctttggtactatctaatgagtttcaaagccgtcttccaagtttcacagtcatacttgcattatggcttaggagtgaggcattgttgcactgacctgtcctcctccaaagagcagctaaaagcatgagatgtgacatccttggtaaagttcttgccaattgctgacaactcacctggggtggcagtcacctggcttttgcccagcgggcttactttagaccattgctggcaagtaaagcattgtggagctgcctcctgaaatttcacttgcctgtcttaatgttgaaaaagtttcaagtagtttcgctttagagtcactaagaaacccagttataatctgaaagtgaaatgagatttaggtttacatgacccttagagaatgaggacaggtatactgttagatgagacgggattaagtctgtggtattgagctgttcagggtgtttgctgtattatctcaaactacctgtagtgtatttgtaggtatgggtgagagtaactgtgcttggaatagaaaagccctgctgcatcgagacacaatgctggcagctgcggcagtgtacagaggtaaggggcgaccactctttcacccgcctcaccaaggcacttgtgctgtatcatgttgattcccttcacgttgccaatgcattttccattcctgttaaggctccctcagacttcttgtccttcctctcaaaacacagatcctgtagctttttccagacagcctttactatttccttaccctcagtattaagaatttttcatgtaagatgttctcagaatcttacaagtatccttgtacccatttctttttgaagaacatgacctttattgagcagaaattttttcctacttgcattttttcagactttaaccattattgtctttttagaaatgtacagaaatgaagatggttcagtacctgctacataccagatctattacatgataggatggaaatatcatgagtcacaggtaacgttactaagatggatcacttttcttagtgggttcgtgttcagattattgtttactaacttgggggaaggggtaatgtaagacagcattaagggctttaattggggctgtgtattatctatctatttctaatatctttaatctttattattttcaggcaagaccagctgaaagaggttccgcaactgtgtcatttggagagctaggaaaaataaacaaccttatgccaccggggaaaaaatcacaataaatatttattcagtgttaatgtcgtccagaattttcatcagaaatggatagctttaacatctaaaattattatattttgaagcaagaagcactctaagctatttactaataggcttttcatataattaggaaaacctaatatcacatctatagtaaccatttcagtttcatattgtttctgttctcataaggatactgctgagtgtctttgcagattcagcctaaaagcaaagaaaatatttccctaaaatatttgcaaataatgttcacatatgtaaatgccttggaaaatattactcatgctgaccttttacacctttttcatttgtcatactgttttctttgccttgaagaggaacagatgaatatgcaccttctccagagttatgtggttttagaatttagaagagcatgtatctttattaaatccctcctcaactctttttttttaaagcatctgaatttaaccttatttcttttttatctccatggtgtgggtgggaccaccatggttttacaccccaccctaccttagggaagaagaaaacattttaaagaataccagaagtagaatcacatgtaacagtctctgcacagtcatcagtttattgttaagctttcctttgtaatttcagggcttaagcactattatcctaatccaagttcacagtcctgttgttgtcgaggagggttcaaaatcatttggagataatcaagctcagacagcttaggataggtgagaagaacatagaggaagcagggagaaggctgagaagcaagcaggagtgagcgctaagtgttttgtttccagttagctgttcgctgtcttttccatttaacctgggcactgccctagcctcatcttcagccttcagtgatctataatagcatttccttctgtctcctctcagtctctcttctgccttccttccctcctttactgtattagcaacaagctgtccatgggtgggggctgtgtgttagcctgtacgtagcacatgggactttccacatagtagatattcagttacattttgaactaattatataacaaacttgccctttgaaagactaagttatagttaaaaaccaagatttgtaggagaaaaagaaattattgttcccttcagtttgaaaaatcatcgatatttgaaactgggatacgcttggtagcttttttgttttaacacaaagtaaacctgtgaagtagaatttggcgttttgttttttggggttttttttttttttagcttaattttcagaacttgaagagagagaacaacaacaaaaaacaaactgcgctagccaggtgcaatggcgcatgcctgtagtcccagctacttgggaggctgaggcaggcaggagttcaaggctgcagtgagctgtctgtgccacggcactccaacctgggcaaaagaggagacctcatctaaagaaaaatccaccaaaaaccctgtgttttaaagtgcaaactgatgatggaggaatgggtaaattccaggggtctatatttccaaaaggacatgtgtttttgtgcactaatacttgtttttgaagaacacatctcagtgttaagtggctgttgctgaggaaggggactgaggaactgggtgtgtctgtgtcattctgtttgaatgtctgtcaggggtatagaaactaggagggagacttgtacttttcactttttaaacttcctgtaaaatttgaattttccaagcaagaatattacttttgcttatttaatgtcaacggaattatatgtggatggtggggtggagctaaggattactctactctggctatcccaaaaaaagctccatttgtttaaaaaaattaagtaaatcaaacacagctaattgaggacccttattgtttaatgtgagtgattgtagtgaaaacacttattttagtgtgtataacactagtgaaattatttttgtagttaaatctgctggaagtgtgctattaagcttttattgtttggagccctcaggaaactaatttttctgaataaccacattttccaaatgattaagagctcatccttttaagcaatgaaacttttaaaaggtctttatcaaaaatttttcataaatgttacattcttaaatggtatatgataaataatcatcttttttgttggtttatttttttattttttattttattttattttttgagacggagtctcgctctgtctccaggctggagtacagtggcgcaatctcggctcactgctgcctccgcttcctgggttcaagtgattcttcctgcctcagcttcccaagtagctgggattacaggcgcgtgccaccacgctggctaatttttgtatttttaatagagatggggtttcaccatgttggccaggatggtctcaatctcttgaccttgtgatctgcccaccttggcttcccaaagtgctgagattacaggtgtgagccaccaggcctggccaataaccatttcttgataaccccacagataatatcataaactcaagttgtctgtattgcttcttcccagactggtcccaagaatgctgtggttggttttgtgtcttttccagcacttttcttacttgctgtcagttgtcaatctcaacaccttgaccaaaatgaactttcttgagtcatttcttctctgtttagctataagattagaattcatactgaaagatttctaggacttttgtattaaggtaggaaagaggaactaggttctgggagaaagactcctttggaataaaattcatgagctttattggttcctttaacagatcttcattgagtttcatgtgccaggcatccaactagtctctgcttttatagttgtcagtctgacagggctctagtatgtgcacaccgtgacacctgttggctgccaggagactgtttggcttatttcctggttcttagcaatattccaggttggcctggagaattccaaaggtaaatatgaaaatgtatacctacaaaagaatttttgctttataggaagaatttgtaggatttattgagatgtaagctacctatatacatcaagtatgtgatatgattgtaaaaagttacagaagtgtgtgagtcatgaagtacctgtgagggaagtttatatattttttcaaactcttttagtaccattttcatccactaggtggaagcaattacagtatgacctgcattaaagacatgtacagttttttggccggctgcagtggctcacacctgtgatctcaacactttgggaagctgagacgggaggattgcttgagcccaggagtttgagaccagcttgggcaacgtgatgaaaccctgtctctacaaataaaaaaaaaattagccaggcatggtggcacaagcctgtggtcccagctactcagaaggctgaggtgggagtattgatcgagcccaggaggtcaaggctgcagcaagctgtcgcaccactgcactctagcctgggcaacagcaagaccctcgtctcaaaaaagaaaaaaaaaaagtacaatttttgtattgattatgtattccttaagtaggagtggaataaaagtattttaccgtggattggcttctgtgaaggaaagaagtgaatattagtagatatttggaaaaaagaa

SEQ ID NO: 2185 - DNA, 489 bp, Homo sapiens
gctagtttccagccaggcgccatggcccacacttggaatcccagcactttgggaggctgaggctggtggatcacaaggttaggagatcgagaccagcctggctaacacggtgaaagcccgtctctactaaaaatacaaaaaaaaaaaattagctgggcacggtggcaggcgcctgtaatcccagctactcgggaggctgaggcacaagaatcgcttgagttcaggaggcagaggctgcaacgagcagagatcacaccactgcattccagcctgggcaacacagcaagaatccgtcttaaaaaaaaaaaaaattattttaggctagtttccaataagaataaacccctacttttagtgcctaacacaataaagttttatcacatcacagctgcgtgctggtgggacagcccatctccatcttgtagctgtgccatctggccctgtgttctataatctggccctgtgttctataagatcaccacagcaaaa

SEQ ID NO: 2186 - DNA, 369 bp, Homo sapiens
tgagtttagtgattcccttccaacaaatagatggtgtgtcacttctgagactaggtaataaaaggcattgcatcctccttactctctcttggatccttcactctagggaaagccagcagccatattgtaaggccactcaactccatggagaagacctagaagtgaggagcagaggcctccagccaaaagccatgtgagggagccatcttggaagcaattctccaggcccaaacttcagatgactgtggtcccagccaatgcattgaccacaacctcatgagagaccctgagctagaaccacctagctaagccactctcaaatatcttatctacagaaactgagatgataaatgtttgtggtttaagcaa

SEQ ID NO: 2187 - DNA, 323 bp, Homo sapiens
gaaaaatgccttatttaaaaggaggccaagatgagtatcaatgaaggctgtcaggtgcggtatcccacaaggctctgttttctgcctttccctggtccacattttcaacagtgacttacacgtgcacctggaaggcagcatttgtgaaatctgtgagtattgcacagctgcaaggggcaaccaacatgatgggcatagaaatggacttcaggaggctttggctagaaagatgatttaaaagctcggccttgaaacattcaaatgtcaaggattggccaggtgtggtggctcatgcctgtaatcccaacactttgggaggccaa

SEQ ID NO: 2188 - DNA, 409 bp, Homo sapiens
caccgctcccgcccccacccccggacactcgccgcccatcggcccgcgcctgaaagtgagagggagggccggactaattttaaacagccggcctgccctactttgctgccgccccgaagcggacttgtgcacagtgcggaaagaggcccttttccagatggccagcctacctcctctcccctccctctcgccgccgtcagccccccgcaggcagccctttccggcgcgctgtttccgggccaggactctgggaggcgcactaccacctccacaagctccccaccagcccggccgcctccagtgctggagaagaggagagagagtcggggtgggtgccctcccctgctcccagcctcagctgggcggcgagttgcgtaaacttgccccttgggcctggggtcttccctgg

SEQ ID NO: 2189 - DNA, 410 bp, Homo sapiens
caccgctcccgcccccacccccggacactcgccgcccatcggcccgcgcctgaaagtgagagggagggccggactaattttaaacagccggcctgccctactttgctgccgccccgaagcggacttgtgcacagtgcggaaagaggcccttttccagatggccagcctacctcctctcccctccctctcgccgccgtcagccccccgcaggcagccctttccggcgcgctgtttccgggccaggactctgggaggcgcactaccacctccacaagctccccaccagcccggccgcctccagtgctggagaagaggagagagagtcggggtgggtgccctcccctgctcccagcctcagctgggcggcgagttgcgtaaacttgccccttgggcctggggtcttcccctgg

SEQ ID NO: 2190 - DNA, 761 bp, Homo sapiens
ccgcggagctacagtgtgctttgagtagaagctgcactggggccgggactcggaggcgcgctgcgtgagccggccgcagagccatggcgggcggggaagaccgcggggacggagagccggtatcagtggtgaccgtgagggtgcagtacctggaagacaccgaccccttcgcatgtgccaactttccggagccgcgccgggcccccacctgcagcctggacggggcgctgcccttgggcgcgcagatacccgcggtgcaccgcctgctgggagcgccgctcaaggtgagggaggccggagaaaggttggggcgatcgggggttcagggtgggcgccatgaaaactggtgggaggtgctccgcgggaagaggctggagcgagtgttcttctccggaaaagtcttgggctggggtcccagggtccactctgccccgcctgcgggggagtcccctctcaagttgaggggaaactgaagaggggtgccaggaacttggctccgccattctgactgcccttcgaattaggcgcacctggggaggtgctcgagttccactcgccgtcggtctgccagggtggcttccctggtcagagtgacggtagccgcttgggctgtagcggaccctggaggcggagctggggagggaccagcttccacctgcttcaggtgaggtgggggcgggaccacgaggaggggcgggcccgaggcggactactagaggtggcagaggtttcctgcggtgtcaggaagctggattggggct

SEQ ID NO: 2191 - DNA, 1026 bp, Homo sapiens
tcctataagtgggtgccccagagtcacagacatgactcaggcctgtcttgctggccctctagagggaagaggtggcccagaaaccagggcatccctgtcccaagctgtagggcagaaataagaggaaggggttctttactcattgcttcgtcctatgtacagttgtccagcagaggacaggacacagccaagtggcctctgtcctcctctgggtactggccccgggtactggccctgatcatcccagcagatgacccccctccctggggatgtacagaggccagcctgctttctccctgggactccacccacacaccccattgggccgagcctagcccctagagttcccctgggggcttcctttttaaagagctttcagatctcagaaagccttgctcatttcctcctagactaggaggaagctcctggccacagcctctgactcatctcctggccctggttggtggaagggagcttgacagtgtcttgggccgggcctagtgtccctgggggaactcaggagtgccttcctcccctccaaaatattcccccagcccagacctgcctttgccagaggggagaatgtgtccctctggccttgcatctcatctcctaatctagagcctcccagttctaccctcccttctgggaagtgtctcaggagcctctccgatacccaaggccctaccacacctggtatagcactgacttctccctgagctccgggtagggggatctggggtgcttctctgaccctgctgcaaaggccaggaaagccctctcctcctgacagtggggatagccctagaaatctggtcattactagcaactttgtttccctagctgtggctaaaaatcagagtaggacaggggtggcactgtcctggaatgtttcctgaccctaccccaacccactctagcctttttacatctcaggagcctttgggagactgtagaaaactgaggtgtgggcatgagtcctggtctcctcctagcctcccctggggctggactatccaatctgct

SEQ ID NO: 2192 - DNA, 1026 bp, Homo sapiens; identical to SEQ ID NO: 2191

SEQ ID NO: 2193 - DNA, 761 bp, Homo sapiens; identical to SEQ ID NO: 2190

SEQ ID NO: 2194 - DNA, 10126 bp, Homo sapiens
cccgtggccccgccccgtgtgcccagcggaagcagcagcagcaggaggggaactacctgcagcacgtccagctggaccagaggagcctggtgctgaacacggagcccgccgagtgccccgtgtgctactcggtgctggcgcccggcgaggccgtggtgctgcgtgagtgtctgcacaccttctgcaggtgcggcccccagtcccacccccggcaatgcagcttaatcaaagccgccaattacgcagggctggacgtgggtggggccctgtgctctgatacctcattggacgcccgcgaaaacctacgaggtaggctccgtctccccatgttgcggacgaggaacctgagggaaagagaggcccagcgccttaccccaggcccacggctcatgagagaagcagcctagacgtgagcgcaggcgtggggggagactcccttcccctctacctttcgccgcccgggctcctgcagccacgctgctctcagcctcgctgtgggcatctgccagtttctgagtctcctgtcatggcccccccacccctgaatgtggggaacacagacccgctcaccacagcggacccttgtggagccgcccctgggtgacaggctccgtgcctgcctcctgcagcttacattccagcagagaggctgatgagaatcggataatcgctggttgatgtctttgtgaattgtgtcaaatgctacatacagtacattaagagacaacaggagtccttcccagagagggtggtctggaagcttccaaggaggtagccccagagcagggaccggaaggcctgctgtaggtgtggggtgtgggcctggcctgttggaggagactgaggaggtctcttggtggctggagcagagggatgaagggggtaatcagagcaggatagagaggtgttgggtacgtgagcagcagtgaggagttgggatttgttctgggtaggatgggagtcactggggagacatggctgctgttctgagatagactctaggggccagatggatgcagggagcccagcgaggaggctcctggagtcacccaggtgggggatgtggggcctggaccagagaatcagagcggcagtatggaggcagggtggaggccttggtgatgggttggtgagagggatgggaaggaaggagatattgaggagaagtccacctggggtgactgagtgaggcccctggggtcaggccttgccatgtgagggatggagtccccagtgaagggggttcctatgatcctaactcttttcccctcccctcccctagggagtgcctgcagggcaccatccgcaacagccaggaggcggaggtctcctgccccttcattgacaacacctactcgtgctcgggcaagctgctggagagggagatcaaggcggtaaggcctcagggtgggagacataccccaagtcccaactcctaaggaactgggccctgagcaggcagcagacatctttcttttctttcttttttttttttggagatggggtctcactatgttgtccaagctggtctcaaactcctgggcttaagcgatcattcatcctcagccccccagacatttttcaagagctttgtccatgtggggtgttgagaccccaagcagaaaaagaattgaggggagtagctagtcaagaaaccacatctatgaaggaaggacagcagagttgttaagaatcagggactcggctgggcgtggcagctcacacctgtaatcccagcactttgggaggatgaagtgggcagattgcttgaacccatgagttccagaccaacctgggcaacatggcaaaaaatattcaaaaaatagccaggcgcgggggcatgcgcctgtagtcctagctacttgggtggggtctgggatgagtgggctgaggtgggaggattgcttgagcctaggaagtaaggttgcagtgagctgtgattgtgccactgcactccagcctgggcaacagagtgagaccttgcctcaaaaaaagaaaaaaaaaattagtcagggaactctggagcctggtggcctgggtgtgtgaccacaagtcagatatttaacctctctatgcctctatctcatctctgttagagtcagagttacagcttctatttccaggattgcaaagattacagtagaggatatgtgtatagaattcatagtagtacatccaggcgcagtggctcattcctgtaatcccagcgctttgggaggccaaggcgggtggatcacctgaggtcgggaattcgagatcagcctgactaacatggagaaaccccatctctactaaaaatagaaaattagccgggtgtggtggcgcatgcctgtaatcccagctactcaggaggctgaggcaggggaatcgcttgaaccccggaggcggaggttgtggtgaactgagatcgcgccattgcactccagcctgggcaaccagagcgaaactccgtctgaaaatatatatatatatatttagagtagtgcttgtcacatagtaagcctttgttgttgttagcgcttactgtgtaacaaatcactgcaggctcaaaacaacagtcatttattcagctcataaatctgcaagttaggacagttggccctctgtatctgtgggtaccacactggagaattcagcaacggtggatagaacatattcttacaaaaaaaattacaataaaaaacaaatttaaaaaacaatacagcataaactatttgtataacatttatgttatattaggtattataaataatctacagatgatttaaagtgtatgggaggatgttggtaggttgtatgcaaatactgcactattttatataaggggtttgagcatccatggatttgggtatctgcaggggtcttggaaccaattctctggataccgagggatgactataatttgggctggacttacctggatggttcttctggtctgggcagggcctcgctgatttcacctgggcctggctggtgggtcagccgcggtggcctggtttataatggtctcatctgtgatgactgggatgactggggcctccttccacttcaatgtctcacccaccagcaggctgcccgggccttctcatgtcatggtggtctcaaggttccaagagcagccatggggagccccagtgcatgtgtactttctaagtctgctcatttctcacttgacactgtcccattggccaaagcaagtcccatgctcaagcacagagtccattgggaagggaccacccaaaagtgtggaatcggggagacagaaacaaattggagtcaccactccgccagtctgtcacagcgttatgtgtgtctgcatacgtgtgtgcttgccgctggcgctcttcatgaattcgttagcaggttctctgcctggctgctggtgatctcgagcaagttgtttcccttctgtgggactccatttccttatctgaaaagtggacagttgggcttgattcatggttttcaaactgctgggaaatgaccttcccagacttgggcactgtgggttcccaggccaaaacatggcagccgaggcccaaatgggagatccccacaaaacacatacacagacctcctctttatttctgtcccccctgcctctctcctatgcccctatttctcctgagaatgctcccaacttcaccaagtgtttatggagcccaagaggttctgcccctggggaaaagggggaggcagaagaggtagaactttgggagttcacagctctgatatcaggagcagccccatttttctctgttgtctctgggtggttgctgaggctccttcgctctggcctggagagacctcatgaccagtcattccatatgtccccagcacccatagccatttgcttagaggtttccctgtggagtccaccccagccaaggggcattatgctggggccaggttcatgccaaagggctgcatgaacttccctggagcccactggagttgatgtgagtctcagaaaatggtcaagtgtgacagagagaaggaggcagggatcagccaagtaatgtagtggaggttgtttttacaaaaacagaaaaatatgcctcaccacatagaaccagagcagaaatcagagagaaaatcacccacaaacccaggaaatcctccaattgcattttatcttatttccttcagtatctctgggcaaattttttttttttttcctttttgagatgaagtctcactctgtcatccaggctggagtgcaatggcgcgatctcagcccactgcaagctccgcctcccgggttcacgccattctcctgcctcagcctcccaagtagctgggactagaggcgcacaccgccatgcccagctaatttttgtattttcagtacagacgagttttcaccatgttggccaggctggtcttgaactcctgacctcaggtgatccacccacctcggcctcccaaagtgctaggattacaggcgtgagccaccgtgcccagccagatatgattttttaagtcaactttacttaagtatactttgcacacaataaaatgtactcattgtaagtatgcagtcaggtaaattttaacaaatgtaactctcgtaaccaccaaccactgttacatataacataggcatgatttctgcctcattgtaaccagcatggatacaatcgctttagcttttgttattttgctatagaatttttctaaagattattacaaatctcaatagcacatatactgtttatacctcttagttctagtttctcagtttgtaatactccttcaaggaatgttttgcatggtgtattcttttttttttttttttttgagacgaagtctcactctgttgcctaagctggagtacattggtgtgatcttggctcactgcaacctccacctcccgggttcaaacgattctcctgcctcagcctcccgagtagctgggactacaggcagatgccaccacacccagctaatttttgtatttttagtagagatggggtttcactatgttggccaagctagtcttaaactcctgacctcgtgatgcgcccgcctcggcctcccagagtgttcagattacaggcgtgatccatcattcctggctggtgcatcttatatattattttcttgggataaagttaaagaagtgggatgggtaccaaagggtcagaaaagtttgggatggttgaaacgttattgccacattgctttctcagtgctacgtactagcttactagtttgtttaatttttattttttatttttgcgggtacatagttggtgtatatatttctggggtacatgaaatactttgatacaggcatgcaatgcgtaataatcacatcatggagaatggggaatccatcccctcaagcatttatcctttgtgttacagacaatccagttaacctctcttagttattataaaatgtacaattaaattattggctacagtctgttgtgctatcaaatactaggtcttactctatttttttgtaccaatttgccatccccactcccctgccacgcctcactaccctttgcagcctctggtaagcatccttttactgtctgtcctcattagttcagttgtttcgatttttagcacctgcaaataagtgagaacatgtaatgtttgtttgtctgtgcctggcttatttcatttaacataatgacctccagttcttccatgttgctgtaaatggcaggattgcattcttttttgtggccgaatagtactccattgtatatatgtgccacgttttctttataggatactagtttaatcatgtctttcccaacattgcttattatttatgttcttttctttattgtgagaaaatagacataacatttaccattttaaccagtttttagtatacagttcagtggcattaagtacattcacactgttgtgcaaccatcaccaccatccacctccagaacttttagaaattccccccactttctttcactttctttttacttttcttttccttttttttttttttttttttttttttttagctaggatttcattctgtcacccaggttggagtgcagtgcatcagtcatggctcactgcatccttgaccttctgggctcaagcgatcctcacaacccagcctcccaagcagctgggactacaggtgtgagcaccacacctggttattttattttttaaaaaaattttttggtagagatgaggtctcactgtatttctcaggctggtctgaaactcttggcctcaaggaatcctcctgccttgactgacctcccaaagtgctgggattacaagtgtaagccaccacacctggcctaaaatccactctttgaatggagtttttcaacactatgaggattacatgaagaaaagagcctggggctgggttggagtttctgggctgggggctttctggagggtatttagtggtcaagggtcatatgtcaggtgttctgaatcctgagcagcaaggacatggtgtgttggcagctcctgacccctgaggattaccagcgatttctagacctgggcatctccattgctgaaaaccgcagtgccttcagctaccattgcaagaccccagattgcaagggatggtgcttctttgaggatgatgtcaatgagttcacctgccctgtgtgtttccacgtcaactgcctgctctgcaaggtggggcctgcagggactccccccacctagtcactgtcatcttgcctggagctcaccacactgcagtgcgtgttctcctgggaagggagctgtgacactggcctgctggtcatgacttagagctacatgtcagtgggagagtgtggcttgagcctgaactgagccctggccccacagacggagtcccagccccagccccagatggagcctcaaacctaggcagccctggttcacaatggagccccgaccctgggccagtctgaccccagtcacagactgaatcccagtcccacattgagccctgatcccatccaagtccatagacttggcctctgaccaaacctgaccctgcacttgtcacttaaggtggtcccatattcagctcagaccctgaaccgagctctgaccctggcttctgactgaatctgtgacagactaaggcctgaccctggccctataccacgtctccacccgtgtcctcaactgagtgctgaccccaaacctagacagccctacctgatccttcccccaggcctgtccccgccgcttcatctcaaaagttgaaggtgaggagccggtaaacaggtctggagcctggtctcagactcagcctgagcaagctcagtctggggtcattgggcctgtaaccccgggcaggcccttgttagggatgcagggtctcaccctaggggtataagggatttctgtgcccatcagaacttaaataagctgggtgtggcagcacatgtcagtggtcccagctactcaggaggctgaggtatattttgctgttagcatatgtgatgaccttgacttcacctccctggcgccaatatcctcttctgtaaaatggcttatgcattacaaagtgaggtcctgccagtgactacacctagaggcattaagtgcctttgtggactcctgccctgcacctcacctctcccagcttcttaaccccctgaggaaccttcttaccttgagtccctcacccgctacaggccatccatgagcagatgaactgcaaggagtatcaggaggacctggccctgcgggctcagaacgatgtggctgcccggcagacgacagagatgctgaaggtgaggctgggacagggccgaggcctagggattttaagttctgggatccaggtgggggctgggggcttcccagtaagggctgtgctcacacatccctggaggctctgacctcccttctggctgtcactcccatccggaggtgggacttaggccgaatggtcatgtcaggaagagcgtctgggtggagggtggagaccacaggaatgaagagggggttgctggatggagcctggcctggcagagccacacaggagagactccacagctctagagggtcaccaccttctccctgccatggggaggggccaggctgggtgactgccccagccccgccccagggccagcacctgccccactccaggtgatgctgcagcagggcgaggccatgcgctgcccccagtgccagatcgtggtacagaagaaggacggctgcgactggatccgctgcaccgtctgccacaccgagatctgctgggtcaccaagggcccacgctggggccctggggtgagtctttgctcgtggtggtgtggagagggtgcccttgtgggctttgccttagaggagggctgggaaaactacagcccatgggccatatccaacccagcacctgaatttgtacagctcccgaggtaagaatttttttttttttttttgaaacggagtttcactcttgttgcccaggctggagtgcaatagcacaatctcagctcactgcaacctctgccttccgggttcaagcaattctcctgcctcagcctcccaagtagctgggattacaggcatgcgccaccacgcccggctagttttgtatttttaggagagacggggtttctccatgttggtcagactggtctcaaattcccgaccgcaggtgatccacctgcctcggcctcccaaagtgctaggattacaggcgtgagccaccgggccgcaagaatgttctttacatctttaaatggttgaaaaaataccagaagatgactattttgtgacgtgaaaattacatgaaatccacgtttcagtgtccgtaggtaaagtgctttggagcacagccgtgttcattcattcacatgttggctgtggttgcttttacactacagaggcagaggccgtatggctgcccggcccaaaatgactggccctttgcagaaaaggtttgcccactcctgccctagaggacagcaagtaaaggttcgatctggagtcagaggtggattggcccctggctctggcacatactgactgtgtgattaggctgcctgccactcacctctgtcagccccatttcctctgtgaaatggagatgatagctgggcttatctcaggcttgttgtcagaatcaagtggaaaaattgcaagagaagtgcttagagagcctgtcacttggtgagcacccttgcagatggtagctgtcgttattaggggtgtgctctggaattgggggcctgttgctacgttcaggtagactttcagacaggtggaggcagaggaaactgccctctcgcatgctgacatgtctagaatatgcagagtggtcagatcctctccctggcctgttcccggatctaggcgtgggtagactgagtgctgtgggagcccagaaaaggcctcagtgactctccatcaggtagctgaggctgaccaggccattcttgcaggaggacctgcagaggcaaaggcccggggtgggagagcgctcggctgtgggggcagtctctgcactgcgctgacattctcttctcttcctcccatcctctagggcccaggagacaccagcgggggctgccgctgcagggtaaatgggattccttgccacccaagctgtcagaactgccactgagctaaagatggtggggccacatgctgacccagccccacatccacattctgttagaatgtagctcagggagcttcgtggacggccttgcttgctgtagcgttgtaggggccctgcctgcactgcggttgtccacggtcacatctgccccagtgcctttgtccttcccttggggcttgccggccagacttctctcccctgcggctcccacctctgcctgaccccagccttaaacatagcccctggccagaggccttgctgggtggagcctctgtgtgactccatactcctcccaccacaacactcatctgtcaaacaccaagcactctcagcctccccgccttcagctgtcagctttctggggctaacttctctgcctttgtggttggaggcctgaggcctcttggaactcttgctaacctgttcagagccaggaaggagactgcacagttttgaaagcacagcccgtcaggtccggctctgcgtctccctctctgcagcctgtgtaagctattataattaaaatggttttccgggaaggga

SEQ ID NO: 2195 - DNA, 756 bp, Homo sapiens
tatcgattcagcagtatttactagaacccactctgtgctggtcggaggttactaagacagggtcctgggatgttcattctctaagtctttcctccgctctgtgacccaccctccttccccttttgagatctggtatttgatgcccaacacattgtccacgctgtgacgtgaccatcatcatagcaggcagagggcgcctctgctgctgaaggcctgtgattttgtggggaagggcctgttctagcaactggaaaggcactgccacctgccgttggatgccaggactcaagagctggccccagtcactgtgcgcagagctgtctgagaatgtgtgagtggactgggtccttcggcactgcctgcattggctcagggcagtcaaccgtcgcagaggatgaggggcacactcaggcagcctccccggccctggaggcagaaaggcccaggcagaaccactgactgggaggaaacagaaaaagcagaggagagccaggctgcaggcgtgtggatgggaccagctcaggcagacgctgtctcatacccactctcccctctcttgccagggcctggcctggtgtctctcaggagcctgggcatgagacaaaagcagagattgttctcttgtggtaccacaggctgtaaccagtccacccagtgttgttttagaaatttaaatcggttgcccatctttttaaattggcaacatcgtttaccacattaaaatctagatgccctgcttctcttgaaaatgtcaaa

SEQ ID NO: 2196 - DNA, 288 bp, Homo sapiens
gggtctcaggtttcttatcagttaacagttagatggggataataatgcctacctcatagggcttttgtggtagttaaaagagataatatacatacaatgacgaacatagtatatagtagatgtttaatgtctaaaattttttttcgtgttaagactaacttatctctgaggtcttttctcaattttttaattcttgtagcaaagcttaattttttaaaaagaaacagattgttgctttgttttccaggctgcagtgcagcagttcaattgcagcacaaagcagcctcg

SEQ ID NO: 2197 - DNA, 309 bp, Homo sapiens
ctgtttttttttttttttttttttttttgagatggagtcttgctgtcgcccaggttggagtgcagtggcgtgatcttggctcactgcaggctccgccccccggggttcacggcattctcctgcctcagcctcctgagtagctgggactacaggcgcccgccacctcgcccagctaattttttgtatttttagtagagaaggggtttcaccgtgttagccaggatggtctcgatctcctgacctcgtgatccgcctgcctcagcctcccaaagtgctgggattacaggcgtgagccaccgtgcccggcca

SEQ ID NO: 2198 - DNA, 252 bp, Homo sapiens
accacagagtgttataaggatgaaataacacaatgtgtgaaaacactgtggaaaactctaaagcaatggcaaatatacatgtatcctcagccctcccattctggtcctggtgacaattttcatttctccccccgcctcttgagcataaaactatccatatatgtatctctgtcctctcttgccgttctggactttggtagttgcaggttgaggcttcctttcctgtgttgacccctttgcacttcctacaag

SEQ ID NO: 2199 - DNA, 111 bp, Homo sapiens
tactcaggaggctgaggcaggagaattacttgaacctgggaggcagagattgcagtgagccaagattgtgccactgcactccagcctgggtgacagagcaagactccatct

SEQ ID NO: 2200 - DNA, 241 bp, Homo sapiens
aaaaagtgaaagaaagtgacaaactagttgcaacaagtaaaatcaccctacaagacaaacagaacatggtgaagagagtcagcatcatgtcttacgcgttgcaaggtaagatgaaagggtccttatgaggtgctggtggaagtttttttttccccagcaaagtttcccttgatagagagaaatccagatgtgagcagcagttaagtaagtgagaccttttaagcccctcgtttgcaggatc

SEQ ID NO: 2201 - DNA, 8576 bp, Homo sapiens
aggtgaaacagatctcaatgatgcaataacagaagcaggaaagacttatgaagaaattgccagtctcgtggcagaacaggtactaacataatcacacaattccaattaagatttgttgctatctagtccacatatttaatttaaaacctgtcttaggacaaacgtcccaaataagtaccctcttcttttctgtttctgtgtatcttttttaattgtgtttaatcatggtttcttaggttaagacaaagtggatgaatacatttgtcatcaagaaatctaaataggccaggcacagtggctcacacctgtaatctggcactttgggaggccaaggcgggtgaatctcttgagtccaggagttcgagaccagcctgggcaacacagtgaacccccaaaaattagctgggtgtagtggtgtacacctgtagtcccagctactcgggaggctgaggtaggaagattgcttgagcccgggaagtcaaggctgcagtgagccatgatcataccactgcactccagcctgggtgacagagcgagaccctatctcagaagaaaaaaagacatctaaatgaatgcactccagtattgatgcctctgatctgttcttagccatcaggggattctaaagaacaggaaagaatgctggctcagatctgtatggaccattgcttagcctctctgagctgtggtttccttatctgttaatctgcagtggtagtgcctaccctgtatgattcttaagatttaatagctcataaataaaaagcacctgctacagtccccaggacagggtaggtccttgtcatagctacatagcttttattggagtctttagtaccccagtttcaggggctttttagataacagataataagttcccttaagaagaatctaagttattttctaatcccttaattaaaaaaaattttttttcagatgactttaaactatgtgtatggatgcacacatgtgtacacacactaatgtggttgtgggctactttgctgatacttctaaaaaagcattcattttaataacatagctattaaagttataattcagaaaaaatggaaaaatttaaaattaccacttaaaatgattagttttaatatttttatattctctgctcatatttagaagttaaactacaacaactcatttgtttgtgtgtaaacatacagcattagctgaacttccttcatggtggtattattttgggccacgtcaaaataactaattttacaaaccaacttaaaaattacatgatgttttgttgttttctttacaacatatgattcaaagtatggcagtcttgggagttattttcttttagaaaaagtgatctgaatgcttaacactcaataatttagtgtagcacatgcaggatttatagtctttgggtataatagttctcttttccttgattttctgaatttctctgccagtaacaatcagcttgtatcttgttatagccaaagaaagatctccatttcctgatggaatgtaatcacgagtataaaggttttcttggctgcttccctgacatcattggcactcacaaggtaacctgatcgtagacatttatagaagacaacagcaggtgaaggaggcagatgtgcgcagtagtcagtattggttttatatgtttattattaaaaaagaaacaatctataattcccattagaaaggttttgtaactgaattttgacattggtttggggtgtcctcacatatgaattctggttttctctccctttttaaaaatctgtacatcacctcaggcatgagttgtgagtattttatattttatgtcaaccatagtagtctatcgtatattatgatgtacttggatttgttaggaaaatctctgcaaagggctggtctgtgatcttaacagtcctggcatgtggccattttagcattctgctttataacttaaatatcatgaaggggtaccataggtaaattaggtttgtacaacttcagataacttaatataaaactcagaaaaattagcttgctgtcgaaatgtatgccagcagcatcagagttgtaggcctggagcctaattaatgcatgagtatagagttgttccttccagacagcggtaaataacgagcagcgtgatgacactggagtgggaaatgtttggcagcttttctagccgcttccatctgagtctttaaatggattcagcgcctcttaaaaaatcaaaggaaagcccaggacttagaatcagcacacttaggcactagcttataaaatattctgttgtataaaaaaagagagagagtgcctgtgtgcacatgctgccctgtacctagccacatgacttccaaaacctgctaatgcctgatttccattacgtgctactcctcaaatggcagcggcttctgaatattacagagatggtgtgctgtttgcttttctcttttgttgtagcataaaactgttcattttagcttagtgacatttgtcaagaatagcaacctttttgcttccaagggacttgaaggaagttaaatttagatgctttcctctcttcttattttgtggaggtatttcctgttcagtagcaaatcagttatagaatatattagcattgttatattttaaactaatgactaatcatttcagctttattcatactgttgcattttatatttcacagggagcaatagaaaaagtgaaagaaagtgacaaactagttgcaacaagtaaaatcaccctacaagacaaacagaacatggtgaagagagtcagcatcatgtcttacgcgttgcaaggtaagatgaaagggtccttatgaggtgctggtggaagtttttttttccccagcaaagtttcccttgatagagagaaatccagatgtgagcagcagttaagtaagtgagaccttttaagcccctcgtttgcaggatcccggtgctgatgaaaatctgtaatatttatttaatttttcacctgtccaccttatctggctatagatgacagcttgattaaaactgtacattttattatttctgagagacatttaagattccttttgtaatctgtggtatcataatgctctattaaatgccagagcccagcttttagcagtctgtaacctgcgtgccttgggatcatggaatgtgaaggggtttgggtgtgtcattttaggcacaatttttttgtgtcaagaaaaaaaaaagatgaatttctataggtttgagtgtttttgagcagatgagggcagcaagtggatttttcctgttggcggatgggtggatggcacttggatgggcagagaatggagagcgtgttctgttaggaacaaaagccacaaaattgtggtgctagattgtgtcatgggcatgaaagagtaaaacatacttagaggttattgggaaataaattttgattgtgaaggaacttgaaagctctagacttgatgcaggcattaagaagccattaaaagggagtaaaaaaaaatcaatcctcaagggagaaggatttgctggttatggaggggagattggaagatgcagacactgtccaagagcccagccagaagaccatctcactgttgtagtctgagctttgagggcctaaagatgtggtactggggagaagagaatgaagcacatttgcaggcttttccaaggaacagctttcaagactggggcattcatgggagaaagagaaggatgagggaggtgtccagagccaggccactacggcaaaaacgaggaaccctgattgaagtttcgggttttgaagggtttgaaatggggagtttggttttgaacttgtgtttgaggttatccaaattgagaaatacaaagctttgtataacttcaagtaactgaatgtaaaatgtagaacagtttgcatgtcatgggaatctgtgcagccgctggctttctcagcctggagggtttgggagaaggcggcataggaggcatccgagggaggcaatgaggtcctctgatgacgaagactcctctagagttgggggcaggggcaggggggacagagaaagaaggaatccatgtattcagcaaacatgaagaaagttgtccctcagcatccagtcctcctgccctgtgagaggttgagttctgacagcgtcgctggtgctcaggggcagcaaggcttcccgtactgaagaagggtctcccgctgtcccacacgctgcccagcctttcaccagaaacctgctgaagcaattgctgtgcaggagggagcggggcagggaccccagctgcctgctaggtccagtgcagacacaccagaggctttgaactgcagtcatctgtaacaaatatgaccaagtattttctatttgatcgattctgttagagtaataggctgcatttgggtgatttatctgtattggattttatagttttgaatatgcaagacagtgaaagtcattcatttactggaaagtaatgtttgtcattagcttgttttgttttgtttgttttgtttgagacagtctcgctctgtcacccaggctggagtacagtggtgcaatcccggctcactgcaacctccatctcctgagttcaagcaattctcctgcctcggcctcccaagtagctgggattacaggcacctgttgccatgcccggctaatttttgtattcttagtagagatggggttttgccatgctggccaggctggtcttgaactcctgacctcaggtgatccacccacctcacctcccagagtgctgggattacaggtgtgagccactgcgcccagctcaacttgtttttctaacctcttagtaaagtgatttaccaagaactgacaacagcagccaaccagattaggtcaggttgatgattaattgtaactgagcagagaaaccaggtgttgtcatttgaaaacttgagggaaaactgattgatgttctgatttgggttgtagctgagatgaatcactttcacagtaaccggatctatgattacaacagtgtcatccgcctgtacctggagcagcaagtgcaattttacgaaacggtgagtgggcgtccacgtgcctttcgcatgtgcttgaggagagggttcctggtaaaccactttgaccatgtaaagttaatctgtttgtattctttaatcctaagtaataaaccaaaggagcctaaattttggacaggatttttttaatctcctaattccatctgccctttgctttttggataacactgggttaaaaaagattttcttctgaagcaggggtcttggatgctagttgcaaggccccaagaagttccttattgtgcagctccttccccccgtcacagcctctctgtgcctctgtgcaccaggaacggtgctgaatgagatgaggtcacccagccgtccctgggactccgttggcagctggaacaggagcctggcaccacacaggaaaccaaaggcagcctttgctttttgtgaatgaggttttcacagtgcgccatggaaatcgcagagagaaaaccaaaaaagcgagatgtgggatggttttattcacaaaacaataacgaaaacttaaatttttcttacctctgcttagtaattttgttgtttaccagagtctatagaaaacaaaaatctagtagcatgtctccctcagacacctgcaggtaaggtctgtaatgtagaatccagcctccgctggcggccttgctgcctacccagctcccctctggccatgggatctaagccatgttcatggggagtggtgagcaagccctctgctcagccatactggtggcatctgcgagctggacactgctgaaaacgccgggctccagcagccagttcttaaaggagaactgtgcttgatgtacctaaggcataattgcgaatcgcgtcttggacagctggtttgggagactaacttacgggaggaactcacctaagccctgtcctcccttacaggacgtgggccctatgctctttaaatgcacacttttcccgtcagttggggccattgtggatttgcctttcattgtatatagcaatataacagattacatttgtctgtgtgagaaaataatgcaagggcaactctcaaaattttgatagtgttgatttattgattttcaagtccaggtatggtatagtgacattgtaattcagaatagaaaaccatgtatttcatcactgtctttgcataaacctaagtagctgatataacattgttaggttttagatctaagttttatggcaaagtaacccttaagttactaaaatttgtgtatgtgttcatggagcagacatatattgagtgtttcttatataccaagccctcgtgctggatgtttagcatccagggatggataagacagctgtgccttcaaggagcaagaggccctggcgcagagaccactgcagcgcctcgttagcttcacaggcaggctcgtgctgtctgcacactcagcagtgacagcagggtgtggccagggcgacacaaccttcaggggattctggaagctcatactcctccaggaaagagggggctctaggcaaacatgaaggcctgagcccccagctcatctgaggaaaagcaggtggtctggaagcgccgctagggcagaggtggggagcatgtgtagacgcctcccggcgggaagggaccaccagggccagctcgggccccagcgctgccggtgtcattcggggttaaggtctgtccagcagcaacgcggggcagggctggtgccaaaaagaccagttaaagaattggaatttgtgtcatgtttaacttgttggagttgtgaataaagaacactgtgaggtcgtaatgggagtgatatctcaacgttgttttgttttgctttcttgtcagattgcagaaaagctgaggcaggccctcagccgctttccagtgatgtaggacagaacgggccttgaagagaatgccgcgtgctttctcctgacttggggcaatgcaattcaaaactttttttcccctattattcagaaaaaaaaggaaacaaaaccaaaaagaaagagttgcaaaaaactgcatttattttattagccaccctaaatgcgtcagttatttagggatggtcttttgttcatttccgcatccattatttaaaccagtggaaattgtctctatttttggaaagtacttaaaagttaccagaattttcaatggaaaatgaggggtttctccccactgatattttacatagagtcataatttatatgtcttataaattataagtcttatataatttataagtctcccacaatcttccagttcttacccagtgtcagataattaattactaattactttcttaaaaacatgaactatgccagaataaaaaatatctatgtttgtatatttttataactcctttcagtcctctggggctcctgtcattgagggaagtcgttacgcctttcactgccacagttacagctcaagtgcttacacttcaagagggaggacgctgggggcccctggggctgctagtgccatcgtggtgtgtggcaggtgggccatcccatgtccctccagggggaccccacagcctggcagatgagcagatacccctggccacccatgtcctcagcgacatttctgatgtgctgctcttatgtgaggaccagtgctttctctctttgcacttccttcctaatcttggttaaggcatgttttatgccatgaagaatacattagaagaattgagggactttgtagagaattttgtggctttggtccaacgggtgagtggctgtgcggaggcctgtgttcgggagggcctgggagaaggagggcacccagcaccccggcgtctctggccctttcttattctttggctcctcatccaccgtgatgagaagcgctgctgtggccacggcacactgcttggcttgggtggcgggttcatggccagttggtgtcatcagcaaagagaaaaagcacaggttagctccccattagatggaaaagtgtagggactgagaagggctgcagcctcagcagtgtacagagtccccggcgctctgaggttggagagaaagaacagaccagcgcccttcccgactacatccgaaacttcacacagggtgtttctgagcaccagcacttccagcgcttcacttaacggcataaagcaaaacaggaccttggcacaccgtcagctcgaactcaacactggcagccaccgtctcacccctgcggaggagcgctcccgtctcccacaggtgccttaccgcgttccctcccgctgctttcatttttctgacctaataattacgggaaatggaaagtctgggccagcatcaataaaatgacaccaaaaataagtagatgaaatcaaatgaatatgagaacatcttgttcttcaatatcacgggtttttgttaatgtttcataagtaattctccccacttgatttttcttctataaaatcccatagaacaatgtttatgctatagccatttaatatatgtacaaattgtaaagaatatgtataaatgttttacacgaatgtaagagcatgtagaagccaacatataaataaattgtttaaaaaaactgtacagtaaattctcaaagcactttttcaaaacac

SEQ ID NO: 2202 - DNA, 1112 bp, Homo sapiens
atctaaatgaatgcactccagtattgatgcctctgatctgttcttagccatcaggggattctaaagaacaggaaagaatgctggctcagatctgtatggaccattgcttagcctctctgagctgtggtttccttatctgttaatctgcagtggtagtgcctaccctgtatgattcttaagatttaatagctcataaataaaaagcacctgctacagtccccaggacagggtaggtccttgtcatagctacatagcttttattggagtctttagtaccccagtttcaggggctttttagataacagataataagttcccttaagaagaatctaagttattttctaatcccttaattaaaaaaaattttttttcagatgactttaaactatgtgtatggatgcacacatgtgtacacacactaatgtggttgtgggctactttgctgatacttctaaaaaagcattcattttaataacatagctattaaagttataattcagaaaaaatggaaaaatttaaaattaccacttaaaatgattagttttaatatttttatattctctgctcatatttagaagttaaactacaacaactcatttgtttgtgtgtaaacatacagcattagctgaacttccttcatggtggtattattttgggccacgtcaaaataactaattttacaaaccaacttaaaaattacatgatgttttgttgttttctttacaacatatgattcaaagtatggcagtcttgggagttattttcttttagaaaaagtgatctgaatgcttaacactcaataatttagtgtagcacatgcaggatttatagtctttgggtataatagttctcttttccttgattttctgaatttctctgccagtaacaatcagcttgtatcttgttatagccaaagaaagatctccatttcctgatggaatgtaatcacgagtataaaggttttcttggctgcttccctgacatcattggcactcacaaggtaacctgatcgtagacatttatagaagacaacagcaggtgaaggaggcagatgtgcgcagtagtcagtattggttttatatgtttattattaaaaaagaaacaatctataa

SEQ ID NO: 2203 - DNA, 384 bp, Homo sapiens
gcgtatcataaccacctgggagttgccaagaagcagacagtctcccagtgtctgactctcggatatttggatttgactggtgtgaggcaaagtgaaaaagggatgggggaaatggagatggcacgggctcctcagagcgtggtagccgactgtgaggaaaagcagagggaatgtgaaagaaaataagagaatccacgggatttgatgcctggaagattctccttcaagtggcaacatggcatatatatccttctccggggagtcacatgcaccatttggttcttagatacgttgatgttttgatttttaatgatttgtatcaacctgtaggtaccacagaagagctgtagtcatacaatcacataacttttacaaatatagtgg

SEQ ID NO: 2204 - DNA, 305 bp, Homo sapiens
ataaatggctgcatttataatgcaagcaagaaaacacgttgatgttagaaaaaacgggagagaaacaaatagttttctctgtaaatgtactcttttcctgggatttttccctcaaaatccagctttctgccttagttttaaaatatattgactttctgcttaaaggagaatacatttgaattcatctagacaatatcttttggttttctaattgctttccctcttttattggcctgttaaggtaaagcccacagtacaaggaattaggaaaattggattccagatctgtctcaaccgtcaatttt

SEQ ID NO: 2205 - DNA, 305 bp, Homo sapiens; identical to SEQ ID NO: 2204

SEQ ID NO: 2206 - DNA, 278 bp, Homo sapiens
acaaaagggggtgggctagcttgaagcaagcttacagtggcgtgacagcagggatacagaggcagaacaaaaacagttaatcaaattgttgtaacaggtttataactcaggattgcacataaccgttgctatgcaacccagatgtcccttatctaggttagcctaggcacgggcttatcccataaccttcactgtggtgcccaggcagctcaggcttctcatgaccttcgctgtacttcttagataaaacagaatacttgaagtcatgagttacagag

SEQ ID NO: 2207 - DNA, 278 bp, Homo sapiens; identical to SEQ ID NO: 2206

SEQ ID NO: 2208 - DNA, 967 bp, Homo sapiens
accgcacggggtatggtccccgggtccgagggcccggcccgcgccgggagcgtggtggccgacgtggtgtttgtgattgagggtacggccaacctgggaccctacttcgaggggctccgcaagcactacctgctcccggccatcgagtgagtgctgtttccgcgactctaaccccgccctcccacttcagtttcgcacagtttcttgcctgactccgacctttcacttcctaccctcacaggtattttaatggtggtcctcctgctgagacggacttcgggggagacgtgagtctagggactcctgggcctgagggaggaggggccgggggcctggactcctgggtctgagggagggagaaagggctgggcctggactcctgagtttgagggagcaggggctgggggtctggactccttgttctgagggaggagggcctgggggcctggactcctgggtctgagggtggaggcgctggggcccggattcctgggtccgagggaggagggagctgggggcccagacccctgggtctgagggaggaagggctgggcgtctggactgctgggtctgagaaaggaggagctgaggcctggattcctgggtctgagggaggaggtgctggggcctgggctcctgggtctgagggaggaggggccgggggcctggattcctgggtctgagggagaaggggctggggccgagattgctgggtctgaggaaggaggaagctgaggagttcctggttctggaggaacgggaagctgggagccctgattccttctctaagggaaaagggaattgaggtcccagattaaaagttttctgtcctcccttcccagtatggggggacccagtacagcctcgtggtgttcaacacagtggactgcgctcccgagtcctacgtacaatgtcacgctcccaccagcagcgcctatgagtttgtcacctggctcgatggcattaa

SEQ ID NO: 2209 - DNA, 967 bp, Homo sapiens
accgcacggggtatggtccccgggtccgagggcccggcccgcgccgggagcgtggtggccgacgtggtgtttgtgattgagggtacggccaacctgggaccctacttcgaggggctccgcaagcactacctgctcccggccatcgagtgagtgctgtttccgcgactctaaccccgccctcccacttcagtttcgcacagtttcttgcctgactccgacctttcacttcctaccctcacaggtattttaatggtggtcctcctgctgagacggacttcgggggagacgtgagtctagggactcctgggcctgagggaggaggggccgggggcctggactcctgggtctgagggagggagaaagggctgggcctggactcctgagtttgagggaggaggggctgggggtctggactccttgttctgagggaggagggcctgggggcctggactcctgggtctgagggtggaggcgctggggcccggattcctgggtccgagggaggagggagctaggggcccagatccctgggtctgagggaggaagggctgggcgtctggactgctgggtctgagaaaggaggagctgaggcctggattcctgggtctgagggaggaggtgctggggcctgggctcctgggtctgagggaggaggggccgggggcctggattcctgggtctgagggagaaggggctggggccgagattgctgggtctgaggaaggaggaagctgaggagttcctggttctggaggaacgggaagctgggagccctgattccttctctaagggaaaagggaattgaggtcccagattaaaagttttctgtcctcccctcccagtatggggggacccagtacagcctcgtggtgttcaacacagtggactgcgctcccgagtcctacgtacaatgtcacgctcccaccagcagcgcctatgagtttgtcacctggctcgatggcattaa

SEQ ID NO: 2210 - DNA, 997 bp, Homo sapiens
ggctcttccagcacagaactaactctcagacccaggagtctgtcccctctgtgcctagtatctcacttgtgaagtggggatgtggatagtacttgtattagtatttcattgtattacttattcttagctgtataatagattaccaccaaataatggctgcatactgcaaacatttattatctaacgcagtttctgtgagtcaaggacacaagagtggcttggctggatggttgggctgagggtctcacaaggcaatagtcaggaggtcggcaggattgcagccatccaggggtttgactggtggtggggaatccgttcccaaggtggcgagtctgtggctgttggccacaagacctctccacagggctggttgactgtctaacatggcaactggcattcctcagattgagggacccaatagagagagcaaagaggaagccccaggcctctcttgtttttgaggaagggtctcactctgtcacgcaggctggagtgcagtggctcagtcacggctcactgcagcctcgacctcctgggctcaagctcaagcgatcctcccatctcagcttcccgagtagctggagtagcagggacggtagccaaatgccagcacacctggctgatttcttaaaaatatttttgtaggtcgggcgtggtggctcacgcctgtaatcccagcactttgggaggctggggcaggtggatcacctgaggtcaggagttcgagaccagcctgtccaacatggtgaaaccctgcctctactaaaaatacaagcaatcatcctgccttgacctccctaagtgctggagtgctgaaattacaggccttagctgggcatggtggcgcatgcctgtaatcccagctcttgggaggctgaggcaggagaattgcttgaacctgggaggtggaggttgcagtgagccgagatcacaccattgcactccagcctgggcaacaagagtgaaattctgtctcaaaaaaaaaaaaaaaaaaaaa

SEQ ID NO: 2211 - DNA, 3448 bp, Homo sapiens
tgcttcttagtttgtaataccatacctcacagtaggtagaagaatgaaaacttctgcaggtgtgtaattttgaaactagtcctctaaaaattccctattactcctatagcaatctaataaaaactacctacatagttactgttttctttccttctttgccaaatgttttataataaatctcttaattacatacatttttctacttaagattaaattggaaatactgtcttagcaaaagtcttgggactatctaaactcccacacatagataaatctgatttggagagagaaatttaaaatatttaattaaaggtgatacccacattttcaagtttttaaaagagggagatggctttgtatgcttttgtgtagtttagaacagatacacattagtaaaagataccaataatcattagagctcaaggaagttattaggtgcagcctctggagccatactcacgctgcagtgcataatgggaaaattaggagcattaataagaaatttcagtagtgtttgtaaggaaaataagctacttactgagatctgtttcttctattgcatgtttgcttttgagggacagcttctgtcaaaagtgaaatcatcaccagaactgggcctgttaggaagaatagggttttatttactttttatgtcaattaacttcaacaaaaaggccacgctggctgctgtcatgccatctgggtatgcattaaacattaatgatgatcagcactgaggttctatttatcttgatttggctttcataaagtttgtcagaatggtgctggaggaccagaagtgctaaggagaaagaagctatgggccaagttaaagaatttgaatgcaaaggccaggtcaatggagttttcataaactacataatttaccagggtttatctcatcttctcaatacatagatttaacaacatggaatactctgcttttcaagagctgcgtaagctagtcctgagataagatgttcaagagagcatgctaagttgcatgtgctagatgagagacacctttacagcccctccgctccaaccagaggtgacacaggaagctctgtaaagttcaagtaaagcttgaacacaggaacactacaactgccagatgctgaggagaatcaggaaagcaatgagctagactctttttttagtcaattaagtgggttgttttagatgtatagagtattgatatgagttaacactttttagtagatggcaaagtgggcttgatgttcaaaagtaatgttcgagttagggttcatggtccctttctcagtaattttttcttaataaaagtaaacactggttcaaagacaaatagcaagtattccctcctgtgctatttatagagggctcaattcgtagaaaggcataccctccaatgcaattctgtggctgtcccttacagtggtttcagaatcacgaaaaaacagctagtaaataggatagaaacaataaaagaaagagtttagaagttccctgtgagcaatctgtgtgtcttcagcgagcttgaaccaaagtcttcatatcctgacccactgaattataagcaattgctacttgcccatcttgccaaagtagtccaaacacacttcaatgaggacagttatatttagcaggtcctcacccctgcaagagacagcatatcctcactattattattcatgtgttattggcaaaaacatagcttgcatctttccagaggcagagtttcaaagacagggttttctttgagacataagcacattgcttaagtacataacaaggttattaacacttgcactcaggggaaaggaaatagctattgcaaattaatgtgaacaacttaataaaataagctgtttgtgtatatgaatttagctctaggtaagcaaaatgcacacatcatataaaaataaattgcaatgatcagaccaagtggctgtgctggacatcaaagaaaagacatgctgttgccatcaggagaactctttcttatatgcgatagccaagatatcttctttaatatgaaaaaagttaatttctgaatttcaaaaagagtaagattagctaattggtcttcctaatttttatgcctttagagtttttagtctattcaagtagaagagtccagcgaggccaaagaagggttacggtgttcaagttctggttgttggagtttttagcccagagtgacatactgaaatcagtaaataattattttataatgacacagcacaactgccttgttatgaatttttcttaaatgcatatatactgtatttaaaattaaaatatagataccaatttaccaaagatacatattactaattctaagcaaaactaaaaaaaaaacccaactcatcataatttaagaatcaaaatgtagtttgtcttaagaatttagtggttatactggaaatgcattttcaactcctatgttctaaagtttatgttcaaatggtgccagtgaatttttatatgaagggaaaatgcctgctttttttttttttttaacagatgtaatttcacttaaccctttgcgctttcccttagttgtcatttaacatacaatactggctttacttatctctagaaagaagaaggcatgctacaaataggaaggaattgtaataatgatatttggcctctactttgtcttagctgttaaactgtttttagtatttttgttaaatatttgcaaagggaagcattttctacagaggataattaatttcaagaaaaatatcttgagttttaagaaataaacatctccagaaaaggagaaagtcgattttataaaatgtcgcaactctccaacatttggggtagtgactccttttttgttaggacatttgaaactagcaagcagccattgtttctaaagaattctggcttcacattgactcatgtttctttcactccattttgaaatagctaaaaatcattaaaactgtaaatattttgttgcttgggtaagcatcttctgggaactttgtatctatggtatataatcatagaattttatattttcatataaagctaatttttttctagtttcaactccgtcatagttttttttcctttttgtggtggatatgtgaattcaactttctgtgtattgaagtagcaaaaaccatctttacattccaaaagaatccaacatgtgttatttctttgaggcagtgattgtgaaagttgggttttctttttaattccattgaccatttgtgcaataggaattagacataattagtcactgaaaacattcgtcacattgacccatttggaaaaagtgtgctttttttttttttttaaatttgttcagggggaggggttttgtaacctgaaatttttccctttttcttctgtttaaactatatcaaatcattctattatagtgttatttaatatgtaaattgtattgctatacataaaataaagtatggtttttgatgta

SEQ ID NO: 2212 - DNA, 3762 bp, Homo sapiens
gtttgggagtggtgatgggaataagtggagaggttggagtgtttggaattttaatatttgatatgcttatttgattccaagtagaggttatcagtaactgaatattcaaaatctagagtttggggaaataactggaaatggaattgtaggagtcattggtacatgaaatatgggtgagctccccaacgccctgtagtttgtgtgtacttgttttatgactgtccttcttgtatgtacagatctggcagacctaactttggctctatgggcgtagagagaagatggatgacaaactatctgaggctatggcagctgggagtggagaagatatactgaagccatggcttcagacagtttgtcatctcctaattcctttgaagaatcatctgccattgacttcctgttcccagatttctggctcaatcctggtctctcagtctcgtaagatcctaatacaagtctaggttgaagttcagattatcaagaattagcagtaataaagccagtgagttcagaagggcagggtagctggaaagtgttgctacttcccacccctaacctccaggtgattgtgaggacttctgcttttattgagtgacacgaaaagtaattggaaggttttgagcagaggggagacatcatcttacgtaagtgggaagggtgacatagctgcagtgagggaggttattcttctatcagtatctctagcaaatcaagtagtaatctggtggggaataacttcattcctagacatatgccctcacattcattaaatctgtggccttcaaaatatgttcaataacgaaatggatgactggaacactagtcaccatgtaaaactttttccacggaaaaataaataaattttgagattataatagtcaagctttcaaaatattaaatgttaatatattaaattaaaagttagtaagtctctggtttgtgtattccacaaaaatctttagtatactagccacaagctacatttacgtgcacaaggcttcacactgatgttttgttgcatgactttctctgtgaatattgtctgtaaatataagaaattcagtaagaattgtctttttttctacctaagatatatgttcatgttcttgctgagaaaatgtatggaagtaaaattaactaaaagagcatatatgttccagattggaagtgataatgtagtaaatattgtcttttatattccacaaacaggaagagtaattcttcatctaaagccacgacaatgagtgaaaatgtgagtatctttaaagcatatttatagaatgaatatgtttggggaatagggcagggaaatgaagtaattatatggactttgtgaattttcacttttaatacactttgcaccagtgtctatcactggtgtttaaaaggagctaagtagatgttagcttctgtaccctgtctaggatggcatgataaagatacctggcatttccaatagcagaagtgatctttaatcatatcattatttgtttcatggtattttctataattagtctgccttcttagtatcactaggtctggcattatcagctccctttgacagatgagtaaattaaaacacaggttcttacagggtaacagtggtggagctgggacccaggctcttttcttccctgtagcttgaccaagcagagtggttccagcagagctgtggttctaggactcacctttggttatgtgaagcacttggaacattttagggctatgcaatgtcttagtcatttgggctgctataacaaaaataccatacactgggtaatttacaaacaacaaatttattttcagttttggaggccaggaagtccacaatcaaggcaccagtagactcaatgtctagtgagagcctgttcctcatagatggagacttcctgctgtgtcctcacatagtagcaggggcaaaacaagcaccctctggcctctttggtacgggcactagctccattcatgaaggtcctgccctcatcacctaatcacctcctaaaggccccacctcttaatagtattgcattagggattaggtttcaacatatgaattttgggtgacacaaacattcagaccagagcacagaatatcctgttataattgaaaggaacatttcagaaatgtttgaaaagacgcagtaattacctaactcagaggttttaaggaacataatttagacacttggaccctttgtaaacactacattgatgcagcaaataccattgttactcagattttgtagctctttggatggatattcagccttctggatgattttctcaggaatatagtgggttggggcagggggagttcctatggttttagaggcctaagtcgtttcttgagaaacaaagcatgggttctcagaaatgctttactcatctatggcaggaattctgtcagatttcttctcagtagagtctggggggtggggtggggcgggggagcctggacatcagtattttaaatgcttacccacttttctgtaaaaatttgattttcaaaaactgttccagaaactattacagaattcaccttattttgtggtttactacactgaaagcttactgatgtttaattaggggacaagaaactttgttcccaccatttttgtgcctacaatttatggaaagtctttgtttctgcaatttacagaaagtactcttggagtgtggaatcgaatactcccatccctccaaacagtatgaagcacattgtggctaaactgaatgaacaaaagccatttattttttctttgccttcctctcagttgcccttatcaactaacagctagagtccccttcagttctcttgtgccctaccacagggtttctcaacctcagcactactgatattttgggccacatcattctttggtgtaaggtgctgtcctgtacatcataggatgtgtagccacaggcctggcctccaacaccagatgccggggcatcctcctaacaggatttgtctgcctctgccttccagtcctacctctttactctctaggcaaagcttcagagtaccttgtctgctaggagttagttagttaattccccataaaacaagtttaattaaatatatactggttttggccaggtgcagtggctcacgcctgtaatcccagcactttggaaggccgcggcgggcggatcacgaggtcaggagttctagaccagtctggccaatatggtgaaaccccatctctactaaaatacaaaaattagctgggcatggtggcatgtgcctgcagttccagctgcttgggagacaggagaatcacttgaacccgggaggcggaggttgcagtgagctgagatcacgccactgcagtccagcctgggtaacagagcaagattccatctcaaaaaataaaataaataaataaataaatactggtttttacctgtagaattcttacaataaatatagcttgatattcataagatttatgtttctttaaatatgaattcatatatttaaacctgttttttctttcttttcctaggatttcaagcacacaaaatcctttataatttaaagactccactttagagatacaccaaagccaccgttgttacacaagttattaaactattataaaactctgctttgtccgacatttgcaaagaggtacacgaggaaatggaattggtatttcattttaattttcatgactactaactcacctgaacttgctattttaaacaaatagttctgtcgacacctaaaatataatctggcttcttgtgtctgga

SEQ ID NO: 2213 - DNA, 3762 bp, Homo sapiens; identical to SEQ ID NO: 2212

SEQ ID NO: 2214 - DNA, 3762 bp, Homo sapiens; identical to SEQ ID NO: 2212

SEQ ID NO: 2215 - DNA, 2571 bp, Homo sapiens
agaatcctcttttctcccctaatatcatccttattctgatgctcgttcatcactaacacacccacagaaaggaggaagcgggatgggtcttatgcccaaggatttgcactttgtgtttacttccattcctgggaactaaaagcaacatcaaaagaaatgcctaatggctggagcccacaggtgtgcaccacaggatttgcctggtgtgtgtcactgatttcttcattaaacgtaatttagatggtcaaacacaaacccaagtggcttatttcacccctactgctgcttgccactgcttccttcttgtaagatttctttgaagaggatcagtgactttgacatcagaactcaccactggagcctacacaagtttgcagatacctttccctgcaggagtggtgacttcacatctttctgtctctaaaaattgtgcagtgacattccgggccaagtcccttagtcaggggttgacaattctgcttttggacaaggagggatgtggagggaagaagtaatagtctaccaggaaaatgagacgaaaaagctcagtatgactccctgcatctggtacccctcttgaaacacagtgggcacatgagcaatggctcaaacgaaaagtggatctaatgtgggtttctcaaccgatgaaccacaaaagcttccagctactattacaatgtgaaaattccaatgatccgtttaccagagcaattagactatgttaaaaattcatatcatttgtaacttcttttaattactgaattgatattaaaaacaaaatatggctagggcatgtcctattcttctgggcaaatgtggatgaaaaggtcacttgctacctttgacaactatgaacatgatggttaatcttctttctttttttttttttttttttgagacggagtctcactctgtcgcccaggctggagtacagtggcacaatcttggctcactgcaacctccgcctcccctccgcctcccagattcaagcacttctcctgcctcagcctcccaagtagctgagattataggcgtgtaccaccacacctggctaatttttgtattttagtagagaagggtttcaccatgttggccaggctggtctcaaacctctgacctcaaatgatccacccccatcagcctcccaaagtgctgggattataggcatgagccactgcactgggcaggttaatcttctttcaaaagagtctgctctttctacccaattggcgaagcaaatccccaggattcaccgaacaaatggattaagcacccactgagtgcctagcatgtgcctggacaccaggccaccgggaagatgctccccctttgacttgtctatgacatgctatgtctctcaccagatcccttcctggaggtcgggcttctgtaacatggctctgcccccaaaataaaattttcaccacgagtcagggatcggcaaacattttctgtaaagagccagaaagtagatattttaagtcataaggtccctgttaacaactacttgactctgccattgtagcacaaaggcagccacagacaaaacaagcaagtagtcatgtctgtgttccaataagactttatttacaaaaacagcaggcacagacaagatttggcccacaggcatagattcccaactcatggtggtgaagtacagaaaaaaacacctgtctacaagcttttgtaagaaatcaggctaaatgttacctatgttttggttggaagatttctttggtttgaggaatgctttcctcttgcattggcatgccaagaggatagatgactctgaaagacgcctcttcagacatacctgtcatcacacaagatcaacttcttcagtttaaatgacacaaatccatattgtggaaggaaaatatgtagtgccttagcttcactaatagttgtaaaacttctttttaagacatcaaaggctagaggattcattttatgcagtgcgaacatctaataacactctctgtgtcaaatatatattgtacattaccttaaactattgtaatagctaggtaaaaatccttgtataaaagaatgttttcccccacacaaagggcagagtattgagcactaatttcctattaaaagtatatatatgtatctgtgggtcactggtgtccagacttgtatttgcatttgtgtttacttgaggaacttgaacactaacaactggtaaaatcccattgtaattcttacagcattttgactttattttcctgcagtgaattgtgttgtgtaaagattagggctttaaaatcttattagcaagctttgttttgttttaattattgttgctgttgtaactagatttaatttatttttagttggaggtttgacctaagtctggaccaattgattgcttttcaatacaactttgcaaagaacttcctttttccacaggtggctttgttcgattaaagtctacactaataaaaatagctgaacttgttaaactttttagccccatataacagtgcagggaaagagtcatccacctattgttattcataaaacccaggaaactacaccctcttaccttctgtagctacaaggcta

SEQ ID NO: 2216 - DNA, 2571 bp, Homo sapiens; identical to SEQ ID NO: 2215

SEQ ID NO: 2217 - DNA, 2571 bp, Homo sapiens; identical to SEQ ID NO: 2215

SEQ ID NO: 2218 - DNA, 9192 bp, Homo sapiens
tcccaaagtgctgggattacaggcgtgagccaccgcgcccagcctattattcctaagaaagttgcaaacagtattcttttcagttgtgttagaaagtattggtctgtgtttataccattcttcttcatatttctttagttattaaatgtctttggtttagctgacttagtgaaatttattactaatttgaagttttgtttcacatatgaattttcatgaagcatgtacattttataatatacttaagtagaggttgagcattccttatccacggtgcttgggacctgaagtgttttggatttcggatttttttgtagctggaattaacaggagtgagtcaccacacccagctaatttttttatttttagtagagtcagggtttcactatgttggccaggctggtctcaaactcctaacctcaagtgatccccccaccttggcctcctaaagtgctgggattacaggtgtgagccaccacgcccagcttgcattgtacttttattggtataatgcaggtgtaatccaatatctaaaaattagacatctgaaatgagcattttctttgagcatcatgttggcactcaaaaagttttggattttggagcattttgggcttcagaattttgaatttgagaatcttaaactgtatatataattaaaattagattctgaagttaaatattctagaatatttaactctcactaaagacaatttagaactataattaaaaaatacgcctgtaatcccagcactttgggaggccgaggcgggcggatcacgaggtcaggagatcgagaccatcctggctaacacggtgaaaccccgtctctactaaaaatacaaaaaattagccgggcgtggtggcgggcgcctgtagtcccagctactcgggaggctggggcaggtgaatggcgtgaacccgggaggcggagcttgcagtgagccgagatcgcgccactgcactccagcctgggcgacagagcgagactccgtctcaaaaaaaaaaaaaaaaaaaaaaaaaaaaaatactctgagacatagatatatgttttttatgccaagatttgtttacaacagcattattttatgtacaattgaacagatttgtattataataagattaaatgcaaatctttctcaggaaaaatataaagaaaattataaaatttttttgataacatgattttttttttcttttagagatggggtctgtctctgtcatccaggctggagtacagtggtgccatcataactcactatagtctcgaacttctgggctcaagcaatcctcctgtctcagcttcctgaatagctgggactccaggtgtgtgcttccatgcccggctaatttttaaatttgttgtagagatggggtcttgctatgttgcccaggctggcttcaaattcctggcctcaagcaatcctcctgcctcagccccctaaattgctgggattagaaacatgaaccattgttcctggctgttaatgtgatttttaagagaggggttaaaaaaatctgttaacttagaataaagttttgacaatcccggttctggttagtgcataagttttcatctttgttttatagccatgaagtacaatcaagaagaaattgaaaaacagtcagagttagatgatgagcttcatcgtttgtcatgcaggatttttatcccctgaagaacctgctagagaagtccaccttcacccttaaccactggtgcctcaacttaatacttttaaaattcatttgtttctgttggaattgggatactaaggtgtgttaagtaaaatacaatatttactttttcattccttatgagtgacaaaatgtctgctttccaggtgtgagatttgaaggaaatcagacctttcctttatttatttatttattttttatttttgatacagagtttcactctcgttgcccaggctagagtgcaatggctcactgtaacctccacctcctatgtttcaagcgattctcctgcctcagcctcccaagtagctgagattacaggtgcctgccaccacatctggctaattttttatatttttagtagagacggggtttcactatgttggctaatctggtctcaaactcttgaccccaggtgatctgcccgcctcagcctcccaaagtgctgggatcacaagcatgagccactgcgcctggccttttccttgatttttaaaaagacctaatatcgttagtagaattctaatctttctccacctactttttaatttatttaaaaaatgagttgttagctatgaattagtaaccatttctttaaaagtctaagaactcagccagaaaaagcagcatcagcaagtggtgaagacaccaaattgaaaaatgtgcatatattgtttctagcattgccaacctgtttattgagacaaaagcaaatcaaaaccaatcaaacttttgatttagttttaggaatttagattttttcaaatattgctcatcaaattatgtagacaaacaattatatttcatgtttttatatatatataattttcacagcagagcttttagtttatattttaattgatgtcagccatgctcttggtgatcctgaatgccatgtagcagtttgattgtcagccagcccttgacagtgcacttctctttctctgctccaccctctggttaccatcaaagctctgcatgcctgtgtcaacaagttttgttttactaattgtttataatcaattgcagttaatagtttaagttttgctgggaaaatttgcttacctccttttattattttataattagtaataaatatatttcccaagcctttccagatttatgaatatatacctcagaattaaagtgttacaatatttattttacaattcttataattttggctactctgtagaatttttatttttattttattttatttttttgagacagagtcttgccctgtcactcaggctggagtgcagtggcgtgatctcggctcactgtaacctccgcctcccagggtcaagcaattctcctgcctcagtctcccaagtagcggggactataggcatatgccaccacacctggctaatttttgtgtttttagtagagatggggtttcaccatggtggccaggctggtcttgaactcctgacctcaggtgatccacctgcgtcggcctcccaaagtgttgggattacaggtgtgagccaccgtgcctggcctatttttattttttattttattttatttatttatttatttttgagatggagcctcactctgttgcccaggctggagtgcggtggcgcaatcttgcctcactgcagcctctgcctcccgggttcaagtgattctcctgcctcagtctcctgagtagctgggactccaggcgtgtgccaccatacccagctaatttttgttttttcagtagagacggggttttgccatgttggtcatgctggtcttgaatgcctgacctcagccgatccacctgcctcagcctcccaaagtgctgggattacaggtgtgagccactgtgcctggctaatggaattttcaaatgagtaatgatttattttccacatgatttcaaagttatgactagtccaagtgattttttttattatactttaagttttagggttcatgtgcacaacatgcaggtttgttacatatgtatacgtgtgccatgttggtgtgctgcacccattaactcgtcatttaacattaggtatatctcctaatgctatccctcccccctccccccacccccacaacaggccccggtgtgtgatgttccccttcctgtgtccatgtattctcattgttcagttcccacctatgagtgagaacatgtggtgtttggttttttgtccttgcgatagtttgctgagaatgatggtttccagcttcattcatgtccctacaaaggacatgaactcatcattttttatggctgcatagtattccatggtgtatatgtgtcacattttcttaatccagtctatcattgttggacatttgggttggttccaagtctttgctattgtgaatagtgccacaataaacatacgtgtgcatgtgtctttatagcagcatgttttataatcctttgggtatatacgcagtaatgggatggctgggtcaaatggtatttctagttctagattcctgaggaatcgccacacagatttccacaatggttgaactagtttacagtcccaccaacagtgtaaaagtgttcctatttctccacatcctctccagcacctgttgtttcctgactttttaatgattgccattctaactggtataagatggtatctcattgtggttttgatttgcatttctctgatggccagtgatgatgagcatttgttcatgtgtcttttggctgcataaatgtcttcttttgagaagtgtctgttcatatcctttgcccactttttgatggggttgtttttttcttgcaaatttgtttgagttcattgtagattctggatattagccctttgtcagatgagtagattgtgaaaattttctcccattctgtaggttgcctgttcactctgatggtagtttcttttgctgtgcagaagctctttagtttaattagatcccatttgtcaattttggcttttgttgccattgcttttggtgttttagacatgaggtccttgcccatgcctatgtcctgaatggtattgcctaggttttcttctagggtttttatggttttaggtctaacatttaagtctttaatccatcttgaattaatttttgtataaggtgtaaggaagggatccagtttcagctttctacatatggctagccagttttcccagcaccatttattaaatagggaatcctttccccatttcttgtttttgtcaggtttgacaaagatcagatagttgtagatatgcggcattatttctgagggctctgttcttttccattggtctatatctgtgttttggtaccagtaccgtgctgttttggttactgtagcctgatgcctccagctttgttcttttggcttaggattgacttggcaatgtgggctcttttttggttccatatgaactttaaagtagttttttccaattctgtgaagaaaggcattggtagcttgatggggatggcgttgaatctataaattaccttgggcagtatggccattttcacaatattgattcttcctacccaggagcatggaatgttcttccatttgtttgtatcctcttttatttcattgagcagtggtttgtaattctcgaagaggtccttcacgtcccttgtaagttggattcctaggtattttattctctttgaagcaattgtgaatggcagttcactcatgatttgtctctctgtctgttattggtgtataagaatgcttgtgatttttgcacattgattttgtatcctgagactttgctgaagttgcctatcagcttaaggagattttgggctgagacagtggggttttctagatatacaatcatgtcatctgcaaacagggacaatttgacttcctcttttcctaattgaataccctttatttccttctcctgcctgattgccctggccagaacttccaacactatgttgaataggagtggtgagagagggcatccctgtcttgtgccagttttcaaagggaatgcttccagtttttgcccattcagtatgatattggctgtgggtttgtcatagatagctcttattattttgaaatatgtcccatcaatacctaatttattgagagtttttagcatgaagtgttgttgaattttgtcaaaggccttttctgcatctattgagataatcatgtggtttttgtcgttggttctgtttatatgctggattatgtttattgatttgcgtatgttgaaccagccttgcatcccagggatgaagcccaccttatcatggtggataagctttttgatgtgctgctggattcagtttgccagtattttattgaggatttttgcatcgatgttcatcagggatattggtctaaaattctctttttttgttgtgtctctgccaggctttgctatcaggatgatgctgggctcataaaatgagttagggaggattccctctttttctattgattggaatagtttcagaaggaatggtaccagctcctccttgtacctctggtagaattaggctgtgaatccatctggtcctggactttttttggttggtaagctattaattattgcctcaatttcagagcctgttattggtctattcagagattcaacttcttctgggtttagtcttgggagggtgtatgcgttgaggaatttatgcatttcttctagattttctagtttatttgcatggaggtgttcacagtattctctgatggtagtttgtatttctgtgggatcggtgatgatatcccctttatcattttttattgcatctatttgattcttctctcttttcttctttatttgtcttgctagcggtctaccaattttgttgatcttttcaaaaaaccagctcctggattctttgattttttgaagggttttttgtgtatctctttcagttctgctctgatcttagttatttcttgccttctgctagcttttgaatgtgtttgctcttgcttctctagttcttttaattgtgatgttagggtgtcaattttagatctttcctgctttctcttgtgggcatttagtgctataaatttccctctacacactgctttgaatgcgtcccagagattctggtatgttgtgtctttgttcttgttggtttcaaagaacatctttatttctgccttcatttcgttatgtacccagtagtcattcaggagcaggttgttcagtttccatgtagttgagtggttttgagtgagattcttaatcctgagttctagtttgattgcactgtggtctgagagatagtttgttataatttctgttcttttacatttgctgaggagagctttacttccaagtatgtggtcaattttggaataggtgtggtgtggtgctgaaaaaaatgtatattctgttgatttggggtggagagttctgtagatgtctattaggtctgcttggtgcagagctgagttcaattcctggatatccctgttaactttctgtctcgttgatctgtctaatgttgacagtggggtgttaaattctcccattattattgtgtgggagtctaagtctctttgtaggtctctaaggacttgctttatgaatctgggtgctcctgtattgggtgcatatatatttaggatagttagctcttcttgttgaattgatccctttatcattatgtaatggccttctttgtctcttttgatctttgttggtttaaagtctgttttatcagagactaggattgcaacccctgcctttttttgttttccatttgcttggtagatcttcctccatccctttattttgagcctatgtgtgtctctgcacatgagatgggtttcctgaatacagcacactgatgggtcttgacgctttatccaatttgccagtctgtgtcttttaattgatttaatggtgagagagaaaaaaaaattgcatctagttctctttgctatctcccatgaatcattgcatttaacatgttatttctgctcaactttagttcattttcaatgtgcatttttagtgatgtcagagtatgtgtcatttaattaaatccccgcccttgctttagattttctgtgcatggggtgtgaggcacatatgcagtctgtgccatgttgtatttgttttgtaccatgttgtttggcctattttgcttccatgctgtcctccattgttaaggtgatttggagttgttttacttttgaattttatcctttctgttcttggtgtgacaactttctaaatatttccttattaaagtagtgatatgtagatgatttcctttttaaagcatatttactatgtcctttaatgttttaaacagttttatggaggtatttattgaagtatttttatcaaacatgactatttaaaatccctatcaactttgtgtagtgattctttcttgttctatgacacttagtaatatatcttagaatttgcatcttaatttttttctaactaaatctcagtcctaatcccatatcattttttatttcttttgatatgtgtgtgtatttattccctttgatgttcatagtatgtttcattgaggttcaaggttgattttttggggaaaagaaaaagcacctttgcagaaaagtcagtttttctagagctagttaggcaggccctcattcctggtttggtttcaattgcagagagttcttgtatctctgcaggggaatttctgactcatggggtgggtccctgactccttactcctctctgattgagtgaaccagcatctggggcaaatacgtagcagtcagatgctctgatgaatgtccctgttcagttctttgacttttttgtatcctccttaaataataatggttttaaagataagcagaagcctatctatagtactttatagatctcagcagggattattcatcttacagttaatacaggaagaaacatctttgatacggaaagactagggtgttaattcagcaatctctggttaggagaaaagtagcctagtttattacttcttcactacttttgcctggatgacctgaattttaatcaagaagttctttcctctctatatgcgctcccccattttcccacttttgtattgactttcccactattgtatttctaatgcaccttcttaatcactggagaaagctttgaggcatgtaagaggtcctagcaccattttcagtcttaaagtttcatagccaccagctttatgggactctattatcaggcctttcaaacaaattcttcccttccctcacaatcccaagctattgatcttttctctaaggaagccttttgtattactaattaagactaggtgactatattaaaacagggttatcttctaaaagatttatataaatgataaaacagaggctaagtatttttgtaaggacagcaatttgaagtcagttaatgcctagagtgactgtttcattcttctgctatggctctggtgacttcctgataattctgtccgagcccctgtgtccagttccaggacctaagaatggaagagctctggaggctgaaggtggaagatggatccccctttcagggacagtga

SEQ ID NO: 2219 - DNA, 342 bp, Homo sapiens
tctcaaaaaaaagaaaagtaaccttttataaatatggggctgaaaacgttatttttaaattttggaaaaagttctactagcttgaagattacttagatttattttttcttggcttatttagatatttggcctatttttaaaactataaataaataattggattttaatttgatagagaatcagaaaaacagagactttatataatttttgttacatttgaattcattttataaatatatgttgtaaaaattcttccagtgcaatattttttggaaaatattgttctagtcgttgtttgtataggtttatttctaattatattaaaagtaaaattagaaaaat

SEQ ID NO: 2220 - DNA, 467 bp, Homo sapiens
ggctaccctagcacctcacaagtttacattgtttcacttaataatttttaaactgttagtccttattttataaatttttagatgatcattgcatattcctccaaacatacttaaataatggatcccaaaattaaatatagcagtttagaaaagttatatacagctttaaaaaccctacaaaaaccactcaatgtagtaatagtgcttgctattttttttaagaaatggaatagaatctctattgcttaaattataagcaatagaatatctctattgcttaaattataagcaatatggaaaaatggtttggaatatccttttgttgatgactactatctgtgacatgaaactgataagacattcttttgggtaaacgtttttagatggtaaactgtggttaaatcgaattaattggaagacatagagtaatttcttgaaatgcttttttggctcaagtaaatgatgga

SEQ ID NO: 2221 - DNA, 570 bp, Homo sapiens
tatcacacacgcatgactctcccataacctagtgagtatgtttacttaatatccaacatattgctattcagtataaattcctgccgcaactttcctcctctgaactgcctgtgttgtttctggtagagaccatgcttcccagcctgcaggctgcaaccctgtgtaagaaataaaggtctccttactagacattttttgacctttggtcagtgctggttagggtttcttggtggacactctgcagcatcctgaagcaatgtagcacatcattgtgagagcactgagtatgctgtttgctcaggtctctcttcttcctataaaaccaccacttctgctcccatgataacacagtccattaatctgtgcatggattgattcattcatgacagcagagctctcatgatccaatgacctcttaaaggccccacttctcaatatggccacaccggggatcaagtttccaaatgagttttgttggggatattcaaaccagaggagtattgtattttattttcaatttccatgtattaattgctagtatatagaaataaagtagtttttgtatgttaa

SEQ ID NO: 2222 - DNA, 570 bp, Homo sapiens
tatcacacacgcatgactctcccataacctattgagtatgtttacttaatatccaacatattgctattcagtataaattcctgccgcaactttcctcctctgaactgcctgtgttgtttctggtagagaccatgcttcccagcctgcaggctgcaaccctgtgtaagaaataaaggtctccttactagacattttttgacctttggtcagtgctggttagggtttcttggtggacactctgcagcatcctgaagcaatgtagcacatcattgtgagagcactgagtatgctgtttgctcaggtctctcttcttcctataaaaccaccacttctgctcccatgataacacagtccattaatctgtgcatggattgattcattcatgacagcagagctctcatgatccaatgacctcttaaaggccccacttctcaatatggccacaccggggatcaagtttccaaatgagttttgttggggatattcaaaccagaggagtattgtattttattttcaatttccatgtattaattgctagtatatagaaataaagtagtttttgtatgttaa

SEQ ID NO: 2223 - DNA, 340 bp, Homo sapiens
tgctgctgtaacaattaccacaaagtgagtggcttaaaacaacacaaatttaggctgggcatggtggctcacgcctgtaatcccagtactttgggaggccgaggcaggtggatcatgaggtcaggagtttgagaccagcctgggcaagatggcgaaaccccatctctactaaaactacagaaattagctgggtgcggtggcgcgtgcctgtaatcccagctactcaggaggctgaggctggagaattgcttgaggcggaggtttcagtgagccaagttcatgccaccgcactctagtttgggcgacagagcaagactctgtctcaaaaaaaaaaaaaaaa

SEQ ID NO: 2224 - DNA, 9439 bp, Homo sapiens
ggagtggaaatgcctggaccctgctcagaggatcttatacagggacgtgatgttggagaactactggaaccttgtttctctgggtgaggatgactttcttccagaagtcaagatctgttcttgtctattgttgcattttcccttacgagtccctggagagcccctgcattgcttgactgagattgaagtcctgttgactctgaaatggaaagcttaatcatgggaaacctggactttaatcttcccctttctcagatgttctgcctcctttgtacttcatcatttgaggtttcagagcttttgtatgcataatacattgtgttagacttttgaaatgtcagatttcctgttttctacctctctgctttggattaagttgttggtggaatagagccttctatcagcatgtaccatgtttcctgggtattcagaaggaggcattcagtggatgattttttttttttttttttgaggcggagtctcgctctgtcgcccgggctggagtgcagtggcgtgatctaggctccctgcaagctctgcctcccaggttcatgccattctcctgccttagcctcccgagtagctgggaccacaggcgcccgccaccacacctggataatttttttttatgtttttagtagagacagggtttcaccatgttagccatcatgatctccatctcctgaccttgtgatccacccacctcagcttcccaaaatgctgggattacaggcatgagccaccgcgcctggcccagtggatgaatttttgaagttttcttagatccacatataatgtcctctcatgtaaacatagggctgggattctggaaaagccccggcacattgtgatcctttctttttataaacaggactgtgtcattttgatatgaatattatctccatgttggaggaagggaaagagccctggactgtgaagagctgtgtgaaaatagcaagaaaaccaagaacgccggaatgtgtcaaaggcgtggtcacaggtaagagctcagatgggcagagagaaggccactcattaactagagtgtgggagggggcacagtagctcacgcctgtaatctcaacacttagggaggccaaggtgggcagatcacttgaggtcaggagttcgagaccagcctgaccaacattgtgaaaccctatctctactaaaaatacaaaaaaaaattagccgggcatggtggcgtgtgcctgtagtcccagctactcaggaggctgaggcaagagaattgcttgaacccgggaggtggaggttgcagtgagccaagatcatgccactgcactccagcctgggtggacagaacaaaactccgtctcaaaataaataaataaataaagtgggaaactctctgcagatgagagagttctttgggaaaataagttgccttagagatagaggcaaagtctttatcatgatggacaacaccctgtcatttgaactctatggttccttctgaagaaactgctttctttcttggtctctccctctgtatttaattccatatggtgctcagttcttagtccatatgggtcagaggggaagcctccatagtccttagtcctgacgtctagacctgtttatgttccaccccatttcctgtgcgtggaagacctgctcaggagatggaaacattggctgctgctccttggcatctgctgccccaaacctcatggaagagtctccagccgtctccgcctgtcgaggtccctcggccatttcttccattctgcttttgccactttcatgggggtgtgtgataagcgagtgggttctatcttctaagattgttctcagcataaccgtaaagacacctaacaaaatccttctgtcattgatcctcagtcttacatggggtgcgtattctgtttttccaggcttcagcacagaaatacaagtactgcatgttgtcacttacatttggaatctaaaccaataaaactaatagcagcaaagagtagaatgtgggttaccacaggttggggactggagggaatagggagatgttggtcactgggtgaaaacattaggagtaaatgataggtttttgagatgacttatatggtaataggcttgtttccatcagtccatattgtatacctataacagaatatcagtttgtttcctgtaaatatatataactataatttgtcaatatagaatttttttaaaaatcatattccagttcttattgtgttggttctaaataaaaatgcttctttctcttaagacaaaactgtttattattccacggacaataattttttttttaaatgaagtttcgctcttgttgcccaggctggagtgcaatggtgcgatctcggctcaccgcaacttctgcctcctgggttcgagagattctcctgtctcagcctcccgagtagctgggattacaggcatgcgccaccatgcctggttaattgtgtatttttagtagagatcgggtttctccatgttggtcaggctggtctcgaactctcgacttcaggtgatccacctgctgcagcctcccaaagtgctgggattacagacatgagccactgcacctggccaataattttttttttaagtttccacacatggccttaaacaagaacattttatatatgcagttattcctctcaattcattttatcataggctgctagaatatcttattagttgattttcataaaatgaatacattatggttttcagcaggtattgtgaaatataactgtcaggccaggtatagaggctcacgcctataatcccagcacttggggaggcagaggcaggcagataacaaggtcaggagttcgagaccggcccgaccaacatggtgaaatcctgtctttactaaaaatacaaaaattagccaggcatgatggcacatgcctgcagtcccagctattcgggagactgaggcaggagaatcacttgaaccctggaggcgggggttgcagcaagccaagatcgcagcactacactccagcctggggagcagagcaagactctgtctaaaaaaaaaaaaaaagaaagaaagaaatataactgtcatgtaccacttactaatgctgcaaaattatctgctctgtgtggatatagatagttatataacaagtatttcaacacatttttttctgacatagttttattgaatgttcattttcctagtgctatgatggttttgcagttcaaaattcccgcttcttaattatgtttcctgtgagctctttgccattataatatattatgttgtactttagtatgtatttgtacataatgaatatgctttaaatgtgtataacttatttttcttcaattgagatagccatatgtttttggccaattggtatgtgccgtgaggtcagcgtggaaaaataatcctctgatggctaacataggattcacaacgtgagtgttttggtcataggtagtttgaatctaggctgcccgattttttttttatttttttattttttaagacatctcactgtctctaaggctgtagtgcagtggtacaatcatagctcactgtaaccttgaactcttgggctaaggcaatcctcatgcctcagccttttttttttttttttttttgatgagacggagttttgctcttgttgccccaggctggagtgcagtggcgcaacctcacctcctgagttcaagcaattctccttcctcagcttcccaagttgctgggattacaggtgcccattaccacacccagccaattttttatatttttagcagagacagagttttgccatgttgaccaggctggtctcgaactcctgacctcaggtgatccacccgcctcggcctcccaaagtgttgggattacaggtgtgagccaccgcacccagcaccctcagcctcttgagtatccagaattgcaggcacatgccagcatgccaaactaatttttttatttttattttttgacggagtcttgctttgtcgcccaggttggagtgcagtggcacgatctcggctcactgcaacctctgcctcccaggttcaagcaattctcctgcctcagcctcctgagaagctgggactataggcgcatgccaccacgcctgactaatttttgtatttttagtagagatggggtttcaccatgttggccaagctggactcaatctcctgacctcatgatccacccaccttagcctcccaaagtgctgggattacaggcataagccaccacacctggcctaatttttaaattattttgtttttgtagagatggagtcttgctgtgttgcccaggctggtctcaacctcgtggcctcctgtgatcctcccaccttaggctcccaaagcattgggattacaggcatgagccacaacagccagcccttcccaaatatttgaattacatgtaactgcattttctttgttaaaaaatactacttttggctgggcacagtgactcacgcctgtaattccagcactttgggaggccgaggcaggcggctcatgaggtcaagagatcgagaccatcctggctaacatggtgaaaccccgtctctactaaaaatacaaaaacaaaattagccaggcgtggtggcgggcgcctgtagtcccagctactcaggaggctgaggcgggagaatggtgtgaacccgggaggcagagcttgcagtgagccaagatcacaccactgcactccagcctgggcgacagagcgagactccgtctcaaaaaaaaaaaaacatttttgttcctaacaattgaaattcacagttctgaagttccaaagtctgttcaatataagtattacttttggtggaatatgttttcaatgtaaaatatttatttctatactgtaattaattggaaattatgtggttctttatatcttgtagatatccctcctaaatgtacaatcaaggatttgctaccaaaagagaagagcagtacagaagcagtattccacacagtggtgttggaaagacacgaaagccctgacattgaagacttttccttcaaggaaccccagaaaaatgtgcatgattttgagtgtcaatggagagatgacacaggaaattacaagggagtgcttatggcccagaaagaaggtaaaagagatcaacgcgacagaagagacatagaaaacaagcttatgaacaatcagcttggagtaagctttcattctcatctgcctgaactgcagctatttcaaggtgaggggaaaatgtatgaatgtaatcaagttgagaagtctaccaacaatggttcctcagtgtcaccacttcaacaaattccttctagtgtccaaacccacaggtctaaaaaatatcatgaacttaaccatttttcattactcacacaaagacgaaaagcaaacagttgtggaaaaccttataaatgtaatgaatgtggcaaggcgttcactcagaattcgaaccttacaagtcataggagaattcatagtggagagaagccttacaaatgcagtgagtgcggcaaaacctttactgttcgttcaaatctaactattcatcaggtcatccatactggagaaaaaccttacaaatgtcatgagtgtggcaaggtcttcaggcacaattcataccttgcaactcatcggcgaattcatactggagagaaaccttacaagtgtaatgagtgtggaaaagcctttagaggacattcaaacctaactacccatcagttaattcatactggagaaaaaccgttcaaatgtaatgaatgtggcaagctcttcactcaaaattcacaccttataagtcattggagaattcacactggagagaaaccttacaagtgcaatgagtgcggcaaagcctttagtgttcgttcaagcctagcaatccatcagacaatccacactggagaaaaaccttacaaatgtaatgaatgtggcaaagtctttaggtacaattcatacctcggaaggcatcggagagttcatactggtgagaaaccttacaagtgtaatgaatgtggcaaagccttcagtatgcattcaaacctagctacccatcaggtcatccatactggaacaaaacctttcaaatgcaatgaatgcagcaaggttttcactcaaaattcacaacttgcaaatcatcgaagaattcatactggagagaaaccttacaagtgtaatgagtgtgggaaagccttcagtgttcgttcaagtctgactacccatcaggcaatccattctggagagaaaccttacaaatgtattgaatgtggcaagagcttcactcaaaaatcacaccttagaagtcatcggggaattcattctggagagaaaccttacaagtgtaatgaatgtggtaaagtcttcgctcaaacatcacaacttgcaaggcattggagagttcatactggagaaaaaccttacaagtgtaatgactgtggcagagcctttagtgatcgttcaagcctaacttttcatcaggcaatacatactggagagaaaccttacaaatgtcatgaatgcggcaaggtttttaggcacaattcataccttgcaactcatcggcgaattcatactggagagaaaccttacaagtgtaatgagtgtgggaaagcctttagtatgcattcaaacctaactacccataaggtcatccatactggagagaagccttacaaatgtaatcaatgtggcaaggtcttcactcagaactcacaccttgcaaatcatcaaaggactcacaccggagagaaaccttaccgatgcaatgagtgtgggaaagccttcagtgttcgttcaagcctaaccacccatcaggcaatccatactgggaaaaaaccttacaaatgtaatgaatgtggcaaggtctttactcaaaatgctcacctggcaaatcaccgaagaattcatactggggagaaaccttacaggtgtacagagtgtgggaaagcctttagggtaagatcaagtctaactacccatatggcaatccacactggagaaaagcgttacaaatgtaatgagtgtggcaaggtcttcaggcagagttcaaatcttgcaagtcatcacagaatgcataccggagagaaaccttacaaatgagtgtggtgaggtcattaggtacaattcactcctttcacatcagttaatttcattcttgacagaatccttacaaatgtagtgacagtggccaatccctcatgagttgaagcattaatagatatgagaggccataagcaagagacatcatgtaaacatatgtggcagagggtctatccaggcctcgcaggttactaggcatcaagatttatatctttgatgaaacgaaacaaatgtaatatgcatcctgaggccattacccagtgaccgatggtaagtgaggattcctaggaggaataacagtctctggtttccctgtttgcctttgatattatacactgtagaatactcacaagtccaaatatgctaaaaattatatatttttaactcacatacgaaaaggttgcaggatatttgtaggcagtcagttaccttcaccttatgaaatgtttcactgagttatttgaggttttttggaaagcctactattgcgtttcaatgtgaactttgaaatcttattgtgcatccttacacaccttccatggtgctttcttggaaagatcattgggatggaaggatcattgattgggtgaagatcattgattaggtgaaggattatttctatccaatttgtgaagaaggaggactttgcttttaaaattaagtatcatctgaattagcatttgggagtggcgaaaaacaatgtaaaactatgatgtcactcaccattctgataatgttcagggtgcctttctcctaccaggagagtactgtggcttagaggaaagaaatggtctatcaactgaacatgaaatggagcaggccaagaccttaggacattgggatttttgtgggaggagagtaataggtaattagacactgattgtgtggtagaaatactgcaggggaaaaggtcgccctcttatgcatcaaagagcaatacctgttgtttagcaaagagtgatgaaaaattgatcttgttttgaaattgaagagagaggccaggcgcggtggctcacacctgtaatcccagcactttgggaggctgaggcaggtggatcacctgaggtcgggagttcgagaccagcctgaccaacatggagaaaccccaattgtactaaaaatacaaaattagccgggcgtggtggcaggtgcctgtaatcccagctacttgggaggctgaggcaggagagtgcttgaacccaggaggcggaggttgtggtgagccaagatcatgccactgcactccagcctgggcaacaagaacaaaactccatctaaagaagaaaaagaaaaactgaagagagagtagttgtcagagtgaagagtttaatcaacagaagtagagtaacatattctttagtagaactcacattatctgcttgaagcacattttgctaatgttttattcagaatgtatcatagatataatgttttaactaataaaatagaatggtttttctctatgaatgaatcacattctttctgccaacatagttttatcctgtctcagtaggatactccataacacaatagcagtacaccactaggctcttaaacgatcaagaacaatttttttcatggtgaaatcaaataacgcagttttggaaacctataaccgcattttgtgcttgaattacgtgccccacactgtggcttaggatacttattggggtataatgaaaatcttactgaaagttaatttcacattcttacaccccaaaatctgcattgccattgatgcatatgcaccacattattatatttccacatcagtttcttgtgtgccaaataagacccatgctttgcatcttggtttccatgaagtgaaaatacatagtaagaatgcgagaaatataaatcaggccaggcacggtggctcacacctgtaatcccagtactttgggaggccaaggcaagcagatcacctgaagtcaggagagaccagcctggccagcatagtgaaaccccatctctactaaaaatacaaacttagctgggcttagtggtgcatgcctgtagtctcagctacttgggaggctgaggcaggagaattgcttgaatccaagaggcagaggttctattaatggagatcattccattacactccagcctgggcaccaggaacgaaactcgttctcaaaaaacaaaacaaaaaaaaaaaaaacgttggctgggcatggtggctcacgcctgtaatcccaacaatttgggaggctgaggcaggtggattacttaaggtcaggagttcaagaccagactggccaacatggtgaaaccctgtctctactaaaaatgcaaaaacattagctgggtgtggtggtgcatgcctgtaaatcccagctacttgggaggctgaggcaggagaatggcttgaac

SEQ ID NO: 2225 - DNA, 340 bp, Homo sapiens
tgctgctgtaacaattaccacaaagtgagtggcttaaaacaacacaaatttaggctgggcatggtggctcacgcctgtaatcccagtactttgggaggccgaggcaggtggatcatgaggtcaggagtttgagaccagcctggccaagatggcgaaaccccatctctactaaaactacagaaattagctgggtgcggtggcgcgtgcctgtaatcccagctactcaggaggctgaggctggagaattgcttgaggcggaggtttcagtgagccaagttcatgccaccgcactctagtctgggcgacagagcaagactctgtctcaaaaaaaaaaaaaaaa

SEQ ID NO: 2226 - DNA, 428 bp, Homo sapiens
ccatcttttcaggggagattcgttgagtgtcctctaccatttgacttcgtaaacctttgtttcccaatgtgtggcctgggtgctaactatactagaaccatcctgggaatgcctattaaaaattcaggtattaagccaggcatggtggctcttgccttcagtcccagcactttgggagaccaaggcaggtggatggatcacttgaggacaagagttcgaaaatagcctggccaacaaagtgaacgtctctactaaaaatacaaaaattagtgggacatggtagcgtatatctgtagtgccagctacttgggaggctgaggcacaaggatctcttgagcccgggaggcagaggttgcagtgagtcaagatcgtgccactgcattccagcttgggtaactgagagatcctgtctcaaaacaaaacaaaac

SEQ ID NO: 2227 - DNA, 428 bp, Homo sapiens; identical to SEQ ID NO: 2226

SEQ ID NO: 2228 - DNA, 428 bp, Homo sapiens; identical to SEQ ID NO: 2226

SEQ ID NO: 2229 - DNA, 247 bp, Homo sapiens
accaccaggtttcttgatatacagttggtaaattgcagaatgatattattataaactaaagttgtattggttcgtgtgtacaaattttttttagtcaaggataatgctcagaagttacttccatttccatgttcttacccctaaatagctgcatttttatcctaatggttttttttgcattattatctcttgaaagtaattgatttccatgctgagctgcttgtctgtgctattcaagtttttatta

SEQ ID NO: 2230 - DNA, 247 bp, Homo sapiens; identical to SEQ ID NO: 2229

SEQ ID NO: 2231 - DNA, 247 bp, Homo sapiens; identical to SEQ ID NO: 2229

SEQ ID NO: 2232 - DNA, 1881 bp, Homo sapiens
gtaaattatttttaaacagtgcattcttgaaagcagtatggcagtcataaaaattttggaaccaaaacagtatctttttttaagctaaaaaaaaagttttaaatggtgtctttctatgttgcccagggtggtctcaaactcctgtgctcaagtgaccctcccacctcattctcaagtggctgcaattacaggcaaccagcctgacttaaaacagtatcttaaggtagatggtgattagcacatgtagtatgcttaacatttaatattataataagacatcacagcggctgtctcatgattaaggctgtgttcccttgttggtgaggaaattaattatgacttgataaatagaacatgttttaagaagtggctatatagctctggataaaacgaacaaaagaattagaattcctgcggggaatatatacaagactttatttagtcaagtaaaaaaaaatcactaatgtttaactgaagaaagagaaattgaataatatagttctatttcaacatgtgggttcacagatttattctaaccttccaagtaaagttgttccactagtaaagttgttctggagtatattttttttaaaaaaaacacttaaaatgttccacttctttcatgaggctaagtcaactctgatatcaaaccaaggggaaagaaatgaaattataggtgagtttacttagttatatacaaaaggaaattattagcctctgctgatggagaacagaggctgtgaataaatggagatccataacatgatcctacatgaatgtttcaatattgtaatcctgtaagttacttttacattgacagttctgaaattcatgttgagtgttaattaggcaggaatcagaagggaggttttgtagaaggtcgtatccatgggttttttatatttgaaaagtgttttcgatgtatcattgggggagattaaatgtctttgacagttgtccaactagaaataaagtcagcatcccatttgactccttacacagaagttcattctatactcattacagatgtaagaggttaagatggtagaggagaatgtagagtatttctgtgcctttaggttcaggaggtctttgataagcaggacaaggtccagaagccatgaagagagaatgacaggactgtgtagaagatttaaacctttttcatggcgtaagatactgtatgcaaagttaaaaggcatatgacaggctgagagatatcttaaacatacattagaaaggatatagcccttgaaaaagggctgttggaaagcagcaaggataaggtgcacagtcttgcagagcatgtcaacaaaatttattggatgaagaaattaaaatggttaaatagaagaagttctcaacctcactaatgatcagataagtgcagattgtaaaagtcctcatccccaccaacacaaaccagcagaaattttatgtgaatgtgaagtttggataatatccagtattgtcgcaggtgtgagaaaccgtattttcaaatattgagagggtaaattagaggaaagccattttagagggcaatgtggtgttacctgtcagcattttgaatataattaccctttgccacaattctacacctagtcagttatgttctcaaaaagcacaagtgcagaaatatagatgcataagcaaatgtgttgcagaattgtgaaaaatttggaaaaaatgtttagtgctattaaagttatgggttacttaagttacagaaaatcagtttagtagatcactgtgtagttacggaaaatgagatggatctctactcaaagatgtcttgcagtttatgaactgagatgtaacttcatgactaacatgatgacatcgttattaactacataaactttataaagcttaaaaaatgca

SEQ ID NO: 2233 - DNA, 380 bp, Homo sapiens
tacagaagaaaaaccttcagccagattgaatgctttacagggaagaattcatactgcagagcggtcttaacaatgtaaagaatgtgcaaatgtcctcagacaagatgcacaccttgctcattagtgagttcatttcaggcagccagctcttcctcacccactacatcaccaagtcctgtggatatatctgctaaatatttttggaatttatccacttcttttggttccccagtccaaaacacagtcatttcacctggactatttcaatcattacacaggtgtccaaccttttgtcttccctgggccacattggaagaagaaaaattgtcttgtgccacacatacaatacactaacattaacaatagctgatgagctaaga

SEQ ID NO: 2234 - DNA, 251 bp, Homo sapiens
aatttttatatatttataattagtgcatttttctctaagttacgttatgctccaatttaaaagttttaaaatgtatatgtatatgtgtgtgcatatactgcttgtctgtgtgttcctcaatcaaccactacaggaaaaaaatactaacagcaggaaataattagcacttttggaaaaccaagcagatatcttctctgacatgactggacttgtggcttcatacttatcacttacttactaaacatctgata

SEQ ID NO: 2235 - DNA, 251 bp, Homo sapiens; identical to SEQ ID NO: 2234

SEQ ID NO: 2236 - DNA, 1510 bp, Homo sapiens
agagtgtaaactatctacagcagtttggcatgtgcagaacacctggatatcccattcctcttaatgttcctttttagctctttttcttcataaaatcctcaaaactgctgcatggataacatgctgacataggcttaacagaaatacttttgtaagcagctgtttaaaacattatcaacttgaaattataaatgtcccttgttacataaacaaaacattttatatctgttcctttaaaaaaaagaaagacaaataggtaaccaatatgcaaataccttatagttacaccaaaacaatgtggttttgttaaagtctgtctgaaatcaattaccatgaggcaagaaaaacaaatacagaactaaggaaggatgggatgggaggaagggtagtggaaagaaaagcagaatttatgaacacataattctactgtctgtgattaaaagtcctttactttttagcaccacattaaacgactttacatatccagtcacttaatgaaatccaacaaactcttcaagagttctggggatctggtcttggtagttaatgtcattagcccgaactgctcgggcagccaggcacttgagactcatcttcatttgagttttaagcagtatttcagataccccagttgtacttttgtctagcggagtcttattctgtttattcgtcatgtcagtgtgagctccggcttcaactaggctaatgatgatggagtgcaaggtcaaaaaatcactgatgggcctgttgtactgaacgataatatgaagggcactgtttccctcattgtccacggcattcacctcagcaccacagtccagcaggagctttgtgacaagtgcatttggaaagctgcagacgtcattggtgtggaaatcatcaactggagtattggaattgacagccagatgcagcaaggtgaaaccttcacgagttctgggatcaaggtgaatcaggttgtagatctgcttgttaattttgcactgatcttcttcgctgcactgtgttttggtagagatgcacactaaatacagaaaggtatagagattacattcataattgtccatagcattgtggacatcagcatctgaaatatttttcactctgttcatactttgttctatttccaaaacactgcatctcaaaacacattctatgtctggggccttcacagtttcattcaaatgtatcatttgtgagaaaacttgagcaaatcgaagaagatccttgtgggtgttcctgttacctttttgtctgaggtgcagggcatgaagccacaacttgatacactgctcaaattccatattatccgcataaacagctcctctgtaaatgatgggatgagaaacatcaatattgtcagcacctaaaatccgttcccgaactataaggccttccatatgaagagcatctctgtcttgccgaatggactccagttcctgaggatttctacattcagttctattcccataagcatggattggtggaagaacctctttttcgagaatgt

SEQ ID NO: 2237 - DNA, 450 bp, Homo sapiens
ccaccatgtgaggacacaggattcctcccctctggaggatgcggccctcaccagacaactgaacctactggcaccttgatcttgaacattccagcttccagaaatatgagaaataaatttctgttcataaattacagtgtcaggtattttgttataacaccacagaacagactaagacatataaatatcatggtttaaccccagttaacatcaccacaaaaaacaataccctttatcacttctactgaaaatactcattttataataatttaagcaattacttcttcagtttcaaataatgacacaaaatgtttataaacaaaagccctctcagtaacagtggctacctacagagaagaggctaggactggctgggaagagacttgaaggtactggaaatgtcctacattttcatctgggtagcagccacatggatatttagggaaaaaa

SEQ ID NO: 2238 - DNA, 273 bp, Homo sapiens
agaaagctgagggcgcccaataacatgtcatgatcccttgaacaagctgttagatctgaaagccattaattgaaaaggagtctgagtcccaaatagatcactgtgccgacagactcactcatttagttattttccaagtctctaatatataatttggatagatatatttggctgtgagctgaaacttcacattaggtccttgtcccgaggggtatgggttatcagatggagaaggctaagcagataacactgaaacatctttatacgaataag

SEQ ID NO: 2239 - DNA, 273 bp, Homo sapiens; identical to SEQ ID NO: 2238

SEQ ID NO: 2240 - DNA, 186 bp, Homo sapiens
ttttttttttttttttgagatggagtctcactctgtcacccaggctggagtgcagtggtgtgatctcagctcactgcaacctctgccgcccaggttcaagcaattcttctgcctcagcctcctgagtagctgggattacaggtgcctgccaccacacccggctaatttttttgtagtttttagtag

SEQ ID NO: 2241 - DNA, 153 bp, Homo sapiens
ttttttttttgagatggagtctcactctgtcacccaggctggagtgcagtggtgtgatctcagctcactgcaacctctgccgcccaggttcaagcaattcttctgcctcagcctcctgagtagctgggattacaggtgcctgccaccacaccc

SEQ ID NO: 2242 - DNA, 156 bp, Homo sapiens
gaaacagatccagggccaggggatgccaaatgagggagattcatatctctgatcttcagaataccatgattttggtttccttggaagtaaaacaaggagagataaataacatttatagtttgacagttataagagtaattcatatgttagaataga

SEQ ID NO: 2243 - DNA, 156 bp, Homo sapiens; identical to SEQ ID NO: 2242

SEQ ID NO: 2244 - DNA, 242 bp, Homo sapiens
tatcattggaatcttcaaacaggaaaacaaaacaaaaggacagaacaaatatttaaagataatgttcaggaaaattctgctcaggtaaaaatagatggaagtgtacattgtgagagggcaaattttatgctggggaaggttgactgagaacaggttatgagtgtgccatatcctacaggaattattaaactctgaagatgaagcaagaacctcccaatgggtaaacaaacatgtcatctctt

SEQ ID NO: 2245 - DNA, 242 bp, Homo sapiens; identical to SEQ ID NO: 2244

SEQ ID NO: 2246 - DNA, 242 bp, Homo sapiens; identical to SEQ ID NO: 2244

SEQ ID NO: 2247 - DNA, 430 bp, Homo sapiens
ttttggattttttcagattttggaatatttacatatacataatgagataacttgggatacaagcttaaacatgaaattcatgtatgtttcacatacaccttatacatataacctgaaggtaattttatacagtatttttaataattttgttcaacccatcacatgaggtcaagtatggaattttccacttgtggcatcatgtccatgctcaaaaagttctggagtttggaggattctggattttggaattagggatgctcaacctgtacaaccaagtgagacagcaggagacaaagtcaagttggcagaagaaaggatggcagcagccaggagaaccaacacagaggtgaaggtgcgattggaagggcccaggagaagacagatgttttgggaaacacaaaaaaggtgatggaaaaatacgaatgagaga

SEQ ID NO: 2248 - DNA, 419 bp, Homo sapiens
gtaaaagatttcagattgaatcaaaaagtgaaacccaactccaagttgtacataagaagcccacctaaaacagagatttacaaaagttggaaataaaagaatgaaaagatatactaggcaaaagtaaaaaataaagtgggacaaaaagcattaaaggaaagcagcagcccactttttcctgccatgatgcacatcagagtaagggcaactggaaaagcagggcatccctgtaggggcaggtggagcagcagcgagggcctcggtcatcattcccacaggagacctctacttcgtgggttctgtcacagggatttgttactgtggcttcccagaatacaaattctacaattttgtattttagtgcaatttatttgctatttaataatgagttttcaaatacaaaatgctatttaataatg

SEQ ID NO: 2249 - DNA, 430 bp, Homo sapiens
ttttggattttttcagattttggaatatttacgtatacataatgagataacttgggatacaagcttaaacacgaaattcatgtatgtttcacatacaccttatacatataacctgaaggtaattttatacagtatttttaataattttgttcaacccatcacatgaggtcaagtatggaattttccacttgtggcatcatgtccatgctcaaaaagttccggagtttggaggattctggattttggaattagggatgctcaacctgtacaaccaagtgagacagcaggagacaaagtcaagttggcagaagaaaggatggcagcagccaggagaaccaccacagaggtgaaggtgcgattggaagggcccaggagaagacagatgttttgggaaacacaaaaaaggtgatggaaaaatacgaatgagaga

SEQ ID NO: 2250 - DNA, 500 bp, Homo sapiens
atgtcataaaagtaagaccaaacattgtatctatacatgtaaacacataactttatacacataacctgaaggttggtaaaagtaaaagatttcagattgaatcaaaaagtgaaacccaactccaagttgtacgtaagaagcccacctaaaacagagatttacaaaagttgaaaataaaagaatgaaaagatatactaggcaaaagtaaaaaataaagtgggacaaaaagcattaaaggaaagcagcagcccactttttcctgccatgatgcacatcagagtaggggcaactggaaaagcagggcatccctggaggggcaggtggagcagcggcgagggcctcggtcatcattcccacaggagacctctacttcgtgggttctgtcacaaggatttgttactgtggcttcccagaatacaaattctacaattttgtattttagtgcaatttatttgctatttaataatgagttttcaaatacaaaatgctatttaataatg

SEQ ID NO: 2251 - DNA, 300 bp, Homo sapiens
tttttttccttgctttttgtgcctaataattttgagttgaaagctggacaccttgtttgaaactatagacatggaggtatttatgcctggaaatggtcatacctctgtttttgctaggcctttagtttgggtattgggttaatatagtaaagaattgagctatgtttgggtttttaccattgttatggctaccctcagtgcttatcacatttgacattttttgagtgttattttgtgtttagggaaggcattgcatgactataggggtttcctccatgcttctgtcccaccctcagcttt

SEQ ID NO: 2252 - DNA, 315 bp, Homo sapiens
tattgctaaggaaaatgatatcttagagattcctagaatcatttagttttaaggattgatcacgttgtttattgattttgttaagcaaagtattttgtagtaaagatactcatttgtacaaaatatcacaatttgagttttctgtcaatgataattttttttaaaatgacatttaagatgaatgttttaaattataataatacctgttcacagttgaaaattaaaaaccatgcaggagggtgtaaaaagcaaaagccccaccacattctctaatctcaatccactagatgtgtagaaaccatccactatttaatc

SEQ ID NO: 2253 - DNA, 415 bp, Homo sapiens
tttattttttatggtggagctgtgagttctttggaattgtgaacattcttttgaaatatggagcccagataaatgaacttcatttggcatactgcctgaagtacgagaagttttcgatatttcgctactttttgaggaaaggttgctcattgggaccatggaaccatatatatgaatttgtaaatcatgcaattaaagcacaagcaaaatataaggagtggttgccacatcttctggttgctggatttgacccactgattctactgtgcaattcttggtaagaaattctaccatagtcgggcttaccctttttgagtgaatatactacctttaatttccttcagttgagatcccagtgtttggagaagggtatctgtgttttgactgtgatggctgaattggggtgaaggagttg

SEQ ID NO: 2254 - DNA, 259 bp, Homo sapiens
tgggagaccaaagcgggaggattcattgaggccaggagtttgagaccagcctgggcaacatagtgagactctgtctctacaaaaaaatttaaaaattagccaggcatggtggcatgtagctgtagtcccacctactcaggaggctgaagtgggcggatcactggagcccaggagttcagttacagtgagccttgattgtgccactgcacgtcagcctgggccacagagcaagaccctgtatctagaaaaataaataagt

SEQ ID NO: 2255 - DNA, 203 bp, Homo sapiens
  SITE (52): n equals a,t,g, or c
ctacgtccaggctgggtgagaagagaggcagtggggcccaggaggctgaagnaagccttagggttcagactggggtgcacgtagtcgagagctcagggtttgggcaaggggatacctgccggggttcagccttgagggtgggtttaccgggttcacgaatctctctctctccttacccccgcccgcccgcctgcctgcctgct

SEQ ID NO: 2256 - DNA, 4090 bp, Homo sapiens
gacgtcacggtcactgacagcgtgagcccgcggcggctgctgccatggtggctggcggcggggtaagggtctgagtggatctcttgccaggccagagcgccttcgggggccgcgtcggaaggccaggagtttgcagccagggcgccgggtttgtggtctgcagtgtcgtgaggctgaggtgggggttgaaggcccagaagccggactctgtgacccgggtcggggggtgtactggaggggcggctacgtccaggctgggtgagaagagaggcagtggggcccaggaggctggaggaagccttagggttcagactggggtgcacgtagtcgagagctcagggtttgggcaaggggatacctgccggggttcagccttgagggtgggtttaccgggttcacgaatctctctctctccttacccccgcccgcccgcccgcctgcctgctcccggtgacttctgctggccgcaggtgcagcatgtctagactgggagccctgggtggtgcccgtgccgggctgggactgttgctgggtaccgccgccggccttggattcctgtgcctcctttacagccagcgatggaaacggacccagcgtcatggccgcagccagagcctgcccaactccctggactatacgcagacttcagatcccggacgccacggtaggagcccgtctcctgagaccgcggtcactgcagactaatgggcctgaggtctgggctgctttcggtggagactgtgggacagggtaacggagagaagtgctttagggtttcacttttttggaagcttgttgaaaaagcagtcgtcgggctgggcgcggtggctcacgcctgtaatcccagcactttgggaggccgaggcgggcggatcacctgaggtcaggagttcaagaccagcctggccaacgttcaaccagatgtcaacatggtgaaaccccatctctactaaaaatacaaaaattagccgggcgtggtggcgcggcctgtagtcccagctactggggaggctgaggcacgagaatcgcttgaacctggtaggcggaggccgcagtgagctgaggttgcgccactgcactccagcctgggtgacagagtgggactctgtctcaaaaaaaaaaaaaaaaaaaaagcagtcgtggttttctctactctttcgcctgtactcacaagaaagtatatttcaaaaagactgtttaactttcacttttagttctggccacaatagtgctatgtgggtattaaaggcacttgcttagtgttgggtgaggtgtgtaataagtagaggaagagtccaaaagagggcaaaaagaataatcttgtagggattaaaagtcttgaggcttatgtattaaatcatatattagaatttgaagacaacttggcaactatcaagacaacttggcaactatctcattcaagtttttttttctttttatccctcctatgaggaaaccaagattcaaaaagatggtataactttcctgaggctgtcacagattaagtggcaaggttgggcctggtcacctggtccagtggactttctacggcatagggctaggagcacgcttaatgcaattgaagctgaatgtggctggcagcctgtacagctgaaatgagtagttcttgcagatttgtcaattcatttgagcaaaggatctagggctggttcaaactactaccatctttgtgcaagaggagtgttttttttcttttcttttcttttttcttttcttttcttttttttgagatggagtctcgctctgttgcccaggctggagtgcagtggcatgatcttggctcactgcaacctccgcctccctgggttcaagtgattctcgtgcctcagcctcccgagtagctgggatcacaggtgcgtgccaccatgcccagctaatttttgtatttttagtaaagatggggtttccccatgttggccaggctggtctccaactcctggcctcggcctcctaaagtgctgggattacaggcgtgagccaccacacctggccaagaggagcgtttacattatctcactcccatgctaattggaaatgagtgttttctctgattgccaatgttagatggtttggaaaagttagttttggagtcttcaaagagctatcagcttagattgcaaatgattgtcagcattttataatcttgtggtaatctagtattggagtgtgcttccttcccttgtattttgtttgtaattgcttcgcagtagtgtttcttctgagattagaagaaagtggccacattgccagggatctttcttgcactacattcttgagcattattggatgtatgttgtggcctggcctagttttttaccagatttcctttaagaagggatttatgcttgccgtattgtagggtcctgcctctctggtttcttttttgtttttgcattttccagttcagttaccataggtggctgtcactttgctagcatttcactgctggaatttactctgagatctagggttgggtcagcagggcttagtgacggtgtctttctgaggcagtttggatgggctttttctggtgtaccttttctcttaataactgccccctttctcctagtccttctctgatatactaaatgaagttctgggagaaactccaagttttccctactattatttgtgaagtgagagatcagaatttgagggagctcagttttagttttagttttgctatgtggttggtattgactccttggtattgggcactatatggtgaggtgaaggtttttgtttttttttaactctagcaggacagctgtcctccttcaggttccacacttgggcaagcatgttacattatctatcgtggtgtgcagcattcctgaagggccctggtatggaaggttcttggagcagagggctctcgtttagagatccctgggtagtttcttgagacttgttaccatgacctggctgtgaacgtgtgctatctgagcgtcactgggccttctcttccaatggaaagcaggtattcttgaattctgggtgtgagatctcttccccaccatattcctgtgtgtcactggctcccattcgtttcccccttcagtgatgctcctgcgggctgtcccaggtggggctggagatgcctcagtgctgcccagccttccacgggaaggacaggagaaggtgctggaccgcctggactttgtgctgaccagccttgtggcgctgcggcgggaggtggaggagctgagaagcagcctgcgagggcttgcgggggagattgttggggaggtccggtgagtaatgcggcttcttctcctgctttatccctcccctgcagcttttcagctggggtgtgttctggccttcgctgtctgtctctaaagaataaaccagttctatagcttctagcctaatctgggttgaagctgtacatttggtacctcgccttgcacatgctccttgctgcttctggactctcatggttgatctgttgtagcagctgaagcgctctgtttgcctaacctagtctgtctgtgcgggctgggcccaggaagctgccctgcttgccctcctgagggttagagacttaggattttctctgcttttagccctttaatgaggagcagtagtaagaggcaccccatggtgagcagaaagacaagctggatgggacctaatggtacccttcgggatggggcctgctttccagatgccacatggaagagaaccagagagtggctcggcggcgaaggtttccgtttgtccgggagaggagtgactccactggctccagctctgtctacttcacggcctcctcgggagccacgttcacagatgctgagagtgaaggggggtgagttgtctctcttggaggcagttatggctacagccaggttgtgttttgtaaaagtattatcaatggaaaattcaaaccaagctgctgcaaatgatttttggaacaggtaagagtataataaatacagaagagttgaaacaaaaaacccatccaatttatgtcattcagacaaatgtagatgttaatagcagttattgcttgcatctgttatcttagtttattacatagttatgatatattatttgggcattt

SEQ ID NO: 2257 - DNA, 155 bp, Homo sapiens
gggagccctgggtggtgcccgtgccgggctgggactgttgctgggtaccgccgccggccttggattcctgtgcctcctttacagccagcgatggaaacggacccagcgtcatggccgcagccagagcctgcccaactccctggactatacgcaga

SEQ ID NO: 2258 - DNA, 412 bp, Homo sapiens
atctgaccttatctgctgctagctccagttattcaggtagcctgtgtgaggcctagaggccgatttctccttgtccagcctttattcttcttaagggaaagactggtgtagagaacagccaagttttatgctggatcagaggaattagctataagcaggtacatggaaactagaagttaaaatcagtccaggtgtggtggtggctcatgggtaatcccagcactttgggaggccgagacaggaggattgcttgagttcaggagcttgagaccatcctggacaaggcagcaagaccacgtctctacataaaataactacctgggggaggccaaggtgggcggatcacctgagttcaggagtttgagaccagtctggccaacatgtcgaaaccctgtctctactaaaaatacaa

SEQ ID NO: 2259 - DNA, 323 bp, Homo sapiens
ttggagagtctaataataacattaatttatgggggtgttgggtgggcagcagtttatagttttttaagacttcattgattattgtgattcttgcctgtctgagaaatggtgctgttaattagcagtacagaaatctggacaatcattagaatcatgtagagaatttaaaggcagtaacaaccatactccctaaccctactctaatctcttgaatcagatctctggaatgaggcccagaaatttgtgttttttgaaaacactccaaatgattctgacagtaccaaggtttgagaaccattggtttatgtactctaaaatcttta

SEQ ID NO: 2260 - DNA, 323 bp, Homo sapiens; identical to SEQ ID NO: 2259

SEQ ID NO: 2261 - DNA, 138 bp, Homo sapiens
ctgtaatcccagctattcgggaggctgaggcaggagaatggcgtgaacccgggaggcagagcttgcagtgagcagagatcgtgccactgcactgcagcctgggtgacagagcgagactccatctcaaaaaaaaaaaaa

SEQ ID NO: 2262 - DNA, 308 bp, Homo sapiens
  SITE (272): n equals a,t,g, or c
  SITE (273): n equals a,t,g, or c
  SITE (274): n equals a,t,g, or c
ggtggcttatgcctgtaatcccagaactttgggaggctgaggtgggtggatcacgaggtcaggagattgagaccatcctggctaacacagtgaaaccccgtctgtactaaaaatacaaaaaattagccaggcgtgttggcgggcgcctgtagttccagctactcgggaggctgaggcaggagaatagtgtgaacccgggaggcggagcttgcagtgagccgagattgcgccactgcactccagcctgggcgacagagcaagactccatctcnnnaaaaaaaaaaaaaaaaaaaaaaaaaaaaaaaaaa

SEQ ID NO: 2263 - DNA, 138 bp, Homo sapiens; identical to SEQ ID NO: 2261

SEQ ID NO: 2264 - DNA, 308 bp, Homo sapiens
ggtggcttatgcctgtaatcccagaactttgggaggctgaggtgggtggatcacgaggtcaggagattgagaccatcctggctaacacagtgaaaccccgtctgtactaaaaatacaaaaaattagccaggcgtgttggcgggcgcctgtagttccagctactcgggaggctgaggcaggagaatagtgtgaacccgggaggcggagcttgcagtgagccgagattgcgccactgcactccagcctgggcgacagagcaagactccatctcaggaaaaaaaaaaaaaaaaaaaaaaaaaaaaaaaaaa

SEQ ID NO: 2265 - DNA, 443 bp, Homo sapiens
cagaggcactcccttcaccttggacctcccggtctatataactctaaaaaattaatttattttctttataaattaccaagttttaggtattctgtaatgagtgacagaaaatgaactaagacagcatgtgtaatacaatgtgaagaagtgtatgaaatataaagaatagactgaaaggcaaaatgatttaattgtccatgttttattaactaaagggaacttgtactataattaagacaatgttctctcttctgttcctattttattttatttgagttcataaatttcccatatcatctcgctccatgctgtgtgagatctatttattttttacttcttgatcttattactagttttaatatttgcttgtgtccttactcaaaatctgccttgatattaagagtcaaacaccaattgatttcttgaataacttttgctcctcc

SEQ ID NO: 2266 - DNA, 28818 bp, Homo sapiens
ggcagtgggactcagcgggcgtggaggtcgcggctgagcgagcgagccctgggcgagtgaattgtggctgtgggttgacggtggagacaccccccggagggaggcggagggaagggaggcgaggcctgcacctgcatgcttcccgcctcccactccccagcgcccccggaccgtgcagttctctgcaggaccaggccatggagctcgaagtccggcgggtccgacaggcgttcctgtccggccggtcgcgacctctgcggtttcggctgcagcagctggaggccctgcggaggatggtgcaggagcgcgagaaggatatcctgacggccatcgccgccgacctgtgcaaggtacgcacgcgtgcggcggggtgtggggaaactggcccccgccgcgcacttgtggactggagcttcggctgggttttgtttttgcttttacatttcggattactccagcactgggagtatgatctccagcgatacagataaagccaaagttcccgcagactttcccggtcctctagcactcagaagggcatatgttacctagcttctgtggttccttttctgccttttctattcttgtccatttttctgttacatttgtggttcttttccttatgatgtgtaggaactctttgtatattctggatttaagtaatttgtcagtttactgtattgtggatactttctttgggtttctttctttttttttaagccaaatttagcagtgggagagttgcataccaacttgaataacagtaatattaataagttctgaataacccattaccatcagaccagcctctgggtctatttcttgtcttttagctttgtttatggtttctttgttagacagagttttgtttttaagttatagttgcagtcaaatttttcttcataactttgtgtattattaggtcagttctcctcaaattttaatgcactaacagtcacctggggatcttgttaaaatgcagattatggttcagtatgtcgggggtgggatctgagattccaagtttctaacaaggtccccagtgatatcatatgcctcttttggaagcacgctttgtgtagcaaagtttttattgttttgatttgtgtgtgtggtttttttgtttgtttgcttgttttgttttgcttttaagactgagtctcactgtgtctcccaggctggagtgcagtggtgcgatctcggctcactgcaacctccatctcttgggttcaagcgattctcttgcctcagcctcctcagtagctgggattacaggcgtgcgccaccacgcccggctcatttttgtatttttagtagagatggagtttcaccatgttgaccaagctggtcctgaactcctggcctcaagtgatccgcctgcctgggcctcccaaagtgctgggattacaggtgtgagccacccccccggcctgtggtagcaaagttttaagtagtgttttagggtgtaagtatattcctgtatgtttgctgataatattgttactttttttttttttaaacggacagggtctccctttgttacccaggctgaagtgcagtgactcagtcataactcactgcagcctccaactcctaggctcaagcagtcctcctgccccaacctcccagatactaggactacaggcatgaggctatcatcttgtttttgtttttgtttttgttttttttcttgaggcggagtctcgctctttctcccaggccggactgcagtggtgctcttttggctcactgcaagctccacctcccgggttcacaccattctcctgcctcagcctcccaagtagctgggactacaggcgcccgccaccgtgcccggctaattttttgtatttttagtagagacggggtttcactgtgttagccaggatggtctccatctcctgaccttgtgatccgcccgcctcagcctcccaaagtgctgggattatagacgtgagccaccgtgcctggcctatcatcttgtttttactttttatctgcattacatgtgtagcaaggctttgctctgggtttgtgatttttcccttccccacaatcccctcaatcaaagattattttaataagtcgtaatagtggtagtactagtagcaactatgaaatttcttttagagtacttttggtggaaaggggctgtgatattaaataaacaagatggggtaattaagattccaaaaagtctgtgtcatttaatcatacttgaagaactaaatgtttgtgtgagtatgtgtgtatataggatgactcaagaaatacaataagttccctgtcctcaagagttttaaacttgactgggaaacagaacatacacagatgaaatgtgagtgatagttataaaccagtgtgttaaggatgaatattaagatgcaggtcaaaagcatgattgctgtaatatataaagtgtgttcagagcagacctttattgctcaaggaaatcttcctgaaagaggtaatatttaagcctggcttttaaagggtgtggattactaaagaaggatttactaatggtattcgactagtgttactactccctgaaataatctttgatttttttaaaagaaatatattagagaattagcaagcccttaccaggggcgtgaagggtgcaaaaggagtctgaatggcaaacagctagtctgataatgccagttgttgtcactacaggtgtacctggtgtgagtgttctgacattcagggccaagtgtatcatacttactctgcaagattaactgtgattctcttataacagagtgaattcaatgtgtacagtcaggaagtcattactgtccttggggaaattgattttatgcttgagaatcttcctgaatgggttactgctaaaccagttaagaagaacgtgctcaccatgctggatgaggcctatattcagccacagcctctgggagtggtgctgataatcggagcttggaattaccccttcgttctcaccattcagccactgataggagccatcgctgcaggtctggtgccaccttatgtctatatacctttttagggaggcttattttctcatattaattggaaattaaggatagtggctaattaaatacatttacttggtgatttgcctttgtttacaccaccagtgtactgagaattcatacataccatacatatttttaaatgggctgctgaggagatttgtgtggctatgttttgaagcacctggggaatgaacctgtgggagtgtaaagatgtgtgagtcagcaggcccaggagtttggagtcaggcatccatgttctaatatggtttcagttgctggctctggcttcggatgaaccatttgattctgtctgaccagtttcttcattcaaataaagactatgagagtaatgctagcttgggtatatagcaaatgccaggagattaatttctcactttgcaggatccagatagagagatgtatgttgaaatggctcacttgcccaataattccagggcagagaggacaatctaagggcagaagtgggagaaaagcgatagaaagctggaggagtgggaaaggctgctggaacccattgtcagtgacctgaagatgaggacagctaaggagttagccttagaagagaaagtgagatgagctcttatgctaattatgaggatatgcagcattgagagctgcagaaataattgggagtacctagcctgttcttcccactgaacatcattttggtagctattaaagttaaatattagatgatactgttctactttttactttatttaggaaatgctgtgattataaagccttctgaactgagtgaaaatacagccaagatcttggcaaagcttctccctcagtatttagaccaggtaagaatttcttgactcatctccaacatatgtgtttactgtggaaaacacacattttattttcttgctattgcatgttattgctggccggggacccaattgcagtctctttaagccttcaacagttggcttagcaaaagaagttcggttccaaaatacacggagtgtattttgtgtggagtcacccagctcttggggttacacaatatatgtaggcccatggcttcatgccaaacagattctgtttgtctgggatttggggttaatttttgagctaacatgattttaggtgttttcatttaatggattatttaatgagggactggtactgtgctgggtgctgacatatttctgttactaacaatctcttttgttctaacaaaatgtacttttctgtgattatataagagtactttttttttttttttgagatggaatcttgctctgtcacccaggctgtagtgctgtggtgtgatctcggctcactgcaacctttgcctcctgggtgcaagcgattcttctgcctcagcctcccaagtagctgggattacagacgtgtgccaccatgcccagctagtttttgtatttttggtagcgatggggtttcaccgtgttggtcaggctggtctcgagctcctgacctcaggtgatccgcccagcttggcctccgaaagtgctgggattacaggtgtgagccaccatgcccatgtgtctggaattggtgggttctcggtctcactgacttcaagaatgaagccgcggacccttgcagtgagtgttacagttcttaaagatggtgtgtccggagtttgtttcttctgatgttcggacatgttcggagtttcttccttctggtgggttcgtggtcttgctggcttcaggagtgaagctgcagaccttcgtggtgagtgttacagctcttaaggcggcgcatctggagttgttagttcctcctgtctggagttgttcattcctcccggtgggttcgtggtctcgctggcctcaggagtgaagctgcagaccttcgcagtgagtgttacagctcataacggcagtgcggacccagagtgagcagcagcagcaagatttattgcaaagactgaaagaacaaagcttccacagtgtcaaaggggacccgagcaggttgccgctgctggcttgggcagcctgcttttattcccttatctggccccacccgcatcctgctgattggtccattttacagagagctgattggtccgttttgacagggtgctgattggtgcgtttacaatccctgagctagacacagaatgctgattggtgcatttacaatcctctagctagacataaaagttctccaagtccccactagattagctagacacagagcactgattggtgcatttacaaaccttgagctagacatagagtgctgactggtgcttttacaatcctctagctagacataaaagttctccaaatccccaccagattagctagatacagagtgctgattggtgcatccacaaaccccaagctagacacagagtgctgattggtgcatatacaatcctccggctagacataaaagttctctaagtccccacccgactcaggagcccagctggctttgcctagtggatcccacgccggggctgtgggtggagctgcccatcagtccagcgctgcgcgcctgcacccctcagcccttgggcggtcgatgggactgggcgctgtggagcagggggcggcgcccatcagggaggctcgggcagcatgggaacccaccaggggcggggtgggggccttgggcatggcgggctgcaggtcccgagccctgccctgcggggaggtggctgaggcccggcgagaattcgagtgtggcgctggtgggctggcattgctgggggacccggggcaccctcctcagcagctggcccaggtgctaagcccctcattgcccagggctggcggcgccggccagctgctccgagtgtggggcccattgagcctgcgcccacccagaactcgctctggcttgtgagcgccacgcgcagccccggttcctgcctgcgcctctccctccacaccttcccacaagcagaaggagccggctccagccttggccagcccagagaggggctcccacagtgcagctgtgggctgaagggctcctcaagcgtggcgagagtgggtgccaaggccaaggaggtgctgagagcgagcaagggttgcccgcacgctctcacctctcacccagcctataagagtacttctgctttcaaaaaagacatgtctgtggcatgaaaacatgccacacatacacaaaaagtgccctcctgaactagagggcagatcctcacactgacttaacatgctggcatttaagaatatcaagaactgaataaagaaaatgatctgcccaactgcgggtagttcatctgtctgagtcagaggttcttatgccttcctggggaggaagttatgatgccgcgaagaaattggcactgctgagttctacatgcagttgctacagggaggagtcttcatttagctttaagcgaaatacagcttaaaaatatcttacctgtattctgtacatcaacttgtgatggattgaggccagttctggttcttggaatgatatttttctctttgttagagccattttgttctaatagctgtgatgatccaatcaagaaagatgaaatggaagacagtgagatgtcaaggattgaataggacgtagaaccagaagatagaggttgaaggtaccgctttgcccctgaccaggggtaaattcttcaataactgactctgtccggataaggaggataataatgctctaccagcttcagttaccgtgttaggggatcaataatatatgctatgtagattaagccatagaaaagttaaagcttgaaacatttgttgggcagctgaaccatgaagtgaatgaaattaattcgccttcaagtggaaacatgagatccacaagccagcttttacttcacacttccaccttggagtcttgaatacctctctgtcttccttgcttgccatctgttctcttacttttgatgctgttattgtccaagatgttctctcttagaatagctggtaatgatagcacaatgcatagatgggctcagtccacagaagctacgtgaattctcccagtaacagatgaggaaattgaggctcagagatgttcagtagcttgcctaaggttgcataagctagtgagtggcagagcccagattcaaaccagatacacttcaaaagcaagcgctctcagctactgtgccggatataccattcattcagaatagcgtgggctaagcccactctgtgttgtgagacagagaacattcagactaagacatgcatgacctgtcctgtgggagccactcttcaccagaggcacttctgcacacacccgcgtctcatgcattttccctggtcaaattcaaccatttgttctccttagtgtctttgttgctgagctcatgtaaaaaaacactggagtctccagattagttctatgtgggttcatgcttcccagatgccatcggactgtgtgttctcctcttgtccttggtcagttccctctcccatccctcacagggactggtcttgacactctctgggttttactgaatgttacatgtttatgttgaagagattgctgatgttagacgttaggatttatttggcagtgcaagagtttgtgtttctctttctttgaggatctctatattgttattaatggtggtgttgaggaaaccacggagctcctgaagcagcgatttgaccacattttctatacgggaaacactgcggttggcaaaattgtcatggaagctgctgccaagcatctgacccctgtgactcttgaactgggagggaaaagtccatgttatattgataaagattgtgacctggacattgtttgcaggtgagtctggctctctgattttctgaggttttcccagcacaatggagacttttcctgacaatgttactctttgtacttgaaccccataccttatggctccaagatacattattaagctttggtggttgatgtcctcaagagtaacaggagtctttcactgtctcttggcgccactgtcaaaaatggtgagctgtaagtcctgacatcatgtggttgtccttaggaattttaaaaaagttatatctgttctcaagattacagctagatctagcaagaaattttaacgttcttctggccagtgatctgtgaagtacataatccaaagtattgtgtgtgcctaataaaatctttaaatgcccatttgagagggtattatgctgatatcttaactgagatcctttgtgggcaaaacaagtgttcctcattttttaactgtgaataacatcttgcatctgaaaattagaaaataagaggtttcaggttctctctgctaaatccggtttagctactaagaagtgccaaatcatagaactgactctgtgctctgggtggtgtggctttctctgcccttcagagattccaggtcagggttccaggttggcttcctaagtagaaatccatttgtcaaaaccagacaccctcagttagtgaatgtttagggcatgggtttctgcccatgcataggaaaggtcttcccaagtggggcagggctccacaaagaggaggatggccttggaggctggctgacatcctgctttatacctgaacatcttgcaggcagagccaaaagccacaaccaggagagtctgtaccgaactctggtcatccaggactttcctttggctggactggaagaggggaaaggacattgggaggctgtttctcctcttttcctgcagcaggcaatggcttcactgtttaccaagtactgtttgccgtgagctggcctgagaacttccctgctatgtaaaatattccacctcatttggaaaatactttctaagttccaaacaactgatttagaaatgagtttttaacttttttataaaaattgccagataaatatatgaatctattttagttgcaagacattcaaacaacacaatgtaacaaatgaatatttgactgaattactgaattatatagctgttctggatgttttcccctcagacgcataacctggggaaaatacatgaattgtggccaaacctgcattgcacccgactatattctctgtgaagcatccctccaaaatcaaattgtatggaagattaaggaaacagtgaaggtttgtattaaaaacatctgattccactgattttaataagataaggagtcaaattaactattcgcaggcagcatccccatttgtttctcccttcaggaaaatttcaaaatcatatgtgactcagtgaacttattgactaatatgaaaatgctatgtgtaccatagaatatatgctgggagcaaggttgcattggtgttaaatctacttaaactgtctagttgatttgttgatgattagttgtggcatatactttttttaaaaaagttaaataatcgtgtgtccgtggttttgagggaatgttgccaaccctttaggtataatcagagagactctttggcatattggccattgctgctgaaggttatcagtttttgtgtatgtagagggcctagggtggccagtagtttggaggagtgacttaattaaataactacttacagtataccctttatataattaacaatctttcagcgtgtttaaagtaaatatttgcagtgagggaaccaaggaagactgcatgtagagtcctaagccaagacttgaagaaatataggatttaagttggtagaaaggaatgggggctgggcacggtggcttatgcctgtaatcccagcactttggggggcctaggggggcagatcacttgaggtcagaagttcaagaccagcctggccaatatggtgaaaccctgtctctactaaaaatacaaaaaaatcagccggggatggtggtgcatgtctgtaattccagctactcaggaggctaaggcacgagatttgcttgaaccctggcaagaatcgcttgaacccgggaggcaaaggttgcagtgagccaagatcacgccactgcactccagcctgggcgacagagcaagactctgtctttaaaaaaaaaaaaaaaaagaagaatgggatgaccaaatgaccagtgtgactgagttcagcagtgggtgaggatcattaacccctcagatgaaagaaattattggagcagtcactgtttactcgacagatgttaattgagcactaaaaggaaggatcaaaaacaccaaagagtaatgcatgtgatctgaaaatgaaaattgttggccagacatggtggctcacgcctgtaatcccagcactttgggaggccaagacaggttgatcacttgaggtgaggagttagagaccagtttggccaacatggcaaaacccatctctactaaaattacaaaaattagccgggcatggtggcacgcacctataattctagctacttgggaggctgaggcacaagaattgcttgaacccgggaggtggagcttgcagtgagccaagatcatgctactgcactccagcctgggtaacggaatgagattttatctcaaaagaaaaaaagatatgaaaattgtcgccgttgtggtggttcactcctgtaatccgagcactttgggaggctaaggtgggaagatcgcttgagcccaggagttcaaaaccagcctggtcaacataatgagaccctgtgtctacaaaagaaaaaaaggttagctgggtatggtggcacatgcctgtagtcccagctactcaggaggctgaagccagaaggatcacttgagcccaggagttcaaggctgcaatgagccattattgcatcactgtgctccagcctgagtgacagcataagactctgtctcaaaaaaacaaaaaaagagaaaattggctgggcacagtggctcactcctgtaatcccagcactttggaaggccaaggcagacagatcacttgaggccaggaattcaagaccagctgggcaacgtagcaaaatcttgtcgctacaagaaatacaaaaattcaggtgtaccggcgtgtacgtgtggtcccagctacttggcaggctgaggtaggaggatcgcttgatcctcctgggaggcggaggctgcagtgagccaagaatgtgccactggactccagcctgggtgacagagtgagaccctgtctcaaaaaaaaaaaaaaaagagaaaattatgtaccaggaagttcaggacaatagttcactatgtgttccaggcagagtaacttgggggatgaggtgctagggtcttgacatggaaattggactatcatttttagtcataggactaaaaatggatccagatgagcacatgaagggagagttgcccagattcagggtatgtgggaagagagagtggttaaagatacttgtgagattgaaaatatttgggaattggagaatgcttagttgagtgtggtgatgaattcaatttcaaaggaataagggcctctgcctccctttgaggcatttatactcttaacacagtggttctcaagctacatgttaccctagtgagccatttaaaaacaagtttgcaagccttaccctccaaagattcagctcgtctgaggcctccaggtgattctatgatgcattcagcattgaaaactactgttggtgactctcgagtcagagcccaggcacatgcattttagcaagctgcaccagtgattccgaccacccagacttgagaattgctcttggtagaggttggatgaacaatgttcattttgatttgggatgaaattgggaactctcacaaggctttgaagtgatgcagcaattcagtaattttgtttgttttactaagtaaatattgattgtatgattattgacgttcttttaccttggtaatttaccaaagctgtattttgatccttcgggtggtttcaccatcatgtgtaagtggtggaaataccagttcaaagaagaccaaaacaacaaagtggagcaaagattggcaaatggtttctgtaaagggctagatggtaaatatttcaggctttgcagatgttagggtctctgctgtaactaccgaacttactgtagggggaaagcaggcacagccaatgtgctaacaaataggcaactctgatgcagagcaagacttctttccccagcctgctcccactgtcagccccaggaggtgaaggcctgtgggtggactctaagagatccataagaacctttggaactatggacaatgacagatctctgtgtgtgtgcatgctttattttctggtcctcgacctgccaaaaagctgaaacttgctactatcatactactgttaaattacttgaggggtggggtgttagattctgtgaggatataaaaccagattgattttggggcatggctggattttgtacttactgaaattgaattgtgggtctttgtgacatttatatactcctgttgttttaaataggaattttatggagaaaatataaaagagtctcctgattatgaaaggatcatcaatcttcgtcattttaagaggatactaagtttgcttgaaggacaaaagatagcttttggtggggagactgatgaggccacacgctacataggtaatggaaattctccttttcctatgggaagatggcaatttggcagtttttgctgacactacttattaacactagataaactattaaatatatagcatttaattgttaaagtactaaatcctgctttctggtatactgtacctgtagcttttgttataaactatttaaaatgtctgtgtttctgtgtattgaatgatgccaccagcgttgctccagttgttcatatttacacataactccttttttcctcctaacaatcctgagaagcagaatagaacttgatgtaattatctgtagtttgtggatgggaaaacagcacaaagaaggaaatagcttggccactattccacaattaaccagtgacggtaccattccagaaataatgttttggtccatcatgcttgaccttattatttgtgtaccttctttgtgctttttcttctttgccttgaatatgtattactttgaatgttaagcacatttttctacagtaacatataaggtgacagaaaaattagacacattttgctggcaaagaagctgcaccacctagctttacttatcccctttatcagataagatgctataagtcaccaaaaaaaaaaaaatcaactttaaaaaaaaaaacttaaaaatgaaataataagcagaattgattctcttataattagcagtcccgaggttctcctgagctagataattcagtggccccgtggtaccatcaaaaaaccctgattctttgtactaggatgcaaaagaaaacaatccttgtgccttctatctctcttggtggcagcccagattgaattggggaatacatctgtagaaaaaagagaaaacagactctacttgtttcacctctctgttctcccatcctcagcatgtccacattgcctatttctaggctaatgaatggtaagaggaaggggctatcctgattagcttatagactaattaggactttcccctgacttcgagctgggatcatcttacctgagcatggctatgcagaggaagtagacactcagcccaaattgtttctctgacctgaggaagatgtgggcaatggatttggagtggcagtttatataccccctggaagtggtgctgcaagaagctgtccccagccacattgccaagataacctattagaaactgggggtaaaggaaaagtgccaacttgttattgtcagatgacttctcttttggttgacgagccagtttcttacttacagcatcttttggagtactgctagttggtgacttacattggcagcagatgctgggacactttgtctagcctccccagcatctgtttcaccctcctttcttgtgcctcttccccatggtagatggaacagtggactaaggtttagggaattttgaccatttaagtctgttttcttaatctgtctaacagagttataataaaggttaatgagatcatatatatgaaagcactcgagttaagaaaaatagtattgatttgattcacagaggagctgtctttgctcctagaaagacctgtccattcgagaccagcctgacccaacatggagaaacctcatctctactaaaaatacaaaactagccgggcgtggtggtgcatgcctgtaatcccagctactcgggaggctgagacaggagaatcacttgaactccagaggcggaggttgcagtgagccgagatggcaccattgcactccagcctgggcaacaagggcgaaactccatctcaaaaaaaaaacctgtccacagaaaaatgttaagtataatctacagttaaatacatgcatggctgtgaacagggttcaatgtgaaaaagatatatttgagtgtgtatcgttcccttggtttgcacaagtatccgcagggttgtgattcacaggctttggagacattgagtatgtgcacagttcatccacgtgctcaggatttttcaatagatatgacttgggtgggagagggaaaggcatggataagtgacccaatgaaagagatgtaatatgagagttgtgcatttttgtctaataagcattttcattttgtttattttctttttagccccaacagtacttaccgatgttgatcctaaaaccaaggtgatgcaagaagaaatttttggaccaattcttccaatagtgcctgtgaaaaatgtagatgaggccataaatttcataaatgaacgtgaaaagcctctggctctttatgtattttcgcataaccataaggtaagctttagagagaacagctagttagcataagcaactgtcaagagtcatgttccttctttgctgtaaaacaatgcaaaaaacaatgtgaaacaatgatggtttcttttgtgtcatgtcagagtccatccactaagtgaggttgtgttccgaggttgctgtcttggttaatgagactctggggttatcacagcatccattcccctcctccctcgggttagatctgagtctgcagggttgagtgtcacaaggtttttgattcacaaacatctcctgtataattggaagacttatatgtgccagcattaaatgcttttctgatgttaatccacagggcattgctgaataacagcctgcacaaaatggcattcacacccactgtgtgggacaaagaccccgacactgtcacataaatggttgtgatatgatggattttagtttctaacatgacgctagcttcttgttagagtggtggaactgcatcacctggttgagcagttctgccactttctgcatggctcactcattcatgtcactaggtgaccagccgctactaagagaccatggcccaaatgttttctggagagcttctgatggtaatgtatagatagtcatgtgacagcttttggagcttgtgagactattgagatacagatagctacaggtatttgaagtgagaccaaatgtgtggggctcagtaaagactgggttattaacaaaacaatggtttgacatttaaaaccatggataatgtgggcaggaaggaaccctgaagccgaaagtaggctggccagggtataagtcaggtgtggagcacttcccagcagtgggtcacccgaggtcactatagtccagacttgacgtttgccatgaacaattgtcaagggcttgctggcacccaagggtaaatgacgtttactagtcaagtgttcttgtgcttttctgagccttaggccaaacaaccatttatttcttaaaaaataggatgctaaatctaaagtcttaaatatttttacatttcataaagactaaataatacctattaatcatgtgttataatttaaagcagagataagaaagaaataataacagtttttaaagctggaatatagtctaagctgtccccttttaaagagtcttttgctgctgtgttggggagtacaactccaggttgtggctgagtaggcccagaggtttggagctgcctccttttgtgcactagatgtgtgtctgagaagttgggtatcagtcactttgctaaattaaccagttgagattgtttgtctatctggcatggtgtccccaaactcgagaattttcactgacacaaagccagaatgtgcatgctttgagcacataactgagcacacagccctctgtgtggtggggccatgagtgttccctaaggggcaacttcactgacctggacacctttggtctgtcctcagctcatcaaacggatgattgatgagacatccagtggaggtgtcacaggcaatgacgtcattatgcacttcacgctcaactctttcccatttggaggagtgggtgagtcttattttctcctgcttgtagtagatatttcaaaagcaccaccatttcatgagtggattgtatgggctgctgaaatagccagctgttgcgtaccctgattgtcctctcctgagggagaccttttcctggtcacccagttgactggttttcctgcttccccacccacccctccagcatagggcaaatgtcttgtcactctctttctgtcagcagcactgactgaccacagctttgttcacttcgttgattttgttatcctgccacatttaggagatttgggaaccaagaatcaggtctcaaattaattaagaagatctctcttcgtgtgtgtgtgtgtgtgtgtgtgtgtgtgtgtggtgtgtgtgtttaatgaagtagcaaatgaaaggttcggaataccagggacagaaggtagaggggttttctaatgtgcctttgttttctgctcagttcttacctgcattgttccccagccctttgttgggaggagcagcctctccttgaattgttttgtgatttgagtaaaacgggactccccctgttctagagaggatgggcagaaagaaattcattccaagtgaagctttgtggacatagcctgatccttgcttttccctttagaacatgacctgcctgcctctcccacatgtgagatgactgactcagctttttatttctcctttgggacctaggctaggtgggcttttctactctctactagagctattacaaaatagccgatatgtaaacattctcataacaaaaacccaaccagaaaagccactgtcttaaagccctgttctatcctctccctttgtaataccgtcctaagtcagttgctccatgggatgcgatggcccagtttggcaggaccatctgttcctggttaaggaaaccttgtcctatgaccaaggagccttgacctatatagccacaggtccttgtctaggaggtaaacatattgccagcacccagcacagtgactgacatgagtgagggacaggcgggaagaggccaattggtaggtattgccagatccaaattggaaatggtggtggcttgtagagggtggtagcaggggagatagtggaaagggaagggggtatttttgggatcaagcagcaggattggctgatggagtgaatgttggaggagggggtgaatgagagaggatgactcctgggattttggctggagtaagtaatagttttgtagcccaaatgcttaaaagattggactctgttgtctctgttcctcagctcaccacataggatcctggcatccactgtgctagtgcagtaatcaactcggtaattgttccatatggtgtctccactgccctctaattgcaaatctaagtgacttgggttcagtccctgtcctacttgacaagatagcctgtggcatcattgactataccatcttatttaaaacaaaacaaggctgggcgcagtggctcatgcctgtaatcccagcactttgggaggccgaggtgggtggatcacttgaggtcaggagttccagaccagcctggccaacatggtgaaaccccatctctactaaaaatacaaatgttagctgggtgtggtggtgcgtgcctgtagtcccagctaccagggaggctgaggcaggagaattgcttgaaccagggaggtggaggttgcagtgagctgagattgcgccactgcactcaaacctggcaaacagagcgagactccgatctcaaaataaataaataaataaataaataaataaataaataaaaataataaaataaaacaagcaacctattatatacccacaaaaattaaaaatacaaaaagaagatgcaaaagaaaaaaacaggtttactctcttagcaaatttcaggcatataatacattattatagtggccatgctgtaaaaaaataaaaataaaaaataaaaacaagccttgacccccaaatgtaaaaagaatacaggctttttaagaaaacttggaaaagatagaagagcccaaagaataaacatttatattacccataaccccactatgtaaagataactggtatatgtcttgcacacatatgcacacacatatacacggtcatctgaatattctattcaaaaaggtatcatactatatattgttctgtaccctgtatgtgacagaatagtgtgacacttttccatgtcaatattcttgcatgtcataattttagtagctgcatacttttccatcatatgaatgtggcatatttatgtaaccaattcccagtattagatttttgtgatttcaatttttttggtattacgattcttatataatgtatctttatgcaatctctgattatttctttaggaaaaatgtctacaagtgtaattactctgttaaaagggcttatacaattttccaaattgaaaaaaatgcttttttcttctaattctcaaagtaatatagacacagtggcaaaaagtctaaacagttaaactttttaatattttggcatatagtttagatttttcttttttttttctttttatcgagactgagactccctgtcacctaagctggagtgcagtggtgtgatctcagctcattgcaacctccaactcctgggttctagcaattctcctggctcagcctcccaagtagctggaactacaggtgtgtgccaccaggcccagctaatttttgtatttttagtagagacacggttttgccatgttagccagcctggtctcaaactcctgggctcaagagatccacttgccttggcctcccaaagtgctgggattacaggtgtgagccatcgcacccagcctaggtttttctttagaaatgcttctctttaagacttttgatagatatttcaagtgtctttgcagatttctgccactttatattcccatgatcagtatatgagtgtttacttccttatatccccaattctggattattccattattaaatttctagacagaaaagggtctcatttcaatttgtactcctttgattattagtgagtttgaattttttttaccactctcatgaattttctatttatgtcctttgatatttttgctgtgttcacatcttccttattattggtatataaatagccttttttataagtaagaaaatcctcagtcctatctgtaatacatatccctttccagattttaatttttcttttaattttatctatgatttgaagcgtttatttatttagagacagagtctcactctgtcacccagggtggagtgcaatggcgcgacctcggttcattgcaacctctgactcctggcttcaagcaattctcctgccccaacctcccaagtagctgggattacaggcacccgacaccactcctacctaatttttgtagttttagtagagatggggtctcaccatgttggccaggctggtcctcaactcctgatctcaggtgatccacctgccttagcctcccaaagtgctgggattacaggcatgagccaccacatctggcctaagcctgtgtggctttttgttttttggtttccgatttggaaagtaggcttagaaaagctttccctatttcattattatataaatatcatctgtaggctgggtgcggttgcacacacctgtaatcccagcacttggggaggccaaggcacctggctaacatggtgaaaccccgtctctactaaaaatacaaaaaattagctgggtgtggcggcaccacctgtaatcccagctacttaggaggctgaggcagtagaatcacttgaaccctggaggcggaggttgcagtgagcagagagtgcaccactgtacctccagcttgggcaacagagcgagactctgtctcaaaaaaataagaataaaataaataaataattaaatattatctgtagtttccttccctccctccctccttttcttcttttcttttcttttttcttttcttttctttccatttaaccatggagttggccaagcatggtggctcacacctataatcccagcactttgggaggccgaggcaggtagatcacccgaggtcagaatcttgagaccagcctggccaacatggtgaaaactcatctccacaaaaaatacaaaaaaaaaaattagctgggcattgtggcatgcacatgtagtcccagctacttgggaggctgaggcagaagaatcgcttgaacctgggaggcggaggctgcagtgagccaagatcatgccactgcactccagcctgggcaacagagcgagactccatctcaaaaaaacaaacaaacaaaaaaaacaccctggagttcactttagaatgccatacgctgcatgatgtaataatttaccttttttttcccaaagagtaaactatgctggcaccattttttgaaataatcatccttataccatcagtactcaataaaaacacgtttgggtcattcttagggttttctcattggttgcattatctttctggtttgttttttccgtgggccagtaccacagtttcaattacagtagttgtacagttagctttataagtgacatttagtaagtgcttattgtatgccaggtactgcggttgaatccacgccttttcttttcttttttttcttgtttgagatagggtctcactctgtcacccaagccagagtacagtggtgcaatcacggctcattgcagcctcaacctcttaggctcaaacaatcttcccgcctcagcctcctgaatagctgggattacaagggtgcaccaccatgcctggctaattaaaaaaattttttttgtatagaggcggggtctcactgtgttgcccaggctggtcttgaattcctgggctcaagcaatcctcccacctcagcctcccaacgtgctgggattacaggtgtgagccaccgtgcccggtcaaatgcacgcattttagagacagacaactaataagtagtaaagccaagaaatgagccaaagttgtctggctccaaaacccacatattcaaccaatccagtagtttgctctttaggacacagtactatttcaatacctaaaagtaaaagctcctcattattactgtttttcgatgttttcttgcttgttcttatctaaatttatttttccagatgatctttggaatcactacctcctcctacttaaaacaaacaaacaaaaccttccgaaatcccctaggatttttattaaaattgatttaaacttaaattattttgggaagaatttatatctttaaaatgtggagtcttaatgggaatatgttatatcatctcttcatttatatagcccttttatatctttcaacaaaactttgtaatttccttcatgtcagttttttgctttttatttattttttgagacagggtctcactctgttgaccaggctggaatgcagtgtggcacaatcatagctcactgcaactttgaactcctgggctcaagcaatcctcctgcatcagcctcccaaatttttcccagtttcttactaccttggttatgtctttggctcgcccctcccttattctttttttttttttttttgagacggagtctcgctctgtcgcccaggctggagtgcagtggcgcgatctcagctcactgcaacctccgcctcccaggttcaagcaattctcctacctcagcctcccaggtagctgggactacaggcgtgcgccaccacgtccaactaatttttgtatttttagtagagacgggatttaacgatgttggccaggatggtcttgatctcttgaccttgtgatccacccgccttggcctcccaaagtgctgggattacaggcgtgagccaccgcacccggccccctccctcattctttaccctccctcagagttagggtttctcatggtcttgtccttgggtctcttctcacaccaggcctgcttcatgaatgattccttcctgcagcctggccttggtaaactgctccctggcctctggtcacctgtgtcttatatcacacatgccattccctctgcccagctcacactgctccgctttgtgcctgtcagtctgttgtacacacaatgaattagagaaatgaaactgtcacagagcatggctttgtggagggcagagatttacacttgcttattatcatccagctgtgcaaccttgttgccctgtcttactttccacaggctttgagaaagcaagtgggtgtgtggggccatggatgaatgaagccacatgggatggtgggaagagagcacatatagcatttagagtctgatccaggttcgggttctggctttgccacttagcagccgtgtgaccctgggcaggttaactgaccctgtaagctccctttccctctctggaaatgaggctgctgataattcaccaagtgggattgtggtgagaattatcttaagagaatgatttaactcttagcacagtccctggcataaatgagagccacagctctagaagaggtgcaagtccttgtcttgctcatggaaagcatcctgtttgacagggaaattgacttttccagggaagttggtaaggacttcctgaaaagagatacttcagctggcagagatgttcagtggggttcccaggcagcagggagtgcatgtgagctttcccggtcgttgttagacagaagtagcttgcatcatctacagtgaagcttgttttgtctgttccctttatttcaggttccagtgggatgggagcttatcacggaaaacatagttttgatactttttctcatcagcgtccctgtttattaaaaagtttaaagagagaaggtgctaacaaactcagatatcctcccaacagccagtcaaaggtggattggggaaaattttttctcttgaaacggttcaacaaagaaaaactcggtctcctgttgctcactttcctgggtattgtagccgctgtgcttgtcaaggtgagtccctataacccatgagtgccattcagtctggtcctggcctgatggctgccagatgcatattctagcaggactctacattaacttgtagagtctaagacagggtcagtgaaccacagcctgctggccagctacccgtttttgtcactgaagttattggaacacagccacacccacttgtttaatcatccacagctgctttcatgggacagtgacagagctgagtagttgcaacagaggctgaatggccctcagagcctaaattattacagaaaagtttgctgatctctggtctaagagattaaaacagcgtagaacttgattgcagaattctgagctgtctgatcaaagggttagccctttgatccttttggtattggactttccttgtcacttacagctttgttcttgaatgtgcatgaaatcagcttaccacagaggtgaaggcaagaactctggtacaacagctttggtgagggatattttattaggcttgagtttttttcctccaaagttcactacctgataaagtttatctttggtgattagtcattatagggatgggcttgcaaagaggccctcatgatagctgccttctcaaagcagtttgcgtattttgagatgaaagaggaaatccgtaattaaagttaagatggaatgaggaaggcaattgtgtctgtggtgccctcagccgttcaactgaggatataacattgaaaatattgaccatatcagtgaagaatgggcttggaaaaggcaatggtaatagttgtgtttatgttttgtttaaaatttgaaagggggccggcgcagtggctcacacctgtaatcctagcacttcgggaggctgaggcaggggaatcacgaggtcaggagttcaagaccagcctgaccaatatggtgaaaccctgtctctactaaaaatacaaaaattagccaggcatggtggcacgcacctgtagtcccagctactcgggaggctgagggaggagaatcacttgaacccgggaggtggaggttgcagtgagccaagatcatgccactgcactccagcctgggcaatagagcgagactccatctcaacaacaacaacaacaaaaatttgaaaggggtttggctcatcttacagtatcccagccttagtggaattggagataccagttgcatttgaaatcatttgggttttctcagaaataccaagctgtgctgaggagaaaggccctgttgatttttctggtagttcacagactgcgttggtccagtaagcagagatgaacaccagatttcaaaacccagccctgtctgttaagagtgaggtaggaactttttgttttctttctatatgtaaggtgggccaagttggggtatgttttcaagggttttttggtttgtttttgtttttgtttttgtttttgtttttatttttgttttttttttgctacagttggaggcttaagggttattgaaaaaagaatgggccgggcgcagtggctcacgcctgtaatcctagcactttgggaggccaaggcaggtggattgcctgagttccggagttcgagaacagcctggccaacatggtgaaaccccatctctactaaaaatacaaacgttagctgggtgtggtggtacgtgactgtagtcccagctactagggaggctgaggcaggagaattgctttaacccgggaggcagaggttgcagtgagccaagattgtgccactgcactccaccctgggtgacagagcaagactccgtctccaaaaaaaaagaaagaaaaaagaatgtttaacttacttatctctagacattttggacctgggcccagagtatcagggtgttaaaactccacttatccacaattttaaaagggtgaagtgacttgctaggaatctaagagaagtgtgcagaggcaatggcttagctgcgtccaggtgaagcatacatcatttcttggaaaagggcagctgagtgtgagcctcatttctcttccccttctactcagctctcctgggggaggtgccagctgactaattcagacttgtcaccatctaggcactgaactctttatgtcataatttaagaatatgttttttaaatcactaagtagttttgatttgttttcatttttaaaaaaaggtttgactttggaattcatggcagcaaatgtcgtgaaatcaaggtgtagtatacaatttaggggctactttctttgccttcctgaggctggaggtgtggtcggaagcttacttgggtctctggtcaatatctgtctcttttgttcttttcccaagacctcggttcctcagtttgataatgcatcttggtaggatagaatattttagcctcatggaaaatacggaggcccaggctgagtctgcattctccaatcttaccaaacccccaagaagcctccctcaggtgcagtgcagtgtgccaggcaggttcgagttcccaaagggtttggcaggcatgtttctctgtgagggtctagagaagcagcaatatataaaagaagcagcaatatataaaacctttagcagaaacaaaaaaatgtggtttgattcctggctcaatgaacttgggcaaggccttttctgagctctttcttgggcctcagcttgctcatctacagggtgagggagtaggtgtcagtgattccccaggccactttcaacccttccgctcaattctcattactaatagttgttaatatttctttggattcaatctggaactaggtagagatttggttttcttttccactttgctgcttttctgctcctttctgagcttttaatcctctttttatcaaattaccttttatttaaaataaatgactttgaatctgtactgtatatttacctgaatagtctatttattgtaattacatttttctgaaatggcttttatgtacttaatagtttccttattttgttacactcttggattttattttattaattaccttactagaattagaagggatttagagcagaagtattgtacacaaagtaaagttccaataaagcttataagctacagaaggcattgtgggagatgtgggttttaaaaggtcgagaaacataagaggttaatgttgataaatttcattaggcctttgacaactaaatatgacatttgaaccttgagattgcagcagcccttcctcagtcttcaataggaaggattaaattcagtactacttttgaattttagaaacaaaattgtataccagtttttgaattccatgtagagacttcagcttcctactgaaaatgctaggataataagttagtactctcatcttctgtctctactctgacattagctagttgacagtggacagaatatagccttcattatcacgttgtcttactcttattgttattgttgttttttgaggaagggcataatcctttggcctaaaccgtgcttcctaggcttcctagggatatgtagtccttttttgtacaatgcatgtagagtctcttcagacaggaggtgtctgagtcccagtgctgagcttgtgttgcaaggctggttgtgggtaggtttttaaagcagctgagtaaactgaatccttttttcctctctccaggcagaatattactgaagaatgatcctgttcaacctcctagtgcctctactgaattattcctcttttaaatggttaatgaaccaataatttttaaatcataccaaaaatagtaagaaaatatgcaaacactctgtgatcaaacttaaaagtcattgccattcatcattaataaaagttgccatttcaactacgtcccaacattccctaatagggtattcagggaacctgtcttaaattgtgcttatctaaatcttggaactttgagctaggggaggagaatgtattagactaaatacaaactgcggggttgtaagggagtctcagaacctcactgaatccttcactccagttaatggcactgctcacttcctgcctctgctgccaccatcactgtgtgaagctttcaagagcttggtacttcccagggctaccggcagtcctctgtagtccagagaggtgagattagatcttcttggttccctgtgaggtttcaggcactaaaactctatgtggggaagggaggggttactcctcctccaatgggactcaaggacttgacctccaggagtaggcccctggtcagaagtgccatctcaccagtggtcttcattcttcctcattcattctttatcatcctgtgttctgtttagttgcaacaatctcttgtgactaatgtcactcaaagcatcttgtaaatcctagggcttcctggaagttagttgccaaagtcatgcaagcatcacctgtcattcttgtgttggagttatagaattctacatcttataaaacctaactggcatttaaaaaatactgtggccgggcgtggtggctcatgcctgtaatcccagcactttgggaggccgaggtgggaggattgcttgagtccaggaatttgagaccagcctggacaacacagtgagacctcatctctatcaaaaaataaaaattagctagatgtggtggcatgagcctgtgttcccagctgcttaggaggctgaagcaggaggattgattgagcctgcgaggccaaggctgcagcaggctgtgattgcaccactgcacttcagcttgggcaacagagcaagaccctgtctccgaaacaaataaaaaatactgtaataaaagtacttataaacatactaatcctctttcaggaccctaaagttgcaggttagtaggtcttcaaggacaaatctgtaagtttcttatttctgtagtgcaagtaaaatttcactttttgaaactatagagagatccctttctgattagcctacagaacttaaagtgagggaaccatttcctctcacagacaaagaggcctgggatattaggactttggggtttgagagcatcatggggcagacagatggtggatggtctggacaagaagcgagtaagccactgcggttggtcatactgaagggaattgatggcaagaggatcccctgagcaagtcagaagttactctcatcagtcgttcatggtcacaacctgaggtactctgctgagtgggcaaggctgaagaagaggcctgtggaatgcagcattacctgctggacagagcagggcaggcagttctatgccttggagctcctgactgcagggactctgtccccacactcaaaaagactcagctcactcaatgagagaatgtgatttactttatagaacgtataatcaactttgttgaataatttgttctattaaggctgtctaaagtatgtgatgtcttcatcatagtatgaagtgttgaaaattaataacgagcctagtttaggaaaaagctgcttaaaactgtggctctaagagagtaatcataaaataccttagataaaattgcactatggaattttcattgagtatgtttaaattattggcttgtctactaatacacatctgcttcaaaatgaacatatttcataaaattggcatcaattttaatgacgctcctggtatggaacctcagatataccctattggagacaatcctttgatcataaattctccccaactataaatcattttatgtctttatcatagat

SEQ ID NO: 2267 - DNA, 491 bp, Homo sapiens
tcattttaaaattcttagctgagaagattttctcaaactttatgttctgctgtgtgtgttgggggtggtggttagtagctatagtaaataggtttttccagtggcatcctcctacccccagttgctgatctagaacaagtgtttctgtaagcatatttgtagaacactaatcccgcaagattttacacaaaaaaatggtcctgccaccagtcctgtataccactggcttgtaaagcacatcagcaaactaaaggacccaggtcatttggaacctctgaagtgctagtgtgtgcagctcccagacttccttgaccgcggagccgtttaccttaatacctgttaaccatggaccacacttgggcaaacagtggcatagagtctggaattgcttccatgatgactttgctgtgctctgttcctacttgttttgtgcccttatttatatcatgtcactactagaagaaaaagttcagtaagaacaagtatttctc

SEQ ID NO: 2268 - DNA, 291 bp, Homo sapiens
ggagtcatttcaactttcaagtcttactatttaagacatttcataaggctacagctgccatagacagtgattcctctgatggatctaggaaaagtctattgaaaacctgctggaaaggattcaccattctagatgccttaaaaacattcatgattcgtgggaggaggtcaaaacagcaacatgaacaggagtttggaaaatgttgattccagccctcagggatgactctgagggatcccagacttcaggggaggaagtcactgcagatgtggtggaagcagcaagagaatg

SEQ ID NO: 2269 - DNA, 374 bp, Homo sapiens
ggagtcatttcaactttcaagtcttactatttaagacatttcataaggctacagctgccatagacagtgattcctctgatggatctaggaaaagtctattgaaaacctgctggaaaggattcaccattctagatgccttaaaaacattcatgattcgtgggaggaggtcaaaacagcaacatgaacaggagtttggaaaatgttgattccagccctcagggatgactctgagggatcccagacttcaggggaggaagtcactgcagatgtggtggaagcagcaagagaatgagaattggaagtagagcctggaaatgggaccgaattgctgcagtctcatgataaaatgtgaatggatgacaagttgcttctta

SEQ ID NO: 2270 - DNA, 374 bp, Homo sapiens
ggagtcatttcaactttcaagtcttattatttaagacatttcataaggctacagctgccatagacagtgattcctctgatggagctaggaaaagtctattgaaaacctgctggaaaggattcaccattctagatgccttaaaaacattcatgattcgtgggaggaggtcaaaacagcaacatgaacaggagtttggaagatgttgattccagccctcagggatgactctgagggatcccagacttcaggggaggaagtcactgcagatgtggtggaagcagcaagagaatgagaattggaagtagagcctggaaatgggaccgaattgctgcagtctcatgataaaatgtgaatggatgacaagttgcttctta

SEQ ID NO: 2271 - DNA, 480 bp, Homo sapiens
ctgagacaatattaaaattagaccaattaataaccctacagtggcttctgagtgttcaagtgaaagggagagtcgcacgtccctcactttaaagcgaagaatgattaagattagtgaggaaggcatgtccaaagccaagacaggctggaagctgggcctcagttagccaagctgtgaatgcaaagaagttcttgaagaaaatggaaagtgctactccagtaaacatacaaatgataaagtgaaacagtcttattgctgacatggggaaagtgtgagtggtctggatagaagatcaaaccagccacagcattcccttaagccaaagcctaattcagagtaaggccctaaccctcttcagttttatgaaggctgagacaggccaggaagctgcagaaaaaaaggtggaagcaaacagaggttggttcacaaggtttaaggaaagaagcggtctctgtaacataaaagtgcaagagctggtgg

SEQ ID NO: 2272 - DNA, 343 bp, Homo sapiens
agttgctataatagcagagctaagcttactgcgtgtgcagtttgtaaatgtccccaaatcacttagcaacaataccaccagacttttgttcttttcttatgctgtagatactaaggaagagcagcttggcttaattttaatttagggcaacaatgttcttaaactgattgcaaaacaaatagtgactttacagtttctgtatactcattcatctaaccatagtgaaagagtatttttctttgagctcatgctcctagacttgatagtttttcaaagaattctcactggaagctccattggcaagagctacttaaaacagttattctggatctgatttcctaat

SEQ ID NO: 2273 - DNA, 342 bp, Homo sapiens
agttgctataatagcagagctaagcttactgctttgcagtttgtaaatgtccccaaatcacttagcaacaataccaccagacttttgttcttttcttatgctgtagatactaaggaagagcagcttggcttaattttaatttagggcaacaatgttcttaaactgattgcaaaacaaatagtgactttacagtttctgtatactcattcatctaaccatagtgaaagagtatttttctttgagctcatgctcctagacttgatagtttttcaaagaattctcactggaagctccattggcaagagctacttaaaacagttattctggatctgatttcctaat

SEQ ID NO: 2274 - DNA, 342 bp, Homo sapiens
agttgctataatagcagagctaagcttactgctttgcagtttgtaaatgtccccaaatcacttagcaacaataccaccagacttttgttcttttcttatgctgtagatactaaggaagagcagcttggcttaattttaatttagggcaacaatgttcttaaactgattgcaaaacaaatagtgactttacagtttctgtatactcattcatctaaccatagtgaaagaggatttttctttgagctcatgctcctagacttgatagtttttcaaagaattctcactggaagctccattggcaagagctacttaaaacagttattctggatctgatttcctaat

SEQ ID NO: 2275 - DNA, 21833 bp, Homo sapiens
gggtgggaccaggcgggccaagagggccgggacgccgcgcggggcagtgtgggactggggcggaaccgcccggccgcgggtcgggctctgtgtcagcagccgggcgggcgctcgggcgggacatggcagcctgtacagcccggcggcccctggccgtgggcagccgctggtggtcccggtcgctgactggggcccggtggcaaagccgctctgtgcggcggccggagctggagccttctcgccagcgtcgaccacgacgacgcggaggcacctctcgtcccggtgagggacggagccagggggcgcgaggaactgggcctggagcccagagagcgtgttcctagccagtgcggaggccaggggcccgggcctgctgagggtgactggagtttgacccgggagagggtcccgagcagggagccgacctgcgctgtctgggacatgtgccaggagcagggaagccagcgcggcccagagccctggttgtacagggctggccctgggggggaacaggttaccctccccaagtgaatcctacttccccggctggggtccccagcaccgatgtcagagggaagctttttaattcagccctagggcattggcttgaaccctcagcctttggatttggtgaaggtctgcctcagaaagatgctagaggtgggaaacgagactcttgggtgtggaccctcgtaggccccaggtttccaagtgactttggggagatcgattttctatctgtgacttggggaagggggtttgaggccatggggatggtgtggaaactgtttccacggatgggacaggcggatcaaatgggctggtggatcagtgggaggaagcataaagttcacatcttcaaaacagtaaaaacagcctttatttgaagggcccctagaaagagcagccctgttcagagtggtgactgacattttagtggctgatattagacactgaacattggggagagatgatagctatttgcaatttaagacccctgtgagaatatgaacaaaaacggtattgagagagcgatgtgccgtaggaaatctagagatgtttaagcttttcaagggcaatgtaagggctacaggttagagggggagatggacatggaattataatacaggacaaatattttttgagcacctcttgtacactaggctctgagggggcagtaccagctaatcagactcaggcattgctcccagggaatttacagtatttaataaagataagacatggacacaactgaaatgtaaagggagcaggatattgtttgatgacttgtgatatagaaaatgtaagaaaagaagaaaaaaagatactccccttctaaaaaaattgaaaaagtgagcaagacagttaaagtgctgtgggaggtcaggagggtgggttagggaagaaacaagggcaggggtacatttgagcagagtgtgagggcatgatatgaagaatgcccagtgaagagagaagacagtagtatgggagcggtcacatctaacactgggagactgtggaggttttcaccaaggaggaggaaagcctttcctgctccagctggtcccactaccccaaacccttctctgctgtcatcgccctggcccctcagtatcctaggagctttttcttatggataactaccattaccttctcagcttttctgttgcttgttcttttccttcctactcagaaaccgaccagagggcaaagtgttggagacagttggtgtgtttgaggtgccaaaacagaatggaaaatatgagaccgggcaggtgagtattgggctgggtcatctttcattttcatagagtgctctgcttctgaaaaaagtcagattaggtcacaggcctgcatggtatggtgttccattcattccaccttgatgtttggtgccattccagaatcaaatttgtattcattttttattttatttatttattttatttatttattttttgtgagacggagtttcagtcttgttgcccaggctggagtgcaatggcatggtctcggctcactgcaagctccacctcctgggtttaagcagttctcctacctcagcctccctagtagctgggattacaagcatgcgccaccacacttggctaattttgtacttttagtggagatgcggtttctccatgttggtcaggctggtctcgagctcccgacctcaggtgatccacctgccttggcctcccaaagtcctgggattactggcgtgagccaccgcacccagcccagaatcaaatttttatagatagggtttctgttctcctggatttgaatgcacttaatgtgtcagtgggttctctttccaagttaatgtggacagggatggtgtggactatagtgaggtttagccaagttgctgaagatttctctaacatagtggatggtgggaagccgtggagggagctttcagaaaagtatacctttgatgctttgccgtaataaaattgacttcagtgtggtaaactctggatgtgtggttctttttctatatcagctttgttctgggtccactgggatagatttaggcccttctaggatattgtaggtaaggaagactttttgtttgttcaacattttatttttctgtgtgcctacaatggactaggcattgtgcattagggttaaatcagaaagcaaagtagacatgattcctgctattgtggagtttctagtctagaaaagaacgatttgcaaatggccaatagctgtacattgtgctaagtggaagggaggtcagggaaggcttcctggaggcctaagcttttacctaaaggatgagtagagtcagccaggtaaagaagaaataagagtgttccagcattggtctggttgatcacagacttcaagggaagaggtagcaagaccttgtgctggagttgcctccacctgtgttgctttgtggtctggggcccacctggatggatttgctggactgcagactcactgaggcccctctttccttccagcttttccttcatagcatttttggctaccgaggtgtcgtcctgtttccctggcaggccagactgtatgaccgggatgtggcttctgcagctccagaaaagtaagtttccctgtggttgtgcctcacagtatcctcaggaggagatggcagacatatgtaattggggtactaggggtgaagacagcgtcctcctaggccttggaaacatccccagagtacttctctgggactaagacccatggagacaaaagtgctgagtgccagggatagtctaagtcagagagtccctttaggcctcctcagaatgctttcctaagccattcctaattttcattatgagtatcccagagggcatttgggggacaagtcttcttgatttcttgatgttcagctggagtctttccctcaatctcacatcatccctagaatacattaaaacagaaaaggttcagccccattaagtgatcacagacagtccctgggatataagaagacaagagtactctgggccctggggactgaggtggcaatttgattttctcaacatggcccccttcttttaagaggtatccacacggtcagatgatggctccataccatggtcttccatgctctattatttgccccaactgaggagcagctgagctgaggtgctgcagagcaggtgtccagctggtgctaaagcccctttagatcagagaccagcctgtttaggtgaggaggagtagggagctgagtcagccacagcttccatttctcctggggtgatcttggcctccttctcccaccccatagagcagagaaccctgctggccatggctccaaggaggtgaaaggcaaaactcacacttactatcaggtgctgattgatgctcgtgactgcccacatatagtaagtaagcaagatggctgggcttgggggtcctctccatggaaagtcctgcatcccaatggggacaaagggagggaagggggtcaaacagagcccaggtcagtcttggtccccaaggccttggactgcacagtggccaacaaagccctgattcacgtctttttttttttttttgatatggagtctcactctgtcgccaggctggagtgcagtggtgagatctcagctcactgcaacctctgcctcccgggttcaagtgattctcctgcctcagccacccgagtagctgggattacaggcatctgccaccacaccagcctaatttttgtactttttagcagagacatggtttcaccactgattcacttcttgccttagtctcagagatctcagacagaagctgtgaccttcttggctaaccatgatgacagtcgggccctctatgccatcccaggtgagtagttagcatttgaatggtgcccgtcaagaaggagtctggtgtgtctcagggagaggattctgatgtcctgtcatccactgggagggattatgatgctgagaggtatgatatcagggttatcccatactggaacaaggccagttaatgtttcttctcaaccccatctctctcctctcctgtgagtttcaccactgtcttttgcatctctgtgccaggcttggactatgtcagccatgaagacatcctcccctacacctccactgatcaggttcccatccaacatgaactctttgaaagatttcttctgtatgaccagacaaaaggtaatctctctcaagaaggggaggtggaatgggagggccttttcatcaaagaatatcatagaaataattccagggccgggcacggtggctcacgcctgtaatcccagcactttgggaggcccaggcaggtggatcatctgaggtcaggagttcaagactggcctggccaacctggtgaaaccctgtctctactaaaaatacaaaaattagctgggcgtggtggtgggcgcctgtaatcccagctacctgggaggctgaggcaggagaatcacttgaacccaggagggtggaggttgcagtgagccgagattgcaccattgcattccagcctgggcaacagagcgagactccatctcaggaaaaaaaaaaaaaaaggcccgggtgcttgtggctcacgcctataactccagcactttgggaggctgacacgggcagatcactaggtcaagagatcaagaccatcgtggccaatgtggtgaaaccctgtttctactaaaaatataaaaattagctgggtgtggtggcgtgcacctgtagtctcagctacttgggaggctgaggctgaagaattgcttgaacccgggaggcacaggttgtagtgagctgagatcatgccaccgcactccatcccggcaacagatcaagactccgtctccaaaaaaaaaaaaaaaaaagaaataattccaacgctctatttccacaacccttttcaacctcctgttagagctgtcatgcctcataggtgtcatacctgacagatgacagatggcagttatttccttacagatatggaaactgaggatcagggatgatgacaagggactcaaggttgctagtagcagagtgagggctgaaaaccagggctcttaactgccagtccgattgttttcccattgtatcacactagctcctcagggcttattcttggtagcagtcctgtgccttcttccagcctgaacttttgcttcatgtatgagcaccttgtttgcctgggccaccactagggagggttttctaggaggggcaatcgcactggactattgtgtgattggactagatacaattgtatccacaacacacaattggactaaccaattgtatcttgccccagcacctccttttgtggctcgggagacgctaagggcctggcaagagaagaatcacccctggctggagctctccgatgttcatcgggaaacaactgagaacatacgtgtcactgtcatccccttctacatgggcatgagggtatgtggccagcctggaccccttctagcaggggtaggccccaaggtgtatggtgtccttaaggtgactgccgggggaagggagtctaaatataaaccatgtccctgtggttctgcttccaagtggtggcatgtgttgggtggggttgagtagcctctagacagtggctgacaccaagacctagagcgggcaggaaaactcataggtcccaggaaggaatcctttatcctgtctcttccctcttgctcaaagggagccatgtttatgaagaatatacacataattatttaaagcagtgtaggcataacactttttacacattatagacacttacacatcgcctggctgtaagcatgtgcagtggtaggggccgcccaactccacagacagaagctataggtcagaaaagtacgtatagtcagtgcatgcttggatacaaatataaatgaaacaccgtccctgtcttccaggaccttatagtagtggaggaggccaacttaaagtattatagcaagggacagtaatgggagacaggaggaggacaggggctcagggcagcaaggatagggggcagggctggtgaggagggcagtgaaaaaggtaagagccctgtaactgatttctgttggcatccagctctgttggtgatcttgaagggatgaggagtggggaggccaggagtggatacagggatgttgcctccctgtgggtgtgtaggccatggttcagctatcacccttatcccacagatactctcagcttggtctgtctgcaaccttcctggaatacatcaactgcactggagagatgttgattggaacacacttggtcttgccctgtgggacttaaattctttttgttttctccctaggaagcccagaattcccacgtgtactgggtgagtgtcactgtctgggagaaggggagcttgtggggtgtgcctgggggtcagggtggaggtgggggagcccaccttctgacgagagcggaacctgtgcagtgcatgtgtcagctttgttgacttttgctttgcacagaattctgaggagggttacccaaattttattttttttaaactctctctcccacacccacctcagtggcgctactgtatccgtttggagaaccttgacagtgatgtggtacagctccgggagcggcactggaggatattcagtctctctggcaccttggagacagtgcgaggccgaggggtagtgggcagggtgagcatccttggtctagtaattctggtcctgtgtggcaagcctgggggcttagcgcatggcttccttctcctttgttgttatagacagaggctcactttgtgaatacattgtgttgttttgggttagaaatcttaaaacaactacatgagatatgtttcttgaaacccatttcatagatgaaaagagtgagactgagaagttaaataaccagcccatggtcccatagctagtagtggcagggcctcaatttaaacccaagtgagtctgaagtcaaaacttgtgtagtttttaaaactggtatagtgtcttttaaaaactaaaatttgaatgtcgttaggtggggcacacacccccaccaatccctgtggtcttgcctctttgcccctttacatgtttacatcctctgctggtccttgaagagatctgattttataatccctgcctacccaaccctgtctcctgagaaataaagtcacaagcagtactggtgtcaggggccacattcaacaagcatttatcaaagtcagcgaggactggggaggcagttgggcaagtgaataagaacaaggctttggatttaggtagtcacttcaaattccagctgagttatatattagcataactttcggcaagttatttaaccaaaatcttagttccttactcctaaaatgtggatcacaccagttatcttatgatcattaggagaattaaagcagcagaggtttgcagagtacctgccgtggtccccgccagcatgtgtgaatggacactggaggggatatctccacaggaggtcctttgtttttagagacagggtctcgctgtgtcacccaggctggagtgcagtggtgcgaccatagtttacttttctgggctcaagcaatcctccgcctcagctttctgagtagcaggactacaggcacacaccactatgcctggttagtttaaattttttttttttttttttttttttttgtggagatggggtctcactgtgttccccgggctgcagaggaggtcctttgcccagtgccttcggacattcagtctgagattatctttcccagagccagcataaaaggcccagccaaatggccatctatgggaggaggtactggcaggaagtgtatcatgctatgggagtgcctgctgtggtggtggctgggtaggggacatccagtcttgatgaactggcagtcagcatgtaaccctggggtgcaggaaacatgtccctggggcttggcctgacccattttgcctaaacctttacaggaaccagtgttatccaaggagcagcctgcgttccagtatagcagccacgtctcgctgcaggcttccagtgggcacatgtggtgagtgagtgtgcacagcagtaggggccacccagctccacaaacagaagctgtaggtcagaaaagtgagagcttagagcttgccattaactctgggccaagttacattcttagagggagccttatctgctatattgttgtgtgggacttgtctgattttctattaccgcctgtttcccagtaccctgtgatttgtggactgaggacttaggctaaagaggtctggtgatttgatgctgcagaattgcttgtatagttgggttttttcccttggtgtttcactcctttacctgaaaatgcagttggctagcttatgcagtatgtatctaaaggccagaatctggacagctgtgttttccttttttcttttgtgagatggagtttcacttattgcccaggctggagtgcaatggcacaatcttggctcactgcaacctccgcctcccaggttcaagccattctcttgcctcagcctcccgagtagctgggattacaggcatgcgccaccacgcccggctaattttgtatttttagtggagacggggtttctccatgttggtcaggctggtctcaaactccccacctcaggtgacctcaggtgatctgctggcatcagcctcccaaaatgctgggatttcaggcgtgagccactgcagctgtgtttttcttttcatggataaccatgaggggctcttgggtctctggaccagtcatcctgtcatgagctagagatagaagagagctcaggctcacatgtcctctgtggctggcagctgagggcatggggccatccagatccttaggaggcctcagccctggctccttctaaaccagcttctttctgactgtaggggcacgttccgctttgaaagacctgatggctcccactttgatgttcggattcctcccttctccctggaaagcaataaagatgagaagacaccaccctcaggccttcactggtaggccagctgaggccccaagtgcccaggcttggtcaccgggaagaacaactctcatcccacaattgctgcagaactcttctctccccatcatgggccacagtgggtctcttaatttgattgtggggttctttttgtggggaggggtggtataacttttcttcagaagacccatgtgggacacctccaaggctggcctcctcataagccctgcctacaccatgttccagtaaacctctccaccaaggaactgtgttcagctgccacaggcctggaggagtttcctggcctgtcacgtgaggtttgatcagtaaaccagtgcacgcttggccacccttgccatttctgctcccagagtctcaggctccccttctgacccagtgtgcgcccttgactgctttctttgctgcccttccagggagctgcccccctggtagggcatgtgcctgtttccctctcagcctggaggctggctggacatctcctagggtcactgtgcctctcagctagttggcgggggtgctggactggactcttgttcactttaccttctgccaaatgcagagagggaggccagtgtcagggtcggagtggcctggctcttagcactgaccgaccattgccatttctggcctcgctaggcccaggagaggagggaggcaagccagtcgggtttcctggagcaatgggtgtgccagccctcagcatgactctgccaagcatccagaccacaaatgcaggaatttggctgaggagcagctttaggtatggattgatgactaagtcaagctacttcctgagcttctctcagatttccaagagccagagatgaattgtgctgcatcttgccccaattcttaggatttcttttcctccgccactgcagtgattgttagaggtagttttcttgaattaatattaaatcacagttccagcccttgttattcttgtccttagtcctccagggggagctggggttgcagggcaacagtacagtcgcgcttacgacctggctagaacacaaggtcagatgataaacagaagcacaggaactcagcccatggccgcaagctggtcaaggcctgctcactgtaaacatggctctgtaccattgagtttaacacaattttattagaaattagtgtttgcttccatcacttatgctgagcaaccaaatattacagttatgtgataaaggaaaaattctttcctgcccaggacctgcgccatcctttaggccgaccttggtcacataccaaattcaataaaacccaatactggcctgtgttgttaacagcaggctgccaggtttctcagaaactgacaagaaaatctgaccttcatccatactttgtttacttacccctgggctgcttggagttgaaaaatgcacacagccaagagttgctttctgaatagggctggaaactttcaaagaaaacccccaaacttttaagtcacaaagtctgattaaagaagctaagatcatgtcagtgagttcaatgttagtattttccttaagaccaaggagagattttcagtcagagaagataaatgcccagtcccagactactgtgctttctcggcaaaaaagactgagacactgaggatgtgaatgtcaaagtagtaagcagggactaaaggggatggggaggtcaaaaggcaagcatcacaacacctcagtggggagctgggaatttgagtgttaaaggacctcaagagggcagctgagaaaataggccagtggtctcaggctgacgcattccagtctctgtgggaaagtcataaagccaaagcctgaatttggccaaagaagtggatttgtctttatcttgttacctcaatgagggctggaagaactagtagctgatcaccaaggtacctgacctgagagtcttagtgctgtttatacattcaagactgtgactaacataaaatgcctaattagaaagtcacatttcccctgtcccgccgtcatgtcacttcaggtccttgtgtctaaccctgggtctggcatttgcccataggctctgtggcatcagctatcataagagtagtcaagagagatgaacttgataacctgtgttctctccaaagagcagaaagtgggtactatacgtggctacgttgctttgttaggctggcagaacagtccctccctgacagcattcctttggaaaataattcagataagctgaattctggtttggccaagccaaacaaaaaggaatgaaaaccaaagccctaaagaggaactcacctcctggctagtgcttggcatctccatggctgagttacccaacaaggagtgaaggccttcagggtgcttcggttgctcctgtcatcccgcgctcagagacaccactgggcagaaccgccatcccagccagcaccaaccaagagcatagatggtgtgggcagggagtagatgtgtggccaagcatgtgccacctctgtaggggctgctgggagtttgctgtcctcagctgatgggcatgccagccaacaccatgcagtgcccacgggctccacggtcttcctgccgtggctcatgtttctggcccatgtgacagctctttggctttaccgtatgtgaggacagcatggctggaagccaagggtactcaagagaatcacaaagagcagtcgtgctagacctaggagtcagtgatgtgactatgatgtgggggtaaaatgtcctttctcacaggcaccctgtgaggactgccggtcccagcttagccatccttccctcctcggtgcactctgagctgctggccaggctgcaaagccagagctgctctgtcggatgttttttttttattgcttcctctttatcccctccctcagattgattctgcagggaagtggggattagggtagaaagacatgggtcaaggagattatcaacctcctgaataacagtacaaagtgctttaaagaaacagatcccacaggcatggagaagggccaagggttctgtcatatgtagggtcttggcaccctggagggcaaaagaaatgctcagtttcctcattactagatttagaattattcatttcctagattattttttaaaaaccaaacttatcaagcctgtgcttaaacaccttaggaaaaaagacgtcccactttctgcaccagggcctctacagcaccagaactgcctttcccccagctgaggcctaaggggcagtagccttctgcacagggcctaggggaaggttctcagcaggaggtgggtcagtccatatgccccagggagcagaagcagctccgtcgggcaggaagggtgatggtgagcagataggacaggacgcagtctccagaagtgctcaggggcaaggcaggggaatgtggtccctcctctgcccagaccctctgacctctgagcagggcctgtcatgcctctgggtgctagagcagagacccaggcagcagcagcatggggtggccaatggggcgggttccacaggatgggagatagggcctcccgtgccctgactccctgagggtctggtcagtcgcgatgggtagactggtggccgagctgccggtcatcgtaagtgctgtagcgcttgacgtggatgcggcggacacggtcccgcagttcaaaggtctcctcatcttcactgggggaagcctggctgcggctacggcttgtggcctccaacaaggagttgtcggggacgcggggagtctcatagagtaggacgttgagtgtctcctcatagattcgggcctctgggaattccacctggggttagggaggaagaaggtggagcaaggtttcatcttcaagaggaagccatgcgtcagagcggctggccctgaggctccataaggcctccgctacctctcataaaacaggtggcggtccgtctccagggaaagccagcctccctccgaaggcggggtgaggggatgtactctacagacatgaggacagggaagaccaacatcctccacacccctgccccagcctgagaccaagggactagtgggcatagagggtgggccagagctaggtcccaacacagctctaccacttgctagctgtggagccttgggctgaacccttctgggctgcagctcccatatgtacaaaaggttggttcagctcaacccctgagagttgctgtcaacattacgggaaagatgtgattgcttagcagaagattggcacacagcaaaccaccaagcagaggcatacacagagcagctgctatgctgagtggttatgctgcctttctctgcctgcctgacgcagtgtgtcaccggcatgacctgcctggaggaaggagaaagggaaggcagtcaagcacctgaattctagccagacctgctctgttggactgagcttctgttcactcatctgtcacatggggagagtggctctagccctgcgtgtctcacaggcatgttgtgaggggtcacacgagttcatgaaagacaacacacttaagaagatgccaggtgcgctgccacttccgtcgcagcatcaccagccactggagacctgcccctgaaccctttcaccaccgatagggtcaggaaccacctgtcgccctccctcccacccctacaccaaaaaccgcagaaggaagcagggccacctgtaagttggccttccccaaaccctctgcagatctcccagctggaggcacctggagtagtttgggggtcgacaagttgcttggcaagtctggctactttgagctcttcacacccacatggcccttcctggatgacctgccatccaccccagcgtatcatctccaggacctgcactcacaggaggcagctactctctggggtaactgactgcagcctgggggagaggggccacctgagtttgtgatgactgtcacctatcaaatgcctcctgtgtacctggcactaagttgattagccagaaacccccagctggttggggccagtaaggagattttattttattattattaaaagtgtttggaagtggaatcttgctattttgcttaggctggcctcaaactcctgggctcaagggatcttcccacagcagcctcctgagtacttgggactacaggcatgtgccacgatgcctggctaatttttctattttttgtaaagacggggtttcaccatgttgtccagggtggtcttgaactcctgggctcaagtgctgtgcccacctgtgtccctggctcagacaggagatctgaacagcattctaacacgaaagcccaagctgtttctacaccacactgctgctccaaagagttgtatcattttcatatctcgttaaattcatactatcatccccatgtctgcaaatgaggaacctgaggcccagatggcttaagtggcttatccaaagtcagaaaactggcaagtggtgtgagccagcgttcaaacctgaattgggccaacttcaaagacccagtccttcccactgtactaggctacttcctggtggtcaacggcccctgccctgcgctgtcaggaacaaagcagttcccgtccattccccacaccccttgttctggccttgtccttgcccagcaccattaccgtgtttggaaaaaagagccaagtccatgccccttttgctccgtgctggtcacagcccgaccacgtcccccgcacagtgggtgtgtgtcctcccctacccaggcaggggcaatcccccacaccttggtctgcttcttctccgtggcatacacgatggaggtacagcacacctctgccagcttacggccctggccataaaaggaccagcagcagatctcgtcaccaatgacatccttgatgaagagcacgcggccgttgaagcgcagggagagcttgtcaaacagctcgatgtttttcagcaggtggtcgtcagagttgctgaaaaaaacatgagggccaagcggctgggagtgaggttccagtccaagggagggtgctagacaagtggggccctcccctccctcccttcccccatcctgtcctgccgaaatgaaagcaagatgccagggggccaggagagaaaggatcatagggtaccctctgggttggggggcctgtgaggaaaaggaactcagttggttttaagtcaaagtagggacagctgaggaaggaggtctcccctcactaaccctggaaggaaggagacaaggctgctatgtcagtgggaggcattccttcccttactgtgggggtgacagtggcaatatgcctggccacagggaatcatagggagggtttgggactctgaacctgcagccacctgcgtctacctaactgtggcctatggagaggacatggcctggagggtgtggggagggaatcggcccagtgtgaactgcacaggctggcttgggggactcccagctcaccggcctcctagcatcccctccacccggtaggatgacacgtgtgaaaacacctgccatgctgccttcgtgatacacgttgagggcgcatttcaccttcaatcatttatatcccagccagggcaccctgctgagttccaaaggcctctgtcccaatttcccttctactttctgtttttccccaacttggcacagccagttccaagacccaggcccagacccacgccgaccgtgctgggagtacaggcagtactccttgggtctgctgcccagtgtctgttgagccctgtgacgcaccctacctggtgtaggaatacttgttgttgcttctgttgtacagcagcttcaccacgggctgtgaaggagttcagagtgaggggccaggccaggggactggcatccccggcccgcacccctcagaggtcctggtaccttggtggaggattcgatgagccgctcctcctcctttagggatgtgatgatggggatgttgcacacaggctggtaggagtccttcttgtcctgtgcgacacagaacagagaaccctctttaggatcttctgcttcccaggcttatcgaggtatacctctggagcccctctgccatggccacccgctgcttggtgaggaagtgtcagatacagatcatgaggcccctgacaatagaaactgccagctggaaagcagacccccagttagaaaacccaagatccaggccgggtgcggtagctcacacctgcaatcccagcactttgggaggctgaggcaggcagatcacttgagcccagcagttcgagactagcctggaaaacatggtgaaacctcatctctacaaaaaatacaaagattagctgggtgccatggcgcatgctggcattcccagctactctgaaggccaaatcacgagaatcacttgaacccaggaggcagaagttgcagtgagctgacatcgcaccactgcactccagcctgggtgacaggagtgaaaccctgtctcaaaaaacaaaaacaaaaacagaaacaaaagcaaaaacagaaaaaccccctaaaatccgggtagcaaagcatagaaaccagaagcagggcctactcacgctgccaagtgtgaacacctggctgccaggttggtgggcctgggtggcatctcacttgtctcattaggtttgcactcatcaaccacgcctcccacacaacctgccaggaaccagagtcctccatcccacaagaagggggcaactcctgacctcatctgcccgccctgctccgccccacccatgtacctgcagggcactctggcacatattcaccagcccctggatgaggtaatactttgcttcagccatcaattccttgatttcttgccggttctgagggagggtgatggtgtcatctcggaggtaattcaaaatggtgccaaagtgctttccacaacggtctatgaggatccagcctaggggtgcagaaggccctacagggttagtttgccgccaggtacctccgaggcaggcaaaggccacctgacaagctggcggcaggtggcagggaagggggtccacgagcacaaagcccttacgcagggtgacagaggcggggatggaggttctagcactcaggcccatggctgctcttcacccttcctctctgaaacccagaactggcacatcccacgggggatacagccctccaggctgtagaagccacaggggcctaggctcagggtaccaggcccagcccaacacagaaaccaccagccactgccggccttctgcccgctgcccagtcttaaggtgacggctcctatgagaatcttgtcctatttaaatattttaaaagtatggctcttcttcctggaaaatgcataaacacagcattccatatacaatttcacagaattctgaagctctactagggactccaggtgaagacaccctacataaagtgaagaggaaaagtgactgaattctagatctggtcatttccttgggaactcctcctgccctccccaccccgagcggcagccccagtgcctcaccttctttgtcggtcagcacctccatgcgcccactgaacatggccttgagcatggtgtcgtggcgggtcagggcccgcacagtggtgtagtacagagagccgcccacgttgagctggacatacttgttgcccaaccctcctcccttgaagccactgagcttgggcttggcccctgaggctgggcacaggcaggtgtcccccgacatctcccgctgcaggtagatcaccacacggcaggaggtaggcttggaaggctccgccgtggtggaaagggtcacgagtgagtggccagtggaggccagagcctcataatctcagtgctgtacatgggagagggaagagaagacacgaaccagctgagacagcccaggaggagacaatagcagaaacacgaccgtactcattctctccctgacaagcccaagcactgctccctggcagaggctaagtccctgccattttgctttcttttttttttttttttttcttagagacagggtctcactctgtcacccaggctggagtgcagtggtgccatctcggctcactgcagcctttgcctcccaggctcaagtgatcctcccacctcagcctcctgagtagctgggaccacaggtgcacaccaccacacccagctaattttttttttttttttttttggtagagacagggttttaccatgctgcccaggctggtctcgaattcctgagcgcaggcgatccgcccacctcagtctcccaaagtgctgggattataagtatgaatcaccgcgtctggcctccctgccatttttactatagcaggaaccagggctggaggcagtctcccagactcctgccctggtcacctcatcagcctccctgagactcagctccactcagggcagcgaggaagacaagcaaacccatggaaccagttagagagggccagaggaacagatcaccctagagatctaccagtcagattccagttactttcttgtcaaggttcccaggatcccagacttccaaccaaacctactgggaatccagccagtctaggagtttcccaggagccagagggacaggatgcacttcctttctaaagattccagcctccagagcagtctgtgccagtgtttattttgagcaccaccgagagtctggcttcaggaaggaaagtaaaagcagcttcaggagagaatgcagtaagccagggtcgggggtgccggccagtgttcttggtgcaggttacctgggcttcggctggggcttcctgaccttcccctttcttggcaccagccttgtcccaagttcctgaaattgtcaccatttttcagggaagaacagctataggatggctgttttcctttctttttcctgagagggagcccagccctactctcctcttccctcccaataagaatgggagaagaaaggactagaaaagatcagaggataaatctaaaaacaatgaggtgagatgtgtgctgccacctgcctgtactcctggctactcagtaggccgaggtgggaggatctcttgagcccaggagtcaagaccagccttggcaacatagcaagaccccatctcttggcatttaatatgtactagctcatttaactcattcagcaattaaactactgagtgcctactatgttaagcagtagggaacaatgaaaaaatattgtctttgccttcaaacagttcaaagaagcatcataacaggaatttttaaaaagagagaaagctagcatttattgtacccctacgtgccaggcattgggtactcagaagagaacacatatagaaagtcatgtccacatggagcttacattctagtggaaggaaacagactagcaacaaggacttaaataaataagcagataattccagaacctgataaatgcaataaagataataaaacagtgatatgagagtgattagggagaggcactaatttagacaaagggacaggaaaagcatctttgggatggtgacatttcagctgaggtttgaagagagcattgtagacagatggaagagtaagtgcaaagttcctgttagaaacaagttttagggggcgggtgtggtggctcacacctgtaatcctagcactttaggaggccgaagtgggtggattgcttgagcccaggagttcaagaccagtctgggcaacatagtgagagtttgtttctacaaataaaaaaaaattagccagatatggtggctcatgcctgtggtcccagctgctcgggaggctgaggtgggatgactgcttgagcctgggaaagtcagcctgggtgacatagggaaatctcatctcaacaatgacaaaattaaaacaagtttgaggatcagaaatacggtcataatggctggtgcacagacagtagggggaagttggtttgatgtcaagtcagggaaggcaggcgttagatgataacaaaggtggatttcatactaattgctatatagtatatgaatcaattggagggttgcaagcaggggagtgatatgatctgacttgcttgtagtgtattttgaaaagataacttgctgctgggtagagaatgaattgtaaaggtgcaagagagaaagtgggaagaccagaggaagcagtagtctaggcaagaagagatgatggcagcctggaccacattggtaataatggagacagaaaaaaagtggaatgatttcaccgaatgctcatcacatgcaggagtttacagttgctcatgccttgtaagtgcaacccagaagcagggcactggtttcccaagtttaccgctgtgttcccctaatggtgctcagcacaatgccatgcacattttaagtatttaacatacgtcagtttgttagactgaaattgtccctgaaaagatttaggtaagtccctgggaagaatgtccaaggaagtggacagccagcgtgggtgctgtgtgaagcagtgaattcctttggcggcttgtctgggagactctttcatttgccacaggggttgggtatgggaggtgagccctcaccaggaggttgccaatgactaagaaacactagaatggtatgagatcaccttcccttttcccgcccacctcaaaggaataaatccacctctctaacaggtattagcaagttccctgtgtattttgtgtctagtcctagttttcccaggatcagagaaagcacacatacatgttctgccaatgcaaaggagctcaaaggataggcctgccaagagaggtcggcggatccagagctaatctcttcctttcctacaaagcaattgctttgagcccctggatgacgtcaatcacattccgcccagaccaatgggttccaggaattctgtggcaggtgacgccccagaaagtaattccagtgagaatgaagtttccactgatagccacagtgctcttccttccgcactttgtgtgtggatatttggggatgcccggggctaagggcggatccgtggctcacgcaacgaagctaatgggaacccaagcacaacaaagggcaaacagccgcggaggtggaaagaggaggggtctaaaaggaagaaggacccagaaatccgtcagacacggaggacggcgggaggaaagctgagggctagagtggcggatctagcagaaaccctaggtgtaaaggttaagcgtcacccaaaaagtcctgggaaatgtggccggtgtgggctcttctctagcccggaccactcctcactaccgagaaacccacaccggttctcacgcccaccctccgtgggagatcggagctctccatctcccctacgccgcccgcgccttttcccccaggacccggccgggctcgctctactccagcaggggccgtccatcccttccccgagggcatcggcgggcccggctctcaccgtccccgggggcgcctctcctctcagctgggtggccagcggactccgagccgcccctagcctgcagccgcctgcccctcagcagtcccaagctgtgagctcacatcctgcgctcgtcga

SEQ ID NO: 2276 - DNA, 4687 bp, Homo sapiens
ctcaggttactggaaacactgtaaaatgccacctactttttcttttcacagctgacacttctcccaactaacagaaactggcaaacattgtagaggaagtgtccactgagtgaatgagtatataatttatgaaaacagaaaagtgctttggaaaaaaaaaaaaagacaacaggagtacatacagtgaaccaaaaagagtgtaccaggaggagcagaccctgaacagttagaactatggaaatcgctatgctttgtgttgtcacaggagttaaaataggaataccctgcatacaataaatatttattggataaataactaagcctgatacccttttcaatgcgttatacagactctatcatcacaccactaatctaagttctcagaagttaaacattacaagacttcagaacaacataggcgtctttggctccatttaacagaagaaggaccatagtgatcatttaatctctatgagtctgtcttatcttctggaaaaggggcctaacaccatttccttttgcaaaaaggtagctgccttgcttccagttctaccatcctctagcaacccatctttctcttatttgatgtctctgatcagctcctcttccagcacaaactggagaaaggggatcctttctgttttcttggaggcttctgaactcaattacaggtctgcattaaaaatgtatggagaaagctggtgatcagtttgtacatatggacaagttcaaggcagtatggtctacttctgggaaggcctggattccatttgctcctgatggaaaaaccctagtcccagcagtgtttagaatgaactggagaaggcagatgggtaccagattcaggaagaggtactgatagaccaagaccagttctttctgttttaaagatgtgttatctcaatctcctccaatgctccctttggaaattcacagaagattagggctccccacagaaacagcagctggcctgggctggtcttctgactaactggagctgaatacaaaaagtctgatgggttgactgagtcggtgactgccaattggagcctgaagcccccaaagtcttctctagacttgatgatgaagcaccagttacagttctcccagctcgccttccattgcccgcaccatgacatacagctcggccagacccaccacagaggcgacgatcaatgcagctagcacccgctggagatggggagaaccaggcttaagggatgcaggccaacaaccagctctgtaccccagcaactttaatgaggatggagagccccccaaccaccctctaagttgggggaggggaagaaaagagaatgtggcttctcctggggttattacctaacctcccgtgactgctggaaagctctaatgctccccttattaatggcataaatatctgttcaatacctaacctgtgcaaggcactttcacatacgtcctcccttacccactaacacccccaccagggcaccctgccctgcccagtgcctactcaccgaggccatttctgtgaagatatattggcttccaaggtaagtgcagacgaaggcagcaaccaccgtgacaatgaaattgaagatggtgatgaccagagccttcaatgatctcactttggggaggagccagagagggcacctttagttcaacattctctaggaggtgctcttatctcatggctcccccaccaactgggtttcagtcaaacaacaagcctgagtgtcatgacccatctcaggaaaaggttttagaagcctgatctcctagtacctcaccttgctttcccaggtcgctgagagtcccaccatgtcttgtatcctgggaaaaagaaaaagaagatgattcagaatagaagcagctcagagagcatccattgacagtctggctcagccctctctattccccaacatattaactctgccctccccatggattcttttgtctggaaccattttgactcttttctggactacagagcaggcatttcggagagaggacataggctgccagtacccatctactctcctgttccagggtaggagcatgccatagagtagtagggagccctgtcagaagaaatgctcgaatggctgggcacagtggctcaccttgtaatcccagcactttgggaggccgaggcaggaggatcaccttgaggctgggagttcaagaccagcctggccaacgtggtctctactaaaaatacaaaaaattagcctggcgtggtggtgcatgcctgtaatcccagctacttgggaggctgaggcataagaatcacttaaacctggaaggcggaggccgcagtgagcagagatcctgccactgccctccagcctgggtgacagagtgagactccatctcaaaaaaaaaaaagaagaagaaaaaaagcctccaagattcattcccacttatttatttatttatttatttattttgagatggagtcttgctcttgttgctcaggctggagtgcaatggtgcagtgttggctcacagcagcctctgcctccgcctcctgggttcaagtgattctcctgcctcagcctctcgagtagctgggattacaggtgcccgccaccacgccaggctaagttttgtattttttgtaaagacggggtttcaccatgttggccaggctggtcacgaactcccgacctcaagtgatccacctacctcagcctcccaaagtgctaggattacaggcatgagcgccgtgcccggctaactcccacttctatgacgtttaaaacttggtcaccatctcagcccagagtctcagtgaatgagatgggaactgtgttgtttgtatgcagacttcctatggtccctgaacagtatagaaaccaagtttccatgttttttctaaactctgtatcttcttccactgcagggccctactctgaggggctacctagaccacgtactgaagagcatgtccttacctgacaagtgacgttgcgggtgatccgtttatattcctcattggccagctgtatcttaatcttctccagccgggcaactagttctgggttctgaagcagaaaaatcaaatgagaagaatgatattcccagcttgttagaaagcacatcacaatcattggttccaggggtaaagcactgctaaaggtatcaggagacccacatactagtcgtaactccagtgctttgaaactgttttttttttttttgatctcaattttccaaacagctgatggggaggacaatatctggctcccccagatcccaaagatttcaaaaacaatttttcaagcctaaaagttgatttataagttcagtgtatcatggataagcccaactcagtcaataaccactctcacaaacatatcccttacatacccgtggaggcttcacaacctctgggagatagatttcactgccttctaggagctcatggaggtatagtttggaatctgagaagaaaaggtttcacaaacacaatgatccacgagctgaggttgaagggttaagatcaagaggggtgtagcccttctttctaccaaaataaaacagggccatctctacattaatccatttccaggatcattttcaattgaaaagaattttggataattccatgtaggtatctcccagtgctgcgcaggtgactttagctgtcagctctcaattatcctgccagtgttataactaacaagtaagccatttacttgtgcctttgggttagatcagttctgtggccacaacagctcttccctaaataagtttaggtcatagtgatgctaaatgctcagaggacactaatactaggcaatctctttctaaggtcctttctagttctaataattgagcagtctaccctttgcacttctggctggtctatgttacttctggcaaaataccttatgtgctagtttgtcctgttccttccctttacacataagggaactgaggcccagcgaggagaaatgactccttcaaaggattagtgacagagctaggactggaactcacatgctactctcaggccagatctttcaacacagcttttgccatcctatattaaaaaaacaaacaaacaaaacaaagtatcagatttcaccactcttgcttttgaggtggaaagaaatccggattcctacaagctcactatgctaagctgattcctaaagtggagaaaaagaagagacaaaacctgtgatatttgtatttggtaaaaacctagactttctcaagggtgaattgggcctaggtgtgcctggaagtgaagagggggctctcaaaagagcagaaactgcacaagcaaatttgtcatccacgagaaattcccatgggagttaagaaagtgggtggccctgggatttatggagtgactcttgacttgtctagatgagtgctccgtagaagaaggggaatgatgggaaaagacctcaggagggaatcgatctggacacaaggaggggaccccggactggagactggggctcacccctttctctcagatgctggtgcagatcccggatgagacggaaagaaaccaagcgttgggggccactggagctatcaccgcccttgtgcttcttccccagcgcggcctcaagctcggcccgcagctttcggggtagccgctctggctccagctccccgccggggcccaaagcacgcaccaatcgctcgcccgcaagcaaagaggacgccatatctagccggc

SEQ ID NO: 2277 - DNA, 9970 bp, Homo sapiens
gacgtcataggtaaacaggctctgtatccgtggcagcggccgtggcaggctggctgggtaccggctgtcgctgacccaggagaagctgcctgtctacatcagcctgggctgcagcgcgctgccgccgcggggccggcaggtaggctgacctcgggtcgggggacgcgggcggaccaggggcgagaggagcctgacaggcccgcgtcctgaggaaaggcagtaccgggcggggagagacgtgggaattccgccccactctcaggggggcgctttcacacccagcttaggcctggagtttgatgcgttgatgcttgccacgatcttacgaggaaactgcggctcggataagttcggggagtttacatagtaaagagtcggctcgcagtgcctcgcatgcatctgggagagccggggcgcagaaagtatgccaccgcctcatgctcagggagcttagtcccagctcttgggccaggtgttgctcagatgctcagacacgcgtgtgatgggagttggtagataatctgtgaactctttccctgcacctcttcttccatcttacctatctctttaagccagcccttccaatcagataggtgggccaagccagattcatgggagtcatgcctgacttgtttttctcttatccccaaacccccacattcagtcagtccattgctaagccccatcacctcgacttacaaaacatctcaactcggaacacttgtgttcggctgccagccttggttactgcaatagtctcctgtttccacggtcattcattccacaaacatttactgagtgccagttatgtgtgggcaccatgctaggtgctagggttagagtgatgaacaagaaggtacttggggctttgccctctcttgttccctccaatcggttctctcaggctgagcaagagtgatctttctaagtctgattttgttggtctgctgagaacccgctggctgtcccattacccttctgataaaatccaagctcatgactgcgtctttcagagccttcggtgatccagctgttgtctccctgtctagcctcattctgttcccttctcttgctcagtctctgttctcggaatgcatcaaatttcctgttgcctcaggatcttcacatacgtgtttccttctgcctgcaatgccttgcttcccctttcacttgacatacttttggacagtctttaggtctgtttaagtgtcatttttttcagaaggcctctgttggccctcccctccaagtccgccccccatgaactgtgtcctcctgcagcacttcacacagcaccatgtacttttccttatagtaatatcacgatttgtgattatttctttaccatctgtccagaggcattgttttcactagtctgtccccagagcagggactgagtggatgtttctgaataaatgcatgctctcagggaagggggtggaagttgaagcagatatttgctccctcatgttacttcaatctttctggagcagctggtcagattaatgacctgtagctgcgaaagacagattttttggttttttttttgagacagggtctcactctgttgcccaggctggagtgcagtggtgtgaacacggctcactgcagcctccacctcctgggcttaagcgatcctcccagcttaccctcccaagtagctgggactacaggcacctgtcaccaggtctggctatcttagaaatcttttgtagagacggtattttgccacattgcccaggctggtttcagactcctgtgcccaagtgatcctcccacctcagtctcccaaagtgctgggattacaggcatgagctactgcactggccagatctttttaaaaagccctattttaaggaagctacagatgaacaaaatgcttcaaaaggatgatgctagctcacttacatcagtggattccagtgaggccaaaggccagagtcgtctacagacagctcatagacatgtattagttggcccatgcagtgttggatgtgggttttcccccttacttaaaatttttggattacataccaacattgaggtactggatttctggtcatcttaaaaaccagaagttctggaaacagtgagacttgattattttccagccattgctcctccttggcacacctgccctggacagccaaccccagaatcaccccattcagaacaggacttctctaaggaagccagaagggaaacagctgaggctgggggcagtgggggcagagggaaggggctggtgcaagtccaggtgatggtagactttggagcacctgggttttagaattggcatagcagccaattgctagatgtaagtagcattgcctccctttttaaacaggtcataaagatgtctatgtttaattgtgtgtgtgtgtgtgtgtgtgtgtgtgtgtgtgttttgagccagaacaagagtgagttttcagtatttccttcctagaattgaggcatcctttggaacaggaatgcaaggtggcttggtaagggagaagatatctctgttagttctctgttgcctacagaaaaaatccaaactccttagcttggcatgcagggtcttcctggtctggctccagctcacctttccagctccattctttttcctctcgtccttaggtgagataggtcctttcagtgacttcaggcctttgtccatgctgttttctctgcttggaatacctatccctgttctcctgccttgatatgttcttgctgatacttcattcctttttgtgttttctgctaggaagagaatgacccaactttgattcccaattcaggcaagcatacgttttgagtaatattcttactcctgactttttattttttaaccataatttttaatttactcggatttcctttatttggtttttgtgttgttccagtatatgtatttgagaagccttttcatgtgcttttcagtacataactggtgatatataaagtaaatacactgatggcttacaacttagttcacatgtcactccttcattaatggctctgtcctcctctggctctttactgatgtttctaaacaagcatttaacgcagtgtggtttttcagtttccgtgtctgtcttcttccagctgaactatgtgctcttcagggcgggcaccgtgttgcattcatctttgtacccccagcatctagcagtgttggcatgtagtaggcactcaagaaatgtgtgttgaatgaacgatgcctgtgacaagcaagcggactttattctttcctgacccttgctcctatgacacacctcctcctgactgccactgtcactccttcagagcagaactcctctagggaacctggatgggaaacaggtgaggctcagagaggtggtggcagagggaacggggatcctttggaacacctgggtttttggcattggtgtccaagggcaggagtggggctggcttggcagcaggcatttccttgggtggctgggaagtgatgaggaattgggcctgtttctttacagccatggccaaggacatcctgggtgaagcagggctacactttgatgaactgaacaagctgagggtgttggacccagaggttacccagcagaccatagagctgaaggaagagtgcaaagactttgtggacagtgagtattggggagatacagtgccactcagctttgagctgccatttcaactgtaccccaggctcatcttggccctgccacagtggagctgctggctccctggaggttgaatctggcgtctgtgagttcccacgtgccacccttttctgtctgccctcttgtgctctcatgtgtccccaacagggcaccagtcaaaccaaacaccgggatggggaggggagggtgtctttagatatgccatctttcatttcttgctcttagaaaccttaaactttctgggaacacaaccatggcttgggtgtgggaaatagaattatgtactcatgatttgatttcttcagagaaagtcttctcaggggcaggttctctgttatttggagttagaagtgataggtgaagtttctagaagcagctcaacagacttactgaagtcatcttttggctggaaatcttcaggaagcctcctgtcccagcagccaagcaagcccaatgcccgtacagagccagatctagctagaacaagggacttctgagctttctggggggtttcctaggttgtggagagagcttggttagtgaaaggtagcttgggttctgtcactaacctgtgattgctgtgccatgcacacacctctctgggccttagtttcccctcagtaaattgtcacatccaggacattggagaaagtgagtgggagattaggcacttaatgctgtgagcttgcttttttgtggttacaagtgggaagcccccatccccactgttaattgaaatctggtgtcatacctgtagctagtccagaggcagcgcttgtgtcctgaggctgcccttttgtgaacaacagtgcttcctgtcactcctggggaagcagggttggggtctgtctggagaatgagcccagcaagggcctagtgctttcatagccggaggtcatagcggctggctggctcagtggggatgcaaggtccgagtatgccctggtccagctggccacccttctctaggttcagaccaagggtaggagacaggccaacaggcaccaaagtgtttaagcgacagggtcttgctatgttccccaggctggaatgcagtggcagttcacaggcatgatcacacatcctctaactcctgggttcaagtgatcctcccacctcagccccctgagtagctgggactacagttgctctccaccacgcctggcccacaccgaactattttaacacaaattagaaggggcagtccgctctgccctctcactgccttagcactctaccgaaggggagtgatgatactaaggaaatattttattttttgttcttttcctaaaagaaattggccagtttcagaaaatagttggtggtttaattgagcttgttgatcaacttgcaaaagaagcagaaaatgaaaagatgaaggtaagatcagcatgtcttccgcctacatcttggcctgggaccctagttcactaccctctcatccctcttccctcttgatttatttagaggggtagagggctgggtgggtgaatttttatttaagattttaataacttctggtccacttaacctactgaacttttgccaatctttatttcctttaatctttattttttttttttttttgagacagagtcttgctgtgtcacccaggctggagtgcactggtgcaatctcggctcactgcaagctctgcctctcagattcaagcgattctcccacctcaccctcccgagtaggtgggactacaggtgtgtgccaccacacccagctgaggtttttgtatttttttttttttttttgagacggagttttctctcgttgcccaggctggagtgcaatggtgcgatcttggctcactgcaacctccgcctcctgggttcaagcgattctcctgcctcagcctcccgagtagctgggattacaggcatgtgccaccatgcctggctaattttgtatttttagtagagacagggtttctccatgttggtcaggctggtctcaaactcccaaccttaggtgatccgcccgcctcagcctcccaaagtgctgggattaaggcgtgagtgactgcgcccggccatttttttgtatttttagtaaagatggggtttcaccatgttggccaggctggttgcaaactcctggcctcaagtgaactgcctaccttggcctcccaaagtgctgggattgcaggtgtgagccaccacacctggcctcgtttcatcttcatatcagcactgatgtagatggtcttatcctcattttataaatgaagaaatgaaggcttacatagtatgattggtgaaaggcacaaggctgaatggcaccaccaaatgtgctattgtgcctgtgtccctggctctaggaatactcctagacctgcctcaaagctgccgtctagttcttgaggcactttgtgatcagtaggttaatccttctgacttaacccaaaagctttggggctccactttcttttcctctctgaagactgacacagctcccagataacccctccccactttgaggacttgatgctgtagatggttttaatgaagccatggccttctctggcaatactgtaggccatcggtgctcggaacttgctcaaatctatagcaaagcagagagaagctcaacagcagcaacttcaagccctaatagcagaaaagaaaatgcagctagaaaggtaagaagtcatgatgtaaagcaagttctttacacagctgaatttccactcttccttctggaatgatcacttcttgtccttattcttcatcattgttttcccaggaatagcatctcacttgtcatcctgatttgaagattttaaaaaataaaattacatttgatgggaaggaaatagaaaacttgttaatatcaaaccacctctagtagtttgagcatgaaagggtccacgaagttggctggctctctgaaagaagactttcctagggctggagatttctcatgggtggctctgggtagggctttgcctctttctttcttcattctgaactcacaccatttcttgaaatcatttaaacctctatatccttctctagaagaattaggtctgtggtttacttcatctttttttcagggcctctaacaattttgtttttcaggtatcgggttgaatatgaagctttgtgtaaagtagaagcagaacaaaatgaatttattgaccaatttatttttcagaaatgaactgaaaatttcgcttttatagtaggaaggcaaaacaaaaaaaagcctctcaaaaccaaaaaaacctctgtagcattccagcggcttgaccaatgacctatgtcacaagaggtggcgtgtaaggaatgcagccccctgaagacagcactacaagtctgggggagccagttttaacatcagtgcacagctgctgctggtggccctgcagtgtacgttctcacctcttatgcttagttggaactaagcagtttgtaaactttcatccttttttttgtaaattcacaaagctttggaaggagaagcaataaatttttgttttcaaatggcttgatgtaccttttttcctgttgctcttgaaatatgtttaactcctcatgagagaaccctggattctctatcccctagtccacaaaacaaaccaggcagtggtcagcagctacctttatttggatcacacacgtgagtcagacagtaccactaatcgggccaatatggcttgtgagcaaaatgggtgaaaatagagggaactgactgggacctgttgtctaacatcattttaaggttgaacttgagcaaagacttagagaaagctgatggaatgccaagcatcaacgtgaagagaccctctatgcacacagtggatatgttatgcctggctgtagccaccttctcttctgaaaacaagatgggaatgacggaactgtattaaaagattaagttatccactagggagcatactagcacacttccagatcagccttgagatgctagacttcagatacagggacttgtgtcaggtggcctctagaaatgtggaagactaagatttagaaataaactaatttaaaagcaaacaaacaaaaaaaactttcgcctaggatgatctgtttacaacagaaacaaaaacattttccagtttaatccatttgactgaaagtcattgttgggctgacccttaaggaaaacttaagtttaaacttcctttgcatagtatgttttctcttttttccttgggttagaggtgggaacaagaaaacattgatatagttttgaattaacattaaagaggcaaaatttcacatttaaaatggcccaaaatatcccactattcattttgctgacaggtgatacactcttgagaatcaggagtggagggtttagtcataagcatatatgctgtgggtcaggtgactcatgaacatgtcaaacaggccatgttctttagcagtttctggtctggtcctgcttttagtaatcttgcggtggaactcaggcacacagttatttggtaccacttccttataacctagcccacacccctttgcccaccctcaagccgatcggtctgttcatcccagtgcccttagaaggtgaaggtttgggctgggcccagtggttcacgtctgtaatcccagcacttagggagactgaggtgggcagatcacttgagcctaggcgttcgagaccaacctgggcaacatggcaaaaccctgtctccacacacacaaaaaaaacaaaacaaattagccatacgtgttggtacacacctgtagttctagctacttgggaggctaaggaagatggcttgagcccaggaggcggaggttgcagtgagccgagatcatgccactgccctttactccagcctgggcaacagagtgagactgtcttaaaaaaaaaaaaaaaatggaagaaggtgagggtttgacatggttcctgacaccatcttgctcttgtgcattgctgccagtgtttcaaatgctgctgaagacgtgggttctgagcagtgttccttgtattgtatccaacaagcaaccaccctgtaggcatctctaccctgggccagtggttgtttccttcattttttttttcttttctcttcatacttgtagtaggggctccgcaacatgaaaattaaaagtatgaatgggatgagtaagtagggggcatagacagacacaagggttaaccgttcatgcaaagtctcaggtctttgtcccttgaaaccactggctttggagaaatcctcaaacagaaatgtggagagtatcggaattaaggttgtcatggtgtgaacagagtagatgattgcaggagttcgaatccacttgcagcttcctgaggtagtcaggggaaaagaaaaatggttaggtctgttcatgactcaaaggtgtccatgaccttcccactgtctctgcctgcctgctttcttctactcccttctccaagtggaaactcggaactggaaacctggatgtgccacactgcccaacatgcagacttacgtgacagctcaccgacagctcgccaaagaaccaagaatgggggtcagaacataactcggaaaagctctagggcaataaaactgccattaccggttaaacctgtgtggtacaaaatccaaggggagggaaatccctgccccatggcatctgtttgttcagtaattatatataggtgagaggatcagaaggcagattcagtgaccccagggggtgccaatgggaaacgagcattttcagtggttttagcttatcaagtacacgtgtatggtcacctttttaaaaaagcattgattatatgagaacactaagaataattttaaaatgagaagcacattagggattagcctgatgctacagcttataagtcagtatgatactatccaacgcagagaaataaaagccaacaaaaagagaaattaattctgttggggaacaaaacaaaagggaacaagctcattgtttaagtggtctcaggcttcatgtgtatgcaagggatttccagacgactgaggcagccgtgcaggcctgctgaccacagacatgagcctgagccacactaatgtccctttacaagatctaccctggctatttaccccagatcctgtagcattctcccacaaactatggggaccatccccttccctttggagatactttcccaaaagatttctgggacctgatttctgagtaaaaatgggattttcccaccatttaccaacctttgaggaaggcatacgttgcaatgggaaagaaaggcagctgaaacacaagctcgcaaaacagaaaggacttaaaccaggctgggggctcctgtagcagtgggtctttgaactccttagcataccacttcagcaggtt

SEQ ID NO: 2278 - DNA, 574 bp, Homo sapiens
atcaaaggcaagatggctcccagctctgtgagctcagcttctcacctcttagttgaacaagtgcagtgtgggtcaatacatgattgctgctcttgctgccaggaactgtcccagcatagaaaggaatgggacacaatccctgccgtcaagattctaagggaggaagcaggcaggtcgactggtgcctcatctctgcagggctccagccaaggtttgtgaaggattttgcaggcatatggagtggggactgattgatcccgagaggggactggggaaagctctgaagaggggatgacatttggtttgaactccaaaaaatggttgctttacctgtttcctgaagtttttgaggtggcttataagaacatataccataaaaaggaccaatataaatttaaaatcagaaaaagagaaaatgggctgggcatggtggctcatgcctgtaatcccagcactttgggaggccaaggtgggtggatcgtgaggtcaggagatcgagaccatcctgcctggccaacatggtgaaaccccggctctactaaaaatacaaaaaattagctgggtgtggtggcac

SEQ ID NO: 2279 - DNA, 574 bp, Homo sapiens; identical to SEQ ID NO: 2278

SEQ ID NO: 2280 - DNA, 697 bp, Homo sapiens
aaaaaaaaaaaagaaaagaaagaaaattgcatttagttcctgtagactgtgtgtcaaatgtctaaatctcttctaacaaatggcctaaggaggtgcaaagcgaagcatcctcaccagcatcctgacttggcagtgaggcatgggaccctggagggagtagtggtaagtgtgactctggaattcttcctgggctacttgtcagtgactggctccagattgagaggagagcccagaggacacaggtggctgccccagcctggaggtgaaagtcttaaaataaaatgccagatgcctagaccattctaaacctttctgagaagctgaaatcatcccttctggaagcgctctagttctaaaaggacagatatacagcaagatcttcctggggctaatatggagtttataggcaagtaggcctcagaacctttccctggtagtgatatctgtgggcaggcacagtttccacactttccagaaattccagcggaaggagtgagaaggaggaatctgcccttgagtgaggaccaaagaaagcagaaattcctcttgggaatttttcctccagagaccaaacactacttgggagcttgtttactgggctttaaaagcttgtgacccccagtcactctttcttgaccccaaggctttgcatttctgtggcttccccactggacagaagtggaactgtcatgctgcc

SEQ ID NO: 2281 - DNA, 326 bp, Homo sapiens
ggaagagtgaaaaggtagatatttagtcaggcacagtggctcatgcctgtaatcccaacactttgggaggccaagacaggaaaatctcttgagaccaggagcttgagacttgcctggcaacatctcaggtgagaccttatctctacaaaaaatttaaaaattagctgagctgtgtggctcgtgactgtgatcccagctactcaggaggccgagaccacagcccaggaggatcgcttgggcccagcagtttgaggctgcagtgagctggcaccactgcaattcagcctgggctacagagcaagacccagtttaaaaaaaaaaaaaaa

SEQ ID NO: 2282 - DNA, 326 bp, Homo sapiens; identical to SEQ ID NO: 2281

SEQ ID NO: 2283 - DNA, 697 bp, Homo sapiens; identical to SEQ ID NO: 2280

SEQ ID NO: 2284 - DNA, 428 bp, Homo sapiens
caaaaacttggtgagtaaaagaagatagacgcgagtacctactgtatgatcctgtagacatgaaattctagatagaatttagttatagaaagaacagtggttgcctagggtggtaagaaaagggtgattgactgcaaaagggctcaagggagtgtttaggggtcatggaatgttcttttatcttgatggtagtgatgcttccataggtatatgcatttgtcaaaacttatataaccatatacttaataatgcatcatttgaaggtagttattcctcaaagttggcttaaattattttagcatttttaggccaggcgttgtgcctcacacctgtaattccagcactttgggaggccaaggtgggcagatcacctgaggtcagaagttcaagaccagactggcctacatggtgacattccgtctctacca

SEQ ID NO: 2285 - DNA, 944 bp, Homo sapiens
agtataagcatattctagatcttcttacaggcgtgtcatttcactgtctgaatttgggtttacacacatgaaggcacgatggaatgctattttcactgtctccggttaatgacaacagaagcgggctgaacttcgtgcacacatgatgcccctgtgggagctgcaggccaaaggctgctgaacaggaacatacaaaagaactgcagaaattcaacagagaaaagggatgggcaagactgtgggggtcggcaaacaaacccaaatgaacctgccatggagcagccaccaccatattcatgatttgtgcaagagtttagatttaagaaacattattggccacattaagttaatgttgttcatttgaaggtaatggctttgccatttttgtatttaatttgtaaagatgtttggctttatggttgtataatggttgtcaacagaaggagtttagtcctattttatttttacacatatttaagtaacattataatcaaaacaatttagttcaatactgcagtaccaagagattgtctttctataaaaaaaaaaaattcctatactcctcaagtctgagaaacacttttctatgtagctttctctttgacaagaacagacaatggaggtgataccatgacatcacagccaaattcacatcctgttaaaggcagatgaagaagtgctttacaggtatgataattcccaactttttggattagtaacatcaatctttgtttaatggacatcttattctctgcaaaaataataattacaaaaaactaaagtttccatagtcctttttcttaaaaatataaattatgtctctcctgagttggaagcatctcacaaattatctagtctaatcacccttctggggcacaaatgcataaaagtatcgtaagtctgacagctgctgaggctgtgcttgagttaggatgagaggggct

SEQ ID NO: 2286 - DNA, 946 bp, Homo sapiens
agtataagcatattctagatcttcttacaggcgtgtcatttcactgtctgaatttgggtttacacacatgaaggcacgatggaatgctattttcactgtctccggttaatgacaacagaagcgggctgaacttcgtgcacacatgatgcccctgtgggagctgcaggccaaaggctgctgaacaggaacatacaaaagaactgcagaaattcaacagagaaaagggatgggcaagactgtgggggtcggcaaacaaacccaaatgaacctgccatggagcagccaccaccatattcatgatttgtgcaagagtttagatttaagaaacattattggccacattaagttaatgttgttcatttgaaggtaatggctttgccatttttgtatttaatttgtaaagatgtttggctttatggttgtataatggttgtcaacagaaggagtttagtcctattttatttttacacatatttaagtaacattataatcaaaacaatttagttcaatactgcagtaccaagagattgtctttctataaaaaaaaaaaaaattcctatactcctcaagtctgagaaacacttttctatgtagctttctctttgacaggaacagacaatggaggtgataccatgacatcacagccaaattcacatcctgttaaaggcagatgaagaagtgctttacaggtatgataattcccaactttttggattagtaacatcaatctttgtttaatggacatcttattctctgcaaaaataataattacaaaaaactaaagtttccatagtcctttttcttaaaaatataaattatgtctctcctgagttggaagcatctcacaaattatctagtctaatcacccttctggggcacaaatgcataaaagtatcgtaagtctgacagctgctgaggctgtgcttgagttaggatgagaggggct

SEQ ID NO: 2287 - DNA, 349 bp, Homo sapiens
catatcaaacacaaggataggatctgcttctctttagcatcaatccaaggtgaaaaatcaaaatgttacccacgacactaataaacagtagtaacagtgacactgtgactatagcctacagttcatgttataataaaatcaaacagacatgggactatttctagacatggcatgatgctatcttataaaaagcattttataagtaatacgtggaaattgagaaaatgtcccattttgatgccaaattcaccacatttaataaatcatccctggctgtttccatgtggggctaccagatccatatttctgactataagatcaattaaaatgattaagcagtgaaatgtag

SEQ ID NO: 2288 - DNA, 757 bp, Homo sapiens
cacaaatgacatgcaaatcaaaaccataatgagataccatctcacaccagttagaatggtgatcattaaaaagtcaggaaacaacaggtgctggagaggatgtggagaaataggaacacttttacactgttggtgggactgtaaactagttcaaccattgtggaagtcagtgtggcgattcctcaaggatctagaactagaaataccatttgacccagccatcctattactgggtatatacccaaaggactataaatcatgctgctataaagacacatgcacactatgtttattgcggcactattcacaatagcaaagacttggaaccaacccaaatgtccatcaatgatagactggattaagaaaatgtggcacatacataccatggaatactatgcagccataaaaaaggatgagttcatgtcctttgtagggacatggatgaagctggaaaccatcattctcagcaaactattgcaaggacagaaaaccaaacaccacatgttctcactcataggtgggaattgaacaatgagaacacttggacacaggaaggggaacatcacacaccggggcctgtcatgggatggggggaggggtgagggaaagcattaggagatatacctaatgtaaatgatgagttaatgggtgcagcacgccaacatggcacatgtatacatatgtaccaaacctgcacgttgtgcacatgtaccctagaacttaaagtataataaaaaataaataaataaaataagat

SEQ ID NO: 2289 - DNA, 349 bp, Homo sapiens; identical to SEQ ID NO: 2287

SEQ ID NO: 2290 - DNA, 472 bp, Homo sapiens
accaaagagtcaatttcagtagaatatagtaagtactgtgaaaaaggtatgttcagggagttagaggactctagtggaggccagctaacagaacctgggagagaaagggcaatactctcaaaaaacatattttaaccacatctcaaagagcaggtgggagtgaatcaggctagagaagagggtaggaaatggggaagggagtcagaagaaagggtatctcttcctggaaaatagtacatgaagaaaaagctgagttgtgtgtcagtaggtttgtatgggaattagtgtttcaggagtaccaagttcaagataggaagtaggaagagataagactgcagggaagtctcatatcttggaaagttgttttagggaatatgaagctttacccataggctataaggagccattgaagaatagtagaagcactaactaatcaaaaacagtcatttacattattcacaaaaatgacctg

SEQ ID NO: 2291 - DNA, 2143 bp, Homo sapiens
caaccacgggtttatagagagaggaactgaacagctgttgattcccatctggaatatatttaatgtttgcctgcttgtggagcatggtatttaaagggtgtggatggatgaatgtttaaaaaaaaacacacaaaactatgcacaagctgtatgagagatggctaggtccatctatgattttttttaaaagaagaattttaataccttttctttgacagtgaactgtatttagaaatatgatctttattgtgaaatgctcataaaatgcaaccaaactgcatgtttggccataggctagaataatatattaaaagaattaatggaaagtagtattgtctgggtttcatgaaactattccagataatattctccagcaaaacttatggtaacctgtattttataatgtcaatctgctggaccaagttaatttagaaaataatttttaatcctcagattttcaaaacttggactactgcaagactgatatgtactttttatgcccaaatcatatttttcaaagataggacatcataaggcatcattatttctaatgtatcttttaactagatagaaaaagctttactgtctaaacaggacttctgctcaaaacctaatgggaaagctatttctggggtaagatttgtaacagtgcttctaggtcatttcatgttttatagggaaaaagatctttgtacacctcctcaacctgttagtagaaatgttgacttcgattttttgcaccctcttcacaggacctcataagttgcctctgttcttggaaagcaatgggaataaaaatatgctgttgaaaatagtgcatggggccaggcacagtggttatgcctgtaatcccaacactttgggaggctgaggcgggcgcatcatgaggtcaggagatcaagaccatcctgaccaacacgtggtgaaaccccatctctactaaaataaataaaaaaaaaaattagccaggcgtggtggtgcacgcctgtagtctcagctactcgggaagctgagacacaagaattgcttgaacccgggaggtggaggttgcagtgagccaagattgcgccactgcactccagcctggctacagagtgagactccgtctcgaaaaaagaaaatagtacatggagggcatgcattttagtttaggaaacccccctcccttcccagttccagagggagaaattataagctatactgtgccaaaagtgagtggggctgcagagagaatggtgccttttctcaccttctgagttaatgcccgacatctgccattggattcattgaccaaaggaagtcatttctactgtataaactcaggagtatcatagcccaacaagtaaataataaatgttcattggttttggaaggaaggaaaggtgagtattaccccaccaaataccagcgaagagcaccctggctttggccatctttccaaggttcataattgctgtgggcctggtgagccctgttcccaggtatgcaagggagggcttctccaggccagacatttctgtaggttttcaggtagcaactcccccatcatattttgggtgtcattccccactctctctccccacttctcagcctgtgccccagaaacaaccacagcagcctcattctgcagacttaacatctgtcaaataaccttcctgaaaaggaaagttattggaggaatccaggccaaacaacaagtagaatagagccatctaaagttattaataatgagttcagggaaatagatgaattttttcctggcatagtcaatatttatatctcacaacaagtcaaaaataattttccatttggaaaacaaaacacaccatgactgtaattgttaaggcatataatcatgaacttcacatgctccctcaacaaacgttactgctctagggaaatcatagaaaaggaccctcttactccccaggggatcaaagcaagtccccttaggaatttcatgtgtgccgtgggtctgtttttatttcacagtgactagtcatatactggagtagctctgttgttcattatttgtaacaggtccatgtaacagtcaagttagcattcaagcaattatggatgtgatactatgatgtacttttgttatgattgtatatgcttaataacaaagttatttttctta

SEQ ID NO: 2292 - DNA, 2144 bp, Homo sapiens
caaccacgggtttatagagagaggaactgaacagctgttgattcccatctggaatatatttaatgtttgcctgcttgtggagcatggtatttaaagggtgtggatggatgaatgtttaaaaaaaaacacacaaaactatgcacaagctgtatgagagatggctaggtccatctatgattttttttaaaagaagaattttaataccttttctttgacagtgaactgtatttagaaatatgatctttattgtgaaatgctcataaaatgcaaccaaactgcatgtttggccataggctagaataatatattaaaagaattaatggaaagtagtattgtctgggtttcatgaaactattccagataatattctccagcaaaacttatggtaacctgtattttataatgtcaatctgctggaccaagttaatttagaaaataatttttaatcctcagattttcaaaacttggactactgcaagactgatatgtactttttatgcccaaatcatatttttcaaagataggacatcataaggcatcattatttctaatgtatcttttaactagatagaaaaagctttactgtctaaacaggacttctgctcaaaacctaatgggaaagctatttctggggtaagatttgtaacagtgcttctaggtcatttcatgttttatagggaaaaagatctttgtacacctcctcaacctgttagtagaaatgttgacttcgattttttgcaccctcttcacaggacctcataagttgcctctgttcttggaaagcaatgggaataaaaatatgctgttgaaaattagtgcatggggccaggcacagtggttatgcctgtaatcccaacactttgggaggctgaggcgggcgcatcatgaggtcaggagatcaagaccatcctgaccaacacgtggtgaaaccccatctctactaaaataaataaaaaaaaaaattagccaggcgtggtggtgcacgcctgtagtctcagctactcgggaagctgagacacaagaattgcttgaacccgggaggtggaggttgcagtgagccaagattgcgccactgcactccagcctggctacagagtgagactccgtctcgaaaaaagaaaatagtacatggagggcatgcattttagtttaggaaacccccctcccttcccagttccagagggagaaattataagctatactgtgccaaaagtgagtggggctgcagagagaatggtgccttttctcaccttctgagttaatgcccgacatctgccattggattcattgaccaaaggaagtcatttctactgtataaactcaggagtatcatagcccaacaagtaaataataaatgttcattggttttggaaggaaggaaaggtgagtattaccccaccaaataccagcgaagagcaccctggctttggccatctttccaaggttcataattgctgtgggcctggtgagccctgttcccaggtatgcaagggagggcttctccaggccagacatttctgtaggttttcaggtagcaactcccccatcatattttgggtgtcattccccactctctctccccacttctcagcctgtgccccagaaacaaccacagcagcctcattctgcagacttaacatctgtcaaataaccttcctgaaaaggaaagttattggaggaatccaggccaaacaacaagtagaatagagccatctaaagttattaataatgagttcagggaaatagatgaattttttcctggcatagtcaatatttatatctcacaacaagtcaaaaataattttccatttggaaaacaaaacacaccatgactgtaattgttaaggcatataatcatgaacttcacatgctccctcaacaaacgttactgctctagggaaatcatagaaaaggaccctcttactccccaggggatcaaagcaagtccccttaggaatttcatgtgtgccgtgggtctgtttttatttcacagtgactagtcatatactggagtagctctgttgttcattatttgtaacaggtccatgtaacagtcaagttagcattcaagcaattatggatgtgatactatgatgtacttttgttatgattgtatatgcttaataacaaagttatttttctta

SEQ ID NO: 2293 - DNA, 608 bp, Homo sapiens
aaaaaaaaaaggccgggcttggtggctcatgcctgtaatcccagcactttgggaggccgaggcgggcggatcacgaggtcaggagatcgagaccacagtgaaaccctgtctctactaaaaacacaaaaaattagtcgggcgtggtggtgggcgcctgtggtcccagctgctcgggaggctgaggcaggagaatggcgtgaacctgggaggcggagcttgcgctgagccgagatcgtgccactgcactccagcctgggcgacagagcgagactctgtctcaaaaaaaaaaaaatatcccttttgttgtgtttgaatgccacctttcagtcttcttccttaagaatgttaggaaggggctttgcaaacctctagtggcaacagtcttccttcccttcttcctaccacgttggaaatgcaggactcatgtcagtcagcatgtgaccgagtctttcatgaacactttgctcctctatgtctcatttatgcaaaattcctggtgactctccactaacatttttaaagtgaaagcaaactttcactttaaaaaaagtgagcgagaggatcccttgagcccaggagttcaaggccagtctgggcaacatagcaag

SEQ ID NO: 2294 - DNA, 4862 bp, Homo sapiens
gtttttagggggagagaggagcgcctgggcccagagggtctccagtaagtagcactctgtgtcctgcttccccaggggaacgttctcagggatgcagctctgatgagcctataggttggtctagtagcaaaagcccgccccttcctgatgccactcagcccacctgaacagaactctgtggttaggaagagagtcatagaagcccttagctgctagtttggatttatttttcaaatttgttttctgttgctgttttctcttttatcatggctaatctttatttgaaatgtctttcctaaagctcaaaaccctgctatgccatgagtctgtttccaagtattatcataaaacatttgaaaggtctaggaaggaaatctatgggtttaaatcataactctgcgtacttgagaatttagccactgctgcaaccctagcaggccagatggccatctcctcttaaaaagtgcaaaaccacgcagggctgtttaggacctgagaagaaattagctgcatataagcatagtatctgggagattaaaaatgagaaatagtagtattcaaaagcatagaaaattcaaaccacgtcactgcttctgaagaagtatcatttctgaaatccagcggctgtggccacagaggtaggagtcgtgggttcccatctcaactcttctacctgctggctttctgaccacgggcacttcactgagggtctctgggcattcttgccccccactgtgcagtggcgatagtggaatctgacctgccatccctgaagtggctactgtgagggtcaaatgatatgaaaatactgtgcctctcttagtgctttacggtgtaagctctgcttccacggtgcccgctgctgtagcagcagttgcgggagatgataacgattttactacaagcttctgacaagcccagaacatgcgtgtttgtgcatttcttttttaccatgccccacacagcgctatatgaaattaaggcttagtaaatactatatgatgataaaggatactcaatacatagaaaaattaggaagattttgtttggacctttcctagtcaacgaggagttgacgtctttacaacatcctctcaacttcatttagtttgtgcttatagtcagccatcttataaacattttaataattttgcttttaaaaaataacagcattgttttttttgagacagggtctcactctgtcacccaggctggagtgcagtggcacaatcttggctcactgcagcctcgacctcttgggctcaagtgatcctcccaccttagcctcccaagtagctgggtccacaggtgcccaccaccacacctggctaaatttttgttaaatttttgtagagacagggtttcaccatgttttccaggttggtcttgaactcctgggctcaagctatccatccacctcggcctcccaaagtgctaggattataggcgtgagccaccacacctggcccagataacatttttgaatacgtattatgctcaaagccctttacacggtatttacttgcttaaatcctcacttatgaatcctacaaaaccctatgaagttgggactattattatccccgttttacagatggggaaactgaaccacaagaaattaagatgacacagctagtaagcggcagagatgagattcaaatccaacagaaccccagtctcttaaccactgctctgctgccttcataagcatcttccagactgctttggaaagtaacctaggagagttattcttatatcctttcctctactggatttgataaagcgttaggagggaggaaaggtgaatacatcaccaaagctcagctgagaagtgacagaattagaaaacaatatggaggacccccaggctcctgtagcagtcctcacattggctccatttggggcacagagttattgagaaagtagttgccagcaagcagcaggtcaagtcatggagccccggaggccattgctgtctgtcgtattctagctttgattcctcccatgtacacagggaccccctggttctttcgacttcctgctacttatgctggctgacatccgcaatgacatcactgagctgcaggaaaaggtgttcgggcaccggactcactcttcagcagaggagttccctttacctcaggaatttcccagctacccagaagccatggacctgggctctggagatgaccatccaagaagaactgagacaagagacttgagagcccccagagacttctacccatagcacatcccaacaccgtcacgccaaaggaagagaaagatcaactcacctgcagttaaaccatctaaagagaagaaagaccactggagacctagaaaacatacatttttctcttctcttctcctgacgtctctccactcctcttcttccaaatacgatgctattttcagagtcccctcctaggcctgcagacatgagggagtgaatgattgatttacctgcttctcactaagagtccattggggtggtttgcattgtaacttttcttttacatcctatttttccaggaactttggatttaagtactctcacagtgtcttaaatcataaattcttgaagttaaatttggcagagtatcaaaagggggaaaatgacaaagtgagctctaagaaaatgtgaggctacttctaagatgtgtgttcacaatagaccataactcctctagtatcaaaattggggctcttcagttaaaaaggggtggggaggacaaacgtgtcgatgtgctttggtggagaattttttccttgtgcttctagtagactttaaatattgtatccctttgtcaaaccttgtttcccaaattcaattaaagagaggagagaattgaatggcgtttagagaagatagaaaagaatcacagtcatatatttactgttatatagattgccacattctaaaattcaaatacggtgcttaaggtttcatgccatgcttatctgtaagtatcctatttagggaagaagattaaactctcttttcaaaaaaacaaagtgaaatgcctggattcacattaaaacaatgggctctcgtttgctataatattttaaagctgtttaatcaacagtggagtctgctctataaatatagattatttgttcaataaactggctgagcttagagagaggtgcagaattcctggttctgagcaggtgcccagaaggtaccattaggtgccatgatccaggctgaaccaatatacagtggggctgaagtctgcaaggaggttgctggcttgggctgacctcactaatgccatcagcagcggtaggtaaattttttctccttgggtattacaagtttttgtctggagccaaccaagcttgccaccaacatattgagagtaatacactattgaaagttatcttggatggggagaaaaaaaaatagtggttttccttgtttgcaaaaacttccttcctattctcattttttcttaattttctttaatttagtccaagttccagttcttttaggccttctctttgatttattttcccctgcatgtgagaagcagttcagaaaaaggtctatatctccacctcctagtgagttagagtgttttctcagagcacctctgggtggcaaagggaagcatgttcctgccaaggtttgctgtggattcagaagcaccaggagcaagagaccagaaggatgatctgctcctttgtaacgttgttgagggccctcttgtttccaatgagcagcttataggttactcacagtccactttctcactggacacacaaagtggctctttatctacctttgcgggagattttcactctcctgcaaatgatcgttctcacactcatattagctcatgttggaatttcccatcctgccatgtcctttcccatttctttttggcttttttgcctccaccttttagcccacatcatttaactccactactgtgaaagcttgcttaaagaaaatccctcttggccgggtgtggtagcccacgcctctaatcccagcactttgggaggctgaggcggggagatcacaaggtcaggagatcgagaccagcctgaccaacatggtgaaaccctgtctctactaaaaatacaaaaattagctgggcgtgttggcacacacctgtaatcccagctactcaggaggctgaggcaggagaattactttaacctgcggggggagcctagattgcgctactgcactccagcctaggcaacagagggagactctgtctcattaaaaaaaaaaaaaaaaaaaaaaaaaggccgggcttggtggctcatgcctgtaatcccagcactttgggaggccgaggcgggcggatcacgaggtcaggagatcgagaccacagtgaaaccctgtctctactaaaaacacaaaaaattagtcgggcgtggtggtgggcgcctgtggtcccagctgctcgggaggctgaggcaggagaatggcgtgaacctgggaggcggagcttgcgctgagccgagatcgtgccactgcactccagcctgggcgacagagcgagactctgtctcaaaaaaaaaaaaatatcccttttgttgtgtttgaatgccacctttcagtcttcttccttaagaatgttaggaaggggctttgcaaacctctagtggcaacagtcttccttcccttcttcctaccacgttggaaatgcaggactcatgtcagtcagcatgtgaccgagtctttcatgaacactttgctcctctatgtctcatttatgcaaaattcctggtgactctccactaacatttttaaagtgaaagcaaactttcactttaaaaaaagtgagcgagaggatcccttgagcccaggagttcaaggccagtctgggcaacatagcaag

SEQ ID NO: 2295 - DNA, 8788 bp, Homo sapiens
ggaagctgcggacaggggctgtgaggtggcagcggctgcagcggcggagccggcgcctcagcgggcactggggtctgttcccccttccccgtccctgctccctgccaggcgcgtgcgggacgccgctcttggtccccacgcctccgccccgccccctcccgggacgccgggagaccccggccgtcctttatccggtgtccgccggcccccggccctgaaacccgggcctcctccccgagggccttgggcgtccctcctggtcctgcgctcgcggcctcgatgctgtctctggcgcggcctccgctcccgccgactggcctgagaacgaggtctgtgccccagtctcccagccgcgacctccgaccccgcctcgcagaacgacccgagctggtctcccgagcccccttctcagcagcccggtgacgtggccagtttatttctgttttgagacgaacggcgaagactcgcgtcgggtcttcgttctagggctagacttggtctctgatcgccgagaggtagcgcaggggctgtgggcccccggcaggggtcctgtcggaagctggccgcgcttctgtttgcgttcccaggaccctggcattgtctctagttgctgcttgtgctctctctttgcttttggtttgcttcatttggcccctggggccctggtaaaaccaggcaccgaatcgctcgcacacagagttccagtccccgcctgctgtctcctcagcagctggggttccgaggagaatgccctgcaagatggctccatcggccatggcgctcctgagaggctgtcagtgctgagtcaccgatctacctcattcgggtgggcagaacttatgtgtgccatgcgagtggctccagaccgctcctgagtgggaggaggggttcctgtagccgttgcgtcttctcaaacacggggagcagagtagaaagaggctctggccccttcccttgtgcccaccgggcctgccgcagtggctcagcagccccttcagtagcccgcctgaggaccgatgccagaggcaggcattcttccggaaaggcccactgaggcaggctccggctcctctggttggggctgttgttttgatggatcgtgtgcttttcccttacctcttatcacttgctgtcatctgttgacttaggcccagtctgcagatgtgtgtagtgttcctttttgggttagctttggcagtattgagttttacttcctcctctttttagtggaagacagaccataatcccagtgtgagtgaaattgattgtttcatttattaccgttttggctgggggttagttccgacaccttcacagttgaagagcaggcagaaggagttgtgaagacaggacaatcttcttggggatgctggtcctggaagccagcgggcctcgctctgtctttggcctcattgaccccaggttctctggttaaaactgaaagcctactactggcctggtgcccatcaatccattgatccttgaggctgtgcccctggggcacccacctggcagggcctaccaccatgcgactgagctccctgttggctctgctgcggccagcgcttcccctcatcttagggctgtctctggggtgcagcctgagcctcctgcgggtttcctggatccagggggagggagaagatccctgtgtcgaggctgtaggggagcgaggagggccacagaatccagattccagagctcggctagaccaaagtgatgaagacttcaaaccccggattgtcccctactacagggaccccaacaagccctacaagaaggtgctcaggtgagagcaacatgtgtgcatagtccccagacactggccctgttttgggctggtgtaaatccttgcctctgcctttccattggcaatcggcgtcgggcgacttggagcaattctggcttattttccatcatggtttctttctgttttttccctccttctcaggtcttagaaagtctcacattcattggtgttaaattagggttcgatgttttttgtttgtttttgttttgttttgagacggagtcttgctctcgtcgcccaggctggagtgcaatggtgcgatattggctcactgcaatctctgcctcccaggttcaagtgattttcctgcctcagccttgcgagtagctggtattacaggtgcacaccaccacgcccagctaattttgtatttttagtagacatgaggtttcttcatgttggtcaggctggtcttgaactcctgacctcaggtgatccacctgcctcggcctcccaaagtgctgggattacaggcgtgagctaccgtgcccagccagggttcgatgttcttgaacagaggaggaattgcatctaacctacctaatctatccttggtagactccctcccctcccaaatcaattcgtgtcagctacttagtggatactcagttcagtacctaattaatattgacaaggaaggaagtttctcccttctcagccccaactcactcctagagggggatgtatattctgaacaagctgggttcctaaagattagggagttgacctctggcacactggtctttccacaggactcggtacatccagacagagctgggctcccgtgagcggttgctggtggctgtcctgacctcccgagctacactgtccactttggccgtggctgtgaaccgtacggtggcccatcacttccctcggttactctacttcactgggcagcggggggcccgggctccagcagggatgcaggtggtgtctcatggggatgagcggcccgcctggctcatgtcagagaccctgcgccaccttcacacacactttggggccgactacgactggttcttcatcatgcaggatgacacatatgtgcaggccccccgcctggcagcccttgctggccacctcagcatcaaccaagacctgtacttaggccgggcagaggagttcattggcgcaggcgagcaggcccggtactgtcatgggggctttggctacctgttgtcacggagtctcctgcttcgtctgcggccacatctggatggctgccgaggagacattctcagtgcccgtcctgacgagtggcttggacgctgcctcattgactctctgggcgtcggctgtgtctcacagcaccaggtgacagctctttcaagtcagtcccagtccctgataagctagtgggggatgagtgattggccttcctcccagcagcaccttagaggccattgttcccccttcctggccactggccgctctgtgggccctccgttgctcacctttggcaatctgagaacctggggctatcaaaagtagtatcttgttaggaacccctaagcaagaccaaagggtgctcctactcagcagtccttctcccctgcccccctgccctccacacctcccccgacatccacacttcagttatggcagtgtgggcatgtcttagagatggctagtctccagagaagtgaggtgatcacttttccagcccagagagctgccctgtttcttgtgctggagaagagtggaagaacccagaggtggctcatcctctcaaaccaaagtattgggaggattttctggcttgtgtcattcattcccttgaagaacaatgggaatctttgggggaagaaagtatcattattattatttttaatatgttatttctgtgatggctccttgcagagcagggctagcctgtaagcaatgcactgagagtagccgagagtgtccttagttgcctacttgctttctactttccaaaatgtgggcagtgaaagaactggggttaagcgaggtgctggaaagggtgcctcttctgtcctctgttctaacgcagcagtgctaacagatgtgaacactgagtatggttaagggcggtttgggactggcagctcttgtgtgtgtcattgattggtctgattgtccctctaggggcagcagtatcgctcatttgaactggccaaaaatagggaccctgagaaggaagggagctcggctttcctgagtgccttcgccgtgcaccctgtctccgaaggtaccctcatgtaccggctccacaaacgcttcagcgctctggagttggagcgggcttacagtgaaatagaacaactgcaggtgagctgaagaggagcaggtgggcagaggaccgcagtcagagggtcagagagagcctgagatgtccaggcgtgcaatgaacgagcagctggcagtggggctgggctaggccctgtataatggcagggcaggaagaggccgaccatacttaaatttaaagcaactacagggacaaaggtctttgggggtccaaagcaatcataaggtaagctcccagcacaacttgaatgcagctaaaggggtttgcaagtagactctgaggatcaggaagctccgcacagtgttcagacagaatagttttagctcctcctcaatagtgcctgtccactgaggaggcaaaaactctgaagtttctttacttctagaactgtcccaagaaagcccaagggtagaagggagaattctcaagttgaacgtcaggcttggcagaggtggagtgtagatgaaaacaaaggtgtgattatgaagaggatgtgagtcctttgggtgtaggagagaaaggctgttgagcttctatttcaagatacttttacctgtgcaaaaagcacattttccacctccttctcatggcatttgtgtaaggtgagtatgattcctattccatctgcattttagaggtgaagaataacgtacaagggattcagtgattagcaagggacccctcactaagtgttgatggagttaggacagagctcagctgtttgaatctcagagcccaggcagctggagctgggtaggatcctggagctggcactaatgtgaggtgcattccctccaacccaggctcagatccggaacctgaccgtgctgacccccgaaggggaggcagggctgagctggcccgttgggctccctgctcctttcacaccacactctcgctttgaggtgctgggctgggactacttcacagagcagcacaccttctcctgtgcagatggggctcccaagtgcccactacagggggctagcagggcggacgtgggtgatgcgttggagactgccctggagcagctcaatcggcgctatcagccccgcctgcgcttccagaagcagcgactgctcaacggctatcggcgcttcgacccagcacggggcatggagtacaccctggacctgctgttggaatgtgtgacacagcgtgggcaccggcgggccctggctcgcagggtcagcctgctgcggccactgagccgggtggaaatcctacctatgccctatgtcactgaggccacccgagtgcagctggtgctgccactcctggtggctgaagctgctgcagccccggctttcctcgaggcctttgcagccaatgtcctggagccacgagaacatgcattgctcaccctgttgctggtctacgggccacgagaaggtggccgtggagctccagacccatttcttggggtgaaggctgcagcagcggagttagagcgacggtaccctgggacgaggctggcctggctcgctgtgcgagcagaggccccttcccaggtgcgactcatggacgtggtctcgaagaagcaccctgtggacactctcttcttccttaccaccgtgtggacaaggcctgggcccgaagtcctcaaccgctgtcgcatgaatgccatctctggctggcaggccttctttccagtccatttccaggagttcaatcctgccctgtcaccacagagatcacccccagggcccccgggggctggccctgaccccccctcccctcctggtgctgacccctcccggggggctcctataggggggagatttgaccggcaggcttctgcggagggctgcttctacaacgctgactacctggcggcccgagcccggctggcaggtgaactggcaggccaggaagaggaggaagccctggaggggctggaggtgatggatgttttcctccggttctcagggctccacctctttcgggccgtagagccagggctggtgcagaagttctccctgcgagactgcagcccacggctcagtgaagaactctaccaccgctgccgcctcagcaacctggaggggctagggggccgtgcccagctggctatggctctctttgagcaggagcaggccaatagcacttagcccgcctgggggccctaacctcattacctttcctttgtctgcctcagccccaggaagggcaaggcaagatggtggacagatagagaattgttgctgtattttttaaatatgaaaatgttattaaacatgtcttctgccaaactgtttttaggtctagggaaaattgagtaaggagaagaatccaagggaagggaatggggagtcgtcccgagggacccactgcctccccaccttcttcccttccccttctctccccctcccctccccagtttccaatgaccacacggctgctgtcagatgaatgacttttaatccagccccacaccccaaggtggcagaggagtgatgctggagcccggggcaaaatgctggggcccgggacacggctgaaagttccgtcgtgctgcttatttttgggctcctaggtgttgcgcacaaccagcgactgctccagctcctgcctgcgctgctggatctttagaggaagtgagaacaggagcaggtgtcagtgttctggtgagtgatcaggacaatcccacctactgacaccgcctgccctgaaagagcatctgggagcagggagggccattgcatggtgaggcagcgtggtgaagctttactgtggggagctgcgagggctgcccacaagctgaacagggaggtttctcttggagttgaggatggggaagcctcagggcaagggtccctgcataccttgcagtagaagtagcgactgacggcctcctgggaccagggctggtggtagaactcagcccggcgctcctcttcagggttgccggctacatctgtcatcacctgggagggagcgtggggtgagccctgagccctgaatcccctcacctgcccctggagtacaacgtttactctctttcccgctgtgcttgtcttccactccagtactccctgagtctccctcttcaccttgaggtcccggctctgggagcggagcaggtcttggacatagcctttggggtctctggagaagcttagcatgaagtccctctggatcttgagctggtttatggactcaatcgtctcatggatctgcaggtagaaagatagatgctttccacctggctttggtgatgtgggagacgaggggaaaggaagcgggtgggaaggggagggagagggggtttcttctgtgaaggacaacccctcagagcccctgatttctctgaagtcccaggggaggaggggatgggcagaactaaacttggaatgaggttcagctccaagcagcatggacgggccatgtgtgtcccattggcccagagtctggtctcttttttttttttttttttaatttaacccagactgctcatctgcaaccacaccctggtctcagaaaagtctcctctatcatctctgggttaatgtcccactccagctctgggcttgggccccaccttactgtccagagcactgatctcctgctggttggccgtggataggaggaagctgctcatctgcccctttaatggctcctccacctccacgtcaatgtcatagcacgccgtcttcttctggtctgaagggtccacgctgccagggaagtccagcccttcgtgtccacgatgcccccatacggccccagggccccggggctggggcagatccaacagggagggagaagagatgggagtgggaggagagggaggggcagggaaggcaggaacgagatcattccctggtctgagaagcaagctggggccacctcacctgatgacatggttgatgacaattgggtcagggggcaatagcagggctgtgaggcgctggggaatctcagaaaacttcagccggggacaatcaaaaatctgaagcaggacaattggggagagagagatcactcttcttgaagagatcatcatgcagttgtagatccttttgttctagaaaggccacaagaagctgagaggaagtctgattcctcagtgcgcatggggatgggattggggtgggctggtctggtggtggagccaccggtatggctgacaagatagggggtgggtcagtgtggggcaggggttgagagtgcgggccctgggtcagcctgcttatgtatcagtcctgcctctgccacttactatgcaacctggagcaagttaacacctcagggctcagtgtcttcatctctagagtggggatgaaaagaatacctatctcccagggctgccgtgagaagtcagtgaactaatacacataaagtgcttgggacagtgcctggcacatggtaagtgcccaataaatatcaactgctatttttactcctcaggtttatctgctgtatttatttttaaatgcattaataagaatattctctgttttggtggaattttgctcaatcacttttgcagcaatttgattttcctaactgcccaggagagtagataggacaggtattgtcactccacttcaaagataaggaaacaaggttcagaatcgctgagtcacttacccagagtccagactcaggactagaacctggggatcctaactccaagtgccaagaatattacattccagaaagcggttggctttgtagggtttccaggtcttcctaacttg

SEQ ID NO: 2296 - DNA, 2545 bp, Homo sapiens
gttaggaaccaaggtttatgattaatctaaaataatttctaaaagaagttaagtctttgctgtttcgttctttctaaaatgtgtattttccttcacacaatgaacatgccacagctaattattcgataacaataaagacattggtgttttgcctctgtggttaaggagctcagagtctgttgtagataatagttaaagttcatgtcctgggtttaggtggcttgttcatcactaaattatgttagaagaataaaccgctaaatatatacatatataaaaagcataccatacaagaaccaataatggaagtgaaccaaggtttatgattagtttaattcagcccaacttaggtccattacaaatgatggagggcttttattaatttcagaggtttttaatattgtattttattttgtgccgtggttgatttacacacatttctttaaagttaaagatcaaggctattcactcctctagggagaagcagataggaaaaggaagatagtgtcagtgtcctcattgtgagttaagatggtggttcacagttgttcattctattgtattattatcttttgctgtgtaatgaattactgaacaatttaatggattaaaacaacaataaacatttgtcatttctcacggtttctatgtggcaggaatccaggagaggcttactgggggcagttttagcttagggtttcttgtgaagttgcaggcaagatgtcaggttgagttgcagtcatctgaaagcttgactgtgctagagtgtctgcttcacttacatggctggaaagttggtgctgattgcgggaagccacagtttcttcacaaatagactcttcctcaggactgcttgagtatccttacaacatggcagttgatgtcccctagagcagtcaatctaagacagagaaaggtggaaccctcaatgtattttataatctagctccagaagtcatacaccatcatttccacagtattctgttggtaatacaggcggtcatgatttaatatgtaaagaagctacacaaggctatgcataacaggagcatgggccttgggagccatttggaggctggctacctcatgtactatctttaaaatatggacaaattaaataaaagaaagtctggatgaaatattaatgtgagattggtatgaagcaaggaagtgtagttaattatttgtataatgcttggatccattctgaaaaaatgcagtatcacttctatggaaaataagcttatagatctcagtaatattcaaggatcttgttcttagttttttttgatttgtgtctattggctttgttgttagtgattcaatgagtgaaaaataaacaaaggtatgaatgaatgaataaaaaagaaatgctaggcctagaccaatgatgagtattctggggtgtctgaatcaatgattttgattaaaccctgtaactctgaggtccattataagaggagacctagttaatacctatatggtaaatgatattatagtggaagttagaattatttgggattttgttcttaggtggttgaagttcataggtgtggattgtattactagaaaagatttagtaaatgaaaaatgaaacaaatatgtaaataaaggaagacaagtagagccatatgttgcctaattatgagaatgtataatgtatttattattattaacacacttctgaagcactcagtttcaacataaattgattaaatctgatacctatttgggtaaggaatatacatacagagacaagtacctagaaatcagtattgtttgtcctgcattatttagatgttgctgtttcttaatgaacacaagaaaatatgatctagtctgggaatcatgagcaaatgacaggtgttaacgccattcatatttctgatgcaatctgtatgttcacagatattgatgatgtcatgagtgaatgtatacacaggagtgaatgtattcagttatttgaggaaggtaaagcagtgtttcttgactttggctctattgacattttgggtaattctctatggtgcaagattgtcttgtatattgtagggtgtgtagtaacttcattggcttctactcagtagatgccaatgttgaccctcctcccagtgtgacgatcaaacatttcttcagactttggcaaatttcatctcgtggggggcaacattgtccccagttgagaaccactgaggtacaacatggactgaagaggagcatgtgttaaaaacgtgtgaattatttatcctgtagtatcttactgatgttcagataaagaaaaagcaaaacaaaagacctaaaactaggctcttcccccacggggtcaggttcatgtgtatagttgcatttaattgtattacgattctgggttgttgatgggctgatcatactgtgttttctccgaaaaaacaaagaattgttcatgagtacttactaaatgaataagtgaaatgacaaatgaataaagaaacacataaaggagagtctagcatggactattttggtgaaaatttaccataaaaaaagtggttaaatttacctaatt

SEQ ID NO: 2297 - DNA, 383 bp, Homo sapiens
ttgttttattattgcgttgtgattcagttaagtacctctccattgataaagatttaggctattaattccttgagggaggagcacataggaagatggacagtgttgtcagtgttctagttgtgcagtaagattatgattccttggtgattcattataccatatttggcacttgaaaaaggaccaaccgtggaccagtgagtagcatggagctgacatgaaagaaggaagttgattaatttataagtgccaaaagtgcatatatgtatatatatgtatacaaactcacacacacatatgttgcagaaagtgacttccatctattagctctttggtcaatggacatatatacaatcattagtattcacagatgttgttcttgagct

SEQ ID NO: 2298 - DNA, 384 bp, Homo sapiens
agcctgggtgacaagagcaaaactccatctcaaaaaaaagaatgaatcaagaaaataagacactacatcagtgatgccaactatatgttttgcaaacaattcagtttaattaaaattcacttttgttatttttttgttatgtttttattgtcatgattatgtaaagttcaataaacatttatttattgtcaaaaaataacacttgcaacagcatcagaaaataccaataaatagtaataaatctaatgaaaaatgcacaagacttctacactgaaaactacaaaacactcctgagataagtaaatctaaataaatgggaaaatattccatgttcatgatccagaagactctataatgttaagatgtcgattctccctcaaaatg

SEQ ID NO: 2299 - DNA, 384 bp, Homo sapiens; identical to SEQ ID NO: 2298

SEQ ID NO: 2300 - DNA, 450 bp, Homo sapiens; identical to SEQ ID NO: 2237

SEQ ID NO: 2301 - DNA, 1868 bp, Homo sapiens
aaacttcagtctttaagagtctgttgtgcagcggagtaggctttaaagaaacagtgcagcagtggtttcagtaataatcctcacttccatcagaatctgcctgggagggagcttttacaatgtacaagtggtgagaatgtttccaaggtgctaattatggacatagattctttgtgtgggttgatagctaccaatgggacagtgtagaaacaagtttccacctttctaaaaccagtttggtacatatctttttaaagatcgctttataaaaacaaaaagataacattaacatttattgaaacaagtcactctgagaagaccaggaacaaagttctcttggcagatctgggtgatgtgtgtgtctcacatttttatcatgtttttatgactgttttatcttgcaggtaagctttacagctttcagaggagttgtagtacactacagaaatatgtcttctttccaggttcaaaaagcaaaatctgattggcattgcattgaattattaattaaataaatttattaattggcattgcattgaatttataggttaattttgaaagaatgtggcgtctttgaaatgctgattttttttcactttaaaaaaatgacttttttttttaccactgatagtatttcatatggtccctcagtaatatttcttagagatggttaaaaataggttctgagtcatcttaagcatatttctaggaatttgttttattgctgtcatgaatataatggttttgctccagttcatttcatagtttaacatatcaaatattaggtatcttaaaaatcacaaatgctatttcaccctgcaggttagcagtattaaaatagaatcatcaaatcccccatcagtgggggcgggggggggggttgtagaaacagtctgatatggtttggctcttgtccccacccaaatctcatctcaattttaatccccacgtgtcagaggagggccttggtgggagatgattggatcacgagggcagatttctcccttgctgttctcatgatagtgagttctcatgagagctgatggttttaaggtgtagcccttcctcgctgtctctctcctgtccccttgtgaagaaggtccttatttctcttttgcgttctgccatgactaagttttcggaggcctccccagccatgtggaactgtgtgtgagttaaacctctttcctttgcaaattacctagtctcaggtagttctttatagcagtgcaaaaatggacgtaataagtcttatgtacttattggtgagagagaaaatccgtgcattgttttcaaaagaattcattaacgtatcaattcaatttctataacctttgaagtggcagtaaatatgtagtaattgatacttgggagatagttgcccacttgggcaaaaacgcatgcagaaggtggagtttttaaatttaaaacatttttaaaatagcaaatgttaatattccagtttccattggtaggaaattttttagataagttcaggcatatgtatgcaatggaaagccactagaaatcttcaggcacacagataatgacaatgcaggttgctcatgaagtatttagtgaaccaggagagttttagaacaacaattatagcatgaccccattttgttagtatgtttttctgtgtgtatgtttagagcaacagagaaaaaaagatgtgggagaggacatataactacttatctctagtggtgggattctgaacgtataatacatatgttgtacttttatgtattttactttgtaacaaagtatctttcagttttataataacagtagagctattttttataaattagcctgatggaacaatcccttatgattaaagattcatgttgtaacctctataa

SEQ ID NO: 2302 - DNA, 991 bp, Homo sapiens
aaacttcagtctttaagagtctgttgtgcagcggagtaggctttaaagaaacagtgcagcagtggtttcagtaataatcctcacttccatcagaatctgcctgggagggagcttttacaatgtacaagtggtgagaatgtttccaaggtgctaattatggacatagattctttgtgtgggttgatagctaccaatgggacagtgtagaaacaagtttccacctttctaaaaccagtttggtacatatctttttaaagatcgctttataaaaacaaaaagataacattaacatttattgaaacaagtcactctgagaagaccaggaacaaagttctcttggcagatctgggtgatgtgtgtgtctcacatttttatcatgtttttatgactgttttatcttgcaggtaagctttacagctttcagaggagttgtagtacactacagaaatatgtcttctttccaggttcaaaaagcaaaatctgattggcattgcattgaattattaattaaataaatttattaattggcattgcattgaatttataggttaattttgaaagaatgtggcgtctttgaaatgctgattttttttcactttaaaaaaatgactttttttttaccactgatagtatttcatatggtccctcagtaatatttcttagagatggttaaaaataggttctgagtcatcttaagcatatttctaggaatttgttttattgctgtcatgaatataatggttttgctccagttcatttcatagtttaacatatcaaatattaggtatcttaaaaatcacaaatgctatttcaccctgcaggttagcagtattaaaatagaatcatcaaatcccccatcagtgggggcggggggggggttgtagaaacagtctgatatggtttggctcttgtccccacccaaatctcatctcaattttaatccccacgtgtcagaggagggccttggtgggagatgattggatcacgaggg

SEQ ID NO: 2303 - DNA, 1582 bp, Homo sapiens
gcccatcttaacagacatcaaagagttcccacaggagagaaatctgttaagagtcttgagcgtggtcggggcgtcagacagaacacgcacatacgtaaccaccccagagcccctgtgggagacatgccctatagatgtgatgtctgtggaaaggggttcaggtataaatcggttcttcttattcatcaaggggtgcacacaggaaggagaccctataaatgtgaggagtgtgggaaggcatttggtcgaagttcaaacctgcttgtccatcagagggtccacactggagagaaaccatataaatgcagcgagtgtgggaagggcttcagttacagctcagtgcttcaagtccatcagaggctgcacacaggggagaagccctacacctgcagcgagtgtggcaaaggcttctgtgccaagtctgcactgcacaaacaccagcacattcaccctggagaaaagccctacagctgtggcgagtgtggaaagggattcagctgcagctcccacctcagcagtcatcagaagacacacaccggcgagaggccctaccagtgtgacaagtgtggcaaaggtttcagtcacaactcgtaccttcaagctcaccagagagttcacatggggcagcatctgtacaaatgtaacgtgtgtggtaagagtttcagttacagctcagggcttctcatgcatcagagactgcacacaggagagaaaccctacaaatgcgagtgcgggaagagctttggccggagctccgacctccacatccatcagagggtccacacaggagagaaaccctataaatgcagtgagtgtgggaagggcttccggcggaattcagaccttcacagccaccagagggtccacacgggagagaggccctacgtgtgtgacgtgtgtgggaagggtttcatctacagctccgacctccttatccatcagagggtccacactggagagaaaccctataaatgtgctgagtgtggcaaaggcttcagttacagctcagggcttctcattcaccagagagtccacacaggcgagaaaccttacagatgccaagagtgcggaaagggctttaggtgcacatcaagccttcacaaacatcagcgagtccacacgggaaaaaagccctatacgtgtgatcagtgtggcaagggattcagttatggctctaatcttcgcacccaccagaggttgcacacaggagagaaaccctacacttgttgtgaatgtgggaagggtttcagatatggctcaggtctccttagtcataagagagtgcacactggcgagaagccatacagatgccacgtgtgtgggaagggctatagtcagagctcacatcttcaaggtcatcagagggtccacactggtgagaaaccctataaatgtgaggagtgtgggaagggctttggccgcaactcctgtcttcatgttcatcagagagtccacactggagagaagccctatacgtgtggtgtgtgtgggaaaggcttcagttatacctcaggtctgcggaaccaccaaagagtgcatttaggcgagaacccttataagtagatgtacatagaggattcca

SEQ ID NO: 2304 - DNA, 1582 bp, Homo sapiens; identical to SEQ ID NO: 2303

SEQ ID NO: 2305 - DNA, 670 bp, Homo sapiens
tacctagtctcaggtagttctttatagcagtgcaaaaatggacgtaataagtcttatgtacttattggtgagagagaaaatccgtgcattgttttcaaaagaattcattaacgtatcaattcaatttctataacctttgaagtggcagtaaatatgtagtaattgatacttgggagatagttgcccacttgggcaaaaacgcatgcagaaggtggagtttttaaatttaaaacatttttaaaatagcaaatgttaatattccagtttccattggtaggaaattttttagataagttcaggcatatgtatgcaatggaaagccactagaaatcttcaggcacacagataatgacaatgcaggttgctcatgaagtatttagtgaaccaggagagttttagaacaacaattatagcatgaccccattttgttagtatgtttttctgtgtgtatgtttagagcaacagagaaaaaaagatgtgggagaggacatataactacttatctctagtggtgggattctgaatgtataatacatatgttgtacttttatgtattttactttgtaacaaagtatctttcagttttataataacagtagagctattttttataaattagcctgatggaacaatcccttatgattaaagattcatgttgtaacctctataa

SEQ ID NO: 2306 - DNA, 386 bp, Homo sapiens
tgcttgagttatctgtcccgattcaaatctgttaccatttttcttctttttaaaaactctttaatgaagtatctctcccccagcacctatcaggatttggtcttgcatttgattggtttgctaacagaagtagccaaagaaggatcaaattctagccaaatattgcttcaaaaatatgtgtaaataaatggacaatgtttaaataattgtagttaacaaataaggaaaatgtaaattgattacaataaaaattagttttttaatatcaatttatgctagagtaaaatataaatttcctgtttatatgactcagtagcatgactaatcagttgcaatttaacaagagacattgctttttaagaggcaaggctttttgttttatgaat

SEQ ID NO: 2307 - DNA, 452 bp, Homo sapiens
gtaaaatcacaggttcttccccagttctgaaaaagaaataggaaggggcaacgtggcagtcagtgtgaaaagaaaccacgcatttgcaggaagcaagaaggggttccgcagcactggctgcttccggcatctgcagtgcgagggtaaacaggcctactggggagtcggttggccctgggtttgagtcattgggctgctgcttggctgtgacctggaacaagtttttcccctcttaatctctctgagatgagattcctttgagtcatatgcctacctcggtgggtggttacgtggattaaattatatcatgtatataaagcactcagcctggcatgtggcatgcaggtagggctcaagaaatggtgtcagtgtgaatattctcccctgaatgttggaatgttgtgtgaaggtgaaacagggattgtgtccctagctcttacttaaattcaacc

SEQ ID NO: 2308 - DNA, 32132 bp, Homo sapiens
agtttgctggaacattatcagatggcttagggaagacgatggacaatcggcatcagtcagagcgggagtacatcaggtaccatgcagccacaagtggtgaacaccttgtagccggcatccatggcctggctcatggtaagtcatgggtgacatcaggctctgctgctgctggtcctcagaggcgcctttgtatcaatctgattgcagctataaaaaaagaaaggtgggctgggcgcggtggctcatgcttgtaatcccagcattttgggaggcctaggagagtggatcatgaggtcaggagtttgagaccagcctggccaacacagtgaaaccccgcctctactaagaatacaaaaattaggccaggcacagtggctcaatcctgtaatcccagcattttgggaggtcgaggcgggtggatcatttgaggtcaggagtttgagaccagtctggccaacatggtggaaccccatctctatcaaaaatacgaaaattagacaggcgtggtggtacatgcctgtagtcccagctactcgggaggctgaggcaggagaattgctcgaaccctggaggcagaggttgcaatgagctgagatcgtgccactgcactccagcctggcaacagagcaagactccaattcaaaaaaaaaaaaaaaaaaaaaaagaaaaggctgacaacagaggaaatcctgtgttggcgtacctgatagccttccaagctctcttactttatcctccttgcagttgaaatacgacagccggtgagaactcctcattcgctttctgaatgttgtgcacattgcaattccttttcgttctctggcttctgttcccaaagtatcataaggtgtaatcaaccagacctgttcttagaattgtagctgctacttctcttagaattgtaacctctgccttctccttactgatcattccttccaaagaaattgaaatgaggaatttgtggccaggtttgtagcccaggtgttttttagttttacataaatgtgcattcactaaaattataaatttatttgcctaagagatgttggtgatggcatgaatgcatttggtctctgactttgaattcttttaatgctttaattctgagtcatttgccttttgttgcatttttcttaacaatttcttagtacggcatccaaggcccttggaactataaatccagccaattttccaaccaccatccttcagccatgctgcactttggccacacacagctatgtactgcttcccaggtgtgcttccaagtccttgctcacacatggtccttctgctctccctcctctgcctcatttccttgtctatcaaaatcctactcagcctgtaagtcccaactcaatacattttcccagctctattgtccctgttagagttaatgacagagcacagtctgggttgtgtatgtcaccagctgtgtacatctgatagattgagaatgtgaggaggggagaaggaccactttgcattcacctttctccttgtgtacctcacatgacacctggcacatagctcatgcatagtaaggcttagtaaattaaactctttgtaccagatccttaggaaccatccaaagctatcagagtcatatcaagactgatcagtattaattatctgcatttggaagaagaggaaggaatatagacagtaaaatattatatttctatttgtgcttaggacacgtttagaatagagtttttgtttatcagctttcctaatggtgagatttggatcaaaatgcctttgcttttcctaaggctgcccaaccgtaaagggagctgtccctaaggagacgtcaggccagaagtgaaatttggctgaaagtaatttgtttatggattttaaaagttgactgttgggcaatcatttggggttaaggtttaatcattctttctcgtaatggtaatgacagtacattggactcttagaagacttttaaaatgaatataaaatgctttgttatgtgtggtggcctttatctggccagcatccttgtgacgtggagagagcatggctctcctcactttctggatgaacacacaaatgtgctgagaaaatgcatgattggttcaaagttgcaaaatcacctcccatcaagaatcattcctataatatgtacagcctctccaggagccaatggcttcatccaaagaggatccactgagctctgggttatacgaaggcagtatcctagagtgagagtcttcccttaggatgaaaagacctttagaaggtgataagaaccagaatccactcaatccccttgatgtaagaaatgggaattgtgctcagttctctctgcaggccttgctggacccaggttcagtcatgttctgtctctcaggtcccagtctgaattcctgttctgtgtgtgctctgccaaaaactttgttcaaaagtttgggaaagggctgggtgcagtggctcaggacagtaagcccagcactttggaagacctagagggagaatcgcttgagcccaggagtttaaggctgcagcaagcggtaatcatgccactgcactcctgcctgggtgatagacggacaccctgtttctaaaaaaaaaaaaagtttgggaaagagatattgcctcactggagcaaatttacccagaatccaaaagaaatgttgtgaattgttagtacattctcacccaaggagtttcctttaccaatttgtctcactagagctgaagagtctagagagcttcctcacaccccactgtcagagggtaaacatcctgtgagtgtccctggcacaggtcctggagatgctccctagacgggctgcctcttcccttcagtgactgtgacctcttcagcctctgccagcttctggcctcttctaaggtgttttcagccattgctgtcaacttgcaaaatgtttggaatgcctttttgacctggattggtcttttgaactgactccattgagggtcccagccagctttcacagctttttggggtgctcttcatgaaggttttatataatcgccgataccgaatttcatcaaagcatgcagtagcttttaccttatttcaagcatccagtggggttggccagtcacccccatagtgttctttgaaaattgcaaatgtataccatcagctctccatatccacagattcagccaaccatggatggaaaatatttggggggaaaaaagatttcacgaagtgccagaaagcaaaatttgaatttgccacacgtttcaaatactgtattgactccacacaaatgaagtgatatgtgggcatcgtattagctacaataaataatctagaggtgatttaacgtatacaggacggtgtgtgtaggttatatgcaaacacctacagcacattatgtaagggacttgagcatcctaggattttggtatctgcaggggatcctggatcaatcccacatggatactaaggaacaactacatttagttatctctctctgccttagatatctttcttttcttttctttttttttttttttttgagacagtctcgctcggtcgccagactggagtgcaatgctgcgatctcggctcactgcaacctctgcctcctgggttcaagcaattctcctgccttagcctcccgagtagctgggactacaggcacgcatcaccacgcccagctaatttttgtatttttagtaaagatggggtttcaccatgttggccaggatggtctcgatctcttgacctcgtgatctgcccgccgcagcctcccaaagtgctgggattatgggcgtgagccactgcgcccagcctctgccttatatttcataggatgccatcatcttcaaactttccccgaaggcccaattttctagtctcctgttgatttaatcctctatctgtatcctctcctgatcgtccgtaggctgcccaagctctgggatcgaaaaattggccactgttaacctctcagcttttctctgatttttttttttttttttttttgaactggagcacactttacttctgactaacatgtaacatatatcctctgactctggacttaatgggcaaatctgcaggatcctcttctgtgagttggcctgtctgtggcctctctggcacagagattaatagaatggccttaagttatcattccataatcaaggggtttggctttaaatgcttttgcttttgtcctcgtcaggttacaacagcccttgtctttttcactaggtatcattggtggactgaccagtgttataacttcgacagtggaaggtgtgaaaacagaagggggtgtcagcggtttcatatctggccttggaaaagggcttgttggcactgtaaccaagccagtggcaggcgccctggattttgcatcagaaacagcccaggcggtgagagacacagccacactcagcggccccaggtcagtggtgtgggaagaatggcttttgcagtttccagcctaggtctgctgcttctcctaatccatactgatgtgtttaattgtgcactttcttagttatagggtttttaattcaaatacttgtaactgaaatttctgatctgcctaatataaaaagatgaaaatgaggtacagaaacctggcatgaattttttcagataaatatatatatagcatattttatatatgctatatattttatatatgtatgtatatatagcatattatatataagtatgtataactatattatgttatttttctccattagagaggtcagaattaggattaaactgttagaagcttcttctgttcaccaagccaactggatccccacatgcctatgaagaaaactgtcagattgtagtctggttcttactcctacaccccgtgatatagttctagaatccccactgttgttgttcaccatgtgggtctgttccttcttaattttccttccgcttgaaagtatcagccccaaccccataaagaaaagtgccaccccccatccccccagcaggtcagcagttctgctgtgggattgctgtctggccttgataccagctgagactggaaatcagggacagcccatatggttccaaaccccacagaacccaactgctttaacgtagctgtttgcttgaatggcctattttagcctcccttttccagagtgactaattggggattcttatcaacaaagggtataatgaatgttaagggcccagccaagctagactcgacttaagcccagaaggattttgctgctgcttggataatagattttccctgagtgaattagtacgcccttttagaatgcctagggcctggcccacatccacaccctatcactccctcaaataggatgtgaagtgaaattgtccccaattgaagtgaatccatttgtctgtcaccaggaaaacttactgaagacacattactgcagtaggggaaatgctccgattgtggactggggccatgcagtgtgctgtgccagaatgccttccatctggaagcagctgagtaaactctgtatggtttactttagttaagttacattctattctcagatacaaaactaaaacaatccttgagtatattttgaagcatttatgaagttgtggggaggggcaggcagtgaggaggcttcgaaagtatttccagttagtttttccatctctgctcgaagcccaagaagtccacctccagtatttgttaagataataagacttaatgaagtgtaaagctgaagacgcctaagagttcccaaagaagcatgtgtattcttaaaatgtcaaaatagccaagggattggttgattaaaaagggttcaaggtatatgtgataaattttttaaagatgattttgtgctgtgaagttttaataatgttgacgagaaagaaacggcttgaattttatacattgtcagcttgcaagtcttcatgggggtttttcattctttttaggagcacaagtaatgtagccacagtcactgcagaaagaatgtctttgagagggacattcttgtcatttttattagttgttcaacattgccacagaagtttgattttctgtcagccagtacatagctgccatttattcattgcctgtcagtaaatagtgattgaaaatttcctatgaactcagggttgggaatagcagaaaccaaaactgtctctggtctcaaagagcttataatcaagcagggcagcaaacataaaaaattatataaacacttatttgctgaaattgtgacaaatgacatcgaggacacttagagggtgccgtgagactatgatcagagaaggtgatggggagaaggagggtggctaacctagtgatcaggggagttgagacaggcttttctaggaaagtaatctttgaggtgaagcctggagtatgaagtaggagttggccaggtgaagagaagagagaatcaccttccaggtaaaagggaactactgtgtgtgcaacagcaaaaggaaggaacttatctatgtgccaggcattgtctttgtgcctccacgtgtggaatcccatttaatcttcatagttgatttacaaatgaggacaagacagtccagagaagtcatggagcttgtccacagccacacagctggtgggaaatggtagacctagacttagacccagcctatgtcttgaccctgtgcccagcaccactgcattgcaccctgctgcctgggtctgcgaggagggggctcattggatttctcttgtacgtgtttcagagtcagttagtgtcaagatatggcattccacatagtttcttccctgctgactcaagatttactttactattacctgcacactgacatgattcaggtcttgaccaacactgcatttttgtctgtctgtttcctctggcctgccaccttagccttatctggacctcagcagcagagaccatgccctcatgaaggcactggggagccgttcacagtcagcactggccactcctcatctcagcccaatgaagttttacatttccatgtagatgaggcactcgggatatagaaaagttgtgcagcttgactcaaagcagacagtaattgggtagcctaattgaagtttaactgcaagttccaactttgtaggctgcagaaaaaaaggaaaaaaaaaaacaacaacaacaaagtttaactgcaagtttcatgagacagcgatctgcctaaccattcactcctcctagaagcaaaagctaccgtgatcattgaggcacagccggtcttcatatatcctcaaaggagggggattagcttccacatcccttctctattcctggaggtgccagtagtgggagagtcatggcagaagttaccagaggcaagtggggcagaggcaagtagggtatatgtttggatcagtggatcagtgtcctttattgtgcagaaaaagctaaaattacagattcttctgaagggatacatagcagccgtttcaccaatgtccctcagtccatttgtccaggtccagaagtattcatgaggagctatgcgttagaagagagcacttgggctgggcatggtggctcacacctgtaatccagcattttgggaggccaaggtgggaggattgcttgagcccaggagtttgagaccagcctgggcaacacaatgcccccatctcttacaaaaaaaaaaacaaacctggatatggtggcgggtggtgtgcacctctggtccttgctacttgggaggctgaggtgggaagattgctgaagcctggaaggttgaggctgcagtgagctatgattgtgcccctgcactccagcctgggcaacagtgagaccctgtcaaacaaggaaagagaacacttgatctggaaaacaacaggccagagtcccagccaccttacttattagctttgggccctgggtcaagtcaagacatctatgtaagactcagttttagttttttcatctataaagtggggataaatttatctctctgtttattctgcttctcaggggtttgaagcccaaccagagttattttaatgtggaagctataaagaactataaaaatgctgggtgatattattttaaagtcctattaaaggagcgcagagatccttgcaggtggagaaatgtttcagtgccagtttgttctgatgacactgtatctcttaggaacatactggctctaacactatcaccgagggataaatcaccctggtttcttggaagtgagttataaccatctccaaccatcccggttgattgaacaggatccaggggtgttactcagggtttttccccactgtttagacaacagggactaacaaatgatttgaagggattagaagtgagattctgaccgagggttgacctgagcccagggaccaagccaggaatagaacccaagagtccaagagttctgcctctgagcctgcaattggaatgagactttctgcttcctttgtaatatttcatccaagtaaaggcttagatcttagcatctatgttttaaaagacccaaattttaagcagatgataggaaagtaagccataaaactgtgaaagagtactccttccagtaatccatctgaaaagtggccttacaggaaacattggctcttttttgtgtttatttgaacatgattttatttatagggaaccccccctccttatgttcttttagattaaaatacttccaagttcctctccttgttggagtgcgctggcattccaagcgacagccacctaactttcctctgaaatttccaggcaacccaatagttctcaggaaggcaggtgggggtggggagagaagagggcggaggactgcagagcctttggcctcaacatgagtgttgtggaccaatatcccccactgcatttgttcactgtacaagtatgtgtggtttggaactgaaataagaaaccttttccaaggcaacgttctgctggctcaggttgcatcttctggcctacgtgtattgggccacactttgtctgttcccaagtaaagtttatgaaaatggcacagatgcagccacacttgaggtgccactgaagctatgtgaagagcctgctacccttcaaacagaccaggcccaagcaaggtgccaagccatgtgagagtgcccagtccactgtgtaaatgtgacggcctttgatggtagtgtttgaaaagatacttagtagaaagttgcagagacccgggagcagccatttcacaaaagaaggcaaaaatacctttgagaagaaaggaatgtctgcctctgcactatgtatttgcttgtttgtttctccaaataccatctgttgcagactggggtgcatgacattttaggtaagtagcagatgaagatttatgaagctgggccctgaggtttcctctaaaatatttcttcaccttttaagtcaagacccaaaagtggggagagaagtaggagttggcagaacttgaaatatttaaactaatttagcaaagctcaggagtgttggagcttatctcgttatttaagttagataaggaggaaggggaatttgaaggataatgatagatcagtgtttaagaatacagccatcaggactgataatgttctggaatcccgggaccctcggattgtgcacgtagatgtaaattccatttgctctgagaacttttgaaaaagaaagtttttggttgatttcacagaaaagatttatggtgggcatatttgactttttcagtaaaaatagccccaaaacaccacccaaaatctgttaagacacttctcgtgaatgacctcttagatgtgaaatggaaatgggttttcttaaggaaaggccccttttgttaacaatgtttgcatgttacttatgactctccaggataaaaggactaagactcttttgggtcaccagagcctgaatgcagtcaggttggacaggtcagcaaaaagtctgcaaagaggccgggtgtggtggctcacgcctgtaatcccagcactttgggaggccgaggtgggcggatcacgaggtcaagagatcgagaccattctggccaacatgtcgaaaccctgtctctactaaaagtacaaaaattagctgggcgtggtggtgcgcgcctgtactcccagctacttgggaggctgaggcaggagaattgcttgaacccgggaggcggaggttgcagtgagccgagattgcgccactgcactccagcctggcgacagagcgagactccatctaaaaaaaaaaaaaaaatagtctgcaaagagaacttaggaaatgcttccattaactttttcatcctagctgggtaatactgcttttaattactctgctctgagagcagccatttcttatacttggtattacacataggacatcaaacagaattggcttgaattgagcctttagggaacttccaaaggtaaagattgagtaaagattcaaatgtttattaggatataccagtgttcatttttttcccactaatattccattcaaggcaggagactaggctgatatcccatgtatctagagtggatcaagtccaatatttctttcagagttcctgttccttaaaactgtaaatgggttttatattttattccatgtttggcttaataagaaaatatttttaattgctacctggtaaaattaacatttcagaaagatctgatatgttatcctgtggctcctgcctcatacttatctaggaagttccagcacgctccttccagatgagtccggtacgctgtagtagcatccatatagaggcatgtatatggtagaggtgaaaagctggaacttgtacctgtttgaccctaaggctctggttctaatctttgggcatatctgtcttttggcttggtgtaacatctgctgcttgggacagccattgtgttagttaacatgtcagtttcatcacgaaaaaggcattacatttcagtgaaactgaaaaattattgctatatccagctgaagggaagggactgtcaaatatctcctctgttgtccaaacatggcacagtagatatagtgacagtccctttatcttctactcacccttgcgtatatatttgtgaggtgagagccatatattctcacttcctgatcttgccaaaccaggtccttccagagaatgcttgaaggtagatgggtcattttctcattcctccctctacgtgagcaaccccagaagaacactaagacctgtgttgatgacattggatgtctcacttggctctgaaattaagctgatgaaattataggatcggatattttattttattttttttcaagacagagtcttgctctgtcgcccaggctggaatgcagtggcacaacctcggctcactgcatcctccacctcccgggttcaagcagttctcctgcctcagcctccaaagtagctgggatggcaggcgcacgccacctcgcccagctaattcttatatttttagtagagatggggtttcaccatgttggccaggccggtctcgaactcctgacctcatgatctgccgaccttggcctttcaaagtgttgggattacaggcgtgagccaccacacccagtcaggatcagatattttaaagaagcatcttaacagtccttcatgccttataagttaaaattcctctcacaggaacgtaagcagagaaatcttattttctgagacaggcttcttccctctcgctgaactctaaatactgtattcccctttcactcaaaggccccagacgatgccattctcattataacataacttatggaaagctcagatctattgttggaaaaaatgcaaagtgtgtgtgttcatgcacacacgtgtttgagaaaagcctttccatttctgaaatcccaagagtcatttttatgcaagattatctgttaggaaaaaacccacttttttggtcatggtacattataatcatttctagaaaggagagcgtctaatttttgccatttttggcatgcagagatgactgacttcatagaaaccacactatcctgcttccaaaagaaaaaaaaaaaacctactgaatttacatctgaatcaacatctcttcaaagtccagtccttgcatctcaaccagcaggtccttgtgcaaagaaaatgaatgggaagtgtgatttggggttattccatttactttctgatttggggttattccatttaaaaatgaaataatgttgccattatacatctgtagtcccttctgtgttcagtgaatttgtttttaaaactctaacgtgacacctaatattacatacataagataagacatttgagatttttggtttgaacttcaagaaaaaataaaacggtgtctatttctttttgagaaaaaatttgtattttgtgcattagagaaggttgaagagccatttgttatttgtggaactcctctgtaaaggcattggatttacttatttttagattttcatgactatcccatgcctcatgtttttcccttacagaatcatccacctttgcccaagataaaattgaaatctttaacaagaggacccaggtttgagttcagctcccctgctcccagagagctttagactgtaagataattctgagatacacacaggacatttggactagcagggacttaaagactcactgttgtattacagattatggctcggaagcactgagggaaggaaagataggtgtgggtgttataattcacccgtggttttcttgccctgatgtatttatctggtactcttttgccagtctccttctcaaagacattttcttgctaaatttcttactaacttgtcaaatggagggaaaataagattgaattagtaaaacattcttatcacaatatactctaaaagaggctgggcgcggtggctcacgcctgtaatcccaacactttgggaggctggggcgggtagatcatttgagctcacaagctcgagaccagcctgggcaacatagtgaaaccctgtctctataaaaatatacaaaaattacccgggtatggtggcacgcgcctgtggtcccagctactccagaggttgaggcaagaaaatcgcttgagcccaggaggtcaaggctgcagtgagctgagattgcaccactgcactccagcctgggtgatgggagtgaaaccctgtctcaaagaaaaaaaaaaaaacaaaaaacttttgttatattgggcttatataattcaaattaataatgttacttatctatatccttagtggatttactttaatacattgaggaaaccgctttctgattagcagagagaatttgtacatatgggttcttttagaacagagggtctcaaaatacggtctagggaccccctgcggaaccccagatccataacctaaaacctatttgtatatattcatgtacttatatatgaatttatagatataacaatttttataatagtattctctaatgagtatacagtggagttttccagaagctacacaatgtatgatattgtaacagattgactgtagaagcagataggtgaatacagctgttttccagttagcaagacttaagagatttacaaaaatgtgcaggtgccactctcctcaccttctgtgactctgcatacatgccaccagccaacaaacgtacctggttaatttttttgacaagctgctctagttgaaaatacagtgattgataatccatcatcttgctgataagtagcacatatcggcaatgatgggctaattcggactaaaccgtaggagccgctgtaatgcaatgcttccctttggcttcctgccaacagttgtcagccctcctggtttgctcctgacttttactgggtttctagaagtaacaattggaaatattttatcacatatcagaaagacctcttacaataatttacctaatttagttcttcaccttaacctaccatcccaataaattttaatttcggcagggtagtaagtgtagagcagattacttcaaagtgcagaatcttgtccaaaggctgcttggttgtgtttgcactgccctgactcttgcaggtactcgagaaggtgtatctgtttcagaattcacttgccaaaacctcaactttctcccctagcaaagttgctggagtaggataaacccacagtatttggataagctcctttgaactccttgtagaaagcagtttttatgaggcagttgttctgtgttaacaccagagacaattcctagcagatttccccaaacatacttcaaacatcgataatggcaggggtgacccaaactgtatcataaaatcccagggactgcaggagacttcaaaggggagacagagcaaaacctcacttctcgttatgaggagtatgggtcacaggaatcctggctagaatccatggtaacctcgcggagtaatgccaggatggacagaggccagggctcatcagttccctagactttactaattgaccccagcagcacagttagagtggtaataactggcacctgcccacctcctgaggtgttagaggccaaattaccacatgtgaagtgcttttctatcctttagtgagaagatgcaaaccttgaagtgtgtttctatttttgtttgaactatcgagggcccagttaattcagttgagccaattctgaccttgggatattcagatccatcacttagtatgtacaggcaaattgacagtagaaatttattgagtcttgaactcctactatatttcaggcatttaataagtattaaatactgggaatatttaaataattgaggacaaactgctctgaagaatcaccaagctgtttggtttgtgtgttaatattcttaagccactcttacgtgttcattaaagcaagtttccctatagttttcttgaagaactcattttttagtgatttgacttactctttattcttgaaaacaacaaaattgcatttgtgcatatggtatgtgttgaggggggtaattacaggcattttttccctcattaccgggtccgttacagctccttgaaaacaaatagttatagttttactaattgtttataaaattagctaatgatcctttgattttttagtttttttataccttagctgtatttaataaatatttagtatcttctgtgcaattaataagaacaatgggggccaggcatggtggctcaagcctgtaatcccaggactttgggaggctgaagtgggcagatcacctgaggccagagttcaagactagcctggccaacatgatgaaatcctgtctccactaaaaatacagaaatcagctgggcatagtggcacacgcctgtagtcccagctactcaggaggctgagacatgagaatcgcttgaacctaggaggcagaggttgcagtgagccgaaatcatgccactgcactccagcctgggtgacagagtaagactctgtctcaaaaaaagaagaagaacagtgtttaaaaacctgttatttttacctgaattattttgctacgacaaatttatctttcaaattagattttatcaaagtagatatgtattcacttttttaagttgaagtctttctaaatgtctaaaaccaaaacacagtaatctcctgccctacctttccctgattcctgctccctcagaggcaatcactttcaacactttgggctgtttcttcaatgtggaggtatttacctttatatttcataaataaaccaactgctatttcttgacatcatttgacttcatgttgttatacatacatgtttcctttccccatttttcagtacagttatatgatcctttttgaataacttagtattccatttttacgttattatgactgtgtaaatagtattcccagtgaagccccccacccaggtcactttgatgatgtttcctttttaaatgttgtgctttgtttttttctccttggagttagtaactgctctttcagtattgtctgctttgttttctatatgcacattcgtaatttattctcaaatgcttatttagtttccacatttttttaaccctgggcctagtaactcgtttttctttaaaaaagaaaaaaaaaattttatgttcctattgctaatttatccacaaacactcttctgtatgtgtacaaatgcactgagtaatttattggtttctaattaaattctccctcttgatgtcctctgctcccatctgactggttgttgtctagctatttttgtctctaagctatttttctatagtagtactatagcagtactattctgagtttctttcttccatttatttgttttggtctttttctttcatgaatagagacagtccccagagaatctggtgattcttgactatctgttctactcctctttaaagatgaggcactaaaaagccaattgggagctcttggtttgaggctgagggggccttactgtggaatgatcaagtggggacctgctgactctgggctcctgttgagaggagcaaaactgaatggggatgagagaggggacctgaagctctaactgcttcccatgcagccttttaaccaatcttcctgttttcacctcactccaggcctatctgtttctcctttatgctccaggccttcagagctacttgctgcctccatctttctgaaatgcagtggaggccaccatcctaattagctttctgctttgtggcttccactccctcaaggcttacatttcagcgccacgtgtccatctgcttttcagcttctaaaatattgttgacaccttctctttatccttttggatttgtgccatttgtatccctttgctttccctttagaggggtctctggactagatctgtcatgtttaatcagaagtcctataatttagacttttcactaatttgtgtttcctttcttggtgttctttcccctttacccccaactagtggctctgaattagtgtggttttatgaaacccatatccattcagccatggttctatgtattatctcatttaggcatcacagcagcttttgcacagcatctgctcaggcagtctgtggctcttctttccccgaaagattgagaatacatctggtgagaagccgttgccagtcccagcccctgctttgagtctggtattggtctttaatctctcattctgtgtgttgtaaagaaacaggttgtggaaggctcttgtcagatcccaggaacatgaaagaaatagcacaccctacggtagtgacatggccctgtcaccacccctcattgaaccataaaagctattcagaggggccagcagctggggagcgactgtacttagatcctgggtgctgatgggtgttttgtagtttccaagggaagttgctgaaagttttcttatcttgacactccaagggcaagaggtctttcttcaaagagaagcgcttgtttcagaaaaagatgtggaaaggacgtaaaatcacaggttcttccccagttctgaaaaagaaataggaaggggcaacgtggcagtcagtgtgaaaagaaaccacgcatttgcaggaagcaagaaggggttccgcagcactggctgcttccggcatctgcagtgcgagggtaaacaggcctactggggagtcggttggccctgggtttgagtcattgggctgctgcttggctgtgacctggaacaagtttttcccctcttaatctctctgagatgagattcctttgagtcatatgcctacctcggtgggtggttacgtggattaaattatatcatgtatataaagcactcagcctggcatgtggcatgcaggtagggctcaagaaatggtgtcagtgtgaatattctcccctgaatgttggaatgttgtgtgaaggtgaaacagggattgtgtccctagctcttacttaaattcaaccctgtccccgaattcttgctgaccacctgctagagtgtgaggactaggagttcatgtgcttggctgggcttttgtccttcccattctctttcttcacacaaaatgaacagttgaactcaggccaccaaacctggttgagttgctgggtggagggactctcctgggctctgagcctttgtgtgtgggaaccgcactggaaaaggtgtgcagaggccacgaacttgctctgaacccacttgtgaagagcaggtgaccccaaactattgttagtgtctgctgtaaatgatatgcctctgggttcgagcagagttcagccaaaagccccacatgacatggaaatctgtcctggagccaggtttgtcgggtaaaagttatgtagcaaatgtctccaaacattggcatctgttgtctgccgagactaggacaaccgagaatgatggagtgcttaaggaaattaggatggggcatgcgaccctgtaacagctgataaactgtttcaggccaccgtggctcatccagctcttttgataaacagctttaaaagcattacgtggtttggaaagcattcttcaaaaatggttatattttccagacgcatgacagtccactgttcagtattatttaagggttttaaattgtagaatcagattccttttcagtggggctcttggaactgtcgagggctgatctgtctgactcccaccaggacaatctcacaacaatattattatgtaggtcggggtcccctaggtctgttaaaaaaaaaaaagttcagggctaagcgtttaagaggaaaaactatttctttcatttctagctaagtctgatgggccctttcaaacactgctttcatcatgcaccttttatttcacgatttctgcataatgaaaatacaagatcgataactgtggattatcgtaatgccttgagcctttgaaaatgaacattttctagattataaatgttccctttgtaattcatttcaaacttcatcctcccatttgtcctaattcccgaaatttaactgttgccttttgagcctcctaggaaattctgggtatcctttaggcaagggaggtagctcttgggggaatagcattcaggccacaggcaattcatttgcgacttgggctcttcttagaacatatgataagtacaacgcactgtagtgacagattttttaaaaaccctattaaagcccaatatactaatgcagattttttttttttaagttttagagagattcatgggattttattctttttcccaaaggcagtggtggagctgacagagtagcatggagcctcgtcctgatgtattgtgcggaagtggcagcagttcacattcattcagtttgtcagcataggatcagttccttcttgactcaactctctgtgatcaaaataagctattggatgttccctttgggtactggaagcagcttggccccttggcaagagaacaggattgcaaatcacaagagcagagccctgactccagctctgatgctactgtgctttgtgaccttgtgcagacagctttatatccccatctcaggtcattctcccccatacaaagggggagagggtcatccttgccctggtcatgtctgcatggctgaggtgaataactagttgtgtaacttcctggaggagtggcacagaggaagctcccttcctagggctggctctgccatcagggaggaagctggatattagaatgaagaaaaagcccatgcagaatatatggcagcccgataatggattctaaaaataaaaaagcactaggttaatctgcagctgtagtgtacctaaagtattctttggcaggttgtggccctagcctaatccccagctggacttagcaccatttaagtgagttacatctcatccccgcaagggattgagtctgtagccaatttggccttgtcaccacttcagccctccctctgatttcacctttgggaaaactacaaagtggccccagacatacatagcaggcttgatcacatgggtggagtctgtcaggacagcatacatcaaataaaatgtccagggaacctgttgtaaataaaccacttcccgcatgctcagtcatcgtggaggtacttgaatgtttagtttcttttagctgatggccaagaaatcaatgtttaaaaaaaaaaaaacaaaaaacaaaaaaacaccttgacagaggcattttgtacaagaatggtgtgtgggtgtgaaaaagtaaattccaaaacatatttccttttagttcccaaacccatattagatgagtacttcttagccttggccacagtgctagagtaaatagcagtgtcacatagctcgtggaacaggcaaaccacagaatgtacaagagagaagcgtgcacaccagtgagtctgctatggcagctctctttgtcctggtttctacatctcatttgtaagcaacttgtgttcctgcattttcagagtttggccagtttatttacttagaattgcatgttcctggaatattgtcataaaagtgatcctgagatagaaaaagtcaacaggaagcaggggcattgagtttataagttctcagtctgtcttggcccatattaaagtctcattctcaggggtaggtccagctttccaaattttaatatatcagagactcctgatgcatctgggctcatgatgggccaaagtaggccttcaggagtcctcgtgttacacactcaacgcctaatggagactggattcatttacgtgtattaatgtaacctgcgtgatcatgtgagtgcaagtgctttgtagattgtcctgggagatgtggcatattatgactaaagacttaattgaaccctgaacatgtatatgaataactggagacagattgactggattacacatttttcttgaaaatttcctaaatttagcctacctctttgttgccttttatttcccagcttaagtggttctctataacactatattttaaacaaaccagaacaaatagtatacaaaagcatagacaagagggatataacaagagatggttttctgtgatccgtggcacctcctctctaccctgcctccaccaccaaaaggggctttaaattaagattcggaatggcaaattcacttaccagctccaaacacagtagacaaggaaaccttgtgaggaaaatccgagagtatatttacagtttctgttcagaaatacatagcttaacttcgaaggaggaagcgtgacttttcacctgcagatagaactagggtctgatttgaaacagaccactggcttcactgaaccccatcaaagaagtctgcttctgcccggaattggaaagtgccagtgggcatgtagttgctagtatgggatttctgtttttatttttaacaagcttgggcccaactcttagtatcaagatgggtgaagacaaaactgaccagaaaaacacgtatcaagtcagcagtggctcacccctcagaggccatttttcccacctgctcctcttatacctttggtttgtttttggttttggattttttctctatgttcctcctactctttctttctctattttgcttgggccttcgttagaagagttctagtaatcatttcagacttccaaaattcaacccagtagcctcattttacaggtggacccactaatacacaacagctcgatgtgacaaaccatagactcacagttaatcacttggagagcctggattcacctccgcgatgacctgcctttccagccctccagtggcgtcctctgtagtgagttgtaaatgtgccactctagaacattccaggaaagccctcctcttgggctaaactctaaaactaaaatgaagtcctgcccatgtgagctgcttgtttaacactttggatgctaatcagagcattaatgagaacacatggatagattcggcaggtctaatgcttgggaccttctcctatttgattccataagactaaatcccctataaacacttccctcctgtgcacacacacatgcattcacatacagcactcacgtatccctcccttatagccaaagaccgaaaaataaattttttttttctacattaaaaataagaccagctagtaaccagggttggcattcccatctcctgtggaacctggaaggactagcagatagctatagagatctgtctcctttttagtgtggttgtattaagggcaatcttgcctcccatggcaccccagaaaatccaggagttcaagtgggggtgcactgtaggaggactcagcagctgttttatggaaggttcgtcagggatcagactgaagattttgcttttgtgagaacaaagtgaaatgtgacattcaggagcagctcggggcctatatataggggcccagggcctgctgggatggggttttacacttgggctgtccttttgcccttcccctgaactcttttcacttcagtcatgagcaaacagtcagtgcctgaactaacaaccctgtagtcctccgaagcacggctggcttacagtaccgaacaaagggagggagtgccgcgtgggccggcccaggccgaggaatgcggcttcagggttctgctccataaatttaaccagcacgacgaaaaggagataatatgagccttcgtgatgatctgaaagggggaggttctgtgtcccattgattgcggtctggcccaatgccaggcccaagcctgaccgacagttgaaccatatcattaaggcgtgtaatacagctcgagtcttgtactgccgccaatgagtgcatatccacagggcaaaagtttataaagagtcgaggctgtcctgtttaaccctctcacactgcatgtaatagaaccagctgccattcagaacttgcccatctgaggtcataaaggaaagcctgcacgtttcttttcttcaaacagcttttcaggactggggagaggaagaaacgctgtctagagagggtcaaggcacggtgatgtttctctctggagaagcaaagcagtctgcctccctccccccggccagaaacgggacaccttagtgctttcttcagagtagctctctgtttgtggtataatgttgctggaggaaacagggctgacaccacaggaaacctgcctgtctccaaggaggccgcatcggtggcagaggtgggtcagatgccggccgtggagtgctcttgtcaagcttgggatgatgccgttttccttccccatcacctcgaaagctgttaatagccttgctttctggccttccacagctacgcccaggtgctaaaacagagcaggtggaaggccgccccacggagtggcctgtgagcccagagttctcactgtccgaggccggtggccccatgggaactctgtccattcaatagggagggcatgtagaaataggcacattgtcacagcaaggcctggagtggcctgggttcttacagtgggcactgcattgaggaaatgggcagacaaacaaggatttagcataagtatagtcagaaagaaagggctgcctgtgttcaaaggacaaaaggaagaaagtgggcgaaggggtagtttagtcctgtccatcagccagtcacgttctttggccaaactcgggacctgcctgtgctttgtccatggtgtccaggaagaaatctgtgtctgtcacttccagattgctgcttgtctgcaatggacaatgcctcttaggcagacacctgctcgggatgacagtgctgcagaaattgatccaaaacattgactagcttgcatggtatcgctgtcattagtattcagtcttcacaaccaccctatgaggtgggtgctatactttccccattgtacagatgggaaagttgaggcacacaggggatacgtaacttgtctaagatctcagaggtagtaaggaagggtaccagaatgtggaccctggccaactgaacacagagtacatgctcctaatctctgtgctgcttctgggccatctctcggtccctcacatcgaaagacctcatgatttcaatccaaagcatctgaccaagtgttaggtctacttcctttcgattcttggatatgaagggtaggagcttaatatctgcctatagcccagaagatttgtgcaaagaccctggttcacttggagaggaggtactataaaatttggaccccacaatgcgaatgaagggtatgtattgaattccctcagcccaccagcttaacacagagacagtgtgagggatatactatagctgggaagcttggaagggctcatgttcaagggcctctttgggccaaacagcagtgggcctgagcatggagagaccctggccttttagtgccagtgcctagagaagcaggtcactaagctttgtgcccaggagctgtgctgtccctggtccatccctgtgtaccccattccactcctgaaataatgaactactgcagccttccaagttcacagtgtgccagtttgtcacagaatagcagtgacacttctctgctgcaacccatctttgctctgccatgctgccaagaccatcttcaccaggcggtaacctgggaactccagctggtacacagtacaagaagcctccgcagtagactgtcccaggtgcatgtgctcagtatgtcatagccatctccttttggaggccagggagagcttctgtttgggtgccacggatcctggacagaagctttctagaggtaggagaagagactaaatggctggccaacccagagattgttggattgtgttatgattccatggtcaaagtgctttaaaaacctagaaattggctctggtagtgagtcccaggatggagctaacttacgatctggactccattacatgattgctaatcctgaagttcagcaaacgttggtactggctgacttttaatggagtacctgtttgagggttctcctcatcatgtatttaaggttaaattgtataaaggaattctgctgctcttttgaaattttctggttctgtttaaccatacctaaaaatgccatgaggtagccagatgattgactaactgggatttatggaaattcttatctgcaaaaatctcaagacaaagagggcactaactagaaggttcccagtgctttatgtaacatgcagaaggaagtctggtctcagcttcttggatctgagcaatcctttggaaagggagcaatgaagagcagtaactgaagactcatttcctgccttctgtgtgactcactctcctttgtcaacttcaagtttgccctaggcctgcttgcttctctccaccccaaggaacttggtctttggaagacacaggcacctgccctctctgtctgccttttgcccccaggtccagagggagaaacaaaccctcagttggaggaaagtctagagcacaggctttgtgttgctcagagaagcatgacaggaagtggtgctgttgcctctgcattggccgactcctggctgcacctgcttttcccagaggcacggggaggcccaggcaggggcccagggcctgctgctgatcagtttgtcctgcttgcaagtctgcatcccagtacccaacggggccaagtagaaaaggcacatagtgtagtgtgagccgtagctgtcaccagatgggtctttcccctccgtgcccaaccccttccctgacctgaaagggcctagcctctttccccactggcttccaccaagttctaacacattttatatatatcgatttccaggcttgtagaggcaagacctacagtccaggagttcaaatggattcagtgttgttggttcttgtttcctagaaggacaagtgctctgaaggtttggtgtcaactctgacccaaggggtgtatctgatttttatgaaggcacagaaatgcacctgaggtgaccccaagtccttctcttttattttttgatttcccaccacctggatcattaattctgctttcaagggggatggggaaaggagaacatttcaaagcaaagttgatttggtctctgaaccagcttgtcttctaggctgtagttcaccctgatgagaatcagaaaggacagtctgtaaaccccttcactctagtgactctgcagctggggagcctcaaaaccagttccagatgttctctctccctatattggccagaagggaatttcgggcaagcaaggaggcagagagcttttgcccattcattgagtacccctgtctgcaaactgtgtcttgcttcatggcactttagggagagtgctgagcacctgggtccatttgggaccagccagcccttcctgttcctcggttagaggcatgctgctccaagctggctggttactgcaagcaagagaagcccgccttcctgctgttcagggtcagaaagcaagaccgtgctggagaagtaagtcaggcaggctaggaaggagacctgcagatgacccttgggttaacaaagcaactttcacggccctgttcaccaccagctaggatagtacagggctttgcctcccaatcttgggagacgaggcatagatagtaatggtcaactgatggccctttactcttgagaaactccacccagcctccccttatccagaagaaagccattcctgactaagcctggccattctgacgccttctttcttagtctgcacccagcctgtgctgtatgcggtatatgatggtagaaatttgcactcttcatgctttgattttaaatgcatattagacattttggcatttgtgcctgaatgctctctgtatcatcttttttaaaacatagtttgattatgtaagttaaagaatgtacaaatgtaaacttctgaaaatacatacaatatatgatttcttagagtgtatggacactgctccagaggccttgcatgaattatctctttaatccttacaaaacgaatgtgatgggtactattattcccacttcaaagaagaaaataaaaaggacttattctccctgggcattgacaagcaaagagattaataatggtaaccccaccagacatctctatgggtatatatgtgtatatacactagtatacatatatgtatacatagtatacatatatgtatacatagtatacatatatatatactagtatatatatatgatttgacatgaatgggagtacatatgttgatgtctaatctttttcactccacaatggtgctagaacgtctttccattccaaaaatcatttttaacatttacataatattataatacaaatattccataagctacttaactagttccccattgatggatgtttttaatttgttgctgttgtaagcatcctctacatatatcccatcttacttgaataattctctccttaggctaaagtcctaaaactatgattgctggatttaagggtgtgtatattttctgctttgaaacacattgtgaattgccttctagggagttgaaacaatttgtactcccacccacagtgtgtgagaggactgactcctccagccgtgtaccagctctggctattcattcattcagaattcagtcaagaattacatgaagtagctgcagtgtgccagatactgtactcagaaccaggcattgttactcttttaagtctttgccaatctgaaagagtgagtatctgtgttactacttgcatttctttgagaattagaagcgttgaaacatcttttcgtgtttcagttggccatttggatttttcttcttttgtgaattacattgcgtattctttgcttcaatctttttaaacccgttaaggtcagaatttgtctttttagtgtgtggtttttttttaattcttatctagtgttggtctaacccttccaacagttgtcatttagccagtttgtcatccatgtaagtacatatctttcttccagatattaacaaagtttatatcagtctcttggtgaattccgttcctgtaagttagaatctgcatcatgactttataaaagaccatcactgtgcctacagttctttaggaatcgctttggcattaagaatgaggcttcagccaggcacggtggctcacgcctgtaatcccagcactttgggaggccgaggtgggcggatcacgaggtcaggagttcgagaccagcctgaccaacatggtgaaaccccgtctctactaaaaatacaaaaattacctgggtgtggtggcgcacccctgtaatcccagctactcaggaggctgaggcaggagaatcacttgaacccgggatgtggaggttgcagtgagccgagatggtgccactgcactccagctgggcaacagagtgggactccctctcaaaaaaaaaaaaataaaaataagaatgaggcttcagccagatgtttttggattatatgtggcgtggcctattacatggtttttatttttgtttcctcctatttcttagtatttctttccaccagttcctgttgtaaaacgtgaccagttggtactgatgctgtacatccttgtattagtaaaaatcctgctgtgcctggaggcagggacctgcttgggccaggccttcccaggaagcccgtcctaccctctgtagcatatagtgccggaccaccccagcgctcccacttacctccttcactctttcattgttgatacatgggctaggtttcctacagagtcacttcaaggatgtagatcttatcctcccaattggattgtgagtttgttgttattgccttttttggtattcctcaaggatgttcagaatacctcacatagtgatggactcagagtacctattaaagagattttcattaaaatcacaccattcagtaagttgaccaagtacatcaagagagtcagaaagacccaagatctagtttggctttgccaggcatagcttcctcatccataaaatgaaatactagtaagatacttccttatgtgaatcttgggaggctcggagtgtccagtacacattcagcactcagtcagtgcagctgtagagacatagcgtggaccttggtggcccagcagtctcaatcctggtttcttctgacctaagattggtgggaaagtacagataaaagctggttgaggaggtgttgatagcacagagtgtttttacggagtgtcctcggagggttacatgctcctttttgttgaatccgaatctttttttttttctaatatggagcctcataatcattcaaggactcagtgtgatgccacaggtttcaaacttgccagttcgtctcttatgttctgccaattttttaaaagtgggaatatgagtgcatgtgcacgtgtacacacacgtgtgtgtgtgtgtgtctttgtgtatgtaaaatgcttgggataaaaaaagatggatcaaattttgtctggcatggcatagcaactctcacctctagtatcctctaaacatttaaccaaatggactttaactggtttacttcaattctatttttattttcgtagtcatttaaatgtatggggagccaactctttcaaatgagacattttgtcattaaaacatgttatttagtttaaccgcatgggcccggcttcagcaacattgaggactgtgaagagggttctgagcggctgttctctcctgacctgaccgcagcagtgacccaccagcttgcaatgcacgcaaactgaaacaggcaggatggccagcccagggttgtctgcacggtggtcttggcatctgtaccttaggttgccagctcctggccctccttgcctgcatttggtggcccttggccctgccgtgtcatatggcacaagagcccttctggcccgcatcaccctgtgtactgattaggcaggaatcagcaaatccgttgagtgcatgtttaatgtgacacagatgtgggacatactacagatctttctgctttacaaattttcagctttttgcatttcatcagtgttgcttattatttacagaatgtaacttgagacatcagaacagattgtaatttttaaaaaggttgttgggggggtgggcccgcaggggatctgggagaaaaaatccagtagtgtggaatgttgtttgctgtccagaccaaacaaaccagtttgccaagggttgatggactatgacaatcagtccaattcatgttaacactgggggcacttaattaaaaggcagcttgacctccttatcaccaaataaagaataatcttttgttaccaggttgaccgtcgcagcaccaggcagaaatgtaccccttgtagaggcactgaagggtaccaccaagctgccagctcgtgtcctgcctccttcctgtccacagagaaaggcaccattgaacccagtccccactcagacatgtggatattcttgcctcatgcctgctgtggctttacacccaggcgctatggcaagaggcggaaaaaagaaatctcttcctttgcccaaaaatccaagatactcttgagggcattggaatgatgagccaggccagtttgacacaagttcaaggagaaggtaccatctcttgcttctagaggggcacatctggctagaggtggccctggcttctgagaaagctcagccataggttacatttaagggcaaacaatgaaaagcaccagctggtcgggaggaagatgaggaggagtgggtgattggttgcttctttcctgtgtctagttctaaagaacttaaaacttgggtccaaaataatgagagccgtgttgtaaaaatcatttgaagagagttctcctggggaatgtgagctagtgccgtgacctgatcccttggtcagatggttctgagctgtttaagtgctgagtgtcaactgtctacagggagccaggcccctgaggagcggccagggttccaagccccactgttcttttccttcctggaaaagtgcagacggtgcacgttccccggaggccaccaggcagctctccagttgccctctgggtgaacgtgacccaggtcggtaactttctagtgtcccccccacgttggaatgatcagcattcctgtactccaggggttcttgagttcttgagttgttaccaacgccctgcctttctctggctcagattcagaggaggagttccactgcggactgccgcttcttcaccctctgggcttcggaagcagcacctctggctcccctgcacccagtcctcagtcttgtggccctggtctgcccctttatcacatgtcttgagcaccctctcagcacacagcaccgttctgagcgctgaggtgcgaccatgcatagaagagacaagaatccctggttccgcatggcttccctcaacacctacgtttccaggccatggcttgggttcagaagaatcaccctccctggaagagatgagtgactggaaggagagcatgtcactggctcccctgagaccctcccaagagcctcagtttctccctctaccacctgaagtctaactgcagggcctgaaacagattctctttaaaaacccatgagtgtggtgactgcataggttttcattctcctgagttcttaatttccgtgtccctagcactttttgaagcatctgctcctgttgcccctttcttttcctcctcaccctcctccatagtctctgtttgatagtagaaggagatttaaaacctccaggctgagtgaacaggcggtcttgaaaaagcaaacaaatcgggtcaggcacggtggctcacgcctgtaatccccagcactttgggaggccgaggtgggcggatcacaaggtcaggagttcgagaccagcctggccaatatggtgaaaccccgtctctactaaaaatacaaaaaaattagccgggcatggtgccgtatacctgtaatcccagctacttgggaggctgaggcaggagaattgcttgaacccaggaggtggaggttgcagtgagccgagatcacaccactacactgcagcctgggcgacagagcgagattccatctcaaaaaaaaaaaaaaagcaaacaaatcacaaagcaggtcccctctgggggctggagcatcctcatatctgcttggctttggtcactgaaagaggccctgggggagggggcttcagggcttcccaggggagaggtgacagttaggacacacgcctcccccacttcagtcaaggcagcttcattgtcagcggttgtacgtactaagattgtgttacaaacttcatttgcagaaagtgttttacccctgaaatttttttttgaaagcgcctgctgtgagttttattaatggcacttttctaaaacttcattaatttcaattatgagaatttgatatctggtgtaattcattgagctgctagtttgatttgctctagctcgttttaaaaagctctgtcaggcaacaggatatggatgggagtgggtcaggtgagtgaaaacgttttaagcactcctttcttcagaaaacacctctgtacccacatggggtgtgctcctcaggagtcattcagacaggtccagg

SEQ ID NO: 2309 - DNA, 964 bp, Homo sapiens
actaatgcagattttttttttttaagttttagagagattcatgggattttattctttttcccaaaggcagtggtggagctgacagagtagcatggagcctcgtcctgatgtattgtgcggaagtggcagcagttcacattcattcagtttgtcagcataggatcagttccttcttgactcaactctctgtgatcaaaataagctattggatgttccctttgggtactggaagcagcttggccccttggcaagagaacaggattgcaaatcacaagagcagagccctgactccagctctgatgctactgtgctttgtgaccttgtgcagacagctttatatccccatctcaggtcattctcccccatacaaagggggagagggtcatccttgccctggtcatgtctgcatggctgaggtgaataactagttgtgtaacttcctggaggagtggcacagaggaagctcccttcctagggctggctctgccatcagggaggaagctggatattagaatgaagaaaaagcccatgcagaatatatggcagcccgataatggattctaaaaataaaaaagcactaggttaatctgcagctgtagtgtacctaaagtattctttggcaggttgtggccctagcctaatccccagctggacttagcaccatttaagtgagttacatctcatccccgcaagggattgagtctgtagccaatttggccttgtcaccacttcagccctccctctgatttcacctttgggaaaactacaaagtggccccagacatacatagcaggcttgatcacatgggtggagtctgtcaggacagcatacatcaaataaaatgtccagggaacctgttgtaaataaaccacttcccgcatgctcagtcatcgtggaggtacttgaatgtttagtttcttttagctgatggccaagaaatcaatgtttaaaaaaaaaaaaacaa

SEQ ID NO: 2310 - DNA, 274 bp, Homo sapiens
ttttttttgagatggagtctcgctctgtcacccaggctggagtgcagtggcgcgatgtcggctcactgcaagctcagcctcccgggttcaggccgttctcctgcctcagcctcctgagtagctgggactacaggtacctgcaaccacgcccggccaattttttgtatttttagtagagacggggtttcactacgttagccaggatggtctcaatctcctgacctcgtgatccgcccgcctcagcctcccaaagtgctgggattacaggcgtgag

SEQ ID NO: 2311 - DNA, 7927 bp, Homo sapiens
ttttttttttagtctgtttatctgaagagaaatttgatcttcaagggtcaaatgtgtatgtttttcaggtagttcttccaacgtttattcttgaaagaagatctcttttagaaatgtatgcagacttttttgcacatccggacctgtttgtgaggtatttgactgaacatggtagtttccaacgtttacagatgttactcagcagctttctgccttttattttgcaggatagatggattccttgtcacctttcaaacatttctgggtattctgtggtattgaataatgtgtttacactggttgcctgtttgcttaaagttatatggtggcgatgttaggcaaccaagtttaacactttaaaaaattctcaagagcccgttaataggtagccaatattcacaaggccaatggtataagtttatttaatccaggcactggcaatcactgtcaaattatttgtactatatcctaatgaagcttaattttctgagttcagcaaacctttccaaagcacctgttgtttgctaggcactttcttacaagttggagaaaggaaaagtcatgtctgcccttgagcttacaatatagtatccaaattatagatgatttataaattttaaatataaagcttgcaatattatatatgtgtatatgtatgagatagaagtaatgtaaaggtgaaattgatttacaaggaggtgagttcacattgcctttcgctggtagcaggaaatttttttgtaatggggaatgttgttagttcgtcttctctgcattccttagtctcagactgtggtttactgaagctagatacatatcactgaagtttcttgctgggtggatacattggctgacattgataaatatatattttttttttcttgatgaagatttaaaagaataaccaattccccaaaggcagaaatttaaataaatatggcagtgtttaaattaacagataatttaagaagtaaaatttaagcatttattagtaacgtgtaagcaaaaatggaacgtaccagttgttcattgggtatagatttgagatttaagggtagtttttatgtgtgagaatttaaactttgaggcccccagaactatttacaggccagttgcagtggctcatgcctgtaatcccagcactttgggaggccaaagtagaaggattgcttgaagccaggagtttgagaccagccagggcaacacagcacaaccctgtccctacaaaaaaaaatttttaataataagccaggcttggtggtgtgcacctgtagttccagctacttgggaggctaaggcaggagggtcatgcagtcccagcaatttgaggctgggactgtgagctataatcacaccactgcagcttgggtgacagagcaagaccctgtcttaaaaaaaataaaagtacagttcaaaagccagtagataagattaaacggaatcatacaaatactccattaattctaagaaaggagaaaaggagaaataatggcatgaacaaggaacaaagggggcatgtagaaaacctattaaaatggtagagttaatcccaactatatcaacagttaccactccatttaatgtcagactggattaaaaaagcaggatttatctatatgatattttcaagagagaaactttaaagacactggttaaaagtaaaaggatggaaaatgagatactatgcaaaacactaaacatagcaaaaactggtgtatctgtataagtatcaaaggagacttttaagacaagaaatattattagagacaaataggaatattttgtaatgataaaagcatctatttatcaagaataaataatactcctaaatatgtatgtacctaataacacagcttcaaaatacatgcagcaacaaaaattgactaaaaagagaaatagccaagtccacaaattcatccgtcagggtctcatgaagcaagtagcctctgccttcaccacctccccgcccccccaaaaaatcaggaaggctatagaagatttaaacagcatatcaaatcaacttgacccagttggcctttctaaacactacccaacaattgtataacacagagtcttttccaggtgcatgtgaaatgtttatcaagatagaacatatatagggaagtcttaataaatttaaaataattggaatcatacagggtgtatattctacacccatgaattaaattagtaattgataacatacagaaaatctccaattatttggcaattaagcaatgcacttacatggacttaatctatgatactagaaaccagaagcagtgtttgcctcagagtaagtaagatgtggcgattgtttggaaagggagatatggaaactttctggattaatggaaatattctgttttttgattaagtgacgattaattaaatagatatatacgtttgtcaaatcctcaagcaaaacactaagacccaggcacatagaccaatggaacagaatagagaacccagaaataaagccaaatacagccaactgatctttgacaaagcaaacaaaaacataaagtgggaaaaggacacccttctcaacaaatggtgctgggataactagcaagccacatgtagaagaatgaaattggatccacatcactcaccttatacaaaaatcaactcaacatatatcagagacttaaatctaagacctaaaatcataaaaattctagaagataacattggaaaaacttctggacattggcctaggcaaagactttatgaccaataatccaaaagtgaatgcaacaaagataaatagatggaacttagtcaaattaaaaagtttctgcacagcaaaagaaataacagagtaaacagacaacccagagagtaggagaaaatattcgcaaactatgcatctggcaaaggactaatatccagaatctacaaggaactcaaacagatcaggaagaaaaaaaaacaaaaacaaaaacaaataatcccatcaaaaagtgggctaaggacatgaatagacaattatcaaaagaagataatgataataaaataaatggttggccgggcgcggtggctcacacctgtaatcccagcattttgggaggccaaggcaggtggatcacgaggtcaggagagtgagaccatcctggctaacacagtgaaaccccgtctctactaaaaatacaaaaaaattagctgggcgtggtggcaggtgcctgtagtcccagctactggggaggctgaggcaggagaatggcgtgaacccggcaggtggagcttgcagtgagccaagatcgcgccactgcactccagcctggacaacagagcgagactccatctcaaaaagaaaaaaaaaaaaaaggccaacaaacatgaaaaaatgctcaacatcactaattatcagggaaatgcaaatcaaaaccacaatgcaataataccaccttactcctgcaagaatggccatattaaaaaaaaaaaaaatagatgttgatgtggatatggtggaaagggaacacttttacactgctggtgggaatgtaaactagtacaaccactatggaaaacagaatagagatgccgtaaagaactgaaagtagatccaccatttgattcagcagtcccactcctgggtatttactcagaggaaaagaagtcattatatgaaaaagacacatgcacacacatgtttatagcagcacaatttgcaattgcaaaaatggaactagcccaaatgcccatcaatcaacaagcaaataaagaaaacgtggcatatatatactgtggaatgctactcagccataaaaaggaacgaaataatggcattcacagcaatctagatggagttggaaaccattatgctaaatgaagagactcaggaatgaaaaaccaagctggtggcaagcacctgtaatcccagctactcgggaggctgaggcagagaattgcttgaacctgggaggtgaggttacagtgagccgagatcacgccactgcactccagcctgggtgacagagcgagactccgtctcaaaaagaaagaatgatacagtggactttggggcttcaaggggaagggtgggaggggtgtgaaggataaaagactacacattggatatagtgtacactgcttgggtgatgggtgcaccaaaatctcagaaatcaccactgaagaagttatccatgtaaccaaacacaccacctgttccccaaaaacctgttgaaattaaaaaaaaaagaaaaaaccactaagaccaatgcatttaattatatatattatactcaattttaaaatgaaactgtaagctaactcctggtcctaggtcctcagtcctctcagcctgacttaggtggaccatgctgggggttgttgcatcatcttgtcttgtaccagaaagcaggacattaaattttgtctttctcccttgcagcattagtgaccagaaggatcccaaggatcgaatggttcaggttgtgaaatggtacctctcagcctttcatgcgggaaggaaaggatcagttgccaaaaagccatacaatcccattttgggcgagatttttcagtgtcattggacattaccaaatgatactgaagagaacacagtgagttctgcattgacatttttaaattatcttaattgtatactgattcaagattttatttaggggcaaataataatgatgaaagcaatgatcaaaagatggtcaccacccatagaagaaattgttgttagagcagcatagtttgaatgtagtgagaaggaggaaaaagagtaggatgagatgaggatggggatgtagaaatcagatcttgcaaggtcttgtagaccataatataattttatggcttttcaggatctcatttttgttttgagaagatcaatagaatgattttgtgaaaaataaattgagaaggggcaaatatagaagcatgaagaccattgtggaggttttgacattattccaagagagacatggtgattcaagctttattttggaggtagaactgattgatggattgggggaggtaagggaaaggagacatcagagatgaatccttgcatgtggatgtaagcagtggcagtgtcatttactgataaggaaaagattggatttggggagggaaaaatcaaaagctaatataaaatataaagttttagaggtctgtgaagctgtcaagtagggagatggaatttaagagtgtggagtttagggagaggtctgagatggggatggggctttcaaagagtatagtgtatttagatgacattttaaagctctaggattggataaaattatttaggaagacagcatagctacagaagagtaggtaacccagaactggctctgaggctccaacaaatttagtggttgaagaaaatgaccagcagggaagactcaaatgcatgtaaaaaggctttaagaagtaaaaaaaacaaaaccatagcccacagcacctgacacataataatctgtcagtaaacatgattctccatatatttccctctccaagtgatgcactacgtatagtccatactgaagacagacaagtatgtgtctgttcttattcatttggcagacattgataagtgcctactcttgtcagccctgaatgaggcacacaatccttgcctttaagaatgtcttagtctagtcagggagactgacacaaagcaattaaaatattgtagttaagttctacaatagaaatatatatatagggtgcttggtgtgtgtagagcgagcagagaccccaattaccagattctctgaaatgtcatttgtgttttctcatcaaaagaaaattatgttatatttgcttgcaggaactagtttcagaaggaccagttccctgggtttccaaaaacagtgtaacatttgtggctgagcaggtttcccatcatccacccagtaagttacagagctcctctgcaacctgtgctctcaaaactattctgtctaaagagggtcattaaaagcgccatagctgagggtactgtcagttgtgtgactagctgtgtgtttcttattccctgaagtggaaactcaagttgatttgttcctcatatcttttccttttgtaagctccagactcttagcttcacaaattaagtgcgtataaaaagaagggatttaggaaaccaacttttaatgcttccagagtcatcttatatatagtaatttgtgctgtagagacctcagcaactgtgagacagtttatataagtgatacgtagtttctacacagtatattcctggcatactgcagataccaaaaccgaggatgctgaagtctcttacataaaatggtgtcttttatattcatataacctatgcacaccctcctgtatacttgagtcatctctagattacttataatacctaatacaatgtaaatgctatgtaaatagttgtttcactatttatttgtattatttttatttttggattttaaattttttcttttgagacagggtcttgctctgtcccccagggtggaatgcagtggcacaatcatagctcactgcagcctcctgggctcacatgatcctcccacctcagcctcccagttagctgggactatggacatgtgccaccacacccaactaattttcttatttttttttttttttttttagagtcagtgtatcactatgttgcccaggctggtctcaaattcctggccccaagtgatcctcccgtcttggcctcccaaagtactgggattgcaggcgttagccactgagcccagcctctgtatattttagatccacagttggctgaatctgtgggtacaaaacccatggatatggagggtcaactgtacataccctcaacatctggtttgtttagtgcagtattaaaactggaaacactggctgggcctaggttggggctggagcctgggtgtacttgcagaccagaacagatagcccttttggttttaagcttcctgggttggccacagcatcatttcagggatgatcctgcccacgtggctctgaatgaatgcttgcattggggaaaagggtataaaaggcaggtaggtacctcctggcgtaattggaggctgtttgaagggtaaaggatttccccatgaagccaattatttccccaggttatgtgattttggagaggtggctgtaggtatatataatctactaattgaaaatttctattcagtttcagccttttatgctgagtgttttaacaagaagatacaattcaatgctcatatctggaccaaatcaaaattccttgggatgtcaattggggtgcacaacatagggcagggtaagtgtgttggcattgggtggactacaatgttataggagaattttatgaaaatggctagactagatgtcattgttagcaactaagcattggtattgggggtgagagcaaagggtggggaactagataggttatccctaaattgaatggagtatcctggagtaaccatcagctcgacaagaaagccttgtggccacttggcactactcatcagagattctgtcccttctctccacaggctgtgtctcatgtctagactatgatgaacattacattctcacattccccaatggctatggaaggcaagtgtgtccatttcctctgatcagcagtagactctgctgttccttgagacatgccccttccccctcttcctcttaactgtcaaccttacctaaaaacttttgattttgcaggtctatcctcacagtgccctgggtggaattaggaggagaatgcaatattaattgttccaaaacaggctatagtgcaaatatcatcttccacactaaacccttctatgggggcaagaagcacagaattactgccgagattttgtaggtattttttctgccttagagctcttatgcttttctgaaataactgccttttgtcttgaactacagcttctggattaggagtgtgaaagaatggttctgtctttgt

SEQ ID NO: 2312 - DNA, 709 bp, Homo sapiens
tcgagtagctgggactacgggtgtgcgccaccacactcaggtaatttttgtatttttagtagagacggggtttcactgtgttggccaggctggtctcgaactcctgacctcgggtgatccacccacctcagcctcccaaagtgctgggattataggcacaagccagtatgcccagcctccaccacagcttttaacataggaccttgaatatagtggatatgtagttattactaaatgttaagaaatttttgcttactctggggtgttctacttcgtaatgaataattgataatctgatactcatttcaaaaactcttctcccattcccattctctaatgaaattcttctctttttttcattggttaatcatctttctcatgtcttcccgtattccagtttgttggttcccagtctgtattcttttcttctttttgtttattcctttaattgctcatttaaaagtttcttactgtgtaaatagtagtgagagcgcgagtgtgaataaaacttaattcttggattgtaggtgctcatcatgtatttcctatacacttgtctaatgatgatagagcaacagcagtagaaagtgcacacacgccccaaactcagatccagtttgaattccacattaataatgggacaattaatagtgggacgctgagcttcatatttcttcactgtaataatttcttcatcatagggctattg

SEQ ID NO: 2313 - DNA, 462 bp, Homo sapiens
gaaaaagtgaagaaaacatatggaagatgttaccaggaaggaaaccaagcaatgaggatcaatgaattcaagaagtgcctacaaacgctttggagaacagagggatttttaaaagggataaactcagaggatgataagaccggatagatgtgacaagaggacttcttcaaaaccactatttctagtgcttgaagacatttattaaataacataaacccaaagaagcttgccttacataagctctttatgctgtttgggtagaaaaaatctcgcaaactaaatccaagtttgaaaatgcaaaactactgaatcagttcaaacctaattattatttcaagtcaccactgtacctactacaagcccctcacaaatcatgccagattaaacacctcaggccctcaaatttctatgccttcaaatcactattcagaagctgtgcttttcctcctagttaaataaatg

SEQ ID NO: 2314 - DNA, 576 bp, Homo sapiens
ttttttcttttaatgtaagttaattttgtaatgcttgtgctgcaagtaatacaggaaatatgttctttgttttatacttgattaggtagttcagctacaggaatggatgattaaaagcatcaataataatactgctatatgtgtagaaggaaaattgatgtaagtatactatttcattattcttttaataaaactttagttatgtgtaagcacttaagagttaatgcatgagaaatagcatcctccacaaagcaaagacctaacaaggttatgaactgaaggcaaaaaagtaaaattactgtgcaggtcctagccatgttgattgctaccagctttcttgtttttgcatgtttactcaagtttttcttaaaataatgacagttcaaatttgtatagtggtttatttttttctgaggtgctaataagtggactggtattatctgcttaattatatatgatcagttaatatttactacatgcatttcagtccagattctcacatctaaattgggacaaccagatataaattactgatccagaaaaggaatcaaaattacttaaaactttccatacggc

SEQ ID NO: 2315 - DNA, 577 bp, Homo sapiens
ttttttcttttaatgtaagttaattttgtaatgcttgtgctgcaagtaatacaggaaatatgttctttgttttatacttgattaggtagttcagctacaggaatggatgattaaaagcatcaataataatactgctatatgtgtagaaggaaaattgatgtaagtatactatttcattattcttttaataaaactttagttatgtgtaagcacttaagagttaatgcatgagaaatagcatcctccacaaagcaaagacctaacaaggttatgaactgaaggcaaaaaagtaaaattactgtgcaggtcctagccatgttgattgctaccagctttcttgtttttgcatgtttactcaagtttttcttaaaataatgacagttcaaatttgtatagtggtttatttttttctgaggtgctaataagtggactggtattatctgcttaattatatatgatcagttaatatttactacatgcatttcagtccagattctcacatctaaattgggacaaccagatataaattactgatccagaaaaggaatcaaaattacttaaaactttgccatacggc

SEQ ID NO: 2316 - DNA, 374 bp, Homo sapiens
aaagactgtcccattttaatgtcttttcctgactcagtataaaactaccactggagaatttgtttttatttgtaaatgtgtaactttacatataaagtaaattgccactcaaattattccataaattttgactttttttctcatcagaagtagttcaatcttaaattttatgaaatttatattcaagaatttctttgcatagattgtcataaaatgttttccattagaatgatattttacttgtagtaagataataaagagttctctgagctattcagatgtttactttggaataaaatactgttaaatctagattaccagcagttacctttttagtttgtagaaaattggaatacaggtctaaactttacaaa

SEQ ID NO: 2317 - DNA, 18860 bp, Homo sapiens
ttaggactatatcaggcaacgtttatatattaaaaggcatgatagaccaaatttccatgaaagaagcaggtaaatgactgtcattattgataagttattttaagaagtaaagcagttaaccatgtttctcacagtaatacacatttttttaacttttaattaggtatttttaaattatgaataaatcaaaacaactgatattatataaaactggtaattttttttctgatttttatcactcttattgacaatttctaataagttatgtgtttttgtttttttttttttttttggaaatggagtcttgctctgtcacccaggctggagtgcagtggcacgatctcggctaactgcaacctccatctccggggttcaagtgattgtcctgcctcagcctcctgagtagccgggactaaggtgcctgccaccacacccaactaatttttgtatttttagtagagacgggtttcaccaggctggtcctgtgcatgaccacttccaacatggcacaaaaaaatgatgcaatagcaactgcaggtagctgtggataaataagcctggaacaacatcgtggtttcctgtggccagtccttttcatgcacaggatccacatatgcccccagggaatggatacagaagtgttaagaggcttggggttgtttttttttttttttggagatggagtcttgctctgttgcccaggctggagtgtagtggcgtgatctcagctcactgcaacctccacctcctaagttcaagcgattattcatgcctcagcctcccgagtagctgggactacaggattgtgccacagtgcacagctgatttttgagacagggtgtcaccatgttggccaggctggtcttgaacttgtgacctcatgtgatctgcccacctcagcctcccaaagtgttgggattactggcatgagccactgtgcccagcctaatttgtgtgagttttaaaatatcaaatgaaatactccttatttacaaggaattatgttataagaatatcatttaactccctgattcctctctttgttgaacccacctggcaccaccccagtcctggtgtaacctaattttccacctatgccttgcacacagctgaatataactggagaaaaacacatccaagtagtctaaatttatgtttactagcaacaagttacagtcccttagtggtttcttggtgctgcttggtatcctaccatatttccctaattcattcactctcccaaccttcctgatgactccttcatattttgacaaatctccaatacctcctcctttttaccctctctcagatgggcaaagtaggggagagggcagagcacctgagcaagaggaacaatcaggatatttctttaccacatctactcacctgcttggattaacacctgcttttattatggatgaactagcacgttactgtctatgtcagcctctccatttgtacactagctctcattttctcttttactcaaggatgttattccagtaacactcccttctcctttttttttttatttctcttttaaccacatttctccttttagccagtattgctctcatttatagcaaaacaattcatatagtttgtttacatttacttctgtaaatctaatttctcttgaattttctttttttttttcttgaattctctttaacctccagttcttcaccaaaacaacctgtatcaaagtcaccagtggcctccacattgctacattcagtatacactttgaacagagttaatcatacttacctttttgaaatactttacttagcttctctaataccatattccaatttttatgctgcctgactgcctcttccttcttagtttctttgtgtatttctccattttttctaataatggggtagcttggggctctttcttttaatacactgcgtggtatgctgattccttttagtcattaaatataatttatatgatgatgaatgccaattttatatctcaaaccaagacctctccccttagtacccaattcattttccacctgcttatttgacatctccactaggatgtctgtaggcatttcaaacttaataaatctaaaacctgatcttctcccttaaatttgcttaacctatattcttccccatctttccatgtgtccagtagccagaattcttggaggcatccttaaattctcagtttctctcatacccacatcagtgtgtgtgtgtcagtacatcctattaatatatctccaaaatatatcccaaactcagacctctgcagcatcactgtagtccagactttcctcataatttgtttgtatcattacagtggcctcctaactggtctcattctttcttcccttgctcttccacaggttcttctcaaaatagcagtttgctttagcagtccagttaaagtaaattagatcctgtagctcctctgcttggaatctttccatagcttctcatcttgtccaaagtaaatggtcagttctataaaatgactctaaggccttatattataatctctcatgcttcctactgcctctgttacccatctgagtggcctcccaagttctaaccccctcctcatgccacttcaagtatactggactcctaattgtttcaaacaggccaggtatactcttgcctttccctttatgttttgtttccagtattctaacccaatattgccacatagctcaatcactttgttcaaatgatgctatttcattgaagacttccctgattatccttttttaaattgctgttcacccctttactcccccatggacatatcgatacacctgtccaccgtccctgcatagccatctaacaaacaagatattgtacttattggttagctacttttttccacattagaagccaagttccatgaggataggagtttttgtctgctttgtttactgccgaattctgaatatctataatagtacctggcacatattaagcaataggtgcatatttcttgaatgatgtaatgaattaatgatatctgtttaaaattctaggcttttaaatactttttgttgttgtttatccttaaataggatatccaaattatctcataaggaaatttatgtttggatttccagaaaattggaaagagcacattgataattttctggaacaattaaggtaaaatgttgttttatgtttttagaagtcaactttattgagatataatttacatttaattatgtgtgtgccaccatgtccagctaatttttgtatttttaatagagatggggtttcgtcatgttggccagactggtctcgaactcctggctacaagtgatccgcctgtctcagcctcccaaagtgttgggattacaggcatgagccactgtgcctggcctgaggtacaatttacatttaattaagtgcacctgttttaggtatttgtttgaaatgccagtttttttgttgttgttttttttttttttttttttttgagatggaatctggctctgtcgcccaggctggagtgcagtggcgcgatctcagctcattgcaagctccgcctctggggttcacgccattctcctgcctcagcctcccgagtagctgggactacaggcgcccgccaccacacctggctaatttttttgtatttttagtagagacagggtttcaccatgttagccaggatggtctcgatctcctgacctcctgatccacccaccttggcctcccaaagtgctgggattataggcgtgagaaaccgcgcccgcctgaaatgccagttttggagtttgctttggtctgtgaagcatttcagaagcaataacattttactagaacttctgttgtatttagtaaatctcaaaggaaaataaaacttttgacatatgtcaaagagtaattctaatcatttacccttcagaaggcatgcagttattaaatactaatgtgcagttcttcctcctttttttttcattcattttctcagtagttatggagtgtctgctactttacagacactatagttgatgctggtgaaagacagaagaatttgatttattcttgcccttgtggagctcataggggatacggactttaaacttaatcacagcacaaatataataactggtaacgggggctggcagtttttttctgtaaagggcatattctgtaaagataatattcttgcaggcatattgcccctattgcagctattcaactctgcctttgtagcagaagagcagccgtagataatatatacatgaattagcatggcagtgttttaataaacttcatttacaaaaacaggcaactggcagttgtcctgtagttttcctataatatcagtttaagtaggaattataagagcatatagtaggaagcagtttggagatcatatttgagtcctctgacttaagatgttacacctcagttctttgtgaaggaagggagtgaaagccatgaaggattaataatgtaagattaaagataccctgcctgggtggaaagagctttatgtgaggggtttttatttatttatgaagattttttttgttttgtttttttgagaatcagtattaaggaaaaataaaataattgtttttaaagggctggtgaaaagaacagggaaaagaccaaacaaaaacagaaaactggaagatctgtccgtgacataaggaaatcaatgaaaaatgatgcacgagaaaaccaaacagatactgctcaaagagccaccaccacttacgattttgattgtgataatttgggtatgttttgtctttacttctctgttggtacagtggttaagttcttacatggtctacattgtttatggtttataatgtgtatagtagtaatgtgtatagtatagtattctttgacttatactgcccccacattcctgcttcttcactactatatgagaagtaactataatacagattaatcatggtcaggattcagcttgcttcatcaaataccacctttgcctgggcccagtgacttatgcctgtaatcccagcactttgggaggctgaagcgcaaggatcgcttgagctcaagagtttgagaccagcctggataacatgacgagaccctgtctctactaaaagtcaaaaaaattagccacacatggtagtgcatgcttgtgttcccatcttcttgagaggctaaggtgggaggatcgcttgagctcagatggttgaggctgtaatgaaccatgtttgtgctacaacactccagtttgggcatcagagtgaggcactgtctcaaaaaataataataataataattacctttttattaatcagaataccaaagaacactggtaaacaaattaatgaaagatgattgttcttttaatttccttgacccaaagtatttaagctgccaacctaccgcaaacctgttgtaaagacatatattatttttgtactaaatttcattcctacggataggcaaaatctgtttcctttcatggaagaaatggaattcaagaaaatgcttttcttgaatgaccattgctgtaacgacagattgcagaactgttctttttttcctctctcttttttaataaggagaccaacttgccagagcagaactgttctgtatcagctctttgccaacactataatctgcttcacttgtataaaaatgtatgaacattaacttacagctctttctaaacaatatagatgagtaaaagttactaaaatatgttgtaaacatttctgctgattttgccttaaacttgtaactaagagctttacagaacttccaaaacttgaaagagttcaggaatccttctgccaaaaacatagcaccatactggatataaatgtacctgtatcctattctaaccactccccaacccgcatttgaacttccacccttgaaactttgcttatcctttctaatgcagagaaaggaatacgttaaatatgtagatgactgcttccccagagctagcaaaaagtcacttaccattgccctagttccttctcaacccttcctctttttatcaaaagtcatcctattttctctaaattaggcatattgcctatttttattgctggagcatcttgagtatgctggaaccttggggcttcggcacctgctctctacttttttactcctaaaacaagaaaatccttgacagtatatctcacttttaatcatttgttggtctttagtcttggttcttacctcttcctgtaccccatttcacttagagccagcacttattagggatttgatcttaattgcaaatattatcagtaaagtgtttaagaaagctattgacaagagaaatgaatacaaatttaaaagactaaagtttggtaaactattttacataccagctgtgtccataggaaaatcactcagcaattttttttttttttttgagacagggtcttgctctgtctcccaggctggaatatagtggtgcaatcatggctcactgcagcctcaacctccttggttcaagcaatcctcccacctcagcctccaaagtagctgggactacaggcatacagtactgcacttggcttgttttttatttcttgtagagatgggatcctactatgttgccaggctggtctcctactcctggcctcaagcagtcctcccaccttggcctcccaaagtgctgggattatagacatgaaacatggcacctggtgtcaacatttttaaagtgctttccatgaaccctggtctattaagttttaggaacttagagatgaataaggcatgattccccccacccccacccccagggatcttggtttaggggcaaatattaatatattctgttatgattgcatcatttttctagtgtaattcattagatcttttcttaatgaaactgttagacactatcttcatatcacgtaagttattttgagtggtggttggggctgttattaattttattattatcattgcactttgcatgaaaaaaacaaaaccacatctaacattatatagctaaggttatgtaaaggtaccaacccatgttaatttaagataatgtaattttatgtatgtgttttaatgatttgcctaaaaagtacttgtgtatcatagtattgctcttaaagcactttatctctgttattacacttaccagagtatatgataaatgacctatcataatagaagcttccttcattatatggtaatattttcaagagcaaggactagtcagtacatctttaaagaatagcttctagaaaaataacaaaatgtttttatactttttatgaatctgttttaacttacctagaattccagcttagtaactgtttgttgagcatatattatatactgtataatttagttttgctcaaaattttaattacagaaatttagttatacattggagtacataaactagttgaaacataattctacatacatgaagaaatagaagaagaacagttattagctttctatttagttgatgtgcagttaggatgaacaggaatttttatttacaaaatggattaaccttactattctgtctttagatgtgacaaaggagatccaaaacagatggtcgtgaataatatggctgtctaggctttttaaattttttttgaaggaaaaaaagtgattcaaacaaaatgtagcgtagcgctatacagagtgattctttccaaataaaattgctttatatcctagtcaaattataacaaatatttatgacagagggattagacagattatcattattatttctgagacagggtgttgctctgtcacccaggctggagtacagtggcacaatcacggctcactgcagcctcgacctccctggctcaagtgatcctcccacctcaggctcccaagtatctgggaccataggcttgcaccaaccttttattctttgtagaatcagtgtatcactattttgcctaggctagtcttgaactcctgggctcaagcaatcctcctccctcggcctcccagagtgctgggattacaggcgtgagccaccacacctagcgtcaaagttaattcttcatgtagaaaagcagcttctcttttatataaccatttattgaaatctccatctttgtattcatagaactgaagagtaataagcacagtgagtcaccaggagctacagaattaaacatgtgccacagtaattgccaaaataaaccaacattaaggttcccagatgaccaagtaaataatactattcaaaatggaggaggagatgacttatctaatcaggtaaggctttattgtacactgtatagttcaagttgatatttagaagggtgatttactactgaaaaggtttgggaccatatcagggacgtgagttctgttttttttttttttttcttttgagatggagtctccctctattgcccaggctggagtgcagtggcgtgatctcggcttattgcaccctctgcctcctgggttcaagtgattctcctgcctcaacctccacctcctgggttcgagtgattctcctgcctcagcttcccgagtagctgggactacaggcatgcaccaccacgcctggctaatttttgtatttttagtagtaacggggtttcaccatattggccaggctggtctcgaactcctgaccttgtgattcacccacctctgcctcccaaagtgctgggattacagtcgtgagccactgcgcccagccaagagttctgtttttcaagtatcagcttttcatttacttggggactgaatgtcttgatatttattttccctgtctctcaatgaaaaaatgcaggcaacaataaaagttttagcttttagagtaaagcttaaataaagcatatttttaaaagcacttgaaaaaccacaaagtattaaattaatgtagaaaatatgtaggataatggattcccagatgttgctcgtagtgctcaaggtctggcaagtaagtttcggaatgtgtccactaatgaaatttgcggaactgtaagtacctagaaatttgtatgcttgatgcatactatgaaaatgcttcagatcatgttttggtagtagttttaaaataaaacctaggtatctttttgttttgaaggaattaattggaaaaaaagaatataaaatgtcttcaaagaaactaaaaattggtgaaagaacaaatgaaaggataataaaaagtcagaagcaaggtaatatatctttaatggttttttaatcataagcagaaagctactatgtgaaatgtttttaatatgataaaagtgatcttgtaaatttcctcatgtaaaatggcaaattatttaatgtttttaaatgtttggttttgttatttttacataagatgattttcataataaaatagcccttttaaaaaccacctatacttacaggtttgccttctttaatctgggtactaaaatatttgtttagatcacaaaactatatatcatttaacatatgcttacaggaatgtgtaaagagtgaatccttttatgaatttagtacaataatttagttttaagtgtggattttcagagtgatttaattggaatcctgcatgccataatttagaggctttcgtctaaatgttagcaagtttacaatttcatgttgagctaaatccattagctttatagcatttttttgtgttttatttcctcttataagtgaaaagaagtgaaagtgaagaacatttatttgtttgaagaagataggaaagcagtgctacttatacttccgagttcatattcggtttaagtatccaagatagctggatctttattaaataatttattaaaattaacaaatactctgaatggaaatattgttcaaaattataatgttgaaaattttcaaattcccaggtaaacatttgaattggatttatatgaggagttagaagaaaatacttttctcataatttgaagatatatgatgccagtggaaaatcttgtagacactttctaaattattttgattattacctttttccacggattgtaatttagaggcttcttttctccccagcattcaatattatctatcagtctcattctgtcagtcatcttgtaaacaatggcacataatatgtggaggtggttgtaatatgtttctatgacagtgggatgatttgcagtttatatgtatttctaattacagttggatagtttcagttagtttgacttctcattacttaggttttgaattggtgaattgttctcattttaatttgctttctttagtgacaagatataagattctcaggttgttctcttttgcttgttttgtacttcatggtgtttggggggattcattttgagtgtgtttctatgaccaccattggcaatgaaagtggaaccatgcagatggagttccatgtcctcctaactagcacagctcatataatacttagtaaggtttcagtgactactggttttcttatatcttctgaatattttacctccagggctttgatttaacaagtatttacttattgcctactgtatatgtgaaaggctctgtactaactccagcaaaaaaaaaaatcaaaccatacagataaagttctaaccattaattattttttccagtctgattgaaagacaagtgtgcaattataatacatgtctcactgtcaaacatggcattatttaaagtattctggaaacttgaaggagagctttcattcagtgtagggaatgtgtacaagtttgtacactaggtgggttagagaataaaatcgaagcaggtagtgattttgtttatagatgaatgaagaacatcttcaaagcagagtggacaacattattaaaagtggagaaccaagaaaatctgagaaatagcaagtggtgtggttctgaacatagaatatagttgagattttgacaacagtgagagattggaactatgtggaaggccaggcagaggagcttatttatatgtctactaaaagactgtgagaagtcactgtcaggtttgtataaacaatagtatatgtttacagttgaaggggcagtggtctgaatagacctgggcttcagaaagattaatatgacaggtgggtatacagtgtagctcgtggataaaaatagtatcttttatttgtgaaaatatattttctgtgcttatatttgtttatagctaatttgagattttggtctttggttttgtcttatgaaattaaagagacaactgaagaattggatgtatccattgatattctaacctcaagggaacagtttttctcagatgaagaaagaaaatacatggccatcaatcagaagaaagcttatattttagtaacaccacttaaatctagaaaagtgatagagcaaagatgcatgaggtataatctgtccgctggcaccatcaaagcagtaacagattttgtaataccagagtgtcaaaaaaaaagtcccatcagcaagtccatggggactttagaaaatacatttgaaggtcataaaagtaaaaacaaggaagattgcgatgaacgtgacttacttactgtcaaccggaaaataaaaatatctaaccttgaaaaggaacaaatgctcacctctgactttaagaaaaataccagactattaccaaaattgaagaaaatagaaaatcaggtagctatgtcattttataagcatcagtcctcaccagatttgtcaagtgaagaaagtgaaacagaaaaggaaattaaaaggaaagctgaagttaagaaaaccaaagcaggaaacaccaaagaagcagtggttcacctgagaaagagcacaagaaacacaagtaatattccagtgattttggaacctgaaactgaagaaagtgaaaatgaattttatatcaaacaaaagaaagctagaccttccgtcaaagaaactcttcagaagtctggtgttaggaaagagtttccaattactgaggcagtaggatctgataagacaaataggcatcccttagaatgcttacctggtttaattcaggataaggaatggaatgagaaggagttacagaaacttcattggtaagtagttagatttcattccgaaatatctacagagcagccacaagacagttaaagacataaaaatagcaataaggggttaacatggaagatgtcattaaaaaaaagggagaaattataatttgcacagggaatggagatagactacacataactcctagtggtatttttgtggtcatctctaatacgaggaaagtacgaggaaagcctaagtatgaggaaagtaaaagtgaccttttcattcccatgtaatatttcaagatagccaaatagtactctctcacgtagcttcatattttaagaaatgcatttttttgttttttgttttgttttgttttgattgagacggagtctcgccctgctgccccgtctggagtgcaatgccacaatcccggttactgcaacctctgcctcccgggttcaagcgattctcctgcctcagcctcctgagtagctgggactacaggcgcacgctgccacgcctggctaatttttatatttttagtagagatgaggtttcaccatgttggtcaggctggtcttgaactcctgacctaatgatccgcccaccttggcttcccaaagtgctgggattataggcataagccaccgtgcccggcctaacaagtgttataaatagtaaagtttggtgccccacaagtgagactcaaggatactagaaacctagaagtgggcactgaagggtaacaaagagagtttaaagaggagctctccagttctgggttgaggagcagaaagggggacttctgacactcagaaacagtagaggaaatccccagtgtttggtttggtttgtttttgttttgttttgttttgttttgttttgtttttgtcttttctcttaactcagtccccatgcaatcctgcaggggctacagtcacagcatcagctggggctgagatatatctaaaactctgagagatgagaaccttctctacaattaggaatggttgcctcaaagtagtggggcaagtacctgttgcttctgttctctttctgttgtctgttgcttggtactggacaaaaattcagttgtgtgaggcatacagcagagcagagtaataaaagccccagctttctggccagagcactgacaagggaaactccagggaaccagaaatcgcggaaagagaggaagtaggaaaagcaaccccataaagttgtttatgaacttctatgccacccaggagttgtacatatgtggacatggtcctaaagagcatataaaagactgagaactgaactaaacagtagaccacacccagtttctaggctagctactcagtgtcccacacacaggaagatcctaacagcactgcagagctttgaaaaatgaaactgacattgaaacaacaatgatagtagactgaacgtatagcttgggataccaccaggttgatgacctgctaaaataaaaatattaacatttcacttgaagcagtaaaatattgattctaagtagactgttgaagttaagtatatttaatgtcatccctagagcaacttctaaaaaaactatacaaagaaataatttcaaacataaattaaaatactggaaaatcaaatagcccaaaagaaggcaaagaagaagagaagtggaggatttttttacatggaacaagcagaaaacaaataataaaattattgacctaaatccaacataattaaattaaatggtctaaacataccaattaaaagacatattgtcagaatgaatttaaaaacatgatctaactatatgctgtatacaacaaactcactttaaatataatgatataggtaggttaaaaggatagaaaaataccgtctaaacacaaatcaaaagaaagcttgagtggctatattaatatctgtcaaaatagactttagtaggaagaaaataaccaggaataaagaaagacattacaaatgatagaagggtcagtcaccaggaaggcatgaaattcctaagtgtgtatgcacctgacaataaaacctcaaaatacatgagttaaaaactgacaagtgaaagcagcggactaaactacaaggatagtcaaatccacagttataggaaaccacactgctcctctcttggtatttgatagaactgactgaaaattagcagggatatagaactgaacaacaccatcagtcattcgtatgattcacatttacagaacattccacccaataataagaaaaagaataggttatttccaaggataggttgatcattcatcaagatagatcataaaacctcttaacagatttaaaatagctgaaatcatacaaagcatattctctgatgataattgaattaaactacaaatcaataaaataaagataggaaaatttccaagtggttgaaaattaaataacttattaatacgtataactaatctgtgggtcaaagaagaagacttaaaggaaagtagaaaatattcttttattttattttattttatttatttatttttgagacggagtcttgctctgtcgcccaggctggagtgaagtggcgcgatctctgctcactgcaagctccacctcccaggttcacaccattctcctgcctcagcctcccgagtagctgggactacaggcgcccgcgaccacgccggctaattttttgtattttcagtagagacggggtttcaccgtgttagccaggatggtctcgatctcctgacctcgtgatcctcccgccttggcctcccaaagtgctgggattacaggcttgagccaccgcgcccggcttcttttattttttttctttttggagacagagtctcactctgtcacccaggctagagtgcagtggtacgatctcagctcactgcaacctccgcctcctgggtttaagcaattctcctgcctcagcctcccaagtagctgggattacaggtgtgtgccaccatatccagctagtttttgtatttttagtggagttaaggtttcaccatgttggccaggctggtctcgaactcctgacctcaagtgattcacctgccttggcctcccaaaatgctaggattacaggtgtgagccaccagcccggccagatattcttaactgaacaaaaatgaaaatatatcaaaatttgcagcatgggcctaggagttcataaacaactttaaagggttgctatgccaagctcctccctctccctgatttctgtcgtactttctacataaacaaattagggtgcattctttcagtggattactaagcagtaaaaaggaagaactattgatacatacaacaacctggttgaatttcaaaggcatattgagtgaaaaaagccaactcaaagggttatacactatatgattccatttatatgacattctggaaaagtgtgctacacacttttaaatgaccagatttcatgagaactccatcagaaggatggtaccaagagggatgttgctaaatcattcatgaggaatctacctccgttaaccaatcacctccccctaggccccacttccaatactgggaattacattttgatatgagtcttgggtagggacacatatttaaactatatcaataaataagaattatttaagccaaggattcaagacaaatggaccttagaatagcatacacaaaagtataaagaaagagggcatatttggaaatactgaaagaatgggtgtggggtatgtgcctgtagtgccaaccactaaggaggcggagtcagggggatcgcctgagcccagaagttggaggccacattgagctatgataatgcccggcactcctgcatgggtgacagattgagaccctgtctctttaaaaaaaaaagaaaggtaaataaagaaagctagaatgaatggaatactgaaagttgaccaaagagcagtacaagatgagactagagagttgggcaaggaacaatacagcgttacactaaggatttggggttttatgctaataatgaaacaagttttaaacatggtgtgatatgtttaagtttgtctttttaaattatctggaataacctagaggagatgtgttaagtactaatttcttattaaatacattattatttgtgttatgtaatagttattttagacagtcgtagatttagaaattagccacacacacaaatagagaagcttgagttcccaagtccttctagttgttcactttagaacactgtggaatgattaattatgtaaaagaattcattaacaagtatttaatgctcataagtattatgcttttctgcatggaataatatgctgtggtcagctggtagctgttcacaagagctgattgttaaattttggagaattttacaaattgagtgttaaagtcattaaaaaattatataaacttaaattatttaaaacaaagataatgcttaaaactcattacttcctaattattttccattttattatatatatatgctcttgagactcttcacctctgtggtatggtggaaatactatgtaattgtgtgctatcacacgtgttttatcaactccacagtcagtgacatgttggtagcttgacatcaactacaatgggagtatttaccctatgaaagtcatcagactttataaatcaggactgtttaaccccgagagaactgattaaaaactttcccacatactgctacatgaaacctatatctattaattggaatccaagtagaaataaaaatattttgccaaagaaacagattaaaaataaagacttggtgtagttgaaatgacattgttaatatcacttttaggctaattgatgagttacatagatgttttctggctaaattgtcaatctaaccacaatgcatgaaatctttatggggagagtgggggtggtaatgtgtataccaggttctaaatcatttacaaaggaacttgtagaatgcaactcagatgttaaattagggacttccttatagttttctctatttcaattttcattttccttaattaagagagcatatatctaaaatactgagttctacaaagtatagtagaatgaaagcaagcataacactttttaatagcttataacctagactgtataagagaactaagagcttattgtccaatatacttagcaccaataagatttaaggtaacagtgaagaaaatttggtcatgccaaaatctcctaaaaaaccgtatcatcgattagttggacttagaaaaaaaaatgttgaaaggctgagggtcatttttcaggcttaataaaacacatcagaatagttagaagacatctactagataggtaaaattacatcttcatattttaagcactagagttaagttattgaggggaaggaataatatctttcttaattgttatccagaatgattttgataaaactgattccttcatctcagtaaatctcatcaattcagtgttatgcttttaagaggttattgtcattggtttgaatttcttattctttaattggttttgatcttccatagtgcttttgcatctcttccaaagcacaaacctggtttctggtcagaggtagctgcggctgtaggttctcgatctcctgaagaatgccagaggaaatacatggaaaatcccagaggaaaaggatcccagaaacatgtcactaagaagaagccagccaattccaaaggccaaaatggtaaccttcgtagtaaatagtttttttcctagtactcagtgttgatttctgatcactgaaatcagatatattttatatttatccatgaatattaataggtattttcttaaaattttaaagctagagagaatttcagaaatcatctgtttaatttttaagtcttacctgggtctctgcttccatcagtagtagtttagtagccttgtgcttcgagttttaggaattctgcagttagatccagagatttcaatatctgaattattgttctaagggtttaattaaagaccacttgggtcagatccccaagtaatttatgagaaagctcagaaaatattcagttttcatagtcccatgattacatactcctgttcatgagtactagtaaaaggttgattatgccagagaatttctataataagcattagcgagaacccaataccctgtcataattcagtaaggtttatatattttggcaaaatcaataaattaggcattcagcaagaggcaatgtagaggcagtcattcttgcagtgtaaagatctttttggccaggcacggtggctcatgcctgtaatcccagcactttgggaggctgaggtggaccgattacttgagctcacaagttcgagaccagcctggacaacatggtgaaaccccatctctacaaaaaaaaaaagagaagatctttttaacctcaccctgcctaatcttagcctcttcatgagtatcctatgggctaatcatattgcacaaatcccagatcccagtgtagaaataatcatttgttctataggagacttgtaaaataacaggctaagttttctttctttttttgctttatctatatctgtatttttttagagatggggtctcactatattgcccaggcagttcttgaactcctgggctcaagcattcctcctgccttggcctcccgaagtgctgggttacagggatgagccactgagcctggccaaggctgagttttttggtttttttttaacatgaatgcacaatttagactttgcaaaggttgttaactttatagagcagttactataaataaccaaatccttatcaaaatggtttgctgactcttaaggcaagagaggtgatgctgatcagaaacaaactattaagataactgccaaagtgggaactcttaaaaggaagcaacagatgagggaatttctggaacagttgccaaaagatgaccatgatgattttttcagtacaacacctttacagcatcaaagaata

SEQ ID NO: 2318 - DNA, 374 bp, Homo sapiens; identical to SEQ ID NO: 2316

SEQ ID NO: 2319 - DNA, 403 bp, Homo sapiens
aagatatttctacaactatattcttggctgatggtagtagcagcaccaccattttttcattatttaattttggaaaattgaccactatttttttcatctaaggctgtgtccttattgtactgaagcacccaatcaactcgatgtaaaaaaagaaagtcttttaaataatgtggaattatgaagacaaaacaactagtgaggaaactaaattgtttttatctaattattttgtaactcatctgtgaactatagataattctgctggtttttgcattcctgaaacagttgctgtgagaataaataatatacttagtaaaacattatgaatgtttgagataatagatgcataatgacttcatccttgtttgtagcttgcttgaaaaattaaattgaatgaaacaga

SEQ ID NO: 2320 - DNA, 519 bp, Homo sapiens
gtaaaaagagggcataactgggatgtcactaactgctactgttaaaatgagcatgtattaaaatccttatggatgtccccttcatattcaacattaattagaaacctgccctatctcagtgttcttctataatcaatccccctttccagtattactaaggtaactgtaagccctgcatgcctgaactgtcctggtttacacctgtttttccagcataattgttaattgcaaccctgttcactgtctgatgaatcttggtttggacgataaattatatggtcaacctaagtattagagtccctgggataaacaatcaaggtgtcattcttatttattggtattggtttgtcacaagctgtgaaaacagtttttcttttgcttgtttcttcctgagttgtcacgaagaccttcacataaaatcactctctcccattaaagtaattattgaagcccccttcagtaatgaccagttgttttagttttcctcctcagattccaaagaccaaatgtagagattat

SEQ ID NO: 2321 - DNA, 326 bp, Homo sapiens
gtgcctgtttatttccgttactcgtaatacagataactacattaatttactaaaaaccctttctagtaaatataataaaacttggtcagaaattattcatatttaaatggtggctgttttatcaatttgtgtgattgggagtgagggggaaataagctaattacactaacatataagtatataatattgtatagtaaacattttgtagttctttaaagtaattaataaaatttgtgattttaaattttttttagcacggttcatgttttgttttactcatatattcttgcattcagtggtgtatttagataaggagatgtgctggt

SEQ ID NO: 2322 - DNA, 16106 bp, Homo sapiens
tggaaattcttttggttcatgaggtggtgtttggtaatagaaagaaagggtcaaagttggcaaagtgatgcaggtttagtgtcctttatctgaaatgcttgtgaccagagtgtttcatattttgtatttttccagattttggaatatttgcatatacaaaatgagataacttggggatggaacccaagtctaaacatgaaattaatttatgtttcatatatatctcttatacacatagcccgaaggtaattttatatgatatttttagtaattctgtacattgaagataggaagggaaaaaaataataattctctgcacgaaacaaagctttgactgaccagcacatgaggtcaggtgtggaattttccaccatggcactcaaagggttttgaatttttagatgagggatgctaaatctatatgttggattgaacttccattgtagaaaaaacttcttgttaggagcagactcctaattcgcctattgattgattgattaattgagacagagtctcctctggcccaggctagagtgcagtggtacaatctcggctcactgcaacctccgcctcctgggtttaagcaattcttgtgcagcttcccaagtagttgggactacgggcacataccagcaacgcccagctaatttttttttgtatttttagtaggcacggggtttcaccatgttggccaggctggtctcgaactcctggcctcaagtgatccacccgcctggtcctcccgaagtgctgggattacaggtatgagccactgcatccggccttaccttattattaaaaagttttgtgccagccatggtgttgtgcccttgtagtcctagttactcaggaggctgaagtgggaggattgcttgagcccaggagttcaaggccagtgtgaacaacagtgagaccctgtctctcaaaaaaataaaaaataagttttctgtatatttgtcaactaattagctttaggggtatgacgtggggtatgatacggaaagcagcttcagtttcatgatactaggatggaaatcaatgagaaaaacttggaaaccaactgcaaaaaccttaaccaatcacaattttttatgtcatttgtatactatttatgatacagacatggtatatactttatcttgaaagttctaggcggaaaggttaacatttctacttatgtattttcctgtttttgtgcttatctagctttttttaaacaatttcttctttgtattacagtcttggtcctttagtgagtaaagtgaaagaataccaagtagagacaattgtagataccctctgcactaacatgctttctgataaagaacaacttcgagacatttcaagtattggtcttaaaacagtaattggagaacttcctccagcttccagtggtaagcaagagcacatttttcttcctatttctttttgtgtggaggtatttctccccacccttttttccccttctggccaaggagggagggaggtggctgtccttacagatgttcataggaatccctttggacaattaagaaaattaaagcgtgaagccttattttccttagaaataaatgttaaatgaatattttgattgaacttgtatgtaatatgaatttcagtgaaggatttttatatgttggagcaagattttatactgtgtgtaccatgactgcagactagagttatgccaacctatgcagtgagggaagagataaccaaaatattgcatcctgattagttcactgtttccagtattaattttactttgcgtcagtatttgctatgtaaaatgtaacaccattcagacatagctgtggaatagttcagtttactagtagctttaattaaagctgagccttttacagctacttggtaattaaacaaatttaaaactatgattaatgtatttgttaactaattagcttttggcctttgatagaaatgtgtaggtaatataaattttagaattggtcttgactactaaactattgctaaaattattaggctaaaagtttttgtctcatctgcaaaaggtgagattatcacctatttcatgggaagatttagattggtaataatgtagtctgggggccgggcgaggtggctcacgcctataatcccagcactttgggaggccaaggcaggtggatcacctgaggtcgggagttcaagaccagcctgaccaacatggagaaaccccatctctactaaaaatacaaaattagccgggcgtggtggtgcatgcctgtaatcccagctacttgggaggctgaggcaggagaatcactttaactcaggaggcggaggttgtggtgagccgagatggtgccattgcattccagcctagggaacaagagtgaaactccgtgtcaaaaaaaaataaaaaaacaaaaaaataaataatgtagcctgggtatgttatttccactcatgtacttgaatcattcactgtgctagttttcatgctaaaggctgcatacgtaaactagtctaaacatcaatcatatgggaggtcttactgttccttctagtttgtagatgggagaactgaaattcagagagattaggttaattcacccaaagttgggtgagtaattgggtaaagattcaaatccattttcttttaatccaaaaaggatgctttcttcaatgtatcataccagtgttattttacctttattaaatagttacttatttcaataaaacatttcaccaactcagaagtatgttatttataattgtattagctatgtatatattttttaattttttttctctcattgaaatgtgtttgcattgagccaatttccggttcttacaagaatttttttaaccattcagattcttactttcacagtgacttgttctttttcttctctcatcagtaacaacatgacctactgtaagtagtaacaattctgatttatgagtcctggaacgaggtttttgctttataatgaagttacggaatctttgggttggaaaggaccttattaaaagttatggctgatttttttttttaaagaagctgctaagcattggagctcagaatatatgctttttaattcactgaagtttaaaaggctagtctactagaaaagactcaaatagagaaaactctccttgctgcttttcaatctaggtgtgcaagctctacagctactactggctccatagttagcattcataccaatgcatacagattatccagtagatagcatagttatctatctactattactagttatctgtaatatctactattatccagtagaaagaatctgctgacatctgtattgttttctgtgtcctttaccccttctgaagttgtcatctctaattcttgtttatgtccagtaagttattttattgaaaagcagcctgttttgaaagatgtgtttttctcccacagatctcctgtgtctcatgatcaggtgtggagttgttaaatatttggtctaattcttgtttatttctataagtcattttattgaaaagcagcctgttttgaaagatgtgtttttctgccctggatctgttgtgtctcatgatcaagtgtggagttgttaaatatttggtaactaccatgaatataagagggaattcaacatgcttgccttgaaattattattggcttcttattcatgcaggctctgcattagctgctaatgtatgtaaaaagattactggacgtcttacaagtgcaatagcaaaacaggaagatgtctctgttcagctagaagccttggatattatggctgatatgttgagcaggtaagtgtgcctgtttatttccgttactcgtaatacagataactacattaatttactaaaaaccctttctagtaaatataataaaacttggtcagaaattattcatatttaaatggtggctgttttatcaatttgtgtgattgggagtgagggggaaataagctaattacactaacatataagtatataatattgtatagtaaacattttgtagttctttaaagtaattaataaaatttgtgattttaaattttttttagcacggttcatgttttgttttactcatatattcttgcattcagtggtgtatttagataaggagatgtgctggtagttacggattttccggttaaaagaatgctggtaatcttcggtaaccatattaatagtgcatattttaggggagggaggaccttggcttttatgtatttgttgctttttcactttcctttggaagtcagatgttagaacatagacagacctaagcaactcctaggagaaaataccttaaaggacctgtcaatttctgattctcatattcattataggccaccattatttgtgtgtgttttttgtggcaaattcatgtcaacttaaaaacaatcaagtgccttcaggtgggtgtgtgggtgtgtgtgtataaagtgaggagctatcatcctggcactgaaagagcttatactttacgataggacataagaacaccgatggctacagggcagaatgggactaaagactaactgggagcatagtgtgttttgggttttaaaatggaaggattcaagaaaattgtttttatggaaagtggcatttgaattgggttttgaagaatgggtagcccttcaatagttagatgtgcccaggtgtagaatacataagtagtatgcgaatggggaagcatattctagttttctagaatagagaatgaatagaaaagcagtaggaaatcattctgatagattggggtcatgttgaggtggatgaggaatttatgtttaatttgataaactgaaaattcagactttttgtcctgtgcatgatttaatcacgaacactgattgtcctggcacaggtttgggtagtagtgactcattgaactatacatttgagatgatttggaagaggggtgttggaacaacaggaacaatgaaactatatatagaggaaagccaataagggagagggagaactcaagagaaggtcagttttttagtgttgtgaatccccccctaaaaaagcaatacagaaagtcagaatacagaaaatcatttagatttctttttttttttctttcttgagatggagtctcactctgtcacccaggctggagtgcagttctgtgatctcagcttactgcagcctccgcctcctgggttcaagtgattctcgtgcctcagcttcctgagtagctgggattacaggtgcccaccacctccactggctaatttttgtatttttagtagaggcagggttttaccatgttggccagggtggtctcaaacgcctaacctcaagttatccacccgcctgagcctcccaaagtgctgggattataggcatgagccaccattcctggcacagaaaatcatttagagattttggaaggagaaagtgacaagatgattgtgtagttttggttgttgttgtttgtgtttggttttggttttgagacaggttttggcccaggctggagtgcattggcatgatcatggctcattgcagcctcaatttaccaggctcaggtgatcctcccacttcagcctcctgagcagctgggactacaggcatgcaccaccacacgcagctaatttttgtgttttttgtagagatgaggttttgccatgttgcccaggctggtctcgaactcctggggtcaagtgatctgcctgcctcagcctcccaaagtgccgggattacaggtgtgagccttcacacccagacttgtggtttttgtttttgttttttaatattttcccaagccaatcaattagatatcctataattggggatttaggtctagattcccggagtcagtttggcaatgtaaatttcagtgctgcattcacttagctcaggtttcagttgcattggtagataaagtgataatttaatttttctttcactatgaattagtctcaactaaatttgtgttctgaatatttgcattgaggtcagaggccagacatttagtagtggccaggcatcttgaattcatttgttgttttctttctttttttattttattttaaggcaaggaggacttcttgttaatttccatccttcaattctgacctgtctacttccccagttgaccagccctagacttgcagtgaggaaaagaaccattatcgctcttggccatctggttatgagctgtggaaatatagtttttgtagatcttattgaacatctgttgtcagagttgtccaaaaatgattctatgtcaacaacaagaacctacatacaatgtattgctgctattagtaggcaagctggtcatagaataggtaagaaatctttaaaagttttacagttttctttaattaaaaaaattaatgcatgtttttaaagaaccattatgcttttcttaggtgaataccttgagaagataattcctttggtggtaaaattttgcaatgtagatgatgatgaattaagagagtactgtattcaagcctttgaatcatttgtaagaaggtaagtttttaagatctctattttttacaaaaagtttttccttaagagtagaatcataaggtctacattaggtgtgtgaggagaagcggccttttggatttcagatataacagacaatacagtatttgaaactaatgtcatcttgctattataaaatgtggtcatcacatttattttgaaaattttccttgtcattgttaggactttatttaaagaattttggaaaggtatttataattattttgggtttactttagaagggaagaaatgccagtgtaataatgtagtctgtactgaaagcccagcaggataaattattcgtcagaaataagtagtgaattgccttttcaacaatttcttaggtcacatccattttgctaggtcagtgattctcaatttggaaactgattctaatatattttttaaaagcttagtaaaagttgtgtatttgtgtactagaaggcaatacaagataagtaacattatttttcctcttgactaatgcagtagcatggtgtcttgagaccttactggttgttttctgcatttatcccttgacactcctggttttgagaagtggcttttaatcataccatattctgaaaatcagaaattgttagattcatttttgttcctttagttgagaaacacaaagtattcttttatttgctggccctgtgggcatttatatgttctgtcctctcattacatcggtagaagaccaagcctaggtgaatatgcactggcatttccacaaataatcctagttactgaagagcacattcatctgggtttggttttctaataacatgttgattatataccgatttctgtctatactgccatacattaaccataacatagttaaaatcgggattaggggagttcatcttaaaattgattaaataagtacaatttgaaaggtaaaccttttaaaatagtaagtccatgggagagaaagagcaagaatcattggtgctagatagtctgggaactactgtcctatgttattgctggtaataaagcaaaatgtggcaggtaatgaatcaaggagtaaaatgcagctcttcaaggcagcttttgtttttgtctttagatgtcctaaggaagtatatcctcatgtttctaccattataaatatttgtcttaaatatcttacctatgatccaaattataattacgatgatgaagatgaagatgaaaatgcaatggatgctgatggtggtgatgatgatgatcaaggtattgcaaattaaatagaatcttttgagtttttgtgaaagacacttatagatggagatgattcttagtccaaattgtactgtttgttttatttagttataatagtgaaaagggaaatgatctcaatatttgacaacagcaaattaagttagagggcatccatgtattgaactgttatgcaacacattaaaaaatcatgtctaaaaatcattcattaatgctgttaataaggtgagtgaaaagtatgtagcaaaaattgctcaccatagcccaattttatttctttaagtatacagaaaaaaatctgtatatttacaactagtactattaccacttgttttctcttggctaggaactatgtatgatttttggttttaagtactattcaaattttctacaaagcatttttgtaaggagataaaccaaggttttagaaagaattgaatctgtagatatacatatttagggcagcttggcttgaaagaatattagtttgtttattcatagttcatgaaaaattctaaatactgttcgaggccccatttaacattcattaatagcttacaacatttctgaggctcctaagattgatgtaatcacacgatgatttatgatatttactctggaaagtagtagcagcacttcaaggacataggggttgctcatgtcagttgtttctgtttgtattggaagaatcataataacaaatatttaagttggtaaattactaggtaaacaggttggtggattttttgttatttttgagaatactttttagtttgattctttgaatgaatttacataacagctttcctgtcaagtcagtaatttcacccatctttaaaaaacaagtaccaaaagagtttcttaacaccatatactcctctagcagctgctgcctagtttctctcctccacaacagagctccttaaaagaatgcagttccattttcttttttccattctctcttgaatccactcctccagtgatggatgagattgcaaatgtttgactctgcctatcgtattactcagtctcggcaacatttctttatttagcttctgggataccattctagcctggatgtagtcctatcgttgtgattactccagtcttcgatgctgtttcttcttcttcaccctgaccactgtacttacagtatcccaaggctcagtccttgaacttacctgttatactgttgatttttttgttgatctcatctagtctcctggctttaatatcaatatgctggcaacccacatcctatctttaatccagatctcacttgtgaatccagattcatatgcaactgcttaattaatattgctgcttggatatctaaaatatcttttccctgccccttccccatctcccacctaacctgttcttctttagccttttccatctcagaatggtacctctattcttcttagttgatcaggccaaaaaccttgcagtcatacctgattcctttttcacacatccctcagctagtcttccacctcagaactatctttcattttattgtttttattttgtttatcacacttagtaactttctgacatactgtaattgatggtctcctacctattagaatataagtttcatgaaggctagatgttttaatctcttgattgactgctttattccagtgcctaggacagtacttgacacacaggcaatcaataaatgggttgtattaatgaagggaaactttagcttatattttaatatgaatatcttttgaagaaagcagtagcaatgtatattccaggttttgaattttgtttttttgtgtgctgtataacaaactaggtacttcacctgctttatcacttagtatgaattatacccattaaatgacttttctaccatggtgtttttgtgatttataaaatcaacgtaattttagtgaataaggacatttgttaattttttataatcttgtttttaataaagcttatatttctgggaggcaattgccatagtgtattgacatggaaaaaattttatgtgctcttaacttgatagtgtattttggcagtatcttttaactttatttgaatagatattggtaaataagcaaacgtcttgcatttagcagtatttggttgtattttcctgtaatgtgctaaggtgaattttaagcttttgagttggaaaattttattattttgttgtatactgtagaatcttctaaggcctagctggctacatttgactgtcaaactaagctaattggaataaaagccagtaaaaagttactactccgctctattatttcaaggctatgtatagtcttatctaagaataaagaaattattgtgagataattttagactatcatgataactgctaatatttctgccacctttctgacttcatattacccaactaattaaacctgatggtgttagaaagaaagattttctggagatttcacacacatgttatccatcaagtatagataagtgagatacaattcttagtgcttttgctttgaatgtttaaggtttagcattaggggaaaaaatggtcctctgttaagtgtgcagcattttcttggtataattaagcaaaaatggttttgttaaagtacattaagacaaaattgtgaaaggtttagaatatacatatttgttcctcacagcttatcaacaagttgagtgaaaagccttgtagtcacaaagctgatgtcaaccttctttttattcccagcaaattagttctacagtgttttgggattggtaaccattctttttatcacctactctattaccacaaatccatttcatggtttgtcttataaagtccctgattgtttgcttgatttttcctatgctgttaagtaagttctttgaattttgtttcaaaggctgggaaatttatgactataaatatttatattctaaagaagttgaatgtgttaattgatgattttaaagggttaaaataagcagcagttcattacaaagtaaatgagaaaatgtttaactaattaaaaataccattatgtttgttttttaagtttaatttatgtgcagatttacagaaataacaagctctttgttcaagttctagttctgttgaaacctacctgttgctgtatatgttaccggaaagttagattaactgatttggttaagaatatcaattgattttctgttttaaatgttatacttctcttgtcattaatagcctgtttacattaaaacttacccttagggagtgatgatgaatacagtgatgatgatgacatgagttggaaagtgagacgtgcagctgcgaagtgcttggatgctgtagttagcacaaggcatgaaatgcttccagaattctacaagaccgtctctcctgcactaatatccagatttaaagagcgtgaagagaatgtaaaggcagatgtttttcacgcatacctttctcttttgaagcaaactcgtcctgtacaaagttggctatgtgaccctgatgcaatggagcagggagaaacacctttaacaatgcttcagagtcaggggggttttaaagtaaagtttagaaaatcatgatagtaaatgcaatgcttttaaaattgtctttatatggaaaggtgagttccagaatatctatagagaagcagaaagttctaggatatgtttatatagttaatgcatgttcatattatgttagttgtaaactattctaattgaattattcttggctttacatgataatatttaaataattttaagattcagtaaagtagtctttatctttgatgttaatagagaagtcttagagctgtggagtcatactacttgcgatcacataactgacttcatttctaatttaggtgtgtgatcttgggcaagttatttagtcattttattaaacctcacttttcttatttgtaataagaacgtacttagaaatatctacctgtggttgtgagagctggatgatctgtgtagagcattcagtgtagtgcctactacatatatgcttgatatatgccagtacttactaataaaatacacattttttcacttgagggcatttgttttctaagatcctaaacattagagctattatatgctcccatttattgaatatttattacataccaggcattctcctatcttatatgtaatctctacagcagccctatgggatgcacaaatagtaggtcaatttttatagattacaaaacagatattgccagggattaaaccagtggagaggacgggacacacatactgtatctatcttgtttttaagtagtacaaataaatacatttttgtggtgaacttactcataaaggtgaatgttgaagattaattgtagaaggaaatgagataaagtgtatggaggacatatgcaagtgagtgagtatatagaagtcaggtattgctcagtagagttgccaggaattctgacaatgctatggaaagttagacattttttttgttttgtctagttcttagatcattgtgtaattagggtatgtgtccatgtagtttggttgttgggatttttcttggctttttgtttttactctgtacttgctttgctgttgaggtattctagaagctccgttgatagctttgcatccgtaagatttgttagtagagaccctgtttgttttactgactagcaaaacattaggaagtttagagcagatgtcttttaatcatacccctgctgcttgtagctacatttgaagtgaggttgattccttctaacagcaaatggaaagtaagaaaaggacctgttcgatggttgcttttccataatttgtcttgtttcctttgatttttatctgtgctgttgtcattcaaaataccatttataaattaacctcctaaattttttattgaaaatatgatttgattaatttctttctttctctttttttttttttttgagatggagtcttgctctgttgccaggctggagcgcagtggtgctatctcggctcactgcaacctccacctcctgggttcaagcgattctcctgtctcagcctcccgagtagctgggagtacaggcatgcaccaccacgcccagctaatttttgtatttttaatagagacagggtttcaccatgttggccagaatggtctcgatttcttgacctcgtgatctgcctgcctcagcctcccaaagtgctgggattacaggcgtgagccactgtgcccagcctattaatttctttttagtcatgtatgtttcacaattaaaaattaagtagggaagactattttgttgctctctggaaagctaaatgatagcttttctgtaatttcttatcagtatcaagcaaatatagttacaagagaacatatataatacatgcaacaaacttgatcttgtgttagcaatagcaatagatagctgaattaggaatttaacaaaaaaagataaactcttccctttatcctcattctccataattcatgttaagtgtactgaggaaataccaacagctgaaccagctaatgactatatgataattgcaggttcccaacattgttaaagctcttcacaaacagatgaaagaaaaaagtgtgaagacccgacagtgttgttttaacatgttaactgagctggtaaatgtattacctggggccctaactcaacacattcctgtacttgtaccaggtatgaaagaaacataaatctcttttgggacttattgtagcctttttgttaggacttagataagcttaaataattgtttccttttaaaggaatatatgtgacaacttaatatgcacatagagctaactttttaatctaacaatcttgaatacctgaagttagaaatttgtaagtaaaaggttaaaagtctcaccctaaaatatttggctgtaatatttattgtagatggtgaaaatttctacttatagaaataatataatgaagtgggaacattagcagtactataggggttgatttttaatttttctttcttaaaagtctgcacagcaatgattggattttttgttggctttttaggaatcattttctcactgaatgataaatcaagctcatcgaatttgaagatcgatgctttgtcatgtctatacgtaatcctctgtaaccattctcctcaagtcttccatcctcacgttcaggctttggttcctccagtggtggcttgtgttggagacccattttacaaaattacatctgaagcacttcttgttactcaacagcttgtcaaagtaattcgtcctttagatcagccttcctcgtttgatgcaactccttatatcaaagatctatttacctgtaccattaagagattaaaagcagctgacattgatcaggaagtcaaggaaagggctatttcctgtatgggacaaattatttgcaaccttggagacaatttgggttctgacttgcctaatacacttcagattttcttggagagactaaagaatgaaattaccaggttaactacagtaaaggcattgacactgattgctgggtcacctttgaagatagatttgaggcctgttctgggagaaggggttcctatccttgcttcatttcttagaaaaaaccagagagctttgaaactgggtactctttctgcccttgatattctaataaaaaactatagtgacagcttgacagctgccatgattgatgcagttctagatgagctcccacctcttatcagcgaaagtgatatgcatgtttcacaaatggccatcagttttcttaccactttggcaaaagtatatccctcctccctttcaaagataagtggatccattctcaatgaacttattggacttgtgagatcacccttattgcaggggggagctcttagtgccatgctagactttttccaagctctggttgtcactggaacaaataatttaggatacatggatttgttgcgcatgctgactggtccagtttactctcagagcacagctcttactcataagcagtcttattattccattgccaaatgtgtagctgcccttactcgagcatgccctaaagagggaccagctgtagtaggtcagtttattcaagatgtcaagaactcaaggtctacagattccattcgtctcttagctctactttctcttggagaagttgggcatcatattgacttaagtggacagttggaactaaaatctgtaatactagaagctttctcatctcctagtgaagaagtcaaatcagctgcatcctatgcattaggcagcattagtgtgggcaaccttcctgaatatctgccgtttgtcctgcaagaaataactagtcaacccaaaaggcagtatcttttacttcattccttgaaggaaattattagctctgcatcagtggtgggccttaaaccatatgttgaaaacatctgggccttattactaaagcactgtgagtgtgcagaggaaggaaccagaaatgttgttgctgaatgtctaggaaaactcactctaattgatccagaaactctccttccacggcttaaggggtacttgatatcaggtaggtatctagattttcttacttaaaaagttttttattgatagttggttgccttaaaagacacctaataaagaagttaagccatgtctatattttcttaaacctaaaagctaagtatgtgatgaagaaaaactgtctttcgtagtatggagtgatattcaaatgacattttgttgttttaaaggatagtgtggtaattagataatggttaaatctgttctaattcctcatgataactacattttaatgttactatattgtgttaaaatgtggaaaagatgtatctaatgaattaacataatctgaagagcttgttgatactaattacaataagtataattggtgacagtacttttttcaaatggaagattctggaagagttttcagatttaccagtgtcatccccattagaacaagtaaaaggtagtaatattaatagcagtaatagccattcattcttagacattgctttctgttttagtaaaaaatttgaagatttttaagcggttttggatttagctagttctattttgtgagggcgagatcgtccactgctgcttcaagtccctccttcccagaaggaattgtttctttgaaatctaatgggattatattttgtgctcataagtaagttaattttgctcctttggattcatgtgtgcaataagaaatacccttcttggccaaggagaattctaaggcattgaagacactggtgttatttgaagtggtttaaaaatgatgtccgtgagttttagtggactacataccaatagacttgcaatttatttttaactaggctcatcatatgcccgaagctcagtggttacggctgtgaaatttacaatttctgaccatccacaacctattgatccactgttaaagaactgcataggt

SEQ ID NO: 2323 - DNA, 299 bp, Homo sapiens
ggttaagtttttgaagataggggccatactgtctttgttattcaataattttgaatacagtgacttcttaatataggggtccttaaaccctgggccatggacccatacagatccttggcctgttgggaactgggctgtacagcaggaggagagcagagggcgagccagcattactgcctgagctttgcctcctgtcagatcagcggtggcattcgattctcataggagcacgaaccctatcgtaaactgtgtgtgcaaggcatctaggttgcatgctccttatgagaatctagtgcctg

SEQ ID NO: 2324 - DNA, 437 bp, Homo sapiens
  SITE (333): n equals a,t,g, or c
  SITE (378): n equals a,t,g, or c
  SITE (407): n equals a,t,g, or c
  SITE (421): n equals a,t,g, or c
ggcatatgttagggctagtgggtaaacccagctgcacctgagagtaggggtatatgttagggcttgtgggtaaatccagttgcacctggcagttggggcatatgttagggctagtgggtaaacccagccgcacccgagagttgtgggtatatgttagggccagtgggtaaatccagctccatctgagatatggggtatacatgaatactagtgggtaaatccagctgtacacgagagtagggggcatatgttagggctagcaggtaaacccagctgcaccccagagcaggtgtatacatgagtgctagtgggtaaatccagcagacgtccggnactgtgcttgagggtgtcatcgagagagagaaggttgatccgaangttagtaaaggctttaaaaattaaaaggncctgagatgatggntagggttttggaggta

SEQ ID NO: 2325 - DNA, 296 bp, Homo sapiens
ggtggctcacgcctgtaatcccagcactttgggaggccgaggtgggtggatcacgaggtcaggagatcgagaccatcctggctaacaaagtgaaagcccgtctctactaaaaatacaaaaattagcagggcatggtggcgggtacctgtagtgccagctgcttgggaggctgaggcaggagaatggcatgaacctgggaggcagagcttgcagtgagccgagattgcgccactgcactccagcctgggtgacagagcgagaatctgtctcaaaaaaaaaaaaaaaaaaaaagaaag

SEQ ID NO: 2326 - DNA, 969 bp, Homo sapiens
ggggagaaaggtacaagatattcttttagaaagcaagaggaaaagggaaccttaaaataaatgaatagttaaggctgaagataatatatatacaaaaactctgctttaactggaaaaaatgatctcagtggtttcatgatagggaccacatttttatttagatttttagttgtattatcacactttcctggtcaaggaaatctccagccttagggtatgaagtcatccattttgaaactcttcagtcccttggcagggtgagatgctttgccatcataaaatggccatatagagtggcatgtggccatgtcagtgattgtaaggttaatattccgtaatgaccgcaaaggaaccactgtgcagccatttatcttaaacacaggaaggaaaattgttggctgatgcctaataaaaatgaatcattctgggtgtcaaagctcttttaaaagcttttaagaatgaaatgctaaatcagaaaggaagtatctgtaatctatgttccttaacaaacaatttatttttatttatctatttagattattattcttgggaaagattgagaatatttgtatttttattattatatttttatcttgtctttaaaaaatctaacgattttgatgctgtagttttagatgtaaagcatcttctgagaaaaaaagagaacattttgaattcatatcttaacctttgtaaaatgtaaacttattaagcctgaatctacccatcaggcacaaaatggtgtcaccatatgccctcctgggcagtagaggggccacagccagcattataaaaatcctggtaaatagctgattttagaggcagtggcagccagaagaatggagaagctgcaatatttatggttaaagacctctatccccacttctttctggacacctgtgggccaaattcttccctccttggccccactcctagccaagtcctcccctttcaggctgaacagtgaat

SEQ ID NO: 2327 - DNA, 614 bp, Homo sapiens
agcagccgcgaggcctacgggcgcgccctggaccggcacggggtacccagcaaggggcgcatccgcaggcgtgcctcccagctcaaagtcaagatccccgacttgactgatgtgaattccatagacaagtggtcccgaatgtttttccccatcaccttttctctttttaatgtcgtctattggctttactatgtacactgaggtctgttctaatggttccatttagactactttcctcttctattgttttttaaccttacaggtccccaacagcgatactgctgtttctcgaggtaagagattcagccatccaattggttttaggtcttgcatatcagttttattactgcaccatgtttacttcaaaaagacaaaacaaaaaaaaaattatttttccagtctaccgtggtccaggttatcagctctttaagagctctattaattgccatgtttacaaacaaacacaaagagagaagttagacaggtagatctttagcagtcttttctagtttccctggatttcactgatttattttttagggaaaatgaaaagaggaccttgctgtccgcctgcactgcttcctggtaaactataacaaacttatgctgccaaa

SEQ ID NO: 2328 - DNA, 335 bp, Homo sapiens
gtgattttgggatatgactatggtaatatattcttcgttaattgccccagataattctgctacaaatccgtaaatcaacagcgtttatctaaaagtggtttcatttgtattttaaattacagagctaaagctaggatatacataatgctgtcagtgttgcctttcttcagaaatgaagaattgacgcgtaaatattgaactcttctcagagagattcagtcaaaattcagttcctttttgagtaacaactaagtggaagtcaaacaactctaagtatatgtggatggagaaactaaaaagaggaagatggagctaaaagattaatgctactatgg

SEQ ID NO: 2329 - DNA, 418 bp, Homo sapiens
gcagctttgatcactctgtagtcttctggcacttaacccttgttcaggccttgcttctctctgtggggtcctcttccctatgcctcttgccttccaagtcctactcatgcctcaaggcttcccataaggcctttcctggttattacagcttatggtgatcacatcttaagattttttccagctcaggactcagaggacttttctctttatccaatgtcttgttacatacatatatataccctttttgtattatatgtattttctgttttcaatgtggtttttaaaaacctagatctttgtagatgggaaaacttatttatccaatggttttatattgaatttatactttgcatacatactagggatacaaaagaaatataaaagatcagtgccttgaatctttgcaattctaatgaat

SEQ ID NO: 2330 - DNA, 418 bp, Homo sapiens; identical to SEQ ID NO: 2329

SEQ ID NO: 2331 - DNA, 1391 bp, Homo sapiens
cattgttataaatgaatttttaaataattaaagttataaatttatggatgggatcacttattaatattgcatcatctgaaattttaaaaatatgtatgccagtcttgttgctataatctgcttagaaaaaagaacaaaacaaaaagactacatttttcaagatttgatttttaagaagtacttaattcttggagaggagaagagagtcatataaataaaatatatcatgagagtgatattactgtggtatatagagtatttctttgcattagacccagtgttagtttgcatatattctcatgtcctcattgtaacaatttttagcgagtattatttttcaggtgagaaaattttacttcagagattaactggtggaggtaacataataacaggaagagccaggattatcttaatttcaaatcccacttcataccattatgctatacttaagatatgtgttcacagtgtacctactgcagttgtatgatctggttgcttctttgaaattttcattctggttttaaatttagaattgagtttgatttttgtggagttctttatttaacctcccatccttatatgtcaacaattctttttcatttttattgcttttagatttacctgtagtttgtaattttcctccaaattacttgaatccttttccctcccttctctccatagaaataccctgatgtattaggagaatgaagatttaaaaacaaaattttgttttccacacagcttttcaagcatatttcatacaggtatactctagtcatatttatgtttaaatcacttaaaatgtcatcaaaataaaaatgggactttttttttaacagatgataaagtgcctaaaatatgtcagtctctgtacaaggtgctagagaagacacctgccattttgaaattttgcaatataatgaaaaagacacagtgaatgtctttgcaggatgcaatgaggtcactatagcagaggcggatacttaccagtagtatgcattctccccttcttctttactgtaaaagtccttgatttttagctgagcacacagccatctgaccaaaaggctgcatctgccaacttcccttgcagttaagtggagacacttaccaagtactcaaagagatgtaaccaaaaggtttgggtgctacttctttgcagtgttcttgtccttcctctctgctggctggaatgcaaatgtgatggctagaactcaagcagccctcctggacttcatgttaaagacacatgctgaggatgattgagcaacaagatacaaggagcccagggcatgatgactttggaagggaagatgcccaactagtcctgactgcttacctctggatgtgttttacatgagagaaataaatgtctttctggtttaactcac

SEQ ID NO: 2332 - DNA, 2530 bp, Homo sapiens
  SITE (974): n equals a,t,g, or c
tctttattttgtgtaagttagtttcatttcatcagatgatctgcacagaactcagaataaaccatcaattttaggtataggctgttttgttgttggcattatcttttagatataaaatcatagctagggtgaactgtagacaagaaagtcttccttgaaacagggataatattcaggttattataaatatttaggcttgaagcatagagctactgtagggtgaaaaatctctgtaggactttctggggcttcagtaccatttacacccacgatgaagggcttaaatagaaaataatggaaaattaaatattactttaaggaaagcaaagctgcactaaaatttttaagggaaaaaaaacaagtagccatttatatttgtgaccttgcattaatatttaaatgttgattttaatatggagctagcacacatagatgcgcaggcacgcacacacaaaacaagcaaatgtaactccaggcatttgtaatttaatataataaatacaagcatgttagaaaaatgctttatgtcttattatttgttaagttaggggaatgagaaggaaaacaaaagcattctcttagtttcatcacaatggctgcatgtacatattgagattctaactgagatttactttgaaatttttcattaaaatattccacaataatcagtttttttcctcttcaattgagtgactgactccctcactcctcctgaatatagtaatgtagtttgatcataggatccctttgaaaaacaggaaggaggataacataaaaaacaacaaaaaacatttcaccacctaaggtctgaagccacaaatctttatatctctgatgaaacaaaggggatatcaatagtacttgaagaagaagagcattttattacttgcttaatttatttattgtgataaccacaattgcaaaagaagaactcaggatttgttttaaaatgtttctctctatggctcccattntgttttgtgaataattatttatgagttgcatgttgacacaaacctactcactggttgaaagctccatttaagtgagtttcaagatcactttcaaagagatttttaaattgccattgtttttaaagctaacataaaaccatttgctatgctaccttgaacctagctaagctttcctttaccttagtaagccaatcagaagactacaatcaatgaatatttagcaaatgtgctgaagggtttaataaggttttgttgttcaataaatttgcaaggtagggtattaacatattttgataaataaatggtgctagagttggcgcagaggtttatatattgatatgtcttagttattggcatttgtgtgtgtttgctgttatcttgatttcatgatttgttaggtatttttttcttgatgctagttatttcttcactgtacattgagacacagcactactgcacaccaaagtatgcaatacccaaaggaaactgtgtgatttctcctgacaaatgatgggagcctttctttatgagatactctgaaaaggagattttgaggccattctaatcccttgtttacattattagcttcctactaatataaaaataatggaaatcttttttgataaaaatattaagactggaggatttttaaccccttgtacagtattgcagcaaactctttaaatttggttgaattcgtccagcaaactttctggggttcatatattgcactaaatttgttgaacctgtggtaggcacatctcttaggataaatgcaaccaatacagtccacagattaaactttttaaatgtgtttcattatgaaaagacaaaatgtcatcaaagtgacagataaaattgtcttatgtagcaatgtgcattgatctcaatgagatatttctattattctcttacatgagaatattacagcaggaagaattaagtttagtttgcttcaccatgttaatacatgatcacaaaatgtgcatgagtgttattgacttatcttgtacagtactaggattcctgtaaccactcttttttttcttcgctgtattgaaactggttcagtgttaaccaggcaagcatagttattcacaggttatttactttatgtttactaattctgcttagttattgttgaatatgttctgttccagattatttttattgttttgatgtttaaaacattttgcatactgtttatcataaaacttcatgaagtaaataattttgcatataattgcaataagcactgacttttgaactgaaaagaaggaaagtgtttttttgtgcagtgcttctgaggttcatataatagtcttgtactataatgtgctttactacacgataaatgacaaaaacaagccctgtttcatgtttcatttagtgcaaaaagtcagatttccccagtgttttgttgtctgttgtacctgctgaaactacagtagttgaatattgcggtagcatttcagttctctttttttattaaagtgctcaaaaattgttttttaaatgttttcaaaaacaattaaaaacattttatattaaactga

SEQ ID NO: 2333 - DNA, 5054 bp, Homo sapiens
  SITE (834): n equals a,t,g, or c
gcaccagaggagcagactacaagaatggcacacgctatggaaaactcctggacaatcagtaaagagtaccatattgatgaagaagtgggctttgctctgccaaatccacaggtaagagaaggcagtaaaatgtgggaaaatgcattcttcttctcattccttacctggccaagttaacttctactgaacaactgtggttcagtaacttctagtaaacaaacacataaagctgtgtaaaaattagagagctgtaataactgcatctcacttaatttgtcttacattttctccctagaaatggagtcatctatgcatttcttacttacctaacatggatacggagagtggtgagaaaggaaactatagaaagtgtatcagctttacataagaattatatagtaaaatacaaacaatgaggttattacagttgtattttgagaaaaggtgttttgcaaaagccagagttttaaatgagccatgagtcaaacagaaatccctttctcttagggatataacttaaattatgcaaaacatgtgtttctaatttgatggggtttatgagattgcacatcaagcaccttccatgttatattatcattgcttgttatttactgagcgtaagattcaagtgagagtctgaactaccttttttcttgtttgcaagtcttacctataaagtacaaggtatgtggaaaaaaggtttgccttaaaaactacattttctagtctgtcttctaacgaatgctatgtaaaccaatttatcatcaatattttaattatcaaatacagcatttttttattcaatttacaaattaaccctttccattctcatanccatcccaaaagttatgtatgttatttatttattattattattattattttgagatggagtctcgctctgtcacctgggctggagtgcagtggcacgatctcagctcactgcaacctctgcctcctaggttcaagcgattctcctgcctcagcctcccaagtagctgggattataggcacctgccaccacacccagctacttttttgtatttttagtagagacggggtttcaccatgttggccaggctggtctcgaactcctgacctcaggtgatccaccgatcttggcctcccaaagtgctaggattacaggcgtgagccactgcacccggccagaaacgtatgttattatcctcatgttcctaatgagaagtataaggcatgcagaatgtaattatcaaactatgtagctagcaagtgccagaggccagtatgagcctaagcagcctgtctccagagtctatgatcttaaaaccattattccacactgcctctcttaagaagggataataagacattgcttattttctttctttcaatcttcagtttaacaaggtacatgggattccaggagaagatttctatgaacatgttataataattctgtagacgagtgtatttttgtttgtagctcaaacagttacagtccacatactagagagcacctttaaacacagcaaatgtttagtcagagatttcaacctaactgtgcttagaaatgaaatcctgtaaacaatttggtgatactggcaaatttaaagcatctacctccttccaatctaattttcctcttcagattgttaattaaagaaaatgaaaagtatactttaattttattgccaaaagcactagtttgctttattcatgcaaaacaataatactcaaacttgctatttgcccgcagatctacaaaaatgctgggactggatgatttcaaggatgtacttatcaatggtacaataaaaccatctttttcagaaactactaaactttgtatcatgggttttgtttctcagatattcgattctccttaaaaatgcaacaactgtgataattatgaatacctgtagaacagattccaaggagtaaagcaaaaccccaaaagaaaacaaacgaaactcttccttagctacttaaaaaaaagattctcggctggggacgggtggctcacgcctgtaatcccagcactttgggagacggaggcgggtggatcatgaggtcaggagttcgagaccagcctggccaatgtggtgaaaccccgtctctactaaaaaaatacaaaaattcgcagggcatagtggcatacacctgtaatcctcgctactcaggaggctgaggcaggagaatcgcttgaacctgggagtcggaggttgcagtgagctgagatcacgccaccgcactccagcctgggtgacagagcgagactccatctcaggaaataataataataatagtaattctgacaaggtgcagtggcttacacctgtaatcccagcactttgggaggctaaggtgggtggatcacttgaggtcaggagtttgagaccagcctggccaacatggtgaaacccctgactctactaaaaatgcaaaaaaaaattacccagcatgttggtgtgcccgtagtcccagctacttgagaggctaagacaggagaattgtttgaacctgggaggcggaggttacagtgaactgagattgcgccactgcactccagcctgggtgacagagtgaggccctgtctgaaaacaataacaataataacaattctgctagctgagatgctgcagaagctagattcactgtcccggaaacatgaaaaaaaattattggttacttttatttcttcactgaagatctttcctagaaattatgaaccaaaaaatgtctgttttatctctcataatctatctgcttcttagtccaaaggaaaataatatgttttctgattccatatagatagatacaaggcacaatctctaatctagcagaatttgaatgatcctcagtatgattcatttttaatttatattataccatttagggatcctctgaaccagagcatattactgattaaattttatacttgttgaaagtgctgtcaaataaaatgatcatcattgtgcagaacaaaaaagtattctgttatttggagaaaatcacaacaaccaaaaaaataagatgtactagatggtgaaacatagaataaaaacaacaaaaatacatttattacatttcttttgaaagttggaaacttcacaataaactcgatatacaaaaatcgttatgtaaactgtataagcctgggtttccttatttatgatacagagataacttcttgggccattacaataattaaatatgtatcttttatatatatgaaattatcgagcagagtgcctagtccactattgacatttaaaacatctcattttccttccattcaaagaacttaaaatctagccaagataaaccaaagtaggccaggcgcagtggctcatgcctgtaatcccagcactttgggaggccgaggcaggcagatcacctgaggttaggaggtcgagaccaacttggccaacatggcaaaaccccatctctactaaaaatacaaaaattagccaggcatggtggctcatgcctgtaatcccagctacttgggaggctgaggcaggagaattgcttgaacccaggagacagaagttgtagtgagccaagattgcgccactgcactccagcctgggcaacagagtgagactccaattcaaaaaagaaaagaaaagaaaaaccaaagcagcagataataattgtttaacaatttgaaaaggcataatccatagaatttatagtggaggagattggtttcaaatagagtagtcaggaggattttagtgaaacctttgaggtgaactttgaaaagctgcaaatggcagtgtttgaagagagaggaagaggtggaacacagagagggtcttcagccctgcgtgtgcagatgacaagacagaggctggtgtttccagacaggtaagccatatgccagggcaacattgcacagaatggatgtgaaggcaaggcatactatcagtgggaagccaaatctacaataactgctactactaaataaagatcttttttttttttcaaggaaaatctacctgatttttataatgactggatgttcattgctaaacatctgcctgatctcatagagtctggccagcttcgagaaagagttgagaaggtttgacatatgtattacatttgtcttcttgtatagcttcttaacattgttaacttggttttgaagcataaaacattactgagattgatttgagtcaattgctccatttgttttcagttaaacatgctcagcattgatcatctcacagaccacaagtcacagcgccttgcacgtctagttctgggatgcatcaccatggcatatgtgtggggcaaaggtcatggagatgtccgtaaggtttggagattttctcagatttcttatgctatgtgacagattttcatctaatttacatttaactttccaaaaattttctaaaagcattataactgcatcatgcaaagtttagataacacgacaaaatgataaagaaaatatgccctggcttgacatgtccactgttatcattattatatttttagtcttttacttcatttttcatcctgtattttatctggcaaccctaattacataaaactaatacagactgcaatatctaacctttaaaacacacatgggcctcccagcactttgagaggccaaggccggaggatcacctgaggtcaggagttcaagaccaacttggctaacatagtgaaaccccatctctactaaaaatacaaaaaatagccaggcatggtggcaggtgcctataatcccagctactcgggaggctgaggtgggagaatcacttgaacctgggaggcagaggttgcagtgagccgagatcctgccactgcgctccagcctgggggacaggagcaagactccatctcaaaaaaaaaaaaaaaaaaaaaaacaacaacaacaacaacaaaaaacctaactactgtattttaatcaggtcttgccaagaaatattgctgttccttactgccaactctccaagaaactggaactgcctcctattttggtttatgcagactgtgtcttggcaaactggaagaaaaaggatcctaataagtatgtaaacagtgataac

SEQ ID NO: 2334 - DNA, 114 bp, Homo sapiens
gggatgccgaggcaggtggatcacctgaggtcaggagttcaagaccagcctgggcaacatggtgaaacctcgtctctactaaaaatacaaaaaattagccgggcctggtggcgg

SEQ ID NO: 2335 - DNA, 430 bp, Homo sapiens
tgttggggaagggggcttccagcccactgaacacccctgtcctgccatagccccagaggtaccaccttgggctctgcccagtgctgcttcaacacctccagatgggaggagagggacctttccttccagttctaacccccacatcagtcaagggaaccctgtacaaaatgctgagaaagccaaagaaagtcagagtgcaggcagcttcttgtgacttactgcgggggctccttgtgtctcccctcctcctgcctgttagacttctccttgctggctgggcccacgcgtggatgcacgggtgcggaggatgggaacccaggatcactcagcaacgtgcttcttgtcagcttcctgcaaaggggagaaatcacgcgtcaaccagaagcttttaagtgaaaatctgaggacctcctaccttcatccaccagaa

SEQ ID NO: 2336 - DNA, 430 bp, Homo sapiens
tgttggggacgggggcttccagcccactgaacacccctgtcctgccatagccccagaggtaccaccttgggctctgcccagtgctgcttcaacacctccagatgggaggagagggacctttccttccagttctaacccccacatcagtcaagggaaccctgtacaaaatgctgagaaagccaaagaaagtcagagtgcaggcagcttcttgtgacttactgcgggggctccttgtgtctcccctcctcctgcctgttagacttctccttgctggctgggcccacgcgtggatgcacgggtgcggaggatgggaacccaggatcactcagcaacgtgcttcttgtcagcttcctgcaaaggggagaaatcacgcgtcaaccagaagcttttaagtgaaaatctgaggacctcctaccttcatccaccagaa

SEQ ID NO: 2337 - DNA, 430 bp, Homo sapiens
tgttggggacgggggtttccagcccactgaacacccctgtcctgccatagccccagaggtaccaccttgggctctgcccagtgctgcttcaacacctccagatgggaggagagggacctttccttccagttctaacccccacatcagtcaagggaaccctgtacaaaatgctgagaaagccaaagaaagtcagagtgcaggcagcttcttgtgacttactgcgggggctccttgtgtctcccctcctcctgcctgttagacttctccttgctggctgggcccacgcgtggatgcacgggtgcggaggatgggaacccaggatcactcagcaacgtgcttcttgtcagcttcctgcaaaggggagaaatcacgcgtcaaccagaagcttttaagtgaaaatctgaggacctcctaccttcatccaccagaa

SEQ ID NO: 2338 - DNA, 430 bp, Homo sapiens; identical to SEQ ID NO: 2336

SEQ ID NO: 2339 - DNA, 527 bp, Homo sapiens
ggtgaattaataacatgtgatgttggccaggcacagcggctcacgcctataatcccagcactttgggaggccgaggcgggtggatcacgaagtaaggagatcgagaccttcttggctaacacggtgaaaccccgtctctactaaaaatacaaaaaattagccgggcgcggtggcgggcgcctgtagtcccagctactggggaggctgaggcaggagaatggcgtgaacctgggaggcggcttgacagtgagctgagatggcaccactgcagtccggcctgggcgaaagagtgagactccatctcaaaaattaattaattaattaattaattaaaaaataaaacaacactgtgatgttaaggccctattttccaggatttatcatgattggttttattgagtaaagcctgggcaaaagacttaggtgtcaatttcgaaagactcatttaagtatctttttagaagtaacattatgtattattattgttgttattattattaaagttctgtgccaatcattattctaaa

SEQ ID NO: 2340 - DNA, 4025 bp, Homo sapiens
gcagagacctccgcctggcacacagggaatgctggagcaatacttaaataggtaagtggagggatcaaccggtggcatccatgggcagtggctggggaaatggagcaagcgaggactcttttttttttttcctttcatctatcttaagacccactacgagggcccttttctaccatggggtttggttgcaaaatgtgcaagcaagttccttctcccctcctgatccaggctggtgatggtgggaggcgggagagttcacttgctcttcactcatctcaaggaagctccagccactaccagcggaaaattcctgcatttctgattcaaaaacctaagtggaacaagcttcatggctgagatgtcccagggaccctcatgaaaagttagagaatcatcagaggttctttgaggcctggaaaatgattttcccagagaagtcacaatactaattagaatgcctctgcctggaaggctttccaggcccacagcagttttctgaagcatgaaacaaagctttctcttggagcaaagtgaagggtgagagaacagagtgggccggggaactgggagctgaaccctggaggtagcagctgctgcctggagtctgaggtgtgtgccggcagtgtggctactgtcctggggcccctgggagccgcaccactgcctcattgaggggatatcctgcccatgtgggctattcttgccccaacaaacaggctgacttttccccaactgggggggagccttcattgggattgcagaacatgattatgaccaccacccctcccagggggctgaggaaacatggcccaagccagggtggcccacgtggttataacatgacaattgtgcattatacggataggcaaggctgtggccagttgcaccctatgggttaggatgaaggtggcccctcattgctataagtaggtgggaccacgccttcccagataatgaaggaattcactctctgaatgggaccagaagagtctacgctggttaagagaagtgcggaaggaggctgtgtttggatggtccctggtcacctctgaaaaaacacagccctccagccctgaggccacagagaaagtacagtaaccagtttataagcatgcatcagtaagctttccatttcatattttcatagaagtttttaatttgattttgggattattcctgaatagtgcaattttatgacacatgaaaaaccaagaacacttgaaaatgatcatcacctttcactgttgagctggcttcttaagcaaaattcttggcacagtgcacccccttccccatggctgtgccttccctgacatttctagtgagctctggagcatgtaaacctaagccagttctaaggtctctaaaataaaggtccatctggaaccttcagcatggaagttccaagccaggaaggagatggagtggtaagaacatgtagagtttggtcaacttggctttgcaaactcttactccgtaagtaagctccacccctcagtttccccatctacacagtgggcatgataacagcgttgttgtaaagcttatagaaagatggtgcagccaaatgctggaggactcctgtggcactctgtgctttctttttggtaacataacaattctcaggcttttttttttgtttgtttgagactgagtctcgctgtgtcacccaggctggagtgcagtggtgcgatctgggctcactgcaacctctgtctcccagtttcaagcgattctcctgcctcagcctccggagtagctgggattacaggcacctgccaccatgcccggccaatttttgtatttttagtagagttggggtttttatcatgttggccaggctggtctcgaactcctgacctcaaatgatccacccacctcggcctcccaaagtgctgggattacaggtatgagccacagggcctggcgaattctcaggcatttttgtgtttgtttgtcttaatttctgtctttactactagcctccttcatgtatctcactgacttctatttccaccaatgtctatcacagttcctgagatatagcaggcactcaagacaggtgttaagtgaataaacaaagtgatgcattaacaaataaattgtttaaatgagtgactgagtaaaactcaacacagaacctacacatagtgagcatccacataataacaatggcaccattcctctttaaaacatacgatttgatcttttgcttttagaacacaaggcctttagatagtgcggtaagcttggtaggaaagttggtcactttaaagtcagtttaatttatagtaatattgggaaagaggatctataaggcaatctcacttccaaaatgcaaacaaacaagtgaaaaccactttgctttggtccttttcatatttcttccagagaagggaataaaaatttctatttaaaaatttgggataaactaggctaggtggtgtgcacctgtaatcctagctacttgggaggctgaggcaggagaatcgcttgagaccaagagttccagagcagcccgggcaacatactgagacacagacccttaaaaaaaaaaaaaggccaggggcagtggctagcccctgtaatcccagcactttgggaggctgaggcaggtggatcacttgaggccaggagtttaagaccagcctgaccaacatggtgaaattccgtctctactacaaatataaaaactagccgggtgtggtggtgcatgcctgtaatcccagctacctaggaggctgaggcaggagaatcacttgaatctgggaggcggaggttgcagtgagccaagatcatgccactgcattccagcctgggtgacagagactgtgtctcaaaaaaaaaaaacggacgggggggatctcctttgtagaaacagagtctcactatgttgcccagcgtggtcttttttaatttaatttttttgtatagacaggggtctttctgtgttgtccaagttggtctcaaactcctggacttgggtgatccctcccaaagtgctgggattacaggcatgagccatcacacccagggtctctttgtatctgttgctagtgatcctgacttcagaatgcagcatccgtgaacgtgccatgttgcatgcagctaaccagtgcttggagagactggacttaagctcttgtcttcaacccagacccaaggactgcctgttcctttgcagaactgcctagtacacagagttaaacgtcgtgtagcttgtatgattgggaaggaagcagaaagtagaattctgaaataacataactgattttttttcaaccagcatggcagcttttcgtgtttggaagccttcagaatcatttcctaccctctcaaggaacccattctttagaggtacacaccgttcctgtcagagaggctatcttcctagtgctaaatgattttttgatgcactgaaaattaaattcacactcaaatttctgcatttgaggagattttcctgtacgctgagctctgtcaaaagaggtatattgaagagagggtagttctgggaccatttgcaagacagcgcattgattggaagcctatacattctggagtgttggcttaatatgttgatcatcctttgaggtggggcacaaggaaaaataaactatttctccttcaggaacatacagtggcataagagagaccaacttggtgataactgatcataggattagaccaaggtgcagaagcaaacagaacctccataaaatgtaatgatgtcttgtgcctgcaatcctagtgctttcagaggccaaggtgggaagattccttgagctcaggagttcgagaccagcctgaacaacacaacaagacctcgtatctatgaaaaaataaaaataataaaattagctgcacacctatttggtggcacacacctgtggtcccaggtactcgggaggctgagatgagatcatttgagcccaggagatcaaggctgcaatcagctgtgatcatgccactgccctccagcctggacaactgagcgagaccctgtctccaaaaaaagtaaaatt

SEQ ID NO: 2341 - DNA, 528 bp, Homo sapiens
ggtgaattaataacatgtgatgttggccaggcacagcggctcacgcctataatcccagcactttgggaggccgaggcgggtggatcacgaagtaaggagatcgagaccttcttggctaacacggtgaaaccccgtctctactaaaaatacaaaaaattagccgggcgcggtggcgggcgcctgtagtcccagctactggggaggctgaggcaggagaatggcgtgaacctgggaggcggagcttgcagtgagctgagatggcaccactgcagtccggcctgggcgaaagagtgagactccatctcaaaaattaattaattaattaattaattaaaaaataaaacaacactgtgatgttaaggccctattttccaggatttatcatgattggttttattgagtaaagcctgggcaaaagacttaggtgtcaatttcgaaagactcatttaagtatctttttagaagtaacattatgtattattattgttgttattattattaaagttctgtgccaatcattattctaaa

SEQ ID NO: 2342 - DNA, 528 bp, Homo sapiens; identical to SEQ ID NO: 2341

SEQ ID NO: 2343 - DNA, 4025 bp, Homo sapiens
gcagagacctccgcctggcacacagggaatgctggagcaatacttaaataggtaagtggagggatcaaccggtggcatccatgggcagtggctggggaaatggagcaagcgaggactcttttttttttttcctttcatctatcttaagacccactacgagggcccttttctaccatggggtttggttgcaaaatgtgcaagcaagttccttctcccctcctgatccaggctggtgatggtgggaggcgggagagttcacttgctcttcactcatctcaaggaagctccagccactaccagcggaaaattcctgcatttctgattcaaaaacctaagtggaacaagcttcatggctgagatgtcccagggaccctcatgaaaagttagagaatcatcagaggttctttgaggcctggaaaatgattttcccagagaagtcacaatactaattagaatgcctctgcctggaaggctttccaggcccacagcagttttctgaagcatgaaacaaagctttctcttggagcaaagtgaagggtgagagaacagagtgggccggggaattgggagttgaaccctggagttagcagctgctgcctggagtctgaggtgtgtgccggcagtgtggctactgtcctggggcccctgggagccgcaccactgcctcattgaggggatatcctgcccatgtgggctattcttgccccaacaaacaggctgacttttccccaactgggggggagccttcattgggattgcagaacatgattatgaccaccacccctcccagggggctgaggaaacatggcccaagccagggtggcccacgtggttataacatgacaattgtgcattatacggataggcaaggctgtggccagttgcaccctatgggttaggatgaaggtggcccctcattgctataagtaggtgggaccacgccttcccagataatgaaggaattcactctctgaatgggaccagaagagtctacgctggttaagagaagtgcggaaggaggctgtgtttggatggtccctggtcacctctgaaaaaacacagccctccagccctgaggccacagagaaagtacagtaaccagtttataagcatgcatcagtaagctttccatttcatattttcatagaagtttttaatttgattttgggattattcctgaatagtgcaattttatgacacatgaaaaaccaagaacacttgaaaatgatcatcacctttcactgttgagctggcttcttaagcaaaattcttggcacagtgcacccccttccccatggctgtgccttccctgacatttctagtgagctctggagcatgtaaacctaagccagttctaaggtctctaaaataaaggtccatctggaaccttcagcatggaagttccaagccaggaaggagatggagtggtaagaacatgtagagtttggtcaacttggctttgcaaactcttactccgtaagtaagctccacccctcagtttccccatctacacagtgggcatgataacagcgttgttgtaaagcttatagaaagatggtgcagccaaatgctggaggactcctgtggcactctgtgctttctttttggtaacataacaattctcaggcttttttttttgtttgtttgagactgagtctcgctgtgtcacccaggctggagtgcagtggtgcgatctgggctcactgcaacctctgtctcccagtttcaagcgattctcctgcctcagcctccggagtagctgggattacaggcacctgccaccatgcccggccaatttttgtatttttagtagagttggggtttttatcatgttggccaggctggtctcgaactcctgacctcaaatgatccacccacctcggcctcccaaagtgctgggattacaggtatgagccacagggcctggcgaattctcaggcatttttgtgtttgtttgtcttaatttctgtctttactactagcctccttcatgtatctcactgacttctatttccaccaatgtctatcacagttcctgagatatagcaggcactcaagacaggtgttaagtgaataaacaaagtgatgcattaacaaataaattgtttaaatgagtgactgagtaaaactcaacacagaacctacacatagtgagcatccacataataacaatggcaccattcctctttaaaacatacgatttgatcttttgcttttagaacacaaggcctttagatagtgcggtaagcttggtaggaaagttggtcactttaaagtcagtttaatttatagtaatattgggaaagaggatctataaggcaatctcacttccaaaatgcaaacaaacaagtgaaaaccactttgctttggtccttttcatatttcttccagagaagggaataaaaatttctatttaaaaatttgggataaactaggctaggtggtgtgcacctgtaatcctagctacttgggaggctgaggcaggagaatcgcttgagaccaagagttccagagcagcccgggcaacatactgagacacagacccttaaaaaaaaaaaaaggccaggggcagtggctagcccctgtaatcccagcactttgggaggctgaggcaggtggatcacttgaggccaggagtttaagaccagcctgaccaacatggtgaaattccgtctctactacaaatataaaaactagccgggtgtggtggtgcatgcctgtaatcccagctacctaggaggctgaggcaggagaatcacttgaatctgggaggcggaggttgcagtgagccaagatcatgccactgcattccagcctgggtgacagagactgtgtctcaaaaaaaaaaaacggacgggggggatctcctttgtagaaacagagtctcactatgttgcccagcgtggtcttttttaatttaatttttttgtatagacaggggtctttctgtgttgtccaagttggtctcaaactcctggacttgggtgatccctcccaaagtgctgggattacaggcatgagccatcacacccagggtctctttgtatctgttgctagtgatcctgacttcagaatgcagcatccgtgaacgtgccatgttgcatgcagctaaccagtgcttggagagactggacttaagctcttgtcttcaacccagacccaaggactgcctgttcctttgcagaactgcctagtacacagagttaaacgtcgtgtagcttgtatgattgggaaggaagcagaaagtagaattctgaaataacataactgattttttttcaaccagcatggcagcttttcgtgtttggaagccttcagaatcatttcctaccctctcaaggaacccattctttagaggtacacaccgttcctgtcagagaggctatcttcctagtgctaaatgattttttgatgcactgaaaattaaattcacactcaaatttctgcatttgaggagattttcctgtacgctgagctctgtcaaaagaggtatattgaagagagggtagttctgggaccatttgcaagacagcgcattgattggaagcctatacattctggagtgttggcttaatatgttgatcatcctttgaggtggggcacaaggaaaaataaactatttctccttcaggaacatacagtggcataagagagaccaacttggtgataactgatcataggattagaccaaggtgcagaagcaaacagaacctccataaaatgtaatgatgtcttgtgcctgcaatcctagtgctttcagaggccaaggtgggaagattccttgagctcaggagttcgagaccagcctgaacaacacaacaagacctcgtatctatgaaaaaataaaaataataaaattagctgcacacctatttggtggcacacacctgtggtcccaggtactcgggaggctgagatgagatcatttgagcccaggagatcaaggctgcaatcagctgtgatcatgccactgccctccagcctggacaactgagcgagaccctgtctccaaaaaaagtaaaatt

SEQ ID NO: 2344 - DNA, 528 bp, Homo sapiens; identical to SEQ ID NO: 2341

SEQ ID NO: 2345 - DNA, 4025 bp, Homo sapiens; identical to SEQ ID NO: 2340

SEQ ID NO: 2346 - DNA, 4359 bp, Homo sapiens
ggatcagtgatttgcttagttctaacatgtagctgggacaatttatagaactgattccatgaaatgatctcttcaaaatcatgggtggtcaggaaatggacacatgaaatcacaaaatacattgttacagttaagtcacaactgtggtgtagagagaaactcctttcctcaaagtccttagaaaattccattgcatactttttggaatgttttagccaagttaaggctaaggctaagagatgtagaaagggaaatagaaaattgaagacagtggtatccttgtagttaagaagcagaaaatctcagagtaaaatttgtcatataccatttgcaaattaatatcagatgctctaaattcattttgtaaaactatttgttagcttatctataatttatttatttaaaaatacttcattgaaataaaacaaatgtgtgttggctttgcatttactattctcagaagtatgagaaggtcagttactggtatcagtgtttgttctcccttaggtgattctgtttatgcatatttgacttactatagaagttatcatttttgtaggtctaatgtcaatttgaattaaaatgattcatttgtctccatcagtgtttctgctatcattgatttctttctgtcagtattttaaacaatagcatcactctgtggaaagtgaaatgaatgtcatctagcatagctaattttttaaaaattataggattgaaaaggctgcatcaactaatttccgtgttttcttcgtttctaggttacaatggccaacattggaataaatggaaatcattctctggaaacctgtgaaacaacactttttgctctccgaatggcaacatggaatcaaatcttagatccttgggtatatattcttctacgaaaggctgtccttaagaatctctataagcttgccagtcaatgctgtggagtgcatgtcatcagcttacatatttgggagcttagttccattaaaaattccttaaaggttgctgctatttctgagtcaccagttgcagagaaatcagcaagcacctagcttaataggacagtaaatctgtgtggggctagaacaaaattaagacatgtttggcaatatttcagttagttaaatacctgtagcctaactggaaaattcaggcttcatcatgtagtttgaagatactattgtcagattcaggttttgaaatttgtcaaataaacaggataactgtacatttttcacttgtttttgccaatgggaggtagacacaataaaataatgccatgggagtcacactgaaagcaattttgagcttatctgtcttatttatgctttgagtgaatcatctgttgaggtctaatgcctttacttggcctatttgccagagaacatcttaatgcagcctgcatagtgaaatggttattttgagatcaccgctctgtagctaacccttataaactaggctcagtaaaataaagcactcttattttttgatctggcctattttgcccctcattgtgtagcctcaattaacacatgcatggtcatgacacccagaattcatgatggtttgttataacaacctctgcatattccaggtctggcagacaggttgcctgaccctgcaatcctatctagaatgggcccattcttgtcatatttgacaaataggactgcctacatttattattatgaaggtcgattgttgttggaagtgttttttcatgtcatagattagcaattttcaaataattattttttctctgaaaattttgtgtgtgattgcacaataaataatttttagagaaacaaaggctctttctcagcacattgatgggcaactagaattacagcagtttcaaaactctaccatggataatgcaaacaaaccgaagctacatgccaatgataggtgcaaagaatattggcaaaaggtgctttaccttgagccattatttgtgtcagagaacaaaagaaacagaatcaatatataaattcaaagactatctgcagctagtgtgtttcttctttacacacatatacacccagacatcagaaaattctgttgagagcaggttcattaaatttgtaagatggcatattctaaagcctgtgctaccagtactaagaggggaagactggcaatttgccaagcacttggggattattattacaattaactaggagatcaagagataataatctctccccaaattttccaataataattgagactttttctttgcttgtttgtgtaattcaaccaaaagaatttcaatacccattcaaattgtcctaggtctatcagaaattagggaaggtagtcctgctttataataggaaaatgtatttctgtataagagttctttgctttcattaacttggattcatttaaaaattaatcttccctgttaggctgatttcagattctctaggaaatctgtgtaagtaaccagaagacctttcagatggtttatttgctttcagcagagaatttatttcatacagttacttaagagtgttgatgtcttgtgaacagagatataaggaaccattctccatccttccttatcatgctgggtacaatgcttctatgaatatttccatgtattttgactggggagaggcatggagaagaaactctcattcaggggctccaggatccttctccttgaggcttctaaataaatggcagaattcttgctgtattgccatgatgtcaccctggccatgtgtactgacttgaggagatcttgcaacatggccatgtgcaaggctttaaggagtgagagagatgtgtacatatcttaggagggttatctatgttatctgagtatatgtttgggtaaccaaattggtcttaaaaatgatgttaacccaagaagtagacatcaaaaattaaaaaaaaaaaaaggaatgtgttttcattgttttaagtttttcttctgagtaaaacaaaattatagaaaacaaatgcaacaatgtgcacatctgacttaagagtttcatttctgttattatatgtgttgcatgtagcttggcgatttactgtgtaatgaataatagactggaacatctaccaataactttcacataaatgttcaaaatagaagtgtattttttcaggtttctggaaataaatagtaaaataaatggcacaaatagtttcaataaatttaccaatttgagtgttttcagctctatttcaaaactcataactaatcttcagaattactgaatttccttttgaactgggtaaggcattatccaagcaacttcacatactatttaaacatgatttctcggtaattatatattctgggcaaataacataaacatgtcaggatttttacaggtgttagtgaatttttctaaaaagatgagacaaaagcaaaaatatcacacataggtttttatgactatgaatacaaagataatgctgattcacaattagctatgggtaagtccaaaacatcagaccttttactgatgggttaactaggtgaaagaaatgggcccttatttttttttttccctagaggcagaaagttacttctaatgatctatatagctaaaacgaaaaatacctgaaagttaatacatacatatgtagatatattttgttatgtgataaatgtttcttgtttgcacacttttggacttgagaaatctgcttttgttttgtgcctactctgagtttagaacccaaataagaggacttgttaaatatagagtgtactttttgttaaaactattgctagcttcacctgtataccatcattgttccaaattaaataactgttttgggtcagaatataaatgctgggaatatacattttattacttcttaatctgggtgtcaaagattttaccacctggtaaataatgttggacttcaacttgttactggcacattttaatagtagatgaaacatgtttttcttggttatgtgaataaatgtatgttgtgctcttcatacttgttggattgtatagagattaaatagtgatatgtatattttgttgtttgctttggtatgcaactcatgtaattttagtgctttgactagcttaaaacttcaaacaagtaattttataataaagttggactaatgtttttcaagagtgattatttttagaaggaccatataaaacttgaaacgcttgaacctaaactcccgttttatctgctactggatgagaagaatttcaacttaatttccattattaccttttgctctcccaccctgcccaatcttctgtgatatcttctctcttttacctgtgtctcaacttacctaggcaagtcataatttagatagaaatctgatttcccaaacctccaggtttagatatatcattcagaaaagcc

SEQ ID NO: 2347 - DNA, 4360 bp, Homo sapiens
ggatcagtgatttgcttagttctaacatgtagctgggacaatttatagaactgattccatgaaatgatctcttcaaaatcatgggtggtcaggaaatggacacatgaaatcacaaaatacattgttacagttaagtcacaactgtggtgtagagagaaactcctttcctcaaagtccttagaaaattccattgcatactttttggaatgttttagccaagttaaggctaaggctaagagatgtagaaagggaaatagaaaattgaagacagtggtatccttgtagttaagaagcagaaaatctcagagtaaaatttgtcatataccatttgcaaattaatatcagatgctctaaattcattttgtaaaactatttgttagcttatctataatttatttatttaaaaatacttcattgaaataaaacaaatgtgtgttggctttgcatttactattctcagaagtatgagaaggtcagttactggtatcagtgtttgttctcccttaggtgattctgtttatgcatatttgacttactatagaagttatcatttttgtaggtctaatgtcaatttgaattaaaatgattcatttgtctccatcagtgtttctgctatcattgatttctttctgtcagtattttaaacaatagcatcactctgtggaaagtgaaatgaatgtcatctagcatagctaattttttaaaaattataggattgaaaaggctgcatcaactaatttccgtgttttcttcgtttctaggttacaatggccaacattggaataaatggaaatcattctctggaaacctgtgaaacaacactttttgctctccgaatggcaacatggaatcaaatcttagatccttgggtatatattcttctacgaaaggctgtccttaagaatctctataagcttgccagtcaatgctgtggagtgcatgtcatcagcttacatatttgggagcttagttccattaaaaattccttaaaggttgctgctatttctgagtcaccagttgcagagaaatcagcaagcacctagcttaataggacagtaaatctgtgtggggctagaacaaaattaagacatgtttggcaatatttcagttagttaaatacctgtagcctaactggaaaattcaggcttcatcatgtagtttgaagatactattgtcagattcaggttttgaaatttgtcaaataaacaggataactgtacatttttcacttgtttttgccaatgggaggtagacacaataaaataatgccatgggagtcacactgaaagcaattttgagcttatctgtcttatttatgctttgagtgaatcatctgttgaggtctaatgcctttacttggcctatttgccagagaacatcttaatgcagcctgcatagtgaaatggttattttgagatcaccgctctgtagctaacccttataaactaggctcagtaaaataaagcactcttattttttgatctggcctattttgcccctcattgtgtagcctcaattaacacatgcatggtcatgacacccagaattcatgatggtttgttataacaacctctgcatattccaggtctggcagacaggttgcctgaccctgcaatcctatctagaatgggcccattcttgtcatatttgacaaataggactgcctacatttattattatgaaggtcgattgttgttggaagtgttttttcatgtcatagattagcaattttcaaataattattttttctctgaaaattttgtgtgtgattgcacaataaataatttttagagaaacaaaggctctttctcagcacattgatgggcaactagaattacagcagtttcaaaactctaccatggataatgcaaacaaaccgaagctacatgccaatgataggtgcaaagaatattggcaaaaggtgctttaccttgagccattatttgtgtcagagaacaaaagaaacagaatcaatatataaaattcaaagactatctgcagctagtgtgtttcttctttacacacatatacacacagacatcagaaaattctgttgagagcaggttcattaaatttgtaagatggcatattctaaagcctgtgctaccagtactaagaggggaagactggcaatttgccaagcacttggggattattataacaattaactaggagatcaagagataataatctctccccaaattttccaataataattgagactttttctttgcttgtttgtgtaattcaaccaaaagaatttcaatacccattcaaattgtcctaggtctatcagaaattagggaaggtagtcctgctttataataggaaaatgtatttctgtataagagttctttgctttcattaacttggattcatttaaaaattaatcttccctgttaggctgatttcagattctctaggaaatctgtgtaagtaaccagaagacctttcagatggtttatttgctttcagcagagaatttatttcatacagttacttaagagtgttgatgtcttgtgaacagagatataaggaaccattctccatccttccttatcatgctgggtacaatgcttctatgaatatttccatgtattttgactggggagaggcatggagaagaaactctcattcaggggctccaggatccttctccttgaggcttctaaataaatggcagaattcttgctgtattgccatgatgtcaccctggccatgtgtactgacttgaggagatcttgcaacatggccatgtgcaaggctttaaggagtgagagagatgtgtacatatcttaggagggttatctatgttatctgagtatatgtttgggtaaccaaattggtcttaaaaatgatgttaacccaagaagtagacatcaaaaattaaaaaaaaaaaaaggaatgtgttttcattgttttaagtttttcttctgagtaaaacaaaattatagaaaacaaatgcaacaatgtgcacatctgacttaagagtttcatttctgttattatatgtgttgcatgtagcttggcgatttactgtgtaatgaataatagactggaacatctaccaataactttcacataaatgttcaaaatagaagtgtattttttcaggtttctggaaataaatagtaaaataaatggcacaaatagtttcaataaatttaccaatttgagtgttttcagctctatttcaaaactcataactaatcttcagaattactgaatttccttttgaactgggtaaggcattatccaagcaacttcacatactatttaaacatgatttctcggtaattatatattctgggcaaataacataaacatgtcaggatttttacaggtgttagtgaatttttctaaaaagatgagacaaaagcaaaaatatcacacataggtttttatgactatgaatacaaagataatgctgattcacaattagctatgggtaagtccaaaacatcagaccttttactgatgggttaactaggtgaaagaaatgggcccttatttttttttttccctagaggcagaaagttacttctaatgatctatatagctaaaacgaaaaatacctgaaagttaatacatacatatgtagatatattttgttatgtgataaatgtttcttgtttgcacacttttggacttgagaaatctgcttttgttttgtgcctactctgagtttagaacccaaataagaggacttgttaaatatagagtgtactttttgttaaaactattgctagcttcacctgtataccatcattgttccaaattaaataactgttttgggtcagaatataaatgctgggaatatacattttattacttcttaatctgggtgtcaaagattttaccacctggtaaataatgttggacttcaacttgttactggcacattttaatagtagatgaaacatgtttttcttggttatgtgaataaatgtatgttgtgctcttcatacttgttggattgtatagagattaaatagtgatatgtatattttgttgtttgctttggtatgcaactcatgtaattttagtgctttgactagcttaaaacttcaaacaagtaattttataataaagttggactaatgtttttcaagagtgattatttttagaaggaccatataaaacttgaaacgcttgaacctaaactcccgttttatctgctactggatgagaagaatttcaacttaatttccattattaccttttgctctcccaccctgcccaatcttctgtgatatcttctctcttttacctgtgtctcaacttacctaggcaagtcataatttagatagaaatctgatttcccaaacctccaggtttagatatatcattcagaaaagcc

SEQ ID NO: 2348 - DNA, 418 bp, Homo sapiens
tcccagggggcagctaagtgcaatactatatgttaggaaaacggaaactaatttgtagacagcactaatgatttccacattaggtaaaaaaaattttcattcttgtcttcctaatagcatttaaacagaaacgatttttaaaagttgttttaaacatttagaaacatcatggcatagaaacatttaggactcactctttgtaagtactgacaagcatggtcttgtaatctgtaaagataaggtagaataaatgaactaaaagaaattttagatgactaaaaggactatataatagaaagagggaaatcttggttcttaaaaattcaggcaattgaaacatttctgtataataccaagcattgttgcagtattgtctgaaatggttgcttttctaataaatgaaaatgactaaaatgta

SEQ ID NO: 2349 - DNA, 418 bp, Homo sapiens; identical to SEQ ID NO: 2348

SEQ ID NO: 2350 - DNA, 452 bp, Homo sapiens
ggcaacactgtggcctgaggcatgataagaaacggctttgtagctgaaagaaaaataaacattccatgattgtagatgtctttgttagtaggaccaacctcctatttaccataaactgtctcagtcttggcactgaaagtccagtgtccctggaaacccatcagtccggggcaaaccaggatagttagtaaccttagtttttggtacactggttttactgcctctgcagtggaacagaagttcttgcactgttttagagctttgctgagccgagaacaaaatctcctgagaataaaataattgtgattccaaatggacatttttggatggtggagagaggtatccccaaatcctcggtaactaatgagttccctctttcaatcaataaaaatacagctgaaccagaaccaatgtccaggggaacattgttacgtcaaaggatcatagaattt

SEQ ID NO: 2351 - DNA, 9973 bp, Homo sapiens
aactgtaggataacagtgtttttaatatttaagtaacaaaacattcaggttaatactcaatgcatatacaataagatagagcaacaacaacaaaattacaaagcacaatctaactatatggaggctttcaaacaattaaatgttggatagagaatgcgctaattaaaaacccagctgagccacaccgcactacctgagacctgaccagggactttctggtggtagaagggagagctcattgtgccctgtggccttcaactcaaatggatgctcttcaactcaaatccagagagcacttaacaaactccatgctctagattgctcaaccctcctccttgcttttcttttttctttagttgacttgtctgctcatcctttacccaaactgaggcagtgagttccacaaatacttcctctggtttggtttaaatgttgctgtctcagtgagaagggcctctgagctcactgctctgactcttgaacacaacttgttatttaatggggcataatccgttctttccccagacatagtctgttcagcctgaagatccttatgagtattcaccaatccccttggaggtcactttcatatgtactattgatgtgaggactttcctctcaaataataacctaatggccaagttcccctgcaccaatgctgctgtgggtagtttttagagactgctcttacctcagtttcctagggggcctatctggctttggtactgggatggaattctactgtcttggaaggaatttagactttctgctcaaaagggcagtgatgtaagctcagggaaggtgtgtggttgcaaagagctttcagttttgcccaaacatctgatggtccaaccactctaggtgaattcagagaagtgaacagctctcagagtaacaaaactgaccaccagctagttgtgatggcgcacacctgtaattccagctacttgggaggccagggtagaagaattgcttgagtgcaggagtttgaggccagcctggaaagtgagaccccgtctctaaacaaagcaaaacaaaacaaaaccgaccacagtgccaggaaagtgctactgctaactggcagtggcttgtaaccatgcaaatgtggatacctgtcacttggaaacattacatttaattcaggctcaacttttttttttttttaaagaattagttttaacctacttcctaggacttgctgtgttccattatttattttttatttttttagacaggatctcgctatgtcacctggctggagtgcagtggtgtgatcatggctcactgcagccccaacctccctgggctcaagtgatcctcccacctcagcctcccggaatgctgggactacaggtgtaggccaccatgactggctgattttttctctctgtattttgtagagacagggcttctccatgttgcccaggctagtctcgaacttctgggctcaagtgatccttcctcctcagcctcccaaagtgctaggattacaggcgtgagccactgtgcccagacattatttactttttacatggcttacacttactatcatgtacaatcagagccatagagacctcaaagggaaagaattaggatcagtgagcttttcatggaatttgtacttaagcatgactttacaaagtaccatatagacaatgtcaaagcaattattttttcatttccttctatccacatgtaggggtgaggctatttcacagagatagtgtatcattttactaaaacattatttattttaactatatttaggacttaaattaaaaaaaataattttctcattcatctagggacaatttctgacccgcgacagaaagaggactccagtggagagctcaggaaactcctagaatggtgttgctgtaataagaagatgtcaacagcagtagaaaggtttggttgcctcaaactgaaaatgactttggtttggtaacttttaagatcacagtgtaagaaaaccgagatcatgggctggagagattacaaatatctttctcttattgcttcttcttcagtaagtgtttattactagccaagttgggggtggggagacaaaattcaaacagcagaaaataacatctttgggtctactctttcctttcaaaagttttcttggggataagctgggaaatagatcatcaatgggtttattgactaggaggaagagggggagtctgtctaaatcatcaaaatgtgagagagagattaaaaccacattctctcatcagagtagaaagttatatttaaaaaaagaaatagaggattgaaaatgtgagctatagcctctaattcataaataactcagctgttttatggtggaatatttagagacagagactgaggctaagaccatttggcctctccaaagatgaaatcgaggcttttctaacttccagctgtgagtcaaaagcaagaagaaatctagatgggatctccttgttttttgggtgagctctccgggagtttcttccgcccgtgctgagaggtcttagagcattacacatagtcgtgcttggaaggataagattgtacctcgtcctctgtgcgggcacctccatcgtatatcttcttgtttttggtgttggacccaaagccagtgctggccttgaagcctccaggcttgtaggcaacactgtggcctgaggcatgataagaaacggctttgtagctgaaagaaaaataaacattccatgattgtagatgtctttgttagtaggaccaacctcctatttaccataaactgtctcagtcttggcactgaaagtccagtgtccctggaaacccatcagtccggggcaaaccaggatagttagtaaccttagtttttggtacactggttttactgcctctgcagtggaacagaagttcttgcactgttttagagctttgctgagccgagaacaaaatctcctgagaataaaataattgtgattccaaatggacatttttggatggtggagagaggtatccccaaatcctcggtaactaatgagttccctctttcaatcaataaaaatacagctgaaccagaaacaatgtccaggggaacattgttacgtcaaaggatcatagaatttgtgagctggagggtacctacgttcagcccattgcctcaagctgctcatttcatggatgaggtgatagaggcacagagagggcaaacaacctgctggaggtcacagggctggtcagtagcagaaccacactggaatccagctgtccccacaccagttcaatttaggaagttacagcagagtttctcagcagcagcactgttgacgttttggaacagatgcttctttgctgtggcacagttctgtgcactgtagggtgttcagcagcatccctggcctctacccgccagaggccagtatcactttcccccaccctcccaaaattgtaacagttaaaaatgtcttcacgtgttgccagatatcccctgggggggaaattgctcctagttgagaaccatggagttacaaaacaatctcagaaggaacaaagaaggatggatttttctttcaaataggatcacatttaaatcagtctaggctgaaatattcccattctgttctttaggttccccctaaaagagaagcttcgataatccttaagtcaaataaagttcatccatatacctagactgattttttttttggctgcaagttatacattaaaatagaccctgaacaaataaaacgtctggttgcagcggaacagggagactcacttggtttcttctggtgccaggccccggcaggcgatgcacatcatcacacccccaattagtgtgaggcctccagcgacccagcccacgaacagagccgcaccaaatgtgtacctgggtagggagatggtggctgtcaatatggttgactcaactctccaggctccacccactgcacctggctgtgcctgttctttctgtccccacttttggattccacatccatccctgaccatgcccctgaacacacattcctgtgggtcacagccaactgatcaggtaccctggagagtagaattgggactaaagttagggggcaaaacagcagggggattctagcatcactcaaccataaaattataaatcttatctctgtgacacatctcaagaaatctccctcccctctctactggcaaaagaaagtgtcttgaaggtttggcaagagaaatttgaaagatataaaatcaatctcgactgggtacagtggttcatgcctgtaatcctagcactttgggaggccaagtttcaactgaggtctggagttcaagagcagcctggccaacatggtgaaaccctgtctctactgaaaatacaaaaattagctgggtgtggtggtgcacgcctgtaatcccagctactcaggaggctaaggcacgagaattccttgaacctgagaggtggaggttgcaatgagctgagattgtgccattgcactctagcctgggcaacagagcgagactctgaaaaaaaaaatcaatctcaagttattatttctgaaggaattttagttctttgagttctcagtatgggccaacgagtagtcatcttaacttatctcaaataatccttacaaccctccatgcaggtagagctattaccttcagaaggaactaagttgaagtgactattcattcttttattgatgtctttacttatttgttcaacaagtctttattgagctcctactatgtgcagagccctgccctggtactgggacacagggcgaacaaggtagacagagaccctgtgctcgtggtgcttctgttccagctcacaagagaattctaacttggggtggtctgactccaaagctggtgccctttgcctaggggggctgcctccaatgggactcaattacatcagatcaggattgggaacaaaatctcctgagaaaaaaataattgtgatcccaaatggatatttttggatggtggagagcagtatccttcttcaagtgaccaaaaactattaggatgtcagtgcgtattttaatgccagctgataacttgatttccggctccatgagttctgcagaaaaggagagctcagcatggaaaaggagtgccttctcttggaagtttccctttgtgttcctcaaagagcatggggactgtttgtagaactctgtgaattactaatatgtttaaagtctacgacacaagctaagaacgttataccaacaataggaagacaagtaatatgtgtgcaaacctctgcaacctaagaaaatacaatactttagatgtgctttaaaagcacacacattggctgggtgtggtggctcacgcctataatcccagcactttgggaggccgaggcaggcagattgcctgaggtagggagtttgagaccagcctggccagcatggtgaagccccgtctctactaaaaatacaaaaattagccaggtgtggtggcaggtgcctgtaatcccagcaacttgggaagttgaggcaggagaattgcttgaacccaggaggcggaggttgcagtgagccgagattgcgccattgcactccagcctgggcaacagagtgagacttcgtctcaagaaaaaaaaaaaaaagaaagcacacacactttagcaggattaaagtaaacaatgtaagcttcatgatcaagtatagttgactgagctcagtccttgaaaaagttctgggagaacatttacctgtaggctatttttatttccttggactgggaaaaagacagaaatttggtttaagggcttctgccttggcatgaagagccctgccccctcatcctacccagtgtggctgggagctgaacagcggatcttttcctggggcttctcctagggggtccctaggtgatttcctgctgacagctctggtccatgggccctgacacagacagagcccctgtccttgatacccctatggatggttgagtgattgcttaatgctaatgatgataacaacaattgctaccatttattaagcccttactgatattgtgataagcacttttttaccactatcttgtttaattctcccaatagccactgtgatagtatttgtcacttgcattttacagatgaagagattgaggctcagcaaggttaagtaacttctccaatgacccaggaaggacacgatatcatcaggattcaaattcaggtcactttgccttcaaaactctcattgttaatgcatcttctgagcatgagggacaaagtccttttcctcaacttagacactctgggtcaaggttagcaaacctaaatacttacctgggacaggcaagaaacttaaatgtgaagtgagctagatagaagaacatatttcattttttcaactgtaatatatgggaaaaatccctataagcatgagttgggctatttgggcatagtggggattgtggtaaactggacagagtgagtcctagccaaaagggcagctgcctctcagctgcagagatggaggtcatatgagaatgagggcccagtgtaatgctgccagatcttctgattttttacacaaagctggaaaagcagagtatgtgtatgtgtgtgtggggtgaagtctccttgtagtaggcactagtggtgctctaccctttaaccgtttctgtgggtctcttctccagcttgtgtattccttttcctttacctgctggcccctgtggctgcctctggaattctggctttggtttagccactgaagccactctgcccccagggactgactggcaccgaggtatgaaagctcagctctttagtttggagttgagacaactctggcgtataattcacactgcacagctctcctcaggatcaggctgagttcagggcttcacctgaaatcacgcccgtgcttggcttcccttccttcccgtccctgtttccttcacccactaaccatctcccttttcttaaagaactctggcactgggatcctcttctcaggatctgtttctgagaaaaccagcccttaacccttctaatttttttttgtttgtttttttgagatggagtcttgctctgtcacccaggctggagtgcagtggtgcgatctcggctcactgcaacctctgccttccaggttcaagtgattctcctgcctcagtctcccaagtagctgggactacaggcgcctgccaccacgcccagctaattttgtattttcagtagagatggggtttcaccatattgaccaggctggtctcgaactcctgaccttgtgatccacccaccttggcctcccaaagtgctgggattacaggcgtgagccaccgcgcccagcctaacccttctaatttttagaagttggtaattggttcagattataaaatgaaatgttttatacaaaacaccttgcagactgtgtacagtgtgagggcaggcagtttgcagctctagtcaggggcttaggctctgccactgttacatacaacacggcaataacagagtcggggaacaggagaaggaggggggtcccaggaccaagtggggcactggaaccaaagctccatcaaggttactgccaaggtctttcttggcagctgggctgtcttgtaagacttctgggtggagaaaatgagaagacaaaagaaagggaaagacagctgcccatccatggagggagaagttcaggaggcctttcagaattctatagtcttaattccaggactgaagctgcctgcctgtgggacaggagctggtgctagggagatgatgtgagagagtgatggcaggcattagtgctaactgcaaagtggctggtagatggctcctctgggcaagggcaatgaccccaggcacccaaatactctgggaaaggtgggcttttctaagtagggtgagcaatcattcttgtttgcccatgatagaggggtttcccagaatgtggaacccataatgctaaaactgggaaagtcccaggcagactggaatgagttggtcaacctacttctaagttgcacctgtaactaagagaccatgagtaggatcagggaagtttttggggatcatttcctttacattcttgaaataaagcagaaaaatgaatggggattggagttccagggagccagagggtaatggatttatcacaccctccctctccgtctgtaccccatgttggtgtggctggaaaaatgccaagtgcatgatccagagatgacaggtcactgaggtctaatatttatatttcttctcaagaacaagatctttctttttcaggaatttgctccagcttcttgctatgagatctatccctttaaagtgactaaatgaatatgggcgttggtattgcttttccatcttttaaaagttctactctccttcagacaccaaatcgtagtggggtttcatctccctctgccagactgtaccccctgtgagagtggggactttgtatctccagcactctgaacatgtcttggcttacagcaggtgatcaatacatttgtagaataaatgaattaatgaatgagagaaagaggcagctataccaggaaggaacatcacttttctcacccatacttcaccttgctaatttctattcaaacgtttccctgttcctagccaggttccagttatggactgtagatgtaagttgatgttcatttacttgcctgggttaatagtgcctgtttcattgccaccacaatggggcttatgtaagagtgttagataaatactatgaactgtcactgtatttcaatgcaaatgtcagatcagcctcaagtcatatcaccaaggatatttcactgaaatgaagtttatgaatttacaggtgattgttgatttatgatatggcatggttgtctctgataatttttgctatttcaggcactgacagtcacattaggtgcatgtgtttaatcagattcttataacaatattcatcatggtgaatgccgagacctagattaggaggttacctggtctgaacagtctgcaccatcccacccatgccggtgtacatgttagctgtggacatccagaagttagtcaccagcatgttggcaaacacagacactccagcaattgcacaaagacctgtgggcaaagaaaaagaaaactccagagttagtttcaagggattacaatgtttctgaggcagtttatgcctagatgagtttagatgagtaggctgcagaatattgtatccctataaccaagcattgattattgaattcttgctatgtgctaaatattgtgataggtgcttagaatgttttatatcgctaattgtggaaggatatgtgtgtgtacagaaagaaatttttcatgcatcttgggaccaaggctcaatattccaaatattttcagtctggttctttggtaatgtcaaagtatcttcccttaaaatcgttttctaaagcctcgccaagaaaatgccttttagggatcaagtcacatgactcttttagggttgagaacctcttttttttcagcttaagttaagattcaaaagctaactaagttttttttttttaataaaaaaattttcttttaatcgacatagggtgtcacaatgctgcctaggctggtcttgaactcccggactcaagtgatcctcctgtcttggactctcaaagtgctgacattatagatgtgaaccactgcacccagctaagaacctcttatattggggttggagtggcagctaagaaggaccttagtactcatgatacacaattggacctccacactcagatcatgaatctcagtatgaaaagttctgaaccacattcagcagtagggaggagtcatgttttctctaccagaataattttgctttgacattcgcagaagtgggaactccaggctctgtgtttacctgagacaatgaacatgatcccggaggtcagtgtcatgttggctttggcagagtcctccatgctgccaatgcggatgcatttcagggcaaagatggataccaggaggccaatggcacccaggacgatgcctacgatcatcagg

SEQ ID NO: 2352 - DNA, 960 bp, Homo sapiens
gtacaatcagagccatagagacctcaaagggaaagaattaggatcagtgagcttttcatggaatttgtacttaagcatgactttacaaagtaccatatagacaatgtcaaagcaattattttttcatttccttctatccacatgtaggggggaggctatttcacagagacagtgtatcattttactaaaacattatttattttaactatatttaggacttaaattaaaaaaaataattttctcattcatctagggacaatttctgacccgcgacagaaagaggactccagtggagagctcaggaaactcctagaatggtgttgctgtaataagaagatgtcaacagcagtagaaaggtttggttgcctcaaactgaaaatgactttggtttggtaacttttaagatcacagtgtaagaaaaccgagatcatgggctggagagattacaaatatctttctcttattgcttcttcttcagtaagtgtttattactagccaagttgggggtggggagacaaaattcaaacagcagaaaataacatctttgggtctactctttcctttcaaaagttttcttggggataagctgggaaatagatcatcaatgggtttattgactaggaggaagagggggagtctgtctaaatcatcaaaatgtgagagagagattaaaaccacattctctcatcagagtagaaagttatatttaaaaaaagaaatagaggattgaaaatgtgagctatagcctctaattcataaataactcagctgttttatggtggaatatttagagacagagactgaggctaagaccatttggcctctccaaagatgaaatcgaggcttttctaacttccagctgtgagtcaaaagcaagaagaaatctagatgggatctccttgttttttgggtgagctctccgggagtttcttccgcccgtgctgagaggtcttagagcat

SEQ ID NO: 2353 - DNA, 308 bp, Homo sapiens
tggtccctgatgaggctctgaaaattgaaccgactgtgtggtaaatgtgtatatatgagcgtgagtgtgtgtgtgatccttgagtatttagagtgttgggccactagtggggcgagatcagcgttgttggagggttaaagtatataaagcactaggcacagtactgattattatgaggactcagtacagaagttagataatgaaaatatgttagtgaatcattgtaatcaatcctgaaggtcacataattggttggcaatgcagtcagaaccagaaatccaggtttttgattccaagcccagtgctct

SEQ ID NO: 2354 - DNA, 479 bp, Homo sapiens
tagtgcatccttaaattgcagtgactcatagcaacaattgtttactgagccctcctgactggccatgggatgacagtagttaacaacaggtcagacatggtctctgttgtcatggagcttatgccaaagtggcgaatgacagtcactaagcatgtctattacaagtataattaatttaacaaggaagacaaattagtccttcatgtgttccagaaggcaaggcccctagtgtggttggtctggtggagctgaactgcaaaactgtgtggagatgcttatgtgctagacaccaattgttttatccctccagtatatccccttttttcctcttaagtccgtgatttctgaaggagttgctgtgtcttacatcagtgcttttcaaactacttaaaaatttaaatttctaatctgtcacaaattgacatcctgacaaaatacaaaatcacctgcttgagtgtcacaggcatgtcaaattgtta

SEQ ID NO: 2355 - DNA, 350 bp, Homo sapiens
tcctgatgttaatgtaaattctccatttttgttgttttcccaagattttagatcttttgtgtttcaattatgaattttagaataggcttgctaattactataaaaaggagtatgattatgctgagactgtaattggggttgggttgaatttgtagatcactttggagacattttaacagttttgaaagttctagtcatgaacatggcacatctctccatttatttaggtcatctttaattttcctcagcaacattttgtagttttggtagaggtcttgtatatcctttgttaaatttattactaaggattttatgttgtatgatgcaaaaataaatggaattgtttttta

SEQ ID NO: 2356 - DNA, 372 bp, Homo sapiens
cacacaaatagggacagttttactttctttccaatttttatacctttatgactgttattgtactatcccagaccttcagtgacatgttgagtagaactgctgcaagtagacatccttgccctctttaaatgtgaagtggggggaaatgttcaatgcttcaaaacttaagttaactgtaggttttttaataggtgtccataagactgagtaaattatttttttagtttgctgaacgttttttgtttttattgtaaatgagtagtcaagttagtaaaatcttatttagcatctattgagataatcatatagtttttcttttttattttctgaatatggtaaattatgttgattaaaaatttttttgttgtaaaa

SEQ ID NO: 2357 - DNA, 1346 bp, Homo sapiens
aataaacataaattactgtcacctgctttagaactttacatttaggtgaccataaatgtccttgacatcctttactcacgataatgtttttgagattcatctaggttgttgtacataccagaatttcatttctctttattgctgtgtagtaagtgatctgttttatgaatatacatggtttctttcacttgtccacatacgtactattaggaataaagcagaacattattgtatgaggccttttgtgggcatatgtttttatttctcttgagtaaatacctaggattggaatcactgggtaataggataggtgcaactttataagaaacagctagagctttttgtactgttttacctgcccaccatcaatacatgggaggttgtgttgctatacattctcaccaacaatcagttgtttgcagtcatgtatattttagtcatcttaatgggtatgtagtttgtgcttttaatttatatttctcattttggttttagtctgtatttctgtgatgatattaatattgaccactttgaattttcatgcatttattagccatttgtttatcttcctttgtgaaatgtcttttcaagttctttatccattttaaaaattggattttgtttttattgagttgtaggagttcttttagtttttttttggtatatatatattctgcttttaagtcttttctcagtagttttgctaggttgtgaagatgtttttaatgcatttttctagagggtttaccaatttatcatttaacctttgttaaggtctatgatttattttgagctactatatggagggaagtagggatcaagtttcttcttccttttttttgtgtatggatatcctgttgttctagaacctactttggaaaacactttttccattgagttgctttgtcacctttattgagtagttgacctaagtggtctacttctggagtctgtattctgtttcattagtctatttgactatccttatgtcaataccatattgtctttttcttttttttttgagacagagtctcactctgtcacccaggctggagtgcttgatcttggctcactgcagcctcctgccaccatgttggccaggctggtcttgaactcttgacctcagctgatccgcccgcctcggcttcccaaagtgctgggattacgggcatgaggcactgcgcccgtcgtatattgtcttgattactgtagtttcaggtttcctaaccttggcactattgacattttgggccacattgttgtgaggctgtcttatgcattgtcaaatatttaatagtatctttggtttctacctgccagatgccagtaacatgtttccagttgtg

SEQ ID NO: 2358 - DNA, 356 bp, Homo sapiens
ggctcactaaaaatatccctttgacatcagatgctcctatttcttcctattttccttaaatgattatttttttgtcagaaaatttttcaaatttgggctttatatttgagaaattaaacaacccacacttttctagaggtgacgttatgtttaagtcaataactgaagtagaaaactttgcatttggatagttctacattgaatatgagtttacttagtttgtttcttcaaagtctcctgtatacggctgttgtaaggagtggaagaggaaccacttggtgttttctgttgtttaaactttgatgaatgtaaaaacgatcatatggaatatctctaaatatggaaatgcaatctat

SEQ ID NO: 2359 - DNA, 352 bp, Homo sapiens
ggctcactaaaaatatccctttgacatcagatgctcctatttcttcccattttccttaaatgattatttttttgtcagaaaatttttcaaatttgggctttatatttgagaaattaaacaacccacacttttctagaggtgacgttatgtttaagtcaataactgaagtagaaaactttgcatttggatagttctacattgaatatgagtttactttgtttcttcaaagtctcctgtatacggctgttgtaaggagtggaagaggaaccacttggtgttttctgttgtttaaactttgatgaatgtaaaaacgatcatatggaatatctctaaatatggaaatgcaatctat

SEQ ID NO: 2360 - DNA, 1647 bp, Homo sapiens
caggaaaagagaaggcaggagggatcgtgccagaggtcttctaggggacagacctggaagtgggatagattatttttgtttatcttccgttggctagacccagtcatgtcggtctactttaactgtgaaaggaagatagaaagtctgtctgagtgctcaagaggaaaagaaaactgagttcaagggagcacgcctaactttacgaacgtcctccttttgacttttttcctctacctaagacattgtgaaaatatttctgttaccgatttagaaagtttagtgatgttctttgacctgcccggaaatacccttgagtactggcagctggagttgggtgaagcaggctgtccatgttccgttcatggatgaagacactctgataacagctcactggtgcgaagggtttacctacactggaagtgagatcagagggagaatggcaatccccatctatggcaggtgtcaatttattgtctctcagcttcaaattcatccttccctgctctgctttgtgatactggaagtggaccctgtaaacatttcttcttagccagctgggtgaatgtaaacgtcatcagtagagggtgccagagtggtgtagtgccaggaacatccctgctgagttctggacttggctagttattatcattcaatgcagtagcacctggcacatgcacctgagccccagctctgcctcaggccatgctctccccagcactggtcacttctcagaagctccttcctgcccacagcctcctacaacaagagatggcctgcttctgcagaccaccccgtgcctttgctttccagaaagcttctccaccagccatttgtgagttcctgtggcagcaaataaaaattaggaaaaaatgttggcccaaaaaaatatttggcaaaaaaaaaagcaaaaaaacttttaaataaaagtctctaataatgagtttaccaagagtcttctccttggagttcaactcttacagttgtgtggtgccctccctcacgatgcagggggaaagaaccactttgcagacaccgaggatactgacctttctgccatgcaatctaactgatcagtaataagggacaggaatggtgatctgtcttattcattcccacaaggcaggcttggcatgaacaagaataacatttggcaaaaatctctgaagagatctgaacctcagcctcagtggaggtagaaggtccctctgcccatccttggttcctttaatttttcactgtccttcagcctagaggtaatagctgctcttttgctgcttccttaaggtccttttaaagttccttttagtagttgtattagtcccttttcataccgctataaagaaatacccgagggccgggtgcagtggctcacacctgtaattccagcactttgggaggccgagttgggtggatcacaaggtcaggagttcaagaccagcctgaccaagatggtgaaaccccatctctactaaaaatacaaaaattagccgggtgtggtggtgggtgcctgtaatcctggctgtttgggaagctgaggcaggagagtcacttgaacccgagaggcggaggttgcagtgagccaagatcgcgccactgcactccagcctgggcaacagagcaagactccatcacaaaaaaaaaaaagaa

SEQ ID NO: 2361 - DNA, 1655 bp, Homo sapiens
caggaaaagagaaggcaggagggatcgtgccagaggtcttctaggggacagacctggaagtgggatagattatttttgtttatcttccgttggctagacccagtcatgtcggtctactttagctgtgaaaggaagatagaaagtctgtctgagtgctcaagaggaaaagaaaactgagttcaagggagcacgcctaactttacgaacgtcctccttttgacttttttcctctacctaagacgttgtgaaaatatttctgttaccgatttagaaagtttagtgatgttctttgacctgcccggaaatacccttgagtactggcagctggagttgggtgaagcaggctgtccatgttccgttcatggatgaagacactctgataacagctcactggtgcgaagggtttacctacactggaagtgagatcagagggagaatggcaatccccatctatggcaggtgtcaatttattgtctctcagctgcaaattcatccttccctgctctgctttgtgatactggaagtggaccttgtaaacatttcttcttagccagctgggtgaatgtaaacatcatcagtagagggtgccagagtggtgtagtgccaggaacgtccctgctgagttctggacttggctagttattatcattcaatgcagtagcacctggcacatgcacctgagccccagctctgcctcaggccatgctctccccagcactggtcacttctcagaagctccttcctgcccacagcctcctacaacaagagatggcctgcttctgcagaccaccccgtgcctttgctttccagaaagcttctccaccagccatttgtgagttcctgtggcagcaaataaaaattaggaaaaaatgttggcccaaaaaaatatttggcaaaaaaaaaaagcaaaaaaacttttaaataaaagtctctaataatgagtttactaagagtcttctccttggagttcaactcttacagttgtgtcgtgtggcgccctccctcacgatgcaggggggaaagaagcactttgcagacaccgaggatactgacctttctgccatgcaatctaactgatcagtaataagggacaggaatggtgatctgtcttattcattcccacaaggcaggcttggcatgaacaagaataacatttggcaaaaatctctgaagagatctgaacctcagcctcagtggaggtagaaggtccctctgcccgtccttggttcctttaatttttcactgtccttcagcctagaggtaatagctgctcttttgctgcttccttaaggtccttttaaagttccttttagtagttgtattagtcccttttcataccgctataaagaaatacccgagggccgggtgcagtggctcacacctgtaattccagcactttgggaggccgagttgggtggatcacaaggtcaggagttcaagaccagcctgaccaagatggtgaaaccccatctctactaaaaatacaaaaattagccgggtgtggtggtgggtgcctgtaatcctggctgtttgggaggctgaggcaggagaatcacttgaacccgagaggcggaggttgcagtgagccaagatcacgccactgcactccagcctgggcaacagagcaagactccatcacaaaaaaaaaaaaaaag

SEQ ID NO: 2362 - DNA, 372 bp, Homo sapiens
gaaaattaaactgtcatcagaatcatcgtgtacaaaagtcaggccaggacccacgtaccaaacctaagcagggtggctgactactaaaataaaatatttaaataagacttagagtctccaaatagtcaaaatacaaaatgtccaggttgaaaacagaataaataataaccttggcagattactcattgcagatttgctcacactcatttggttaaaaggaattattctggatacaactgaaaagtaatagttatatcaagaatcaggaaaatcacaactttaatgaaaacaagataatcactgacacagaggtgaatcagatactggaattatctgataaagactttaaggcagttattataaaaatgcttt

SEQ ID NO: 2363 - DNA, 317 bp, Homo sapiens
ttttttttttttttttttttttttttttttgagacggagtctcgctctgtcgcccaggctggagtgcagtggcgcaatctcggctcactgcaagctccgcctcccaggttcaccccattctcctgcctcagcctcctgagtagctgggactacaggcgcctgccaccacgcccggctaattattttgtatttttagtagagacggggtttcaccgtgttagccaggatgttctcgatctcctgacctcgtgatccgcccatctcggcctcccaaagtgctgggattacaggcgtgagccaccgcacctggccaaaaa

SEQ ID NO: 2364 - DNA, 467 bp, Homo sapiens
acagatagttatgcaaaagaagaccaatttgaactcatggaaacagtgacacgatttatggttaagtgggggaaaaaactagtttcaggataatatgtatggcaagatcccactcttggagagaaaaaaagatatatgtgtacagtgtatgcacctgtgtctgtaaaggcccacaacaaagtcatcaaactattaacagcagtggcctttgagaaagggagtgtgagtggaatgaagaggccaaagagagaatacagattgctcagcacttcatagtgtgatttaatcttttgtaataataatgcatttgtacatttcctatgtgactttttttaactagaaaaaataaacaacaacaaaaaaaacaagaaatacagaaatgtggttggcctaaaaatcttgggtattacttcttaattttaacaaaaatgttcttacaatcctagtctggttgctattccagcctt

SEQ ID NO: 2365 - DNA, 467 bp, Homo sapiens; identical to SEQ ID NO: 2364

SEQ ID NO: 2366 - DNA, 432 bp, Homo sapiens
aatctctaaagctaaaagacaagtttactcagaaggttcaggaatgtgaaaatcaatgtaaaatgacaaaaagtttcatgaaacccctgataaggctaaaatctgacagcttgatggagacatctcatattgagagttcaggcaaaaacagtgagcttttgtaattctcactgttaaattcacaatatagtctcagttctagcctggagatatttaaagtatggacttgaaatgtctaacaagacacaaacctttgcaagagctcagcactctcttccataaggaccaggatcaaaatttatcccatattaagaaccacacaaggagtttgttaaaacctcatattcctgggcctcctttgccagagattctatgtaggtctgtgacaaggccctggaatctttttttttttttttttaacaaaagccgtgg

SEQ ID NO: 2367 - DNA, 360 bp, Homo sapiens
agggggcagggatagcattgggagatatacctaatgtaaatgacgagttaatgggtgcagcacaccaacatggcgcatgtatacatatgtaacaaacctgcacgttggcacatgtactctagaacttaaagtatagtaaaaataaataaatagaagttaccttctccctttttggagggcaatttgaccacatctattaaaactttaagtgctcataaaatttgaccttgcaattttacatctggcatccatcctacagaaacactgaagtctgtgcacagagttacaaacacaagaacattcactttgcattatttgtaatagtgaaaattgaaaaccttaatgtttcatcagtataat

SEQ ID NO: 2368 - DNA, 360 bp, Homo sapiens
agggggcagggatagcattaggagatatacctaatgtaaatgacgagttaatgggtgcagcacaccaacatggcgcatgtatacatatgtaacaaacctgcacgttggcacatgtactctagaacttaaagtatagtaaaaataaataaatagaagttaccttctccctttttggagggcaatttgaccacatctattaaaactttaagtgctcataaaatttgaccttgcaattttacatctggcatccatcctacagaaacactgaagtctgtgcacagagttacaaacacaagaacattcactttgcattatttgtaatagtgaaaattgaaaaccttaatgtttcatcagtataat

SEQ ID NO: 2369 - DNA, 432 bp, Homo sapiens; identical to SEQ ID NO: 2366

SEQ ID NO: 2370 - DNA, 2622 bp, Homo sapiens
  SITE (1507): n equals a,t,g, or c
catagggccagaccctaggcctgaaaaggatgcaaagcctgctgttttcaggctgttgggaagaatcgtgcgtaccgagtgattatgatgaaacgtatcccagagaggaaatgaatgggacctgaaaagtgggtctgccacatccctggtagcccgcctccaagagcactacactccccccagccccaccggccacactacatgacgtgggaaggctgtccgttcatccttaccctggggactcaagtgtgctctgcggagtgagtcacagccctgatgtgcaccctgcactactctttccccaggtgcgccggagacgcaggcttgctcatttccgtcctgacacagctcgctgttcctgcggtggtcagagtccccctgtgctgtgtcagctcctggacactactagtctttcacatgataaagcgcgagcactttttcgcttttgcagtatttggggaaattctaacacatttcccggggatttgcccaggtccctccacctcccacggtgggtaactgtgtggattctgcacctggcaatcggcgctcccctttggaaacacctgggggccctgtttcttccagcctggtccttggtttctaccccagccgctttcagccggcacctgcatgggactgcctggagggccacggtccagggaaggacaggtgggaccctgaccatgacagatctttctaaaacaataaagtcccattgatgacaactgcagtgggatgaatgccattgcagcggtcatgctgggagctgccgagagcttacaacaaaagcagttcctctcaagacactgcttgcatcttccctccacgcctctcggtgcatttggaacttgtttatgcgctggtataactcgagtcagctgcttatttctgtgcccttgcactcacaggttccttcattaacattttaaataagtggctaaaaaaactcctctggaggttgtttttgaaagagacaggaaaaagaaacacacagtacctggattgttttgacttattttcaagcgactcagctgaaagccggtgttgcatacacaatttcctcacgctgacccagcctgactaagacttgataaaaggcacagcccttggcagcaggcagtgccaatgtggacagtgtacactaagctgtgagtgtgtgcacgggcgagcacatgtatgtgtactcatacatccagatgaactaaagggacactgggctttgtgctggcaaaggttacgatgctgctgtagcttggctgtgggccccaggcagtgtcagatggaacctgctttgatggcgtgttgttcagtgtactcagtggggtctcacatggcccgaggacccactgtgagcactccgcccgctgtggcacagaacacggctggggtcatcacagcccaggtctttattgaaaggcggctcatatagaacccatttggccaggtctgggccatctctctgcctctgccctatcttggctgcctggaggggcccaggccaagnaggattcttgtaccctggaagagctcccaggcattcagctatggccttgacatttggctgcaggttaccgtcagaatcaacaccatatcctgaggaagccctggtatttccccaagtctgcctatgtattagacactctaatcaatgctaacacagttcagtttttgagggaactagttttgtcataatactacacccctctattgtttttaaataagaaaaaaaaaaaccccacgaaactttccatcaaagcaatggtccgtgttggcctgatgctttaagaagtttgaggaggtaggtatggaggcaccttaacaccagtttttgagcagaagttctagaagctgatttagaactacacagctatggatacacctgatgaaaaccgcaaaaggcgatgacaggcccagaaatatgaccagcaagcccgtgagcctttggggcatccgactgaatttgaaaataataccccattcagatgaacattaaaagccaatgtactggaattctctttgttctgcccgacatttgggggtgtccaaggacctgtgtttttaacaaagatgactttatgaccgttctaaggattgaacagattcctgcacagggtgccaggtttcaagttaggtcctcttagtataagctctctttttttctgaatgtaaacctatttgcattgtcatttctaataatccagtaggtttctggatattgtaaagatactgagtacagatataactgtgtaaatttcatagtgttttattttgaggtgagagttttgttatagtttataaaagatattttcctattcagacctcagggctattttgggacctacaaataaatgtgattcccagcagcttcaatttttgatattcaaaaagttaataatctttaagctaaatataatgtgatatgattcagaaaaaaatgtttttcccttttaacttctaacaaattatgtatctaatgtttaaaaaatatggaaaaaagggataatgtaaaaatgtgggagaattgtggctaaagaataaaaaatcacttgttaaaacgcattcttatggtacaaatgtgtgatatttaaataaacttaagtgtgtataaattagagaatg

SEQ ID NO: 2371 - DNA, 742 bp, Homo sapiens
tatgctttaactggacagaagaaatatttctcagacaatgtcgatgctgctgatgacaactgagatgcctggagctcacccttgatggagacttccttggtgattggagatgggggactctggtggcagaaatggctttggggtaggtgtgaagttgcttcagtccctctgagttgcctcttctggatggaacgtgtgtatcaacaacaatgaaatgcacctccgtgtgcatggaggcggctgatgagaatacagataggccagtcctcgctcttccctccagaaccggccgctcccggtctgacgttggagcacgtgaactaagagtgacaattttttctacttgcttctgtgaataaagtgttctacagtcagcccagcactaaactcaccagaaaagaggagggaacagcacggagccattcatctggaattactcgatgtgcagaggctgccccttggccgcacttgggaacatcgtggacatcttccttcctctcaggctcctcctgacagactcctggcagcactggagacctcaggactatggagatcagaattgtaatggctttgtcatctcagtgtggccactcctgaggcaagaggctcctcctgggagcaggagagagagagtttgtgatgttggttggaaaataggatttatggatgcaggagggccgtgctaggcccctctgcccgcttctctccctgctgttggcggtgaccaggtctcaggagcgga

SEQ ID NO: 2372 - DNA, 540 bp, Homo sapiens
tagtagtcattctaataggcatgaagtgatatctcattgtggttttaatttgcatttccctgatgatttgtgatgttgaatatttttttcatatacctactagccatttgtatgtcttcatttgagaaattctattcaagtcgtctgaccagtttttaattaggttatttgctttcttactattgagttgtttcaattccttatatattttggatattaaccccttgtcagatgtttggtttgcaaatatattttctcattctgcaggttgtctccttactctgttcattatttttgtagttatgcagaagctttgtagtttgatgtaatcccagttgtccaattttgcttttgttgcttgtcatttggggacatacccataattgatcttagccaaaaggctgagaagtgatttgggtcatattaaaaaatatcattgccaagaccaatataatggagtttttttctaggttttcttctggtaagtttatagtttcaggtcttatgtttaagtctttaatccattttgagttgactttt

SEQ ID NO: 2373 - DNA, 328 bp, Homo sapiens
tctggctgcgccatgatctcaaccggctaatgccgagagtttgggatgacagctttctgcctctagtcggcccccggcttccccagggaaattgaaagtggaagctggttccaggtagaccagcgcttccaacccagaagcgttgggggttgttagaaagccattccccagacagcctcacacttgagtcttaagtctggtggccgccctatcgtttttaaccgtccgacaggtgcctggtattttcctccaattctaaggaagggtagaacagaatagcaagcgaaagcgctttggaggtcccttcatgattgccaaaatgttacca

SEQ ID NO: 2374 - DNA, 141 bp, Homo sapiens
ttttttttttttgtaaattgacaaattatagttgtatatatttatggggtacaaagcaatgttttggtttattaatacaatgtggaataattaaatctaggttgatattaaatcaataaaattgacatccatcactttaaa

SEQ ID NO: 2375 - DNA, 367 bp, Homo sapiens
gtgtgcacctgtaatcctagctactcagggggctcaggcaggaggattgctggaaccggggagacggaggctgcagtgagcactgcactccaccctgggcgacaaagcgacactctgtctcaaaagaaactagttccatatatatttatccttccctaacaattaagcattattagggataaaagagcttctgctttcatgttgccatactcctaacattcaagataaagataacttttaagtctcttccaaagttatctaaaatggttaagcagtatttgtgctagcaaaactatgggagctggttcacaagcagatcttgagacaaaaataaaaattatatatgtatttttattttaaattatat

SEQ ID NO: 2376 - DNA, 6163 bp, Homo sapiens
accagtaatagttgcaacttcagcagagaaagcttgctgattaagactgcttgtttcagaatctatatgaagagtagttagactagccacttcctgctcttcagcactctgatgatggccagaacctgaatccacatcagcagaggacgtaaccccagtgtcggttccaaagccaaaatctataggaagaagaaatgttattatatgagtcccaattacaaagtaaaaatatttacgagagctaaatcagcaaaatgatcaaacataaacattccccgtacatctattctgtttacatatcactcagacaagtgtaaataatcttaatactctgaagattataagtagatcgggatagtgtacaagccatgaagggaggaaacatgtaattctccaatgcatatcccagctcttcacaaacttagttcccaaggttttgacttcttttttaaaaatttggtgcccttcactgactgccaagtgcaatatagaattatagctgaataactaagtggtaataatatagcaccaaataatattactgatgttattgtaacaaggggcaattattcaaaggaagttctgggtactgtagcattgaacataatccaaatatttggttctcaaatatgagtgtgtgaaacagtggcaactcataatcatgactggctttttagtaacaggtctatcctaaattattttcctttctacagttttggtcttaaaaatgtcatttcttttaagaagggatcacattttttgttttttaaatgctcttaatttggcaacataaagtagcttcaacttaaggtgattccctaaaacttcctttgaaatttcactgaaaattgaaataaaaataagtggggccaagaatgatgccttgcacctgtaatcccagctactcggaaggctgacgcaggaggactgcttcaggccaggagttcaagactagcccagacaacatagcaagaccaaatatctaatttttttttttctaacgtgggagccactgcctaagtaacactggagaggaaggtgatggctacataatccgtaagtcagtcttgaacagaagacaatcaacataaaacatagtattcaaatagaaaagatacttgctgtcaaattttcggccatcatattggaaagcgctgaaagaatccgaatgactatctgagctgataagatcactgctccctgcactggcaggagaagtccattctgagggcacacctgggtcatcaatagggcgcatctggttctgcttgtttagaatatcagggaggtctttgggaatttccaggctgcctggactacttcctcttcttgtcatagtctaaacgttcaagaaatattttaccattaagaaaaagcttttattctctttaaccatctgaaacctttaatttccaaaccatcacaataaatgctgagatttagaggctgaagtaggagtggagaacacactcaccaaacaatctatgtaactgaatggagctagagcctgacctattgttggtctgcctaaagacccaaatatcacatgatgctgggcctgtgactcttaagcctcagcaggatccatgcagtgaatataaattaaaacagcagaaagagtatttagtggaaaaaaagcagcaaataaaaaagacagtggaagagtggaaagaatgacagcaaagatgtcattcaatgatttttatccactcaagggaaaaaagtaagcctaaaaagaaaggggcggggtatataatggagttatagagaagtcaaacccaaatgaaatatgacagtttaaaaaaagcaattccaggtccagcacagtggctcactctggtaatcccagcactttgggaggctgaggtgggcagatcacctgaggtcaggagttcgagaccagtctggccaacatggtgaaaccctgtctctactaaaaatagaacaattatccaggcatggtggtgtgcacctgtaatcctagctactcagggggctcaggcaggaggattgctggaacccgggagacggaggctgcagtgagcactgcactccaccctgggcgacaaagcgacactctgtctcaaaagaaactagttccatatatatttatccttccctaacaattaagcattattagggataaaagagcttctgctttcatgttgccatactcctaacattcaagataaagataacttttaagtctcttccaaagttatctaaaatggttaagcagtatttgtgctagcaaaactatgggagctggttcacaagcagatcttgagacaaaaataaaaattatatatgtatttttattttaaattatatattagattatatttatttatttatataactacgggagctggggcagaagacctccattgctatctttcccattgagggcttgcagctggcaccagggtaacctacgagcaaagacaaaaaaaggggagactaggaaggtagttgcttatacctgtgtatttgtgcacaggtacctgtctgatctttcaccctggtgaaaattatgaggctgtttatgtctttagataaaaaatgttataaaaatgtaattcaaaaatcttaattcataaaaagggttatattttgaggaaaggttattttgaataaaaattcccatatataaattgacatatatgtacataggtatatatctgttagtttttctaccctcctctataaaaccaaatatataaaataaaacttaccgaggcattaccacttcgaagtcgttctgctataaactcatccatcagatcaggaacattagcactgctgccgccaatatcactattaagaggaggcagtttttggctcatgtcctctttattgactaaaaataaataaataactatatatagtgaggaaaaacttaactgcattttctaactttgaaacaaacaacaacccaaaacaaagtacctttgccaattatttgccaaacatgcatttatgaataatttcccttctttcagatttaattttaagaattagtaaattgatatttactttatttaactaagcagatgttagtcaatcttcagtgtaactttaaacagcaagaaagcttatagataagcactagctgaagttaggttaatattgcctataaagaaactggtatatttatcttttttcctgactcaatgtttctttttagagccttaacaatttataattccgtatttcccccaaagaacgtttgcagggaatacatcctttgaatctatgcaaaactcagtgggatacaaatgcatttgagtatttataaatacaaattctatggttttgatatactgctgtttctatccactataaaatctaattttaatgctttaagaataaaaagttgacttccacaaatgtttttcttaccaaaaaaacccaaaatagttattttgatttttttatcactacattattattatttttaccatttacattaacaagaaagttttagacttgggaaactaacttatagaaaataatatggtatctatgtcactactatgctattgaaaagttgatttctctgcaatgaaaggaaaatgagcactgtttatattcctaataaactacaaagtatttcagattaaaaaaacacactggtcagaagctcactgtgaaataccattatctttatattactggccaggctttgctaagctgtcaaatactgccctcaggtggcattaatggctcaatgcaagatgcattatacagcgttgttaatcatgctaacaaaaccatgttaaaacaaataaaatcaaaaccaaccttactgctgaaagttaatagtctatatatgtaaagttattttaactttgactcaagatagagaaaacagttaccataatcttgctttctgttatctgtccatagaggttccatatttaaatcatgagtggctactgtgaaacctttatgcacatttaaaatctcagaaaaaaacaaagtaattaaagtgtttcaaggacataacttgcattctatataaatgaatgcaaaactaaaagcctacagcatgtttggaaatggcttaaatgaaaagtgattaaattcactttgagatttaagaaataatttcctcatcactgatagttaactataatgttggtgctggctgtaggaccttgatttctattatgttagttgtcaaaataatttctatcaagaaaaaatacaaaaccaaatagatcagcagtaaaaataagtgaaatcagttagatatatctggtgcccttttaaactatagtggggtggggaagaaagcatagtaactccttgataatcttaatttccatacttgtggtatacactcagaaaaatacttgatttaggtagtctttgataggttattgaaattttcctatatatccactttcctatgttgttgttcagcagcaaagaggtttaactaaatgccttataagggaaattagtaatttaaataaacattctatgctgggaaaaatacagctgggaaaaggcgcatgcataaccaaacagagagaaagcagtgaccatcccaaagctttttgattgcttatagcttgcttcagttgcattaagccaaactggtgctgtctttctccttttgcgctctgcacactgttagtgctcacctgcagctttccttccaaaatagcccattacatgactgtacagatccctcagtggagcctctggtggcattctgttctgcctctgtggggaaacatttgccttcggcttcgaaagagcatgtacaacagttttataaacgccacccagggagccctgctgtagtcctgcctcatgacttgatgacctaagagtactacgactacctaattgactacttgcaattccttctttttgtaatatggtggtgggaatctctgtggattccttcactgttttgctgcttactgatgcagtaccaagtgtatctagaggtctgtacacaccaggttttactagctctgtagcactatttgtgctggtatgggtgttgctagtgctgctattgctgctaccactactaaagccaccgagcttccgcagtctcatcttccatggagcctctttgttttccagaggattataaaactgaacggactcagtggatggcctaaaagtaacatgaacactatttcgttttttagtagcaattttcatgattttggctctatgagttactgtttcagacaagctccttttagttggagaaagtttgctagtacttgtaacatgaggcattctgcggttaacaggtgcttttagtgttgctttcttggcacgcataacatgtgggacagtgattttttcattaatttgcacactcttaagcttttcaactagtgttacatcaacacaagcatctaattctgtggctgcttgtctgtacagatgtttccttttttctttatcacaagggctatctaaactaggctctgatggctgtttatcagtgtttagttgcttagatttttcagaagtttgtgttctaaaaaaactgtctgactggttaggtgcgatattactcatgaagacagctgagtttggttctttctgaaactgtaggttttcaggagtcccaacaaaagaggtgatattttctgattcagtttcctgatctgtgcattctaatttatctaaggataatctttcacccctatttactgcaatagtcacttcctgagaagctgggtctttccctgtctcatttttactatgattttcctggttttccttaaaatattctttcagggtggaaagaagatcatcatctccttcaaggtcaatgtactggatttgttcaaaagctgaatctgcaagttctactggacctattaaatgacaaagatggtcatatatgctatcaccaacttccagagaagactctctactatgagtatcagtgatgtggctttcagtggatctagttattgaagaagcctctgtggaactctgcaagcttggtgcatgacgggatgaactgtcaatgacaggaactgcacctttggctcgttcaacagtgaatggttccaagatgtcagaagtgctgctacttcgaggcaatggctgctcctcattcaaagcaccaaaaacttcatttccagtttcttcactttgtgaaaaatgtctgactcta

SEQ ID NO: 2377 - DNA, 167 bp, Homo sapiens
tttttttttttttgagacggagtcttgctctgttgcccaggctggagtgcagtggtgtgatcttggctcactgcaagctctgcctcccgggttcatgccattctcctgcctcagcctcccgagtagctgggactatacgcgcccgccaccacgcctggctaattttt

SEQ ID NO: 2378 - DNA, 1936 bp, Homo sapiens
aaaatatatatatagttgttttaaatggtgataagaagaaatggctggtcacagtggctcatgcctttaatcccaccacgtactttgggaggcaaaggtgtgtggattgctggagatatatatatattatcagagcatggaagcacatgcctgtagtcccaactgctcaggaggctgaggtgagggctcacttgagcccaggaggttgaggctgcagtgagccaagatcataccactgcactccatcctgggtgacagtgagaccctgtctcaaaaagaaaagaaaagaaaaagatacggagaaataactcatggtaagagactaggaaggagtggactgggtcagggagggcttctccaagaaggtgacatttgaggaaggaactgagtgttccaggcatagtcaagcctctgatatttgtggcatgtgcctgtagtcccagctacttgggaggccaaggtgggaggattgcttgaggctaggagtttgagaccagcctgggcaacatagcaagatccccatctcttaaaaaagaaaaaaaaaagactatatgacatttaagaataattcaccactgtaagagaagaccccactgagaggaggagagaggccttaacccattaatccactctcccctagtcccctgggggagcaggacttggagggtactagagagggagagggagtctcagtggaggtgggaggcagagaaaggtcttttgtgctgcttggggcaggtggccacagcacagaaccctggcaggcaagagagaactttggtcagctcatgactcaacacatcttaactatgcacctactaactgccaggcattgtcccaagcactgggagaacagcaaggaacaaagtaaatgtcgctgcccttgtgggacagacattccaatggggaaagccagacaataaacctatacagggaaatggggtaatggagatggggtgactgggggctgagctgttctgattcaggagccgctggcttctctaaggaagtgatatttaagtggagacctgactgatgggaaagggcagctgagcagagatctggggcaggaacttcccagatatcaagaacagcgagtgcaaaggccccgaggcagccgtgagcttggcttcttgagctgctggtgcctgaagcagggccgggtagaaggtgaggtcggagaggatggcaggaaggggctggataatgtgcagtcttgcagaccatggaaagaaatgtggactttattctaagtgcactggggagctgtcagagagctctaagccagggagagaacatgaccggattgatgattttaaagaagctcagtggctgctgtttggcaaatggagtgcagaggcaagagtgaaagatgagagcagtgaggcggctggtggttggagagcgagggctgtggctgtggcggtggcagtggagaaggagtgaagtggtcaaacccaggatatgttttgcaggtgcagctgtcagcatcagctgttgggttacatgtcgggacagggaaacaagaactaagagcaatgcccaggcttgtggtctgagccccagggtggatggagcacttttttttttttttttttttttttttttgagaccgagtctctctctgttgcccaggctggagtgcagtggcatgatcttggctcactacaacctctgcctcccaggttcaagcaattctcctgccttagcctcccgagtagctgggattacaaacgtgtgccaccatacctggctaatttttgtattttgtagtagagaaggggtttcaccatgttggccatgctggtcttgaactcctgacctcaagtgattggcccacctcggcctcccaaagtgctggaattacaggcacaggcatgagccaccacgcctggcctgtggggcacctttcattgggacaggctctcaaggagca

SEQ ID NO: 2379 - DNA, 410 bp, Homo sapiens
ataaaatgggatggcaatgtggggagaagtgatgtcagcaggatggtgaactagaatgtaccaggccttgtaccctacaaaaacaatgattcaataactatccacaaataaaagtagttatgggagagctctgaagcccagttaagaaactgtagccacctagtggaggcaaaaaaaggaaaatgaaacaaacaaaaaaaatcctgaggattagtaaacagaaaagggtaggaaaaacagtagcattgtagaaaaactatttagaaagccagaagaccctataagctctggccactgaggaccgcagcagcccagatggctgcagactgctgcagcctttgccagcaaggacccttgcaatctttaccaacatgggctccacttgccagagttgcctagagctcacattc

SEQ ID NO: 2380 - DNA, 410 bp, Homo sapiens
ataaaatgggatggcaatgtggggagaagtgatgtcagcaggatggtgaactagaatgtaccaggccttgtaccctacaaaaacaatgattcaataactatccacaaataaaagtagttatgggagagctctgaagcccagttaagaaactgtagccacctagtggaggcaaaaaaaggaaaatgaaacaaacaaaaaaaatcctgaggattagtaaacagaaaagggtaggaaaaacagtagcattgtagaaaaactatttagaaagccagaagaccctagaagctctggccactgaggaccgcagcagcccagatggctgcagactgctgcagcctttgccagcaaggacccttgcaatctttaccaacatgggctccacttgccagagttgcctagagctcacattc

SEQ ID NO: 2381 - DNA, 410 bp, Homo sapiens; identical to SEQ ID NO: 2380

SEQ ID NO: 2382 - DNA, 7513 bp, Homo sapiens
aggtttcatcgtccataacgaagagtgagactatttggaaacagagactgatcatctttgggggaagccctgcttcctgaaaacctgatattgcactgggatttgaatgtgtgtgtttccgtttaacttgtggtgaaggaagtgtgtgactcagcttggctgggaagtgctcctcacctgtgtggcccagatggctccaacaagcaaaaggaaggatgcagtgactcttgctgcccagaatgcacagcgatggtaagagacaccgtggatattcttcatcagaagctttaatcaaagaagatgagcagaagacaatcactggctccctgttaccagaaagccaaattttataatgcgggtgaaagaaaaatatagattaaaattgctgggcactgaaaaggggtgggagttggaaatcagaaagaaagagaaatatttcattatgttaatgaagaaaagagaaaattgaagcataaatgtatttttgaagtagttattcggtagctgagaacttattaagggatttaggaatttaacctcctgatgtggattcctcaaagacttgatcggagaatactcttgtttcaccattatgttggtacagtatagtaccattattttatgttgtgccagtgaatccagttgccagaaataagtctgaatgttttcatgcatctttttcttaaatgcaagagcttctactgactcttaacaagcatgcttacccaaattttgttgcatgcttttaagtagcattagctatgcacacttgacatttttaaatatccctttcctagtgtaccagccttcacaggataagaggactgggaataaagtcagatgtaatgtgaccctagaaaactgtagcaagcttcagaaataaatcttttgatctttccctatcttgattagatccaaagtcaaagcaaccatacttcacctagagaagacagtattggcaatcatgacacctgtaataaaaacttgaatccaaagtcaaaacttaagcaagatacaaatgtgctgcctgcagttagtcctgcatgggaataaggactagttatttttttagtgctgcatttttttaaagttggattgctgctatttaaaaaaaaaaaaaggacacagatcaaaaaaacacccaaaggcttaacagaacatggaaagttcccactaagttgtgtgtgaggaaatcctcatcttgtattttaagaatctgcagatggcatccatagatacagtacagtatttactgtcaatgcaaaagaatcagtgaggttaaagtagtggaagttttccctatgagcctacagtctgtattgtttacattaagaaactctctattattgtgttgctattttccatggagtcacaggcacactatgacttctgctcccaaatacatatgaccatatgtaaataccaccttgcatttcattgttcttcacaagtgctttgtgcccctttaattaaaaacacatgaaatgaataacaaaacaagacccaaatagagtttattttattctcagagtttggactacaattttctaagatgtttctggttcaagactgtcattttctatttcaaccgaaaagtaagcatttaacccggtgaataaatgtagatcctgccattcattggtattttaaagaaccacttgaaatcggatcattttatttaaaaataaaaaatgttaatgccagttggcctactataaaaagccaggaccatgttagaattaggaaaagtaaccagcattactgcacctcttgttagactctgtgcattaataaaacacacctagagtctgttgtcatttcactaataggataagacaaattttttgctttgaaaaaatttttctgcatgcccaggtgtctgtctctggctgaggttttgtctattttacagtgtttcaatccagccataaaaattaacttgtgattttttttttcccaaagtcatgcttttccttaattatatttttattttattattttagtgtcttgagaaaaataccaagagatataatgtttcttttaattgtctatgcttaatcatctttaaacactttttaaatttctaaccacaagacctctctataatggtaaatgtaagacatcaccattttatcactcaaagtatgttattgaaagtttctatttggttgataaaaggaacaattttttcccacttttgatgcctgtgatgcaattttttattgcctacaatgagatacacttagtacaaaaaatgaaaatctggtatttcaaaattgcatttcttgtataataggtcagatttattaactactcatactttttctttacactaatcgatacatttagaaaaaattttctaagttagagacaagtttaaaagtaaaaaaaaaaaaaaattagccactgctagtctactgtttaggtaatcggaatcaccaattattttattagaatgatggcttgagtaaaaagctgtggaaagaattaaaggattatgagctaagctgtattttgcagaatatggttctattttagtagagcagagatgagacatatccccaccggccacccagccagaggtctcctacctgggggccctaaagggatgcagaggtctggcccaccctccgtgcataggcacctctgtccaccaccagcgtttcagcaatccaaccagtaagcatatgctgtataggaaaaataaaagtgtgtgggaattggatttcttttgttgtaacacaattccaggtttttggctatttaaagtttgacattaggctgacatcgaggaagtaagtgggttttcctgagttcccaagatatgattaaggaagaaaacaaacccatctccaggaagatcccaggcaggaaagaactagacagatgtagaaaccaaagtgaccattttagtttttttattggagaataaaacattaatattagggtattaagaagatgctcagcaagcttgatcagaatcttcatggtcattaccaatcagtctgacaaaatagttctctggtagtcagcattcatttaaggcagcttgcctgataatttcctgtgttatgtgaagtgtcttgcactttcacatgttagctataattccttaaattacttaactgaaatctgtaatagagaaccattttggcatttgaacagctattttacatggagaaaaagcaaacacatctgtttgctttacccagaaaaactgactttctggtttcatcttcatattgtttagtagcataatgagagtagtcctttatctttctctaatgttagtaaatatattctgttagtaggaagttctgaaattgaagggaaaatatatttaaggaaataaaggaattcaatacacccttcaaaagtcaccaaatactgaaaataagagatgagtccttaaaacctgagtcaaaaaaggtccagttttacagcctgcaattaattcagggctgcgttggcattaaaaaagaaaatatatatatatatatatatatatatatatatatatatatatatgtatattatatatacagtagcttacacttaaaagaggaaaaatttgcattaacattgcatattctgatatgtaccatattaacacataacaggcattttatttatgcttcatagaatcagacagacacaactttcaaaaatcttactgtattcacaatagaaaagggtagtcttgtctaccacagaggagtatgtccacacttaataatgaaaactttcttcctttcctgcccaaaaatttcttcagtctgttattatttttaagtgccccttgctgcaaatttcaaacagagcaagaaatcttcctcagagtaggtggtatgaaattaaactagtacaatatatatgaattcatgtcatttacccctgagtatggtagaattgttaaagcattcttaaattccaattatatgaagcctatcattactaggaaaagtatattctttgggataagaattaatttcttcacactattagagcatgttgtgagtagtaaggaactacttagatgcaatttatttacagaattgtcccttgacctcttgaaatggctagatctttcactactgtgtaggtagtctctacttactggtaggatagattacattgctttactggacaaagcagaatgaacttatataactaaaatatgtcctatattggctgggtgcggtggcttacacctgtaataccagcactttgggaggccaaggtgggtggatcagttgaggtcaggagttcgagaccagcctggccaacatggtgaaaccctgtctctactgaaaatacaaaaaaaaaaaagtatctgggcatggtggcttgtgcctgtaatcccagctacttgggaggctgaggcagggaaatcgcttaaacccgggaggtggaggttgcagtgggcccagatcgtgccactccactccagcctgggagacagagcaagactccatctcaaaataataataatagtaataatgaataaaataaaataaaatatgtcctccagggaaaagcaatgacagagtaatcaccaaattaataggaacatctttctagagaaagtacatgcccagttagttcaaacccaggtttcaaagaagtagcactgggctctactgtaaaggcaggcagtgaccaagaggtggtggggagagaggtagagtaccctcaaatcattcccattttcacttccaatttcccttttgtaatcattaagcttaagctatgtatggaaatgcaaagcaccattagcatttctagaaagcagctggaaccttacccaccaatgcttttttgaagacagtatcatcccaaatttaaaaatcctattgtatatgttgtaaaatttctggcaaagaaatggaggatcctgtggcagctattcccacctaaagccaaccctataaggatgggtcattttttagccatgctaggatttactgcacacacaaaaaatgtcatttagcttgtcacattgctagcacagctgcacatatgagcaaagcactgttggtctgtgtttctcagtgggggtactcttggcatttggagctggataggtctttgctgtacagaatcatcccatgcattgccagatgtttaatatcccaggcccctgctgactaaatgtcagtagcattctcagtcattgtaaacaccaagaataaaaagcattcccccaggttcaaatgccctccctgggaggttggtatcacctcccctgaatgccactgtctactgcattttgaggacacagggagaaaaagtgcctatcctcaaacattgtctctgctgccttgcatttctttgggccctgaatggtttttctcccttcatttttcgagcctttctctcagtgcagctgttcttcagggaggaggttactgggcagccttggccattcagtgggcatggggacttggcctagtccctatatatatatacttaaagtccctatatatacttaaaggagagatcatacatgaagaaagcttttttttttttttttttttttgccttacaacttttctttagaaccacattattggtcataatccttgttactgtcatgaggattgttgcatgggttaaacacaaacacagactagcaatgcacttgaacaaacctggtggtctttggaaataaatcaccattagatttcacctggttatgctgcatcccataagttccaaatgaatcacctgcttatcctattaacgaagcatttaattcacacacaaatgcttgaatttcccctgtataaatgtagtcatgcgattcaacttttctaataagatttgtgaatgctgcatcatgatgaaaatgtggattaactgtgggttgcatgcctgttgttcatacttcagtgatggtcacacacaaaacaagatgagttttacttaggtgaaacattattaaactgtactaacaatacagaaacatattctctttgtcgctttttatcaccaaaactgaatggcaaatatgtcttgacattacttggatgaactgtggctagcaaaatggaattaacttagccactataattttttaaaacattaaagtttctaaattgtttttggggccgagtaacgcagagtcaataaaggtggttatattgtaagcttttagatggtgcttaagaattcttatctttttaaatagcagtattttttttttaagaataaattgtaaggagcaaataaggcagaatgccactctaccctcaggtcaattttatggtatatgaaaatgccagtaatatttgtgccacttgccaactcgggggaggaggggcttttcccttactggatacttttgttatagtttgactatgtcattatgttgtttagagagcctccacaatgagaagttgccactgcagggctaactcgccttcagaaataatcagaatgattcaagggtcaaaccactttcatcccttaaaatatagggactaatatttctttttcttttttttaaaaaaaacatttcttctgtggcttagaaatgtgccagtgtgttcaaaacatttacaccaatttcaccagatttaggacctattaaaaattcaaacaagtttcttttttttttttttttttctgtgtaacagggatttttaaataacggactatatgcattcttttgttatttcacacttcagttaaagtgataacaatggtaaactgtgatcattatcagactgactgaatgctttctgatttccagtgagtgatctagttctacgtattacacaggtgtaatatctgtgagtgtaaataactggaactgtacactgattaacatgacagtttctcttttgttgttcttatctgtactgtattatagtatgtgggtataaatatctacaagtatacacacatatgtacttgtattccactattgtaacctgaaagaaagactatgtattcccttttttaattccgtactggtatttgtgttatttaaaaagcaaaattctgctctatttagttgtataatattagaggatactttgctgtgcacaattccaagtgccttagaacattgtttagctttcctaagtatatataaatgcatatatgtataaaattgggaaaagttacctcaataaaatcattgggaaatccccagttttagtttgttccagtttctcttatatttggatagtgctcagcctttttaaatgaaaaaagaaaaaagagtaagacaacttccctaattgcctgttatttcagcttcacctaagtttttaacacctctttgtatgtaaggtcttgagacatgtaaggcctggtactttttatttaaaatgtctgtctaaagaattactgctcttaaaagaaacttccagtattttttttaacttgctatctttttatgtctgaggtatttgatattgatgtttttattgccattattatatgtaaacataaaagatagtccatttagagtttataatatagaaaataaacagacttcctcatt

SEQ ID NO: 2383 - DNA, 440 bp, Homo sapiens
agtgaacagcatgttcaaaagcaccgggctacaaaaatgcaaggaatgttcaggaactcacaaggagggaaaggaagccagctggctggctaacaagcataccgtaaaagtagtgccagcaaaagatggaactttaatgattccaagacaggcagttgaggcaggacttggtgactaataggaaatgctggatgagggagagaaatgaattgctaatctgaggtttctagaccaaaaatatttttaaagatagaatattaaataagacaaagtgcaaaggcaggttaacaaggaaagctttgtatagttgtggacatgcttagtatatacctgtggaacatctggggggaagcgccctgtgggcttttggaaattcaagtgtagaaagtagatttggagtcgtcagcaggagatgatgagaggctgaagctaatgaaaaa

SEQ ID NO: 2384 - DNA, 5930 bp, Homo sapiens
caggggattctgcttcttcaactctgtagccatcaccgcaaaactcctacagcagaagttgaacgtgggcaaggtcctcatcgtggactgggtaggcagtgagctggtggggctgggcaggggcgggtagagctaggaccagggtcagccttcaggaagtctcctcccccagccccaccttcaagcaccccagtcgtcctcatcctcgggtgctgggtgtgggtgcagaaggaagggcgctggggctcctgccggatgactaacgtcacattccaacagggctccctcctcaactatgaaagacatttagctcctgttccatcttggccctcacgttgcagtttcaagcaacgaaggggatttcctaccttgaacggtagtgacgctgccgccattgctagtagccgatatttcctcccaccccctacaattaggagcagactgtataccaggaacacaatgagtactttatggccacctcgagtagtaagaacgaggatgtccatttctgtgaacaaaggtgttgttgcgtgacttacccaaggccactcagctggggatgtcggcactgggtttcagaccaaggcttttggccccagcactctgctcttgctaccatgggtgcttcccaaaccctgctcctaatggtggaggcagaggcacacaccactctctgtgagctggggaagtagccaggaccaagcctcaggaaggacaaaatctcttggaagcccaattctggcttaaaaattcatgtaaatgttggatcctccttcagaatcttacgtgcttgtggttgggcacaatggctcaaagcctgtaatcccagcattttgggaggccaaggtgggtgaatcacttggggtcaggagttcgagaccaggatggccaacatggtgaaaccctgtctccactgaaaattcaaaaaaattagttaggtgtggtggcgggagcctgtaatcccacctattggggaggctgaggcaggagaattccttgaacctgggaagtggaggttgcagtgagtcaagatcatgccactgcactccagcctcgatgacagagtgagattctgtctcaaaaaaaaaaaaaaaagaaagaaaagaaaaaggaaaacaaaaaaggccgggtacagtgactcatgcctgtaatcccagcactttgagaggccgaggtgggtggatcacctgaggtcaggagtttgagaccagcctggccaacatggtgaaaccccatctctactaaaaatacaaaaaaaattggccgggcatagtggtgggcgcctgtaatcccagctactcgggaggctgaggcaggagaatcgcttgaacccgggaggtggaggttgcagtgagcccagatcgtgccactgcactctagcctgggcaacaagagtgaaacttggtctcaaaaaaaaaaaagaaagaatctcatctgcctgttttaaattccctactagccttaatgttttccccaaaactgtgaggtggaatgggttctgtagggagatatgccacatttatcccatggttttgaatatcacctacacagtgccaccccacagaggctcagacctagttagagaagtgtggggtgtgcaataccattgtgaacagaatatggatgccctgtggccaagggtggagtcctgggctcaagcgatcctcccagccctcagcctcccaaaatgctaggattacaggcatgagctacagtgctcagctgacaggtggaatttgaccattgggtcagagcgcgggccattttcccgatgcttctacctcccctcataggacattcaccatggcaatggcacccagcaggcgttctacaatgacccctctgtgctctacatctctctgcatcgctatgacaacgggaacttctttccaggctctggggctcctgaagaggtacagctcctgggcgtaaatgcagaccctcctggcccctctgggaggtggcacaatgggacctggcggggagccacggaggcccatggtggtgttggtacctggggagtctgggctcctagtgggaggaccacactgatctgactgcccctccaggcagagcagaggtcagtggagtgagatctggaggcaggggtgagggcaggggcaatgtttgggactcccaggtggtgagaatagccctctccccaactctggtgccaggttggtggaggaccaggcgtggggtacaatgtgaacgtggcatggacaggaggtgtggacccccccattggagacgtggagtaccttacagccttcaggtagggactgaaaagggccatggtagtcagtgggagcccctctgggccctgcagtgggaggggcagaaggcactcagttcagtgtgggtagagggggttgtctctgggaggataacagtggggcgaggcctggcctggtcatctgccgggctcagcttgagccatccctttgcaggacagtggtgatgcccattgcccacgagttctcacctgatgtggtcctagtctccgccgggtttgatgctgttgaaggacatctgtctcctctgggtggctactctgtcaccgccagatgtaagcctgctgggggattgagggaggaagtgaaacagtgaggatatcgagtccagtgaggcatggggcagggaacagactgatattgcagcagacggggaaagcagggggcagggcctagacttggaatcatcttggtaactcccccaacttgtcctctgccaaccccggccttgaggggataggaggtggcagtggggtagcagaggatagaggatgtatcctgccggagctgtagagatgggcttgttggtccctggtgtttcagtgatgctccttgtcattggattggagtcttcagccagtctgttaatgttttgactgtgatagggcatttagttcactgatgctgtattttattatggatatatttgggtttatatctcccatcacattttgtgctatttgtcccacctcttgtgtttctttttctctccttttctttctttttttttttttttttttttgaggtggagtctcactctgtcacccaggctggagtgcaatggcgtgatctcggctcactgcaacctccgcctcctgggttcatgccatcctcctgcctcagcctcccaagtagctgggattacaggcgcgtgccaccatggccggctaattattgtatttttagtagagacggggtttcaccatgttggtcaggctggtctcgaactcctgaccttgtgatctgcccgccttggcctcccaaagtgctgggattacaggcgtgagccaccgcgcctggccttttttctctcctcttactggctcttgaattgattgattacctttcgccatttcttcttcctcccttcacccatcctcaaaggttttggccacttgaccaggcagctgatgaccctggcagggggccgggtggtgctggccctggagggaggccatgacttgaccgccatctgtgatgcctctgaggcttgtgtctcggctctgctcagtgtagaggtaaggggtgggaaggagctgggaggtggcaggccagaggtctgaggggccagcaaggggtcagccagcactgggagccccttaggaagctcttccttgggcctaaagagcacataatgggcacgctctctgagtatgcgtttgtgcaaaaaggcgatgtgtgcccctgttgtgagggatatctggggctgagtggggcagttagaggggtatgcatggtaaccctactccccaccctaatccttctcttctttcccctgccagctgcagcccttggatgaggcagtcttgcagcaaaagcccaacatcaacgcagtggccacgctagagaaagtcatcgagatccagagtgcgtgaggacacgtagaggggctcaggctgccaagggggcacggagcttgtgggagcaccaggactgggactgttcatgtgggtgtgctctgccctccctgaccccttgcctgtctctcgtccacaggcaaacactggagctgtgtgcagaagttcgccgctggtctgggccggtccctgcgagaggcccaagcaggtgagaccgaggaggccgagactgtgagcgccatggccttgctgtcggtgggggccgagcaggcccaggctgcggcagcccgggaacacagccccaggtaagcagcaacccgcaccacctctctgccctcacccctgctggtgcgccccactcaataccctcccctgtgcttgccccacaggccggcagaggagcccatggagcaggagcctgccctgtgacgccccggcccccatccctctgggcttcaccattgtgattttgtttattttttctattaaaaacaaaaagtcacacattcaacaaggtgtgccgtgtgggtctctcagccttgcccctcctgctcctctacgctgcctcaggcccccagccctgtggcttccacctcagctctagaagcctgctccctctgcagggggtggtggtgtcttcccagccctgtcccatgtgtccctccccccattttcctgcattctgtctgtccttttcctccttggagcctgggccagctcaaggtgggcacgggggcccagacagtactctccagttctggggccccccgagtgaggagggaacgggaagtcggtgccttggtttcagctgatttggggggaaatgccttaatttcactctcctcccttctccagcctcaggggaggatctggaggatccactactgtctttaagatgcagagtggaggggaggtgggcacccaccctgcgattctccaccctttccccttctttcgtcctcaccatctctgcagacccctctcctcctccttcctcttggtctcagcactgatgggaggctggtgcccaagctgtggcctgcagtctgtgaggagggctgtcttgcctcacactcctcacagcctacttccccttccccggggctgagagggtgaaagtgtgtggggaaggagaggactggtttcctgggttctcaggggccaggaggagtaacagaaccaggtctgctccccaccttactcggatggcctccctgcccctctgctggcacagcctgggcaaggggagaaggtggtccctgcagaggggctccaggctggtgagagcccccctgctgtcaggaccagattttcccagccatccagcatgctgcggggagaaggggcagaggctcacctccctcctggggccttttgttttggatcctggggatggtgagaatggaggttctagaaggggtaaggccagaacccagggatccaggagtcggctctcagctggagcttccataccttctgggctccctttgctgaccaccagcccaagggagctaagaccaggagggggctgggcgctgtcccttctctttcccaggagccctgccaggggctgtgggcctacaaggcttccaggggatgccatccagcctgtaggaaaccaaagatgggaagtggctcctatggggctgactcttccttcctcctcctccccagtaccacatatactttctctccttctatctccagggccccaccaatctgtttacatatttattatcctatgggggcctgagcaggattgagggagccaggggaggggcaggagtcccagcaccatcggttcatagtgtgcttgtgtgtttgttttagatcctcctgggggatggggatggggccaggctcagtgtactaggcctctctgtgctgagccccaggctcccggccccttacccactctctccctgtggctggtctggttctcatgtaaacccactccttgctttgtctccctggatatggatttcagttaagtattttgtaacccgttacactgtgtgtccttgtgtaaataaacttgtttctggcagtgccttctggg

SEQ ID NO: 2385 - DNA, 16086 bp, Homo sapiens
tccccacccccccccaccccaggggagcccaccatgcttctttggaccagagttcccctccccagagcggcccccctgggacgcctccctcctacaaactgcctttgcctgggccctacgacagtcgagacgacttccccctccgcaaaacaggtgagtgagtcccccacctggcctcccagaatatggctcctgggaggcagaggtgggcttgtggcagtgtcagccctgaccccagtgggctcagctgcagatgtgtgctgctgtgcgcgtatctgaacctcggttaccttctctccagcctctgaacccaacttgaaagtgcgttcaaggctaaaacagaaggtggctgagcggagaagcagtcccctcctgcgtcgcaaggatgggactgttattagcacctttaagaagagagctgttgagatcacaggtgccgggcctgggggtaagggctgctctcatgtacctgttctgagggtctgggaatcaggggtcgggggtagttcacagcaggcccaggtgacagccacttctcctatagcgtcgtccgtgtgtaacagcgcacccggctccggccccagctctcccaacagctcccacagcaccatcgctgagaatggctttactggctcagtccccaacatccccactgaggtacaggcctggctgggggctggtggggcggggacagagttgctccttcccatggaagaaagagtgcagctccttccagtctgtctgcctgagtgcccagcagagacctctctgcccacatgaataggctggaggatccttgcttggacttaattgcattgaaggggaatttgtcccacaggactatgaagagccctgatggctcagtctccctcagtgggagctcagggtagagggaactgggcaccattcagagaccttggccttggccccaggttgccctcccttgttgcctcccctttgtgcactctcatgcctgtctcttctgactgctccccagatgctccctcagcaccgagccctccctctggacagctcccccaaccagttcagcctctacacgtctccttctctgcccaacatctccctagggctgcaggccacggtcactgtcaccaactcacacctcactgtaagtacagggcatataccccatcttccctctggtgttgaggtcacaggtcctgcatgcccccagctggggttttccccttccaaggccctaagggagatctgttggccctacccagagcttggggggtagatagtgggtagatggggatgctagtccaaagttggcaggactgaggctgtataagcccctcccttcaccccccaggcctccccgaagctgtcgacacagcaggaggccgagaggcaggccctccagtccctgcggcagggtggcacgctgaccggcaagttcatgagcacatcctctattcctggctgcctgctgggcgtggcactggagggcgacgggagcccccacgggcatgcctccctgctgcagcatgtgctgttgctggagcaggcccggcagcagagcaccctcattgctggtgagtggacaggtagctgtgcaagggagggggctaaggtcaggaccaactgtcagggatactctccaaccctgtcacagttccccttagcagaatcaacagcatcagtgatttcttccacattctggaaacatgggatacctacaggatgccaggcactgttcttgacaaaatctgctgccatcttggcgttcacatcccagagcagtgttgttcagtagaaacataacacaatctacatacgtaatttctagcatccacattaaaaaatgtaaaaagaaggccgggcgcggtggatcacgcctgaaatcccagcactttgggaggctgaggcgggtggatcacgaggtcaggagattgagaccattctggctaacatggtgaaaccccgtctctactaaaaatacaaaaaattagccgggcgtggtggtgggcacctgtagtcccagctactcaggaggctgaggcaggagaacagtgtgaacctgggaggcggagcttgcagtgagccgagatcgtgccactgcactccagcctggggcacagagcgtgagactccgtctcaaaaaaataaaaaaattaaaagaagcaagtggagccacacatggtggctcaagcctgtgagcccggcactttggaggccaaggcaggtggatcacttgaggtcaggagcttgagaccagcctggccaacatggtgaaatcccatctctactaaaaatacaaaaattagctgggcgtggtggcgggcacctgtaatcccagctactcgggaggctgaggcaggaaaattgcttgaacccaggaggcggaggttgcagtgagccgagatcgctccattgcacccaagcctgggcaacagagcgacactctgtctcaaaaaaaagagaagcaagtggaattaatttcaccacatatatttaactcattatatccagaatattacaatttcggtaatacatatgcagttattctttctattttttaatttttgtagagacaggatcttgctatgttacccaggctggtctttttttcgagactgagtctcgctctgttgcccaagctagagtgcagtggcgtgatcttggctcactgcaacctctgcctcccgggttcaagcaattctcctgcctcagcctcccaagtagttgggattataggcgcctgccaccgcgcctggctaatttttgtatttttaatagagctggggtttcaccatcttggccaggctggtctcgaactcctgacctcaggtgatccgttcgcctcggcctcccaaagtgctgggattacaggtgtgagccgccatgctcatcctttttttttttttttttttttgagacagaatctcactttgttgcccaggctggagtgcagtaagcaggatctctgctcactgcaccctccacctcctgggttcaagcttcaagcggttcttttgcttcagcctcctgagtagttaagactacaggcgtgtgccaccacacccagctaattttttttttttttttttttttttttttgagacgaagtttcactcttgttgcccaggctggagtgcagtggcaagatctcggctcactgcaacctctgcctctcgagttcaagtgattctcctgcctaagcctcccaagtagctgggattacaggcatgtgccaccatgcctggcttaattttttgtatttttattagagaagaagtttcaccacgttggccaggctggtcttgaactcctgacctcagatggtccacccgccttggcctcccaaagtgttggaattacaggcgtgagccactgcgcctggcctaatttttgtatttttagtagagacggggtttcaccatgttggccaagttggtcttgaactcctgacctcaagtgatccacctgccttggcctcccaaagcgctgggattacgggtgtgagccaccgcacccagctgcccaggttggtcttgaactcctgggctcaagccatccccctgccttggactcccaaagtgctgggattacaggtgtgagccactgtgcctggccaatatgcagttaccaatgagatattttggtttttgtttcatactctttgaaatctagtgtatacttcacacttatatcacatttcagtttagacaggttgtgtgcaagggctcagcagtcacatgtaactagtagctatgggactagacagcacaactttagacagcccttaagtaccagggctgtctaaagagccctggcaccagaagaggttctgcttgaaagatacatgatcctggccctagggcttcctagcctggcgggatccacggggaggatccatgatcagggaggccttgttgcacttagggagaaaagtcattgttcgttcagagggctcaagactaaatgtatactcagtttattcagttaaggaaatcgaagggaaaagatggtgaatccaggaaggcttgctggaggtggtaccttagagctgtgaaactcttcattcatggggaagaggaagaatggagctcaggtttgggtggggggtgcttcaggtcccccagggtttttcctgagtatataggtggtgatatgccagagggggttgtgggggcaagatgcagggtcggtgggagggcagtcaggtgccctgacaatggtgcttagtcatcacccccaactccgtagtgccactccacgggcagtccccactagtgacgggtgaacgtgtggccaccagcatgcggacggtaggcaagctcccgcggcatcggcccctgagccgcactcagtcctcaccgctgccgcagagtccccaggccctgcagcagctggtcatgcaacaacagcaccagcagttcctggagaagcagaagcagcagcagctacagctgggcaaggtgagcctggaaaggtgaatggcctggggctgtggtgggggcaggacacaggagagtaccaggctggcagaaaagtcctcctttcaggccagacacggtggctcgcgcctgattgggaggccgaggtgggcagatcgcctgaggtcaggagttcgagaccagcctggccaacatggtgaaacccccgtctctactaaaaatacaaaaattagccaggcgtggtggtaggcacctataataatcccagctactcgggaggctgaggcaggagaattgcttgaacctgggagatggaggttgcactgagcccagatcgcaccattgcactgcagcctgggtgagaagagcgagaccgtctcaaaaaaacaaacaaaaattagctgggcgtggtggcgtgcgcctgtaaccccagtcactggggaggctgaggcaggagaatcgcttgaatttggaaggcggaggttgcagtgagccgagatcgtgccactgcatgccaggctgggcgacagagggagactctgtctcaaaaaaaaaaaaagtcctctcagaggagctacctcacctttttctaattcacatagaagctctacctggaagaagggagggagggaaggatagactgttctgggttttaggctgcacagctgctccccaactcccagctgatgtgcccccatattctgttatcagatcctcaccaagacaggggagctgcccaggcagcccaccacccaccctgaggagacagaggaggagctgacggagcagcaggaggtcttgctgggggagggagccctgaccatgccccgggagggctccacagagagtgagagcacacaggaagacctggaggaggaggacgaggaagaggatggggaggaggaggaggattgcatccaggttaaggacgaggagggcgagagtggtgctgaggaggggcccgacttggaggagcctggtgctggatacaaaaaagtgagccccgtccctggtcccagtccttggtcaccacccctctgtccttctccacccctgcctctgcccttgtctttccctctcccccatctgcagtttccaggctgtgcaggagcagctttctgtagagagcaaaaggggagtgggaaggaggccggtggggagaagggggagctgtttgtgttgatctcagagctgtgtctgtcctaggctgccagttccctccctgtgtctgtgatactggcctgcctctctgcttgtgtgtctgtgtatgcatgcgtcggtccctgtgcgtgcctgtgcgtgtgtgtacacacacgcccccgctgttactactgtctgcctcgcgcctagctggcactccattcattgcggacacagccgagccctccgggcctgactcatcccgcccccaccccgcccccgcccccacccctcccagcctcttacctcaatgctactctttgatgtgactcatcacatctcccccatccctccccatctcagaggagatgtgtctcctgtccctggagggagcaagtgggaggaggtgggggaaggagacttggaagaaaagggctggattggggccccactggaggccctgacagggcctgccctcacccctgtcctggctgagtctgacccaggccccctcccattctcccctccagctgttctcagatgcccagccgctgcagcctttgcaggtgtaccaggcgcccctcagcctggccactgtgccccaccaggccctgggccgtacccagtcctcccctgctgcccctgggggcatgaagagccccccagaccagcccgtcaagcacctcttcaccacaggtgagcccccaccaactgttaggtccttctgccaggcaccagagggcctgtgtgtggtgtctgccccatggcagggggaagaggctgctggggccccttaggcaccctgaaaggaggggacacaggccttcgttctctccctgtaccccagagctgttcatggtagcggcagggccttctgcctcagccgggagagtgggtagcgtctttctcaccccgctgaaggaaggactgccccacagcctgaagtgctgggtagagagagcctgctgtccctgttgggccctgaccttctaccttcccttccttctccctgtgaggtctgggatgagaccagagtcctcttccctatgaagctgccacaggctgggctctggggggacacagacgtgcctgagggtggccctgtatcacccgtggagagtaagacacgggtttggcaggagggggaaagcaggaggtgccgtgagaagggtgcagctgaggaggcacagctggcagagatgagactcatgcgagtgtccagggcagccttgctggggcttgaggagcagggaagcttctgataggcaataatggagcaaaggaatttcaggaggagtcaagagggggcaaaggctggagaggaaaggccaggtgcagtggctcacacctgtaatcccagcattttgggaggccaaggtgggaggatcacttgagcccaggagtttgagaccaacgtgagcaacatagtgagaccccgtctctttaaaataaaaaataaaaaaataggttgggtgcagtggctcacgcctgtaatcccagcactttaggaggctgaggtgggtggattacctgaggtcaggagttcgagaccagcctggccaacatggtaaaaccccgtctctactaaaaatacaaaaattagccaggcgtggtggcacatgcctgtaatcccagctactcgggaggctgaggcaggagaattgcttgagcccaggaggcagaggttgcagtgagccgagatcgtgccactggacctggccgacagagcgagactctgtctcaaaaaaaaacaaaagaaaagctaggtgtggtagtgcctatagtcccagctactcagaacgctgaggtgggaggatcgcttgagcccagggtggtgggggcagtggttgaggctgcagtgagccatgatagcaccactacacactccactccagcctgggtgacagagtgagaccctgtttcaaagaaaaaaaaaaaaagctggagaggagagggggcaggtttgtggcagggtggctgcagtggccatggggaggtgtttggacctgggggttggagacagctccatgagccctgctgaggatcatggtagccaggctgggatcctgggcccagagcagtgctggctgacacataggtctgtggcccaggtgtggtctacgacacgttcatgctaaagcaccagtgcatgtgcgggaacacacacgtgcaccctgagcatgctggccggatccagagcatctggtcccggctgcaggagacaggcctgcttagcaagtgcgaggtaagggagcccctccttcttctggctctcaacttaaatccagcctttgtttccctgttagataagcctctcttcatgcttcttcctcatcctctcttcagccccagacttcggggccagttctcccaccaccccgttccatcccttgcagcctgttttcccccatggtccccagctgagtgggggggatccgggagtaaggtcatgacagagccaggatctactttctgaaaatatttggatctcctgaggccaggaagtggctctgtgtgccctggctatggggcagagaggctctgagagagctgtgcctttgtgtgacccctcttactgatcctcctggcagcggatccgaggtcgcaaagccacgctagatgagatccagacagtgcactctgaataccacaccctgctctatgggaccagtcccctcaaccggcagaagctagacagcaagaagttgctcggtgagctggcacatgggtgggcgggcaggcatgttcagtgtcagggtgggatgggggctctcaggaagactgcctgaccaggctaggagggttgtccccacgggcatagggcattgctgcggcagaggtggcacaattatcacgtcacacacctccagagggcgccactaaaatagagcatgctgtggggcgcggtgcaggaggatggaagtgctcggttggggggactgctttgttcccctcctccacggcttatcatgctcctctctccctgccacctgcccccagaggtaagacgtccccaaggacagaggactgacagcttccaactggtgtgggctgcagaggcctgtcttgtacttgggtctgagccctcatttttggtggctaagcctgtagccctgtggcagttgaggtgccttttttttttttgagacagtcttgctctgttggccaggctggagtacagtggtgcgatctcagctcactgcgacctctgtctccccaggctcaagcaactctcttgcctgagcctattgagtagctgggtttacaggtgtgtgccaccacgcccagctaagttttgtatttttagtagagatggggtttcatcatgttgtccaggctggtctcgaactcctgacctcaggtgatccgcccgaggccacttctagagtagctctattcctcttccatgcaggccccatcagccagaagatgtatgctgtgctgccttgtgggggcatcggggtgagtagggcgtacagcagtgggggtgggcgggcggctctcctaggtctgtctcttccctgcctaccacagccgctggcccactgtccaggtgccctcccctgttcttgccctgcagggggcacactgaaacctgctctcctgccctgcaggtggacagtgacaccgtgtggaatgagatgcactcctccagtgctgtgcgcatggcagtgggctgcctgctggagctggccttcaaggtggctgcaggagagctcaaggtgagcgtgtgcttgtgacctcggtgccccttggcatggccctgctcctcagaggcagaggacaggggcagccttgggatcctttcagtgaggcactgtcctttgcaagctcaactctcaggcaccagggtgggaaggagttgccagctgggaattcaggttatgagggaccaacaaaaagacactaatgcccagtgctctcgtgggtgtctcgaggcagaaatagtgtctgcctgctcaagcctcatggttggcattcaaaatggtccgttgaggctgggcacagtggctcatacctgtaatctcaacactttgggaggccgaggtgggcagatagcttgagcccaggagttcgagaccagcctgggcaacatagtaaaacgctgtctctacaaaaaattaaccaggtgtggtggcgtgtgcttgtagtcctagctattcaggagactgaggtggaaggattgtctgagcctgggaggccaaggttgtagtgagccatgatcgcgccactgcactccagcctgggtgacaaagcaagactctgtctccaaaaaaacccataaaaaaacaaagaaaccccaacaaaattgtgcattaaacatatggatctgcttttctggtttgtgttcacttccctgcctggcttgtgcttctgtcctgtgctaccccctccacggccttcctgcctggatcttgcccctcacctctgcctgcacctcttcagaatggatttgccatcatccggcccccaggacaccacgccgaggaatccacagccatgtgagtgccctagattctctgccctcgccccttcctgtctcttgcaaacgtcatgctgaggctgacctcctgcccttttctcccctcctcaggggattctgcttcttcaactctgtagccatcaccgcaaaactcctacagcagaagttgaacgtgggcaaggtcctcatcgtggactgggtaggcagtgagctggtggggctgggcaggggcgggtagagctaggaccagggtcagccttcaggaagtctcctcccccagccccaccttcaagcaccccagtcgtcctcatcctcgggtgctgggtgtgggtgcagaaggaagggcgctggggctcctgccggatgactaacgtcacattccaacagggctccctcctcaactatgaaagacatttagctcctgttccatcttggccctcacgttgcagtttcaagcaacgaaggggatttcctaccttgaacggtagtgacgctgccgccattgctagtagccgatatttcctcccaccccctacaattaggagcagactgtataccaggaacacaatgagtactttatggccacctcgagtagtaagaacgaggatgtccatttctgtgaacaaaggtgttgttgcgtgacttacccaaggccactcagctggggatgtcggcactgggtttcagaccaaggcttttggccccagcactctgctcttgctaccatgggtgcttcccaaaccctgctcctaatggtggaggcagaggcacacaccactctctgtgagctggggaagtagccaggaccaagcctcaggaaggacaaaatctcttggaagcccaattctggcttaaaaattcatgtaaatgttggatcctccttcagaatcttacgtgcttgtggttgggcacaatggctcaaagcctgtaatcccagcattttgggaggccaaggtgggtgaatcacttggggtcaggagttcgagaccaggatggccaacatggtgaaaccctgtctccactgaaaattcaaaaaaattagctaggtgtggtggcgggagcctgtaatcccacctattggggaggctgaggcaggagaattccttgaacctgggaagtggaggttgcagtgagtcaagatcatgccactgcactccagcctcgatgacagagtgagattctgtctcaaaaaaaaaaaaaaaagaaagaaaagaaaaaggaaaacaaaaaaggccgggtacagtgactcatgcctgtaatcccagcactttgagaggccgaggtgggtggatcacctgaggtcaggagtttgagaccagcctggccaacatggtgaaaccccatctctactaaaaatacaaaaaaaattggccgggcatagtggtgggcgcctgtaatcccagctactcgggaggctgaggcaggagaatcgcttgaacccgggaggtggaggttgcagtgagcccagatcgtgccactgcactctagcctgggcaacaagagtgaaacttggtctcaaaaaaaaaaaagaaagaatcccatctgcctgttttaaattccctactagccttaatgttttccccaaaactgtgaggtggaatgggttctgtagggagatatgccacatttatcccatggttttgaatatcacctacacagtgccaccccacagaggctcagacctagttagagaagtgtggggtgtgcaataccattgtgaacagaatatggatgccctgtggccaagggtggagtcctgggctcaagcgatcctcccagccctcagcctcccaaaatgctaggattacaggcatgagctacagtgctcagctgacaggtggcatttgaccattgggtcagagcgcgggccattttcccgatgcttctacctcccctcataggacattcaccatggcaatggcacccagcaggcgttctacaatgacccctctgtgctctacatctctctgcatcgctatgacaacgggaacttctttccaggctctggggctcctgaagaggtacagctcctgggcgtaaatgcagaccctcctggcccctctgggaggtggcacaatgggacctggcggggagccacggaggcccatggtggtgttggtacctggggagtctgggctcctagtgggaggaccacactgatctgactgcccctccaggcagagcagaggtcagtggagtgagatctggaggcaggggtgagggcaggggcaatgtttgggactcccaggtggtgagaatagccctctccccaactctggtgccaggttggtggaggaccaggcgtggggtacaatgtgaacgtggcatggacaggaggtgtggacccccccattggagacgtggagtaccttacagccttcaggtagggactgaaaagggccatggtagtcaatgggagcccctctgggccctgcagtgggaggggcagaaggcactcagttcagtgtgggtagagggggttgtctctgggaggataacagtggggcgaggcctggcctggtcatctgccgggctcagcttgagccatccctttgcaggacagtggtgatgcccattgcccacgagttctcacctgatgtggtcctagtctccgccgggtttgatgctgttgaaggacatctgtctcctctgggtggctactctgtcaccgccagatgtaagcctgctgggggattgagggaggaagtgaaacagtgaggatatcgagtccagtgaggcatggggcagggaacagactgatattgcagcagacggggaaagcagggggcagggcctagacttggaatcatcttggtaactcccccaacttgtcctctgccaaccccggccttgaggggataggaggtggcagtggggtagcagaggatagaggatgtatcctgccggagctgtagagatgggcttgttggtccctggtgtttcagtgatgctccttgtcattggattggagtcttcagccagtctgttaatgttttgactgtgatagggcatttagttcactgatgctgtattttattatggatatatttgggtttatatctcccatcacattttgtgctatttgtcccacctcttgtgtttctttttctctccttttctttcttttttttttttttttttttttgaggtggagtctcactctgtcacccaggctggagtgcaatggcgtgatctcggctcactgcaacctccgcctcctgggttcatgccatcctcctgcctcagcctcccaagtagctgggattacaggcgcgtgccaccatggccggctaattattgtatttttagtagagacggggtttcaccatgttggtcaggctggtctcgaactcctgaccttgtgatctgcccgccttggcctcccaaagtgctgggattacaggcgtgagccaccgcgcctggccttttttctctcctcttactggctcttgaattgattgattacctttcgccatttcttcttcctcccttcacccatcctcaaaggttttggccacttgaccaggcagctgatgaccctggcagggggccgggtggtgctggccctggagggaggccatgacttgaccgccatctgtgatgcctctgaggcttgtgtctcggctctgctcagtgtagaggtaaggggtgggaaggagctgggaggtggcaggccagagggctgaggggccagcaaggggtcagccagcactgggagccccttaggaagcttttccttggtcctaaggaacagctaatggccaggctttctgagtatgcgtttgtccaaaaaggccatgtttgcccctgttgtgagggatatctggggctgagtggggcagttagaggggtatgcatggcaaccctactccccaccctaagccttctcttctttcccctgccagctgcagcccttggatgaggcagtcttgcagcaaaagcccaacatcaacgcagtggccacgctagagaaagtcatcgagatccagagtgcgtgaggacacgtagaggggctcaggctgccaagggggcacggagcttgtgggagcaccaggactgggactgttcatgtgggtgtcctctgccctccctgaccccttgcctgtctctcgtccacaggcaaacactggagctgtgtgcagaagttcgccgctggtctgggccggtccctgcgagaggcccaagcaggtgagaccgaggaggccgagactgtgagcgccatggccttgctgtcggtgggggccgagcaggcccaggctgcggcagcccgggaacacagccccaggtaagcagcaacccgcaccacctctctgccctcacccctgctggtgcgccccactcaataccctcccctgtgcttgccccacaggccggcagaggagcccatggagcaggagcctgccctgtgacgccccggcccccatccctctgggcttcaccattgtgattttgtttattttttctattaaaaacaaaaagtcacacattcaacaaggtgtgccgtgtgggtctctcagccttgcccctcctgctcctctacgctgcctcaggcccccagccctgtggcttccacctcagctctagaagcctgctccctctgcagggggtggtggtgtcttcccagccctgtcccatgtgtccctccacccattttcctgcattctgtctgtccttttcctccttggagcctgggccagctcaaggtgggcacgggggcccagacagtactctccagttctggggccccccgagtgaggagggaacgggaagtcggtgccttggtttcagctgatttggggggaaatgccttaatttcactctcctcccttctccagcctcaggggaggatctggaggatccactactgtctttaagatgcagagtggaggggaggtgggcacccaccctgcgattctccaccctttccccttctttcgtcctcaccatctctgcagacccctctcctcctccttcctcttggtctcagcactgatgggaggctggtgcccaagctgtggcctgcagtctgtgaggagggctgtcttgcctcacactcctcacagcctacttccccttccccggggctgagagggtgaaagtgtgtggggaaggagaggactggtttcctgggttctcaggggccaggaggagtaacagaaccaggtctgctccccaccttactcggatggcctccctgcccctctgctggcacagcctgggcaaggggagaaggtggtccctgcagaggggctccaggctggtgagagcccccctgctgtcaggaccagattttcccagccatccagcatgctgcggggagaaggggcagaggctcacctccctcctggggccttttgttttggatcctggggatggtgagaatggaggttctagaaggggtaaggccagaacccagggatccaggagtcggctctcagctggagcttccataccttctgggctccctttgctgaccaccagcccaagggagctaagaccaggagggggctgggcgctgtcccttctctttcccaggagccctgccaggggctgtgggcctacaaggcttccaggggatgccatccagcctgtaggaaaccaaagatgggaagtggctcctagggggctgactcttccttcctcctcctccccagtaccacatatactttctctccttctatccccagggccccaccaatctgtttacatatttattatcctatgggggcctgagcaggattgagggagccaggggaggggcaggagtcccagcaccatcggttcatagtgtgcttgtgtgtttgttttagatcctcctgggggatggggatggggccaggctcagtgtactaggcctctctgtgctgagccccaggctcccggccccttacccactctctccctgtggctggtctggttctcatgtaaacccactccttgctttgtctccctggatatggatttcagttaagtattttgtaacccgttacactgtgtgtccttgtgtaaataaacttgtttctggcagtgccttctggg

SEQ ID NO: 2386 - DNA, 421 bp, Homo sapiens
tcaaagtattcaagggctttattggggccgccctggctgcccctcacagtgttgcaagaacccgctggtcttgctgttgcctttgctctttgggggcttgagaggaaaggcagagggaggaccaacttatctgggagagagaaagcccatctttggggctaagcccaggtggtgcggaagcagatttagggaggggagggcctacttaggggctggaaggggatggggctgcctcctggagtgtggtgctcacagagtgttggctttgtgggagggaaaggaaagggaggcacacaagaagtcacgaagagtggatgggcggtgctttctgggcactgcacatgtgctctgcccagggcacgagggccaggtctaggcatggccagagggtgtacttgaggaaattgaaaatgtagaagag

SEQ ID NO: 2387 - DNA, 747 bp, Homo sapiens
cagtggaggtgaagccggtgctgccaagagccatgcccagttccatggggggtgggggtggaggcagccccagccctgtggagctacggggggctctggtgggctctgtggaccccacactgcgggagcagcaactgcagcaggagctcctggcgctcaagcagcagcagcagctgcagaagcagctcctgttcgctgagttccagaaacagcatgaccacctgacaaggcagcatgaggtccagctgcagaagcacctcaaggtgagcgaggggggtgcggggggccgcccagacctccgatccccgcccgggcctggctcacttgtgcctccgttcccatgcccctgcagcagcagcaggagatgctggcagccaagcagcagcaggagatgctggcagccaagcggcagcaggagctggagcagcagcggcagcgggagcagcagcggcaggaagagctggagaagcagcggctggagcagcagctgctcatcctgcggaacaaggagaagagcaaagagagtaaggcagggcctcctgggacctcgtagggccccgcccgtgatgcctgcccctgccatggggggtctggccccaagcagccaggtcagttgtgccctgtcctgcaggtgccattgccagcactgaggtaaagctgaggctccaggaattcctcttgtcgaagtcaaaggagcccacaccaggcggcctcaaccattccctcccacagcaccccaaatgctgg

SEQ ID NO: 2388 - DNA, 5808 bp, Homo sapiens
tcaaagtattcaagggctttattggggccgccctggctgcccctcacagtgttgcaagaacccgctggtcttgctgttgcctttgctctttgggggcttgagaggaaaggcagagggaggaccaacttatctgggagagagaaggcccatctttggggctaagaccaggtggtgcggaagcagatttagggaggggagggcctacttaggggctggaaggggatggggctgcctcctggagtgtggtggtcacagagtgttggctttgtgggagggaaaggaaagggaggcacacaagaagtcaggaagagtggatgggcggtgcttcctgggcactgaacatgtgcactgcccagggcacgagggccaggactaggcatggccagagggtgtacttgaggaaattgaaaatgtagaagaggctgatctgaggggggtggcccagccagtccagggggcccagcagccccatggccagcacaaggcaggctatcttctggccatttcccagctgtgcccgacgcacctgggcatagcagggagagtgcaaggcaatgcccaggcccagggcagcccctgagtcacggctcagggaggcaaagggccggctatccacgtgtatccactcaggccgctcacaccacttgaaggctaggctgatggacctgtggggaagaagagttcttgccaggagaggctggaacatagaaggccactggctcttggccatctgcccttggggcccactcccatgttctgttttgtgcctgtgagggtctatgtgaataggtaatgtgtccttttttagctataatgaaccagagacacaccaggctaggtgcaggcgagataggacagggcccagcctgcccaggcttcaaagcgagacttaccaagaaagatccaggcccagtgtaaagagggtccaatagatgaggctggtgcctagcatgagggccagtgcagtcaacccatagaagcttagctcccgctccataggcactcggggagtcatcagccagcccaggacagcgcctaggagagtggagtgacaacagcttcaaggagtctggggatatgaccctccccaccccgacccccagctgcagtgcagcttggcaagagaataaactgagacataacggggggcctctggggtgggctctacagaagctgggagcgatgggaagatcctagactgatcctcccactgccaaaggcatcctctcagtccaccccgttgccccagttgctcaccagttattaggccagccagcacctggtgagggaaatgtgctaagatgaagattcgcgacaagccaaccgccaaaaggaaggtgcaataagccaggctaggcatcacccttacccagcggctagaaagaagagaggcaaggagctcagagcgtgtccatacacagcttggcctcctgcagcacccaggtactccatggttgaaccacacaacctagggtccccaaaactccagctcccaggctgccatgctgctgtgtctattaggtacagggtgccatcacccctgctcccaatggtgggcaatgccaagggtatacctgcgggcccgagtggccacctgcgaagacagggccgtcattatgggccagagggctgctcctgtgatcatgcagtgtccagaagggctgcctgccagcaaatccagaagctcgtggtgagaagatggaggcagaaccccggggcccctggtgatgcctcaataatacagctgcctttcctggctgagaagagcttttccccagcactgattcataactcgctctgctctgaggcctttttactgccacttgaggtcactgtgctcaggtttctgtcctgatctgtgtctcttggctgtcctctatacaaggtgggcagctggtacatagcatgagtgccctcctcccataactcagcttggtctccctggggttcttttgttctctgcgccagtaattgagaggctggtcctttggttgggccacccaggctgaaaagtactctgaaatgttcacccgaaccctaaccacattgggaaagggagaatgtttgaggcttcccacctggaccagtctcacaagaagaggggaactggtgaacctgggctggagcctggctgtagtaaccagactcatggacccaccaaaagggcctgtctccaaaaagaaacctggaagagaacagatgcaagatgactttccacatgcacacacagccagggggggtacaaggcgggcaggacacagagtactctggagggcctgaggggtgaagtcaaaaagggactacgattctgtccactgctctcaaggtatccatggataccttgccatggttttctaccttagaacaggagaaagaaagcacactatttcttttcttttttttttcctaaccctcagcctgtggaaacactatttttaaaaactagtctggggccaggtacagtggctcatgactgtaatcccagtactttgggaggccttagctggaggatcacttgaagccaggagttcatgaccagcctgggcaacatagcaagacccagattcaacaaaaacaaaaaattagctggaagtggtggtgcacacctatagtctcagctacttgggaggctgggcgggcagatcacttgagcccaggagttcgagaatagcctgggcaacatgacaaaaccccatctctacaaaaaatacaaaaattagccaggcatcttggggtgtgcctgtagtccctgctactccagaggctgaagtgggaaggatcacttgagcccaggaggttgaggctgcagtgagctgtgattgtgccattgtactccagcctggtgatggagtgagatcctgtctcaaaaaaagaaaaagtgaataaaataaaaaataaaactgatacagaggcaagagattgtggtaagccgtgtgtgtgctctgagatactcagccgtcccactctaccccctctcactgcaaggccagctcttatcatccacagagagtccaggacccagctctctcctccaggccctcactaaccctcctgctacccctgcctccatgtccccagttacagcctgaattatccacacctaaattatttaggtgagcctctcaggtctgaaaatgggggtgggaaatggacagagaaggctgagaaagaataaggaggacaaaaaaatgtcaaaatcctctggtctagcaagtgcttggctgggccctgggaaccacacaatgaagaggctgctgtggccagaaagagaaaagatgggatagcaaaagagatgctggcaggaagccacgtgctggggagggatatacagaaggcacttgcctctcccctctgaaaactgagcctagtatatatacaacaagtgctcacacagaaaatgaacggcggtgccaggcgcggtggctcacgcctgtaatcccagcactttgggaggcagaggagggtggatcacttgaggccaggagtttgagaccagcctgaccaacaaggtgaaaccctgtctctactagaaataaaaaattagccgggcgtggtggtgggtgccgataatcacagctactggggaggctgaggcagaagaatctcttgaacctgagagacagaggtttcagtgagccaagatcatgccattgcacgccagcctgggcaacagagcaagactccatctcaaaaagaataaaaaaaaaaaaaaaaaagaatgccaggttgctcacgcctataatcccagcactttgggaggctgaagcgggcggatcacctgaggtcaggagtttgagaccagcctggccaacaaggcgaaaccccttctctactaaaaatacaaaaattagccgagtgtggtggcacacgcctgtgatcccagctacttgggaggctgaggcaggagaatggcatgaagccgggagacggagtttgcagtgagccaagattgcgccactgcactccagcctgggcaactgagcgagactccgtctcaaaaaaaaaaaaaaaaaaaaagagaaaatgaaaatgaatagggactttgccacttgggggacattaatagtgtctgaaggagattgtgatctttgggggacaaggaatagagggggaggcttatacagactttgagagaggagagcacaaagcaaagggcaattaggcaagaaagaagtgaacagatcactgtggttccctttacataaggatgaggccctcgtggaaaagagtggaagggaggggaactctatgttgtttttcagcaagtcattccagctcattgaaatacctcctatgagcctcccttccttcccccaggctgaggatctggcaacagaggctgaggtgaagggaggtgtggctgcatgcccagccccaggggccacagggcctccacccatgtccctgggattcctggcttctaagtctcagtgtgaagagtctactggtgaatgaaagagaaagaagagaaagtgttccctggaaagcagtgctttagcccaaactttactgcatacgcacagggaatcacctgggaaccttgttaaaatgcagattttgattcagtagctctggcccggggcctgagagtctgcgtttttagccagttttcaagtgctgcctatgccgttgggcatggtccagggaccacaccttaatctgcaaggtgtctctgtccttagcagctaccgtgatgcccagcacaaagcatgcttctgaaaaattatagcaaatgaatgaatacatgaatgaaaaagtgagttgagaggtaggactctccactacttaaatcaccatatttgttaaaatatgaattcccataaaccaaaaataaaaaataaaaaataaattcccaaccccttggagtttctaaattagtaagtgtgagatgaggatgggatatttacattttagacacgccccttaggtgatttttccatcagaccagtttgaagaacactggtctaatgagtaggatggttggactctgaggtttgagtccaagctgcacaaagatgctcaaggggaaaaaaaatcagggactacagagtaggggtgggaaggcccttgagacagttgctgaaagagaccagggcttacacatgactcagggccctcgggggtggggaccaggatgccggagggcttctctgtctcaccacttgaagatgaggttgagccactcggtgatgaggctgatccagagcaccgcgatgcccacacggcgggaggcgtagtaggccgcggggaagtagaacagaaagaggatcttgggatcgcccagaaaggtgatccagagccacacgttctccagccaggctagctggttctgtagcgcctcggctatcacgatgcccgcgcccagcgtggactccatggcggcccagctgccgaccaggccccggcttgctccagggcggaaaccagagtccaggcaacgaagcagcgtcgaccctctgatctccaaagcccacccctctgagccccaggccccgccccgccagcagtcaccaccaagccccgcccccagcagtcccccgctcctgcaagaccggcctccagccggtactgtttcctcctgcgctctcctccggttttcctccctactgggcagcgcaggggacaaacctttgtaaaggcgtttcctcagggccccacgtggccactgttgcaggcacgtgggcagccggctagcggcggcaccagtgcggttccgggtcaggggactgactagccggcgggccgcgcgcgctcccagcgtccctgctccgctgatgcgaaggcggatatataatctccagggccggg

SEQ ID NO: 2389 - DNA, 2397 bp, Homo sapiens
ggaggtagaggagggaaatctttgtggtgataaaatagtttcgcatcttgattgtggttgaggttacatgaatctacacttgcgattaaatggcctagaattatacacttatacacacacaaatgagtgcttgtaaaactagtgacatattaataagatctgtgaattgtaccaatgtcaatttcctgacttggatattgaacagtaattatgtaagatgttaacatgtggggaaacctggggaagggtgtgtagaacctctctgcactattttttttttgcagcttcctgttattctataattattttaaaagtaagagctcagtacaaaaaaggaatgaacttctattgatacatgcacaaatctgcatgaacctcaaaggcattatgctgagtaaaaaaataaaatagcctatcttaaaaggttacagactgtttgattgcatttatatggcattctcaaaaagacaacactacagtgatggagaacagatcagtgcttgctaggtgtgggggagaaaggaagatgtgattgcaaaaggatagcacaaggagatttgaggggttatggaactcctctctgtcatgaatctatacatatgtttaaaatcagatctgcacatgcacaaatgtcaattttactgcagaataaaatttaaaataaaagtagataggcaaggccgggcatacctgtaatcccagcactttgggaggccgagtcgggtggatcacgagatcaagagatcgagaccatcctggccagcatggtgaaaccccatctctactaaaaatacaaaaattagctgggcatggtggcacacacctgtagtcatagttactcgggaggctgaggcaggagaattgcttgaacccgggagattgcagtgagccgagaccgcgccattgtacgacagcctgggcaacaagagcaaaactccatctcaaaaaaaaaaaaaaaaaaaaaaagataggcaagtagtttgtttctgacttgtttcttctttccttccttcctttcattcgtccattcattcagccatttactgagcacctactatgagtgaggcactgtgcaagactttggaaatcaaccaaaagtaagacagccaggccctgccctcagggagcattgtttctgtttcagagaagtggccagtagggtttggagcccagtgtttctacttggggaagtgtggcaaggcaaagactacggagggacaaagtgagcaacttttcattcctagagcccagtccggtaggatttcaaatgatcacttttccctcaaagactcttaggcctgagatcagaggaaagcccccaatccgtgtttcacaggtactcacaagagaaaatgctaggagggttgtgccttgctaagggaaggaagaaaagttgggggtggggagcatgagatttgatgcagttagtaaagaatgaactctgaaaagtgttacgagagagagagagagacttaaaacaaccatttgtttagctcatgactctatagattggcaattgagctgagttcagctgggtggctcttctggttctggctggatacacccagcatctgcagtcagctggctgtcaaaggcctcgatcacatgtccagtaattggctggtggttgcctgggtgacagggatctctgggccatttgtttctcatcatccagcaagctattctggtcttgttccttatggcgaggtcacagagttcccaagagcagcagagaataagccccaaaatataagtgctttttaaaaaatagctctattggggtataattcacatacattacctgactttgaattttgttttctcccctgtttgcagggaatctgaagcatgtggtctagttgacagaaagagatcaggtttccagagctgaggagtggtgcctataatgaagacagcgtgtttatgcaagcagtttgtggaatttgtgactgcagggaaaatttgaaagaaattacttcctgaaaatttccaaggggcatcaagtggcagctggcttcctggggtgaagaggcaggcaccccagagtcctcaactggacctaggggaagaaggagatatcccacatttaaagttcttatttaaaaaaacacacacacacaaatgaaatttttaatctttgaaaattatttttaagcgaattggggaggggagtattttaatcatcttaaatgaaacagatcagaagctggatgagagcagtcaccagtttgtagggcaggaggcagctgacaggcagggtttgggcctcaggaccatccaggtggagccctgggagagagggtactgatcagcagactgggaggtggggagaagtccgctggtgttgttttagtgttatatatctttggtttttttaataaaatctttgaaaaccta

SEQ ID NO: 2390 - DNA, 2396 bp, Homo sapiens
ggaggtagaggagggaaatctttgtggtgataaaatagtttcgcatcttgattgtggttgaggttacatgaatctacacttgcgattaaatggcctagaattatacacttatacacacacaaatgagtgcttgtaaaactagtgacatattaataagatctgtgaattgtaccaatgtcaatttcctgacttggatattgaacagtaattatgtaagatgttaacatgtggggaaacctggggaagggtgtgtagaacctctctgcactattttttttttgcagcttcctgttattctataattattttaaaagtaagagctcagtacaaaaaaggaatgaacttctattgatacatgcacaaatctgcatgaacctcaaaggcattatgctgagtaaaaaaataaaatagcctatcttaaaaggttacagactgtttgaatgcatttatatggcattctcaaaaagacaacactacagtgatggagaacagatcagtgcttgctaggtgtgggggagaaaggaagatgtgattgcaaaaggatagcacaaggagatttgaggggttatggaactcctctctgtcatgaatctatacatatgtttaaaatcagatctgcacatgcacaaatgtcaattttactgcagaataaaatttaaaataaaagtagataggcaaggccgggcatacctgtaatcccagcactttgggaggccgagtcgggtggatcacgagatcaagagatcgagaccatcctggccagcatggtgaaaccccatctctactaaaaatacaaaaattagctgggcatggtggcacacacctgtagtcatagttactcgggaggctgaggcaggagaattgcttgaacccgggagattgcagtgagccgagaccgcgccattgtacgacagcctgggcaacaagagcaaaactccatctcaaaaaaaaaaaaaaaaaaaaaagataggcaagtagtttgtttctgacttgtttcttctttccttccttcctttcattcgtccattcattcagccatttactgagcacctactatgagtgaggcactgtgcaagactttggaaatcaaccaaaagtaagacagccaggccctgccctcagggagcattgtttctgtttcagagaagtggccagtagggtttggagcccagtgtttctacttggggaagtgtggcaaggcaaagactacggagggacaaagtgagcaacttttcattcctagagcccagtccggtaggatttcaaatgatcacttttccctcaaagactcttaggcctgagatcagaggaaagcccccaatccgtgtttcacaggtactcacaagagaaaatgctaggagggttgtgccttgctaagggaaggaagaaaagttgggggtggggagcatgagatttgatgcagttagtaaagaatgaactctgaaaagtgttacgagagagagagagagacttaaaacaaccatttgtttagctcatgactctatagattggcaattgagctgagttcagctgggtggctcttctggttctggctggatacacccagcatctgcagtcagctggctgtcaaaggcctcgatcacatgtccagtaattggctggtggttgcctgggtgacagggatctctgggccatttgtttctcatcatccagcaagctattctggtcttgttccttatggcgaggtcacagagttcccaagagcagcagagaataagccccaaaatataagtgctttttaaaaaatagctctattggggtataattcacatacattacctgactttgaattttgttttctcccctgtttgcagggaatctgaagcatgtggtctagttgacagaaagagatcaggtttccagagctgaggagtggtgcctataatgaagacagcgtgtttatgcaagcagtttgtggaatttgtgactgcagggaaaatttgaaagaaattacttcctgaaaatttccaaggggcatcaagtggcagctggcttcctggggtgaagaggcaggcaccccagagtcctcaactggacctaggggaagaaggagatatcccacatttaaagttcttatttaaaaaaacacacacacacaaatgaaatttttaatctttgaaaattatttttaagcgaattggggaggggagtattttaatcatcttaaatgaaacagatcagaagctggatgagagcagtcaccagtttgtagggcaggaggcagctgagaggcagggtttgggcctcaggaccatccaggtggagccctgggagagagggtactgatcagcagactgggaggtggggagaagtccgctggtgttgttttagtgttatatatctttggtttttttaataaaatctttgaaaaccta

SEQ ID NO: 2391 - DNA, 351 bp, Homo sapiens
ctaggaagtccaagttaaaggcaccagtacgtttggtcgtctggtgagggctgcagtcttctgagagagaaacactgtccttacaaggcagaagggcaagctaggcaattgctatgtgaggtctcacctttataagcctcttaatgccattcaccaggggaagagcccttatgacctaattacttcttaaaggcctcacctcttaataccatcacattggccattaagtttcaaagttcatgaagcctaaactttggagggaacacattcaaaccatagcaatctgtgaatgaaaatttattttacacacttgggatccagttggaagctattttaaagcaatgcttattt

SEQ ID NO: 2392 - DNA, 1056 bp, Homo sapiens
ctaaaattgatcattttaattaattattttctctctttatttaccaggagcttcctgaaactgtgatagatcttttgaataagtgccttaccttccatccttctaagaggttgatattatttagagattgggattacattgagatcctttacgcataagcaattggtttttttcttgttttaatataatggattaaagataatgtacatatggagtagtatataattgacatcagtatcataactgtgaatgatgtaagctttcattttttgtgaattaatgaaaaagtaattaaagttaaactacggtcagaaaactgacatacactaaagaagttactagttcattttcaagcttttaaatagaatattaactaaactatggaatgtaggtattcctagacccaataataacatcagtgaaatgagaataaaagtttgttgtcaatatgtattatagcaatgaacttggatcagtggtgtgataaactaacaattgttgacaataaaaaaggatttcttagaagtttcattaattgactttgacttgatgatgtcactactagtcatacagctatccctaaattcctttactatgtaatgtttgaaaataatgtatacaaatttgcctttagaaaaacaactttatcaagacatgttagagagaaatagttttgtgtcaatgtaccacattaaaggacaggaagaaaagccaaatggtattattataatagtttgcataaatattatttaattatttaagatattcagtaaagcaggtgaatgctagtcagggtaaaagtaaacaatgcagaagcttttatggaatgatatttttgatacatcatgaggtaaagtacaacataagtaaaaaaaattcagtatttactcacagttatttgattataatataaaagtatgcatctagactctgcaaaagagagctgtattattttctgtgctaatgaggtatttaagacttttatccattctcttgaatgtatgccattattctaggaaattttttatgactttcattcatgctctgtattttaaa

SEQ ID NO: 2393 - DNA, 683 bp, Homo sapiens
cagaaagcagatgaatggttgtgagaggctggggtggggagggggatggggagtgatttctttctttctttttttttttttgagacagtcttgctctgctgcccaggctggagtgcagtggcacgatcttggctcactgcaagctccacctcccaggttcacgccattctcctgcctcggcctcctgcctcagcctcccaagtagctgggactacaggtgcccgccactatgcccggctaattttttttgtatttttttagtagagatggggtttcaccatattaaccaggatggtctcgatctcctgaccttgtgatctgcccgcctcggcctcccaaagtgctgggattacaggcgtgagccaccacgcccagctggggagtgatttcttaatgggtatagggttcttttatggggtgatgaaagtgctttggaaccagatggaagtggtgatcgcacaacattgtgaatgtactaaaggctgctgatttgtacactttaaaaaatatcttcaggtgttcaatattgctttcagtctattttggtaagatttttctagaaaattgtttattttgtctgttttaaaagttgttcctttgtggatatcatctgtttgtcattggtgttctgcagtttcattatgatttatgtgtcttttttccacataaatttttcaaagtta

SEQ ID NO: 2394 - DNA, 442 bp, Homo sapiens
ctcaaatatacatcaataggtgaatggattttaaaatgcagtatatctatacaatggaatattattcagccccaaaaagcaatgaaggacggatacactgatacatgctataacactgatgaacctctaaaatttcctgctaagtgaaaaagtcatgaaagaccacatgctatgatcccatccatataaaagtccagaatagggaaatctatagaaacaggaagtaggttagtggttgcttaaagaaagagtggtaagtaggttgcttaaagggtcataagtggggacaatagttaaaaagttgggggtttggaggtgatttttaggttttcagatgatgaaaatgtaaaattgaggtggtgatggttgcatgtatctttgagtatactaaaagctactgaattgtactactgaaataaatgagttatatggtatatgaatt

SEQ ID NO: 2395 - DNA, 468 bp, Homo sapiens
tgctctccagttgtatgatatttatgatagtatgtgaataatgttaagtagataaaatgtggtctgctgaggctgagtgctcagcctgagtataatactggtatgtgacaggtccactggcggcctggggttcttctgtaaagtgagtagtttggggtaactggtatccaggcatctttctagattgaattttaaaatcccactaattgatatgcatctggttgatgactcctcttctctctttatctttttaatgtaggaagagaggatggtgatgcaccggttacaaaagatgagaccacctgcatttcacaagacacaagagctttatcggagaaatccctgcaaagatcagcaaaggtcattgcctacagattttctccacgtgtccaaatggctttcacctgagctacttgttgaagatctcgtgtgattcagtcaggactgtatttggtcatttaatcagaa

SEQ ID NO: 2396 - DNA, 468 bp, Homo sapiens; identical to SEQ ID NO: 2395

SEQ ID NO: 2397 - DNA, 423 bp, Homo sapiens
gctgggattacaggtgtgagccaacatgctcgactaaacacagctgacttctagctgtgcacatagctcatagtggcagaaatggtgaagggcaacgtataaagtggcataatggcatgaggctttatgtttcagaagcatccatcagtgtgtttcatatgggaatgcagtgtgcttactctaccaagcaagttgattaatagagtattgctcttgcatactgacatgaggaatttctaaattatactctatatatttgagtactaactgtgctccaggcagcatgctaagtgtgggagattagaatgaatggaaagcctggggatggatctggctcacagacctattttgtttgacctgtgcagtatttaaaaattttgacttcatggctttcagcaaaaaaaaaaaaaaaaaaaaaaaaag

SEQ ID NO: 2398 - DNA, 423 bp, Homo sapiens; identical to SEQ ID NO: 2397

SEQ ID NO: 2399 - DNA, 435 bp, Homo sapiens
aaataaattttgtcccttaggaacgcatacaataactgtttaagtctactagtggatcagtactccacatcatggggctcagtcaacatggacttgtctagccatctctactgaagttggcatttttattacagtaacattgattaagggacataaagactggctaactgaagcatatactatctgtttcaacagctttcataatcttagctgaatctcttgaaatgtgggtaaaaagtagaaaaaaggaaaaagaagtctttatatcaagtagcattcatagaatgggtgatcccagaggtctcttcttcctgaatctccttgacaaattttgtgacaaggcaattcacctcctcacaaagcctcttcttccattgtcaggtagctttcatttattagggaatttgttttcctatactttccaaaaatcagtga

SEQ ID NO: 2400 - DNA, 435 bp, Homo sapiens; identical to SEQ ID NO: 2399

SEQ ID NO: 2401 - DNA, 435 bp, Homo sapiens; identical to SEQ ID NO: 2399

SEQ ID NO: 2402 - DNA, 750 bp, Homo sapiens
atgtcaggcctctgagcccaagccaagccatcgcaccccctgtgacttgcatgtatatgcccagatggcctgaagtaactgaagaatcacaaaagaagtgaaaaggccctgccccgccttaactgatgacattccaccattgtgatttgttcctgccccaccttaactgagtgattaaccctgtgaatttccttctcctggctcagaagctcccccactgagcaccttgtgacccccgcccctgcccaccagagaacaaccccctttgactgtaattttccattaccttcccaaatcctataaaatggccccacccctatctccctttgctgactctctttttggactcagcccacctgcacccaggtgaaataaacagctttattgttcacacaaagcctgtttggtggtctcttcatacggacgcgcatgacatttggtgccgtgactcggatcaggtgacctcccttgggagatcaatcccccgtcctcctgctctttgctccgttagaaagttccacctacaacctcaggtcctcagactgacaagcccaagaaacatctcaccaatttcaaatccggtaagcggcctctttttactctcttctccaacctccctcactatccttcaacctctttctcctttcattcttggcaccacacttcaatctctcccttctcttaatttcaattcctttcgttttctggtagagacaaaggagacacgtttcatctgtggacccgaaactc

SEQ ID NO: 2403 - DNA, 750 bp, Homo sapiens; identical to SEQ ID NO: 2402

SEQ ID NO: 2404 - DNA, 750 bp, Homo sapiens; identical to SEQ ID NO: 2402

SEQ ID NO: 2405 - DNA, 109 bp, Homo sapiens
aaaaaaaaaaaaaaaaaaaaaagaattaattagaagattttaaagcttgatggcaagtcccatcattatcaatattatttggctgttactttttcatataatctgctgc

SEQ ID NO: 2406 - DNA, 128 bp, Homo sapiens
gggtgagactcagtatccaaaaaaaaaaaaaaaaaaaaaaagaattaattagaagattttaaagcttgatggcaagtcccatcattatcaatattatttggctgttactttttcatataatctgctgc

SEQ ID NO: 2407 - DNA, 128 bp, Homo sapiens
ggcacggtggctcatgcttgtaatcccagcactttgggaggccgaggcgggtggatcacttgaagtcaggagtttgagaccagcctggccaacacggtgaaaccctgtctctatacaaatacaaaaat

SEQ ID NO: 2408 - DNA, 128 bp, Homo sapiens; identical to SEQ ID NO: 2407

SEQ ID NO: 2409 - DNA, 4957 bp, Homo sapiens
atgcccttttctttttttcctttttttacttacattaaatacatcggtaaatcagcagtcgcattctgttaccacgattgttatgttgggagaggaagaaaggcaaatgctttctcagaagcaaaacaaaaacaaaaaaccacaacacccccccttaaaaaaactgaccagaagaaaaaaatgagctgggaaataaacaaaagaaaactaagatccccaagcccaacagagctcaaaggaaggcagaagaggtggtaggaagtagagggaaggcagccgataggcccagaagctaaggccaaatcctgttcctatgggggtggggggagggagaagcctggggaagtggtttcccaggcccaagataatgaaacatcttcactcctgctccaagggggaaagctgcacagagaaagaacttcatttctagaagactttggaaagccatcctagttcttccacttgtaaaaaggatgcactgggtgctatggggggccagtggcttctgggaaaggaagggggaaatgtgtgtgtttcagggccatgggaactaaggctgcccctggaaaaggaagggaattgaggcctaagtggaagaacctaagctgggtcttcagaatctcagcttcatagatttctcagctgttctgggatagaaggcagtctgcaagccaaaagggcaggaaggttccaatcctaggtcactgtgacctttcctttctttctttcccaaaactccgggctggaacaaggaacttaaagttctcttttgccttgatggcttctcagagacatcttaaaacacctgatgaaggatatgaagagagactagagatttagaaaggaccaaggtcctctgataatatgagccagttgtaaggtaccttcagtgccggtcattccctctccacaggaacaggtggtatgatacgagggcaccacaggaggcctctgtggtactagcccctattggtacatggattaaaccactggttgcatgatggggagggatggggggattaaggatggagggactaaattcaagatattaacaaaggaacaaagaaacagggcctgatgggaggcagaggatagaacagactgtacagtgggaataaagatcatacctatttacaaggaagtagaaaagacatggtaatggatatcaaattgagtgtgaaacctgggaaaggacagaaaactcctcccttttgcctgacctcctttttactcccctaccttggcctgtgctatcctgagacactcctcaattgctcaattaattctccaggaaaggcaaacctatagtcaatagttagcttggcaagaatataggttaataattagagttggaggaagctaacagtggagataggacttgagtagctgccactggtagttttatctataacctctcctcgaacctcgcattaacctcagatttcattgaattaaaaagaaggtgggagggcaagtaaatcaatcaaaacttccataaaacaagtaccccaactgaactaccatcaattaaagtgcaaactgcaggggtatatggtggctggggctgaggccatctaaaggccagaggggaaaaaatgcatatgtataaatcagaggatgggtaccagaaactgtccctcctccaatcagatcacagcagagccaaagatgcaggcaaccagtgaaaattctttggaagactctggggtccaacccccacgattaggggaaacgctacctaagaggctgcgtgaggggaaactgggcctttgaagagttacagagccacagttgacactgcacctccacctccgcccagttagcttacaaggcacctcctgcctggtgcctgagatcttgcctccccattctcacctctacctaggaacaccctccacaaggccaaatcatggataccgcaatgttttcaaatatgagaaactccaaccaaataaaaacaaaaaggaaatgtttccttactccctcctgctctgagctttattctcccccagggcccttaatgtaaatgaactggaaacctccttcctcagttcctgggttcaccactttctgcatcctggggagaggagaaaagaggctcaagaacagggactgaccaaaagcagaaggggaagggacaggagtcagaagtgttttctgaaaaaatggggaggaacactagggaggaggagaaaagatacgtaagtcgctgtcttgtacctataatacaaagtgaagaaagtttgttttggaaggtaagtcctggggggagttgacccccaagccccagagtagggggtaggaggccagtggcaacagctgcctggtgtttgttgctgaagcgttaaaaagtgccatgacggagctgtcaggaggcagcccttgggagccagggctcagtgtgctgttaccgtaggggttgtgtgctgaggggtagggatggaggttatttcttagctcttgtgctagctccatacttgtttgctgctagccaccccctcagttgctacaacactggctcttgttctgctgggactgttcatggagatccacaccccggcttcggcctgctgcacctcccagattctggggttcactctttggcaacttcttagctagagataaaaagagaagagaacaaagtatggtagactttacttccctacccctctgcctccacccgccaaaaacggctactgaattggggaaaagggagaatttgagagattaaaagaatgttctgaagatgggagggttcactatttgcaaactttttttttttttttgagatggagtctcgctctgttgccaggatggagtgcagtggcacaatctcggctcactgcaacctccacctcccgggttcaagtgattatcctggctcagcctcccaagtagctgggactacaggtgtgcgccaccacgcccagctaatttttgtatttttagtagagacggggtttcaccacattggccaggatggtcttgatctcttgacctcgtgatccgcccgcctcggcctcccaaaatgctgggattacaggtgttagccaccacacctggccggcaaacttacacattgaagacaagggagctaaagctgcagccaaggatggaggtcataacagaaagttaaggtatttccatacctaaagtttttgcaaaaggagatactcgcacctatccttgatttgggttagctataattttgcctataaacgagggaaaaaggaggacctcaggatgttctgaccttacctattgccaggaagagatcattcacgttcatagctgtcttggctgaagtctccatgaacaataagctgttgtcatctgcatatgcctgggcctcctgcaaggagtgggatgtattagtgctcagaatgtagggtgggaacgagtattgcctttccactcccatgcagcacaacagctaggcaaaatcctaggttccctccccttaattaatacccctttgagccagctagcctagatgcataatttaatgacaactccctcaagatgaccccatgtccactcagtccaacacacaaatgtcagaaagcttaattataggggagagggtaagttagttgggggcttttgggttgtgacacttgaatagtcccttaccacaaatttaattgctccctccttcctgttttcacactggtacccccacagctggtacctccctaaccctctgctctggagttttctcctgactcctttgaaaatctcctggctgtcattagggtcacagtgttgctgtatttaacttggtgtagaactggggaatgagacaatgaatgtcctctgttgacgttttcagagagggctggtttggaaaaaaagaggtcccaggaacagaggaagtgttagagaggaactccacgggccaccttacttcatactccaccatacgtttgttggccaggtcagctttgttccctgccagggcaataacgatgctaggactggcctgtcgctgtagttccttcacccatgtctttgctcgggcaaaggtttcctaggaaaacatgaagagaatgagtaggctggaatgactgccaatccatatccatcaccttttaaaatgagtctcaaaattcacctcttctaggtggtcttccctcagtgaaaccacaggtctctgataattcattatctgtcttcttagcacttggaagcataatttgtactcttatttgctatttcaagaacccgttttctgcccccttaccccctgccccaaactaactcctctaaatataagcaaggacagtcttttttcttttttttttgaggcggagttttgctctgtcgccgaggctagagtgcagtggctcgatctcggctcactgcaacctccgcctcctgggttcaagcgattctcctgcctcagcctcccgagtagctgggactacaggcgcgcaccaccacgcccaactaatttttgtaattttagtagagacggggtttcaccatgttggccaggatggtctcaatctcttgacctcatgatcctcccgccttggcatcctaaagtgttgggattataggcgtaagccaccatgtccagccaacaaggacagtcttcttagctcacttacctgattagtaatgtcgtaaaccacgattgcagcttgggcacccctgtagtacatgggggctaagctgtgatatcgctcctgcccagctgtgtcccagatctcaaacttcactgttgtgtcatctagacaaacggactgggtgaggaaggccgctatggatgagagaatggaggggaagatgctgtaagtgggaggatgaatgggaacatccctcccccccttcaaaatgtaactgccctacactaagaccagtcaccacccaggatagtcagctacaggaaaaggttttgagttctccttacatgtaagtcttgaaaccaggattaagactgcccttggctaag

SEQ ID NO: 2410 - DNA, 325 bp, Homo sapiens
ggttcccaaactctctgcactttggaatcattgggaagcttcaaaacatactgatgactgtgtgactgtgttctgcctctgggtttgtgatttgactgatttagggagtatcaagggttttggaatttttagaagatcaccaaggtgacgctaatgggcaaatgagttagggattttagtcctacttcgagttcaggtgaaatggtgagcagagagatgctgcgtttgttcttctttacttcacatccactgctgcagatctaccagccccttattttgttcactcaacacaacaagaacttttttcttcaggacctctgtacct

SEQ ID NO: 2411 - DNA, 325 bp, Homo sapiens
ggttcccaaactctctgcactttggaatcattgggaagcttcaaaacatactgatgactgtgtgactgtgttctgcctctgggtttgtgatttgactgatttagggagtatcaagggttttggaatttttagaagatcaccaaggtgacgctaatgggcaaatgagttagggattttagtcctacttcgagttcaggtgaaatggtgaggagagagatgctgcgtttgttcttctttacttcacatccactgctgcagatctaccagccccttattttgttcactcaacacaacaagaacttttttcttcaggacctctgtacct

SEQ ID NO: 2412 - DNA, 649 bp, Homo sapiens
cagagccagtctttctgcccaactctgtggttttggtcacccaggggaggcgtcaccttctccataaggcactcactgggtctgttccccaaccctgcttggttcttgcactgggctttgcagccaggaggagagagccctgtgctcagcgccctccccaggcacaccccgcccactccctgtgtgctggggcgtgaggatgcctgggcggttgtgtgcataacgatgttcttcttttctccctctccaatgctaacccgtcggaactaacagcaagcattcagaatgagcgtaagtgccctgtgtgcctctctgtgcctctgggagttgggagggaggaatgaggcatgaggtgatacctggggattagtggcctgctgggacttctgctggggcctcttcataccagagccctgtagtgaggtatcttactgcgggggaaggaaggaggcttgcctgcagcattctcttgctgggaaagacagaagggcacgtggtaagaagagggtcattggatcgaagctcatgtgcaccacagctgtttccccatcctccagtggctggcacaggaccccagggtagcacactggcacttgggacctagaaggggaggatctgggaagttcttggggactgaaggccctctctg

SEQ ID NO: 2413 - DNA, 649 bp, Homo sapiens; identical to SEQ ID NO: 2412

SEQ ID NO: 2414 - DNA, 604 bp, Homo sapiens
ggtgaagatgctgtggagacgagctccggggagcatgtgttcagaagccatagatttttgctttccccctggacttttcattcctttgtctcctgcccaggcagccctgggcaaatggcgaagcaaatgtctcttcagtcttctaggggccacacgaaataattattttggatcttttcatgagtcttagtctcaagattttccttcatgcatagcatgtacggcagggcccttgtcctgccacactctgcccctcctctgggatctctcttcccttccctgctgtggctcttcctgcacctcttgttctgagcttaactctggcttctccaggctgccctctctaagcccccagaatcctcgccacatctcactcaagtcaagtaggaaggcttcaaagtcaccatggctttgccctgatgctggcagctcgcagctccccacaaggagccctcactctgaaaaagtcagcctgcaacaacagtacagtagtctgcacctgcatgaaatgagaatgccatgttactttctgatatattcatcaggaaaaaacatttgaaagtcacagcaacacatgttcccttttctgcacattttaaccaag

SEQ ID NO: 2415 - DNA, 604 bp, Homo sapiens; identical to SEQ ID NO: 2414

SEQ ID NO: 2416 - DNA, 380 bp, Homo sapiens
cagcagaagataatgaaagggtagaacaaaaattgaaaaccagagacactgtcaggagtaaactaaagccacttctcagagtttccatagatccaatggcactgccataaatctagattgagaaagtccattagcagttattgcagatacagttaccttctcctcaccccaaattctaaataaaatatatcaaaataaatgaacagattggttattatttaaatattaacccaatttgccagcttcttttaggtcgtaaatttgcatggactcatggtaatccaaatgactgtataaccaatcaggatatttaggaaaaaaaaaaaaagaatcagtggcaatactcaagcccaggttccatgccatctgcaggagctgtg

SEQ ID NO: 2417 - DNA, 380 bp, Homo sapiens; identical to SEQ ID NO: 2416

SEQ ID NO: 2418 - DNA, 370 bp, Homo sapiens
tcagcctcccgagtagctgggactaaagacatgcaccaccatgcctggctagtttttgtagagacagggttttgtcatgttgcctaggctggtttcaaagagtttgtagtgattttgaaagcgaaagcaagctagataaagcctactttatgaaacatgtgcttggaataaaatagattaggatttaaacccataataataaagagccacgccacctctccttatagggaatatttaatatattcccctagaacataaagagttaattgttaatcacttaacaggaagactaggagaaggggttctacgacattaaaagcaaaaatgggaagaaatgttttaaataaactagaaatcggtgggaccacac

SEQ ID NO: 2419 - DNA, 24699 bp, Homo sapiens
ggcggggtggggcggggcggggatcaagcaggggcagggctggcgctgcggcgggagatgctgtcgggccgcggcggcgcttggcagccaggagctctgcattgaaggcactggggtgaggcttactgcccggcaggctggtgggtacgcgagggctgaggtgtctgtaaatctggccgccagcctccacgggcccggcatttgtccatctttctaggcgctcgcgactcggcgacggcggccgcagtgggacacggaggcggggccgggcacctgtgcgcgtttgcaggcacctgctgcgctggccgcctcgcagcccgggactgctgctggggactgcggctggagctgggctggcccggcccgagggagaggggggcccagctggctcgccccggcccgtgcccgccctccccggccgggtcccgaccccgagctctggttaagggggcgtcgccgggccccagagcccccccactggaggggcccgcggctcccgggccagcatcgagctagctgcgaggccaggacagggcccccgccttgcatcacctcgagacaggtttgtccagattccctgagtgctcagagacgggtttccgcccgcggtgagggtgccggtccgaggccgccgcgggtcccggctgtccccagcgagcctggcccgggccgttttcatctttttttttctggcccctgctctgtctcctcttaacgtgtaatttcttaagtccgattcggggtgatgtgagtgcgctgtggcatgtagagtaacagcagcactcatgttttagcctagttttagctctgccacgcactgtcattcgcgcaggctgaagacccagacttctcagctgggtgatgtaaaggaatgcagccgtggccaaacaggcagaaattctaaaattgtttccaagtgacaaggatgtaacatgtcttgcttccatctatgtcattcctctcagaacatgtatgctgtgcttgtcctagactagaccctgaaaagtgtgctacagtttctcgtgattatgttgctgctggaaacattggattaaaagatccatagcaaagttaggcagcagaagacaatacctcctgcttaatgacaggcagaactggggacaaaatttactggattcttaaagagaatcctaacgcgttagacctttaagagactttacaggtttgcaccagcccattaaatgtatgttgtggagcacaccactgtgtcccaagggatccggtcccgtgttaggtgtgtcctagaggacactggggtgctgcacattactgctagatctgaaaatcagtgtcttcatttgagccaaaggggaacatgcccccgcacatttttgatatctcaagtatattcagtgtgtcatactcacctttaaaggcagatttgcggagaactgttgttacttattgcatgttatccatgctagtagaagagccaggatcttcattcctctgatttaattactgggtggcattttctcttggaaaacaaaacagcagtaatgggcactggcaaggtatggatgacctgggttgggtacgtccctggatgtcacaagctcgtcagagaagacaaattattgctgattggggacatttagtacatggtttgctcatgatctgtttaagaaattaggaaaacgttgcttagttttgacccttttcaccttcagccgtttgattggtgcaagtaggaattcagagaaggagctctgctttaaaggtaacagagcctggggggaaataccagggcagggaagttgctgttcttacagctgggcttggctgcttttcctttgcttctttgtatttttagtaaatgacccactgactttatgacctttgagacatgctttcttatccacgacttgaagcttcggctggaagatctgtacttgtgaaatgtctctcttgcgtgcctgtgttgcatttgtctggattgcttggcagttccttaagtacatgatcctgcagtttctatatgtttcgaagttgtagaaggcagtttattgggggatggtactgacaggactcaggtaactacttttgtcgtcttagtgacatacttgtgctgtgccttcctgttttctcttatttctttggctaatactttgctggaggaatcattttgtactcaggtgagttgaggcagcgcttaaatcagcctccttgtatctattgtttgttcccataaccctgggaacagtgatacaacttatgtgtatgtgggtacagtgcattctgagtctggctttcctgttagttaaatgccgagatgtgctagtaacaactgttgtccgtatcttctgaatttctggcaccaaagctcatctgtgtcactgagtaatctgaatcctggccaagggacctggtgcacagattcttatagacatctaagtgtgaaagaaattagaaccagaaaaggaggtgggtatagaaggaaactatttctgaagatgcctgaagaccttttcctaggtttttataaccccttgttatataacattatattgtatatccagggtgtcataattagttattcatcatttcagaagtcttaactgttggccgggcgtggtggctcatgcccgtaatcccagcactttgggaggctgaggcaggtggatcacttgaggtcaggagttcgagaccagcctggccaacatggtgaaaccctgtctctactaaagatacaaaacttagctgggcatggtggcaggcacctgtaatcccagctactcaggaggctgaggcaggagaatcgcttgaacccaggaggtggaggttgcagtgagccgagatcacaccactgcactccagcctgggcaacagagtgagactccatcttaaaaaaaaaaaaaagtcttaatggttggtgttggcatgtttctatgtcttcccgtcttgttttaaggtaaagtgaatgccgaagacagaagatttggatgatacaccactgactttctttgtttggaatacacgttatgaaccctttctggagcatgtctacaagctctgtacgcaaagtaggtatagttgataaattcagtaagaaaacccatttgcttctgtgtctgaaaatagggtcagaatgaaggctaaaataatctgtcacggtcacctgtaatcttgacaaaattacctggtttttctagttaagggtttactcttgagaaataattattttgttggttgaagtctgtttctgagactaggattgcatctcaaatagaaatcgttctggtcatcacaattctaagatgatttaggttatatttacacatgatgaaatttgtaacattgtagttttctactaaacttcaaggttctacggttagaacagctgtgggaaaggctagtctaatatcattaaatcagacttgaggggcactaatttaatttttctaaataaaatgattttttaaaaatatattttcattttaggaaaggttaaaataggcaaacaataagaaaataaaaaccagctgggcacggtggctcatgcttgtaatccccagcactttgagaggccgaggcgggcagatcacgaggtcaggagatcgagaccatcctgactaacatggtgaaaccccgtctctactaaatatacaaaaaaattagctgggcatggtggcgggcgcctgttgtcccagcttctcaggaagctgaggcaggagaatggcgtcaacccaggaggcaaagcttgcttgcagtgagctgagatcgcgccactgcactccagcctgggcaacagagcaagactccatctcaaaaagaaaaaaaaaaaaaaaaaactataatctcacctctaggagaacaaacaccactattactttttttctatatacatgacatctcttccttacttgtacatagtaatggggtacaagtttagttttgctacattggcatattgcattgtgctgaattcagggcctttagatgcccccatcactggagcaatgcatatgatatacatgtttttatatagctaattaaacagcgtttggttgtacttgcgccaaggaagtacctatgagatggtagtttagtctctgactcatgtcgacctttgtctttgacgaaggatgacagtttatgctggtgatatttgaaatgttgaaacatacccagtagggacaaatcaaaatcagacccaggcaagtgagagaatagcttcattctttgtttctaacctaagtgctaacaggcagtgactgatttcagtcatccacattattttgagcttcttagcacctaaccttctgtagcatgtaagtgctgggggacttttctagccttgtacagttgtctaattgcttagtaaccccttgccctctttttggggccactaggaaaaaacatttctttctgtgtttcagttaatcctgtacacactgattgtatcatccttataggatgagtttccctatatgaaagagtttctctaatgctttggtcttgcttcaggtttgtcttctctttatatgacctgcctgcccaaaggactttctagtcatcttggtcatggtgttagaatgtgcttgtaaaggagtaattccagcatttaggccatggagctaataatgtactcttgtgatttaagaatcatcctaacagatattcttacaacttcatcttgtatagcgatctgaaggtgaagagaagacattaacaggggacgtgaaaaccagtcctccacgaactgcaccaaagaaacagctgccttctattcccaaaaatgctttgcccataactaagcctacatctcctgccccagcagcacagtcaacaaatggcacgcatgcgtcctatggacccttctacctggaatactctcttcttgcagaattgtaagtccttaacaaactatttggttaaattaggaatgatcctttaaagtgaagaatgaaatttattctgatggatgcagtaaagggcagacatttaatctcaaagctcaaacctgtccctttccagtatcagacttaataaatataaaactataggctattgctggtgataaaatgtttcttaaccaagacctaggtagagagataaaaatagcctctcttaaagattctttagagctcgggtgaataagatttaaaggcagagggtactttaatttccatgtctgttttggagagtaacaaaaggaagaaactaaggcttattaagaacctacagtagattggccgggcatggcggctcacgcctataatcctagcactttgggaggcccaggcaggtggatcacgaggttcaggagttcaagaccagcctggccaagatggtgaaaccccgtctctactaaaaatacaaaaattagccaggtttgatggcaggcgcctgtaatcccagctactcgggaggctgaggcagagaattgcttgaagtcgggaggtggaggttgcagtgagccgagattgtgccattgcactccagcctgggcgataaagcgaaaccccgtctcaaagaacctacagtagattaggaacttaataaatttagtcttcgtttatgtgaagtgaggaattcgcctcctggaggtttttctagagagtaggacagtgggagagtggctgtctctgccttcttgggtcagacccatctggagggtggtgctccatttggttgtcgccttgtaggcagcctcctgacagatggaggagaaggcctagcagggagggaccaggaaggccagtccttagggatccacagttgaaggaactggagaagttttcttggagaagagacagcttaagcacgtattaaagttgtcttaatatatttgaaggtctgtcacaaggaaggatcttattctgtatgacccccaaaggcaggacttagcaattctagggaagagacaaagatgtgggctccatgtaaggaagacgctgactggtcaccgaggtctgcagctgggctgcagttgcacctggttgtggagtgcaagaagccaagcagggtgcggagtgctggcagcgaccctgtggtgcctggcacacacgggggctccagcactgcacagacgcagatggcatttcattagagaatttgttaaaaggacagaaagtttggagaattcttaatttccatcatttaaaaattcctttgtatacagttattttaaaagcatccttgagccaggcacagtggcttatgcctgtaatcccagctacttgggagactgacgcaggaggatcactggaacccaggagttcaagaccagcctgggcaatagagtgaccccgtctctaaaaaaaaaattaaaaatttcccagctgcagacctatagtcccggctactcaggaggctgaagtgggaggatcatttgagctctgcaatgtgagacaagtgtaggccatatagtgagacctcatctttttttcttttttttgagatggagtctcactgtgtcacccaggctggggtgcagtggcacaatctcagcttactgcagcctctgcctcctcagagcctctgcctctggattctcctgcttcagcctctggagtagctgggactacaggtgtgcgccaccacacccggctaatttttgtagttttagtaagagactggatttcaccatgttggctaggctggtctcaaactcctgacctcaagtgatctgcctgccttggcgcctcccaaagggctgagattacaggcatgagacatcgcagacagcctatgagacctcatctttttttttttaaaccaaaaaaaaaaaaaaaaaaagcatccttgacccctccctggatgtattaatgttgtaatggtcagtgggtctgaggccccagtgtaactttttaactgtatacaaaggctgggtatgatttggtagtaatggcccctttggctctataatggaggccttgtgtttgaggctgggcagtgagttggacaggcgtctattggggtgattaaatctgtattagaactgccttttctggcaaacttcactgtagtagagatacagctgccagccatgttgctactgacatgctgaattttagcaacttaaaaatggaccggataataactcaaaaatgatgaaaagtaagtgaatggaaagtaggtaataaaaatgataaacttaaggcctgataaactagttcttgatagaatccaggattggtaggttaatgtgatcagaatggctgtgggtgggtaactgggtcccagaagaaccagtgtagcctttgtgtcaatacacttatcgtttcttgttttcagcacccagttttccattccctggcaaggcccacagagttcaggtctctgcatcagggtgtccatttgagagcagggcgtgtgagagccgcacaaggatgcctgccctccccaggcagtactgcgagtctgaacattgccttctgctgtgggatcttgtgattaaaatgtaaaatgacaactttgtgacccaattccaagaaatcttaatttatctaacattgtattttaaaagtttttgaatgatcatccaggcacaaaagcataattttacaaatactctcattgacctcagctgtacagaacttacctcaggttgcattattcggaattacctataggctggtttccaagatgatgttttggaagagcgaatttctgggaggaaactttattcttcatttattcctgtttggctttagttcttactgtggggcccctgctggcctgctggtttctctgtgagctgctgctatgaggccagtagtgggcagcgatcagggctggggctctttcctgagttgtgtcaggtgagagattgtgagaacttggcttgcagggtttgggcatcagctgcccattgaggggccgttcattgtctcaaagtgaatgtggggtggtttgatctgcatgtgtcatttgtatccacacaagttaattattctgcttttgttgtagtaccttggttgtgaagcagaagctaccaggcgtctatgtgcagccatcttatcgctctgcattaagtaagatgaggattcactcttaatttatgggcacatttagttcctcccacacaaatttaggccttaactcttttattttttcctacagtgtggtttggagtaatattcatacggcatggactttaccaagatggcgtatttaagtttacagtttacatccctgataactatccagatggtgactgtccagtaagttggagacacagtctggctttatttgtggatcagcgagaagggctgaaagggcttacagctttcctggttcttttcctgacctggtacctttatgatttatctacccagtagttgtccagggggacttctgtgctttgcagcagcttccggcatgccatcagagctttgtttctctgctcagggtctgcaagggaggctggctgcctgccatcctgcagcactcaccaggtgaatggtggccctcaggctctagtggaggagagggagttttccccgcttcattgcaaaatttagtttttcaggaaaatggtaaaagtagttaagtagcccccttgaggcagctctttagctttaaataacgtgactgccttgtcctgaagctctttttatcacgattcctatgggtctcataagcgccactgcttccattaaaggacatgtctctctttatttaaatacagcgcttggtgttcgatattcctgtctttcacccgctagttgatcccacctcaggtgagctggatgtgaagagagcatttgcaaaatggaggtaagtaaataaagtgtttcttttagtgacataatacagcaagaggacgcctcggtaatcacgccatgtttccctttaggcggaaccataatcatatttggcaggtattaatgtatgcaaggagagttttctacaagattgatacagcaagccccctgaacccagaggctgcagtactgtatgtaacttttgctttgttatttaaaataaatttgaagatgcagctaagtagattaagttagtaactttttgacttaaacttttaacacaggtatgaaaaagatattcagctttttaaaagtaaagttgttgacagtgttaaggtgtgcactgctcgtttgtttgaccaacctaaaatagaagacccctatgcaattaggtaagtggtgcatcccccaagtgaactgtccactgtcctttccaatacactgcttcctttctccaggtggtctcagaatagggatataaaaaggcacatgcataagctgttagcctacaacctttataacttggtgccaactcgatttctgatgcctcttgaggctcttctcttaaacaaaaagcttcacatctgacaggctgtgccgacagcacattctctggtgactttggtttcccagggatccttgtgatatatttattcattcccatgtcaggactcttcttttcagctggcagttttagctggagcccctcttaaactgccaaaccctcattgacattcagatgtggtaaaaggagggaaactgaatagtgtgagaatggtgggttcctgaagcactatgacatttgatttaaggaacagtgtctggaggagtattgggaatggacgaattggtgattttgctctttggcaacattggtagtgcttaggaaggcagtggagtatagctattaagagcttggactcatggccaggcatggtggcttatgccagtaatcctagcactttgggaagccgaggtgggtggatcacgaggtcaggagttcaagaccagcctgaccaatatggccaaaccccatctctactaaaaatacaaaaattggtcaggtgcagtggctcacacttgtaatcccagcactttgggaggccgaggcggggagatcacccgaagttgggagttcgagaccagcctgaccaacatggagaaaccccgtctctattaaaaatacaaaatacaaaattagctgggtgtgggtggtgcatgcctgtaatcccagctactcaggaaggctgaggcaggagaatcacttgaaccagggaggcagaagttgcagtgagccaagatcttggcattgcactccaggtacctgtagtcccagcgaggctgaagcaggagaatggcctgaatctaggaggcggaggttgcagtgagccgagatcacaccactgcactccagcctgggtgacagaactagactcagtctcaaaaaaaagagcttggagtcagcagatggactacgtggcttttgtactttttagctctggtaacccagagcaattaatttactctgctttgctgtcttaatctttaaataacagtacttcaaggggtggtgtgaggcttaaatgagatcattcatgtatgagggatagttatgtgagaaaattaattagataatgtctaaaacatacatgtcgacaacaataaaaaatactgtgctttattaagttaggggaattggcttaaaactgcaaaatgaatgttatagaaatttagtgagccaacaaatagtttttaaatacttttctcttccttaagcttttctccatggaatccttctgtacatgatgaagccagagaaaagatgctgactcagaaagtaagtggataacaacttatgaaatggctaactcattgtttcttttctaaaatgtcttcatttggagactgctcattacatacaagtaactttttttgggaaacaagtttgtacagtgctgaaatctcctcaccagtaattttttaaatatctgttttgattgtgcctagaagaagcctgaagaacagcacaataaaagtgttcatgttgctggcctgtcatgggtaaagcctggctcagtacagcctttcagtaaagaagagaaaacagtggcgacttaagagatggtgaatctggtgcaccatgcactttcctgctagactctggcctagttcaagctgaccaatggcagaggactgcctgaagagtaaaactgtgtgaacaatgactgactgccagtgttttccatgtatgcataggttctaacagcagggtttggaaacctgtctctaagtaatgcattacttctgtcagaagtgtcttagggtggttatctagttcagtactccaaattattggggaccttgaggcttaagtaagtatttttctgaatataatgctaaaggtaagttgcattcatttaaactaatagagcagacagaattcagcactacttaatagtttataaatcagtggtttcagttgtatatatgttaggaaatggagaggtatagagagagcaggttccatagctcagcacttttaagtggaagatcatttgaatctcagtcttcagcctgcactgatttgtagcctgcactgtcttactgatttacaaactgaaatcactgagaaatgtctttagttcagtgagaagaaaccagaacacttgttcctagtgttgtgttgttttttttaagcaaattacttactgtatttttatggcaggagggagaaaaagtgttacaacggtttctaatgaagtccggtatttaaatgataaatgactaatgtgtttagtagagacaaaataaaccaataaatgattgttctttgccatttatgcaggaaactacccttttctcaatataaccaaacaaaggctaatttataaatgctttattgaaaaatacacttatcttcatataaaattacagtagcagtatcttgagaagttttataaatatttttgcagaacactattctaattgaacaatgtaagttccatatttctctcagcaatatgaagttacctagtaactttgtttatactgattcaatttacaattgaattttctccctaataagattattaatttgacttgaaaactgctggaacaatagtgattaataaagatatgtatagataattcagctgttaaataacattttctaatttgtataaatggtactatggtactaataaaaacctaaattctccaaccaatttttttaaactgccaggaacacccaaaaatatttttaaatatatcaccttaatagacatttcttttagataactccctcctaaaggaagaggtcataagttttcatattaatcccctcaattcaacttgattaaaatcttttcttagctggttgatccctatataacaaaaaactggagaatttaaaacattcccaaaaggtggctataggggttttaacattttaaaaaaatataaaagcattaaagaaaatattggatgtttagcctggaagttttgtatttaataaagttcacattgtagaaagtgctatcacaaatatacagcaaaatctgggttacaaaatcatgcattttacagccctaaagtgcctccacttatacaggttcactcagacattgcacacccgaacaatcaaggacttttcacactgcaccacaccgaatggggagagggaagatgtgcacaaagggaacgggagacgagggctaatgacctaggacctccaaacctgggtgtgctctcctttgtcaggaatgcaaaaaatcacacactcctaccaggtgttttaggacaaaatacctaatttttgttttgctttttatgaggactacagctgaccacaaaacaggtaggattgaacttgaaacacagttcttctgttggagtacgtcaacagaagcctcctatgctcacgtttgggtacacatcattttcttgcagtatttctaaaagctttgccagagtcaaaaatccaagtttggattctaagcagccttgacagtaatcactgaatggtagggaaaaaaagacagttgggatgaattaaaatgttctaaggacactggaaggagttaagtcccatttctcaccaaaatgtcccctcatgttactaacaggctgtaactcatcagctggattaaggaaaaaagctccataatctagatgcattaaaggctgctgctaaacagattttgtgaagagtttaatacaagagactaacctcagtgggaaccacggtcattagctacatcttggagacggcgtaataaggcagaatgattttctgggcaaattctttttgcaggtgattcacttccatcttccaaaagaattcctctctttttagtaggagtttctcctgtgcgtatcatactattaatttctctcagtctctatggtgggaaaaagatacaaaaattttaaaatgcaaatgcacatagctcagtattaagtcaaagaatctcaaatgagttaagcagtttaccctggaagagtttgaacacatctacagagaaaagaaacactaagttacataacctgccaactttacttttcagctggctgaggccgatggctatttgagaaggggctgagtagttctatttttaacaagctcttccacaggcacttttgacctgtaggtcaattatacatgtctataatttgtgagttcacaaatttgtgattttttttacaattagggagcattacattgctatctgatagtcacttagacacatctttttctcttttttaaagtacaactttatacaatattccctttttttcagtctaatgttactcagtttttagcagccattctcaactgggatttcactagaaaagtaggccttaatccccccctaaggtatccattgtagctaataaattagtaagatctagaatggtactatccttgggagaattgaggattaaagttactcaaattattttctggacagtggctcagatgaggagctgcaattgagaaagacactgccagaatgtcagaaagactggggctggctgtacagcacctttagcattcagtttctccaaagcctctaaaagtcgtctgtcacattattttctgctagtttgttggttaaaattctttttcatgtgctgcttcatccatgtttgcttacagaaagcatactaagcaaattcacagatatctattataggaaattgtaaacatacaaaagtagagaagcataatgcatcctcacatacctattcctctacttcagcatgtttggccagccttgtttgatttatactctgattcacttccattccccagattattttaaaacaaatcccagacatattttatcatgacacttgttatttttattctttaaagtaataaatgttttgggggttttaatgaaaatcagtgttctttattatcaacagatgtaccttcacaagtgtttttcattttttttttttttttaattaacaatagaaatggggttgcactatgttgtccaagctggtcttgaattcctgggctcaagcaatcctcctgctttggcctcctaatgtgctgggaacaggcatgagccactgcacctggccacaaaatcttaagcatctgaagaaagctttccttcaattctttttctagccccctttctgccttcctaagagtctggtctgcatttgctatctctgcagtctcccatttgcttgaatatttcttacactgtttactgtatacattgttaattgtgtataagcaatgctaccataatttatttttcaacaagtcataccagtgcactgacactgctctgtcaagtatcactaatgatcagtcttcatcttaactgatcttgtatagtatttgataattattttctcatagtagtctaaatgttagtacgttatagattggttctagacataagctacttcttgctttgtaatattctcccccttcttgctttgtaatattctccccgtaagtttcagctatcacctattacgtcaagatgacaaatctttctccaaccaagagtctaataatcgctatcattttactggacagactcccaattctgtgctagaaatacctacagtcggataaaactgttcctctgaaaaaatccctcatactcccttgtcagcctatcccaaaccaccactgatgttcttgtccaatagttttgccttttccacaatgtcacagaaatggaatcataagtagcctactgaatccagtgtctttcacttaagcattgatgcatttgagatttatctacattgaatatatcagttcctttttattgcaaagtagcagtcgattgtctggatgcaccacagcttatttatatgcattcaccagctgaaggacgtttgggttgtttcccactttttggcaattaggaagaaagtcactataaacagtcatgtacgtgattttgtctaaacataagtttccatttcatttgtgtaaatacctaggaatgagattgctggttgtataatggtatgtttaagaaacaactttccacagtggcgatgccattttgcgttcacaccagcaatatgtaaaattgttccacattgttgtcagaacttacgatttgtcactttttggattttagccattctaacaggcatgtaatgggtgaagtgtgttcaaatcttttgcccacttttacatttggtggttttcctactgaattttgagaattctttagatactgtagatatacaaatgcttcatcagatatggaacgtgtacagattttctaatagtctatggctggttttttaattctcttaacagtgtctcaaatagcagaaattattcattttgataaaatccattttaacagtattttacggattgtgcttttgatgttgtatataaaattttcccataaaacatgttcactaagattttctgttgtcttctagaggttttgtagtttgagattttacatttatgtctgtggttcatttttagtttttgtatatagtgcagggtatgggaacaagtttactattattttgttatatgcacatccaattgttccagcaccatctgttgaaaaggctatcctttctctaccaaattgcctttgcacctttgttgaaaatcagtttaccatacatgtgttgtctatttcaggactctgttctgttctattgatctctgtgtctatacttccaccaacactactgtcttgattactgtggtgttataatacagatattttgtgtaccttcataattagtgtgaatcctccacctttgaattattttagctattcgagttctttgccttgtaaatgacaaattttagaatcagttttttacataaatctgtttggattttgactgaaattggtttgaaattatagatcaattgggagaaaactgctgttttattttccatgaattggaaactaaggtattattttcattcaatgtcatgaacacatttctgtatcttctcaggctttaatttctctcaccaagcttctatagttttcaggatatatgtgttgcatagtttttatcatacctacccctaagtaattttaaaatgttatggtattcaattttttattttacttctgattgttcactgctagcatatagaaatacatttgatttttgtatgttgatcacataacctcccttattagttccagtagctttttgtggattctttgtgattttcctatgtagacaatccaggctgtatggcttttcttgtcttattgcacatgctaggactcccagttacaatgttgaacaggggtagtgagagtggacattgttgccttgttcttgatcacaggggcaaggcattcagtctatcaccattaagtatgatatctgtagatgcttttggtaaatgtttaccaagctgaggaagttccttgagagtttttacattaatgaatgttggattttgtcagatgctttccttcaaacactaagatcatttatcaccttcactttttgggagagtttctatagaattggcattatttcttccttaaatgtttggtagcatttaccaatgaagccatctgggcctacagttttctctgacaggaggtttttaaaccacaaattaatttctttagtagatacaggggctactgagactactacttgagttttattagtttgtatctttcaagaatttgtctatttcatgtgcattgtcacatttattggcattaaagttttgaaacagggtctcactctgttgcccaggatggagtgcaggggtgccatcacagctcactgcagccttgaccacgcaggctctagcaaccctcccacctcagcctcccaagtaactgggactataggcacacctcaccaaccccaccacacctggcttttttttttttttttttttcagagacaaggtcttgctatgttgcccaggctggtcttgaactactgggctcaaggatccttctgccttggtctcccaaagtgctgggattacaggcatgagccacgacatctggctggcattacgttgttctttatctttcattatacttttaatgtatactagtaatgtgtcatttcttttcctgattattctgtacatagaggaatcaatttttaaaatcatctcccaaaatacctaggtggttttttgtttttgtttttgtttttttttagatggtctcattctgtcactcaggctggagtgtagtaatgtgagcatggctcactgtagcctcaaccacctgggctcaagccatccttccaccttatcctccggagtagctggaaccacaggtgtacagcaccacacccagttaaattttttttttttaaagtagagacaaggtcttgccacgttaccaggctggtctcgaactcctgagctcaggcagtccacccacctcagcctcccaaagtgctgagattacaggcatgagacacagcacccagcctccaaaaaaaccgagcttttgtttgccttggtttttctctgctttacagttttccatttcagtgagtcctacactttttctactttcttaagctgaaatcttaggtcactaatttgagaccttttttcttttggaacataggtgtatgtatttctctcttagcactgttttagctacatcccacaaattttaatattttggattttcattttcatttagttcaaaatattttctaatttctcttgtgctttctttaaccaatagaaatatataatttaggttccaagaattgggggattttccaggtatcttttattgatttctgatttaatgccattgtgatagtgaaaacacagtatttcaacccttttaacatttatcgagacttgttttatggtccagaatgtagtctatgttggtaaatgttctctctgcacttgatttgttagagagtgttctataaatgtcaatcagttgataatgtctacatcttctgtatccttagtgattttctctatttgttgtaccaattatgttgaaatctcttgactaccagttttttttttttatttagggttatatgtcctctttataataggaaacgaccctctttgtcctgataatattttttgctctgaaatctactttctctgatattaatacagccactccaactttcttttcatgagtggtagcatggtataaccttttccacccttccagctttattgagatataattcttataccgtattattcaaccatttgaagtgtacagctccatggcttttagtatgttcccagagttcccagagcagccatcactacattctatttttgaattctttcatcaccccagaaacttcttgttcataagcagaaactctattccccacaacccttggcaaccatgaatctcctttctgcttctagatatttgcccattctggacaactcatataaatggaatcataaaatatgttctcttttgtgactggcttctttcacttaacgatgttttcaaggtccattcatattgtagcatgtatcagtacttcatcctttttattgccaagtaaatattccttttatggatatacatttttatatttaaagtatataacttacaaacaacatatagtttggtcctgcttttttgtccagtcagataaattctaactattaattggtacatttagaccatttacatttaaatgctattttcctgtatgttccttttttcctcctttttaagccaccttttgagtattatcattccaattcatctgctttgtctattacctgctattattctgttctttttttccatttaactctgttaatccatttagaatttataggttacaggatgagagtctaatttaagccgtcagaatcatttcctccaactccatttgctttttggggctgttactgccaatttatgtttccaggtttcataaccagtcctactaggaatatcactggaattagactaagcctatataacagagaaagtatatcttttaaatatttggtcttcttattcagaatcgctggtatgtcttcatttattccagttttcataagttttataaattcattccaaagcacgtgacacctttacacctttttttttttttttttactatgataggaaaagtgtctccattattacattttctgtttttctttggagacggagtcttgctcttgtcccccaggctggagtgcaatggcacgatctcagctcactgcaaactttgcctccgggattcaagcgattctgagtagctgggattacaggtgtccaccaccatgcccggctaatttttttgtacttttagcagagatggggtttcaccatgttggccaagctgatcttgaactcctgacctcaggtgatccacccatctcggcctcccaaagtgctgggattacaggcatgagccaccacacctggcccattattacattttctaacagatttttgctgttcttgtttacttgttttcctcaacttttttttccaaacagacagggtttctcactttattgcccaggctggagtgtggtggcacgaccatagctcaccgcagccttgaactcttgggctcagcctcctgagtagctacaactacaggtgcatggcaccatgctcagctaatttttatttgttgtagggatggggtcttatgttgcctgagccgttctccaactcctggcctcaagcaatcttcccaccccagcctgccaaaatgttgggattacaggcgtgaggcactgcacccggactgttttcctcaactttttaaaagattgcaagcctacaaagagttgaaaaaaatagtacactgagcagccacttatcaatcattaatgtctaagagttgctttcactctctccctacctaaatatattgcaaccaacccgtttgaaagtaagctgcagacactgggacactttacctctgaatactttcagcacagtctcctacataatctgctaggcatcatcaacaccaaagaaacttttaaaaaaaaatacactgaaggccacattcaaattttcctcaaaatgtcctttatagcaacgttttcctatgcaggatcaaaaatcatgcattgcatttggatgtcgtgtctccctagtctcctcaatgataccttccccgtcctcttaccatactgacctttttttgaagagttcaggccatatatatatgtgtatttctaagcaaccgtttttttttttttttttgagacagtgagtttcgcttttgtcacccaggctggagtgcaatggcgcgatctctgctcactgcaacctccacctcctgggttcaagctattttcctgccttagcctcccgagtagctgggattacaggtgcatgccaccacacccagctaatttttgtatttttaatagagatgaggtttcaccctgttgactaggctggtcttgaactcctgacctcaggtgatctgcccactgtggcctcccaaagtgttgggattacaggtgtgagccacaacgcccagcctctaagcaacctttatcaataaaaatctcattatgtaagggccttcacaatccagttccactcgctaacatagcatgatgcccgtaattaagctttggatcactgtctgcctcaaggacactgttttcttccccttaacctgcttcctgctgagtgcccttccatacctcaacagctccctgacttttcaacattaaggcctgactcaagcttccttccccttcttagaatgaggtggctgttgccacatacatctgtgctaatatgactattgcactgcaatgtcaaaaatgtcaacttctcccattagccagagtcctgaggacactgcctgtcccagaaacaggcctttggtaaggaatccaaaatttctttccctaacaaatgtggaaaattgttacaaatgggataaacacaaatttcaggtttacagcaaaatgtacaaataggagagggaataaaaagaaatccaaatcccttaccctgtttcccaccctaaaattccaccccctccccctcaaaaaaggcaaaaaacaaaacaaaccctgggttttgcttcatgaggactgactgatcactgctccctggcagctctcatcactctaatgagtgcctaagcttagcacaaaccctgtttctagcatctgaagcattttgaggttagtaaaggccaagattgatgttaggctcacctttgaaggactgttgctgaagtaatagaaaatcttttctcgaggagaaagcattgtttcatttttatgtggggaaatgtagacaggatgattttgagacaactgtattcggcgaggggagcctgttcttacaaatggatagggagagagtggaggagcatccatctgtttaaaaaaaaaaaatcagtaattctaagaaaaaaatttataattatttttactgaaaatgattattgagtgaagaggtgtgctaaaccagtagttttatgaatgacagagtgatgtattagcaataacttaacctaaagaaaaatattctaatagcaaaccttaagtgcttagtttgtgccagttattattttaagcaatttttatacattatgtcatttcatccttacaacaaccccatatgctaggaactagttatattcccattttatatatgaggaaatgaggtacagagaaaatttaatgatttgcaaggttaccaccactgttaagtactggaaaatttgaacccatgtagcctgtctcttgtactactatactttgtagggactccaaatacaatcttactcgtttaatgcttaacaacagtagaatttatattggttaggtaaattacagacctcctcagttttacttaatagaattatttgtaaaactagcttatttatgagacagagtcttgttctgtcacccaagctggagtgcagtggcacaatctcaggtcactgcaaccaccgcctcccatgttcaaacaattctcctgcctcagcccccagagtagctgggattacaagtgtgtgccaccacgcccagctcatttttgtatttttagtagagactgggttttaccacgttggccaggctggtcttgaactcctgacctcaagtgatctgccctcctcggcctcccaaagtgctgggattacaggtgtgagccaccacacctggccaaaactagtttatatacggaccaggtgaatggtccatatataaatcataaatgattcctcaacactcatgagtgaaaaaagtatgaaataatccctgtcatacttacatttgcctgtgagtacttcatggcaaatgtcttaatctgtttgatgtagatgttgttgtagaactgaatgaggtctcccctctcctcttcttccatgtcactgttggcacctgtgaggcgagtaggtgtgggaggagcactgctgggctgtggaactggcaaggtgctgcttgacctcataactggactggagtctctactggctgcagccaggagaacaaaggctgtcagtacaaaggctgctaatattgactgttttaattttttaaaagtaggagaaagggaacagctacctgcactacttgctaataacagtgaataggcactctgttcttcacaccaaaaagcaaagctcagctaggatattaactttctccctatgccataaccatagcaagggctttctgagtagtgtccattaataagttacaccaaattttctaggacctaagccctgtactaagtggtacaaagcaacaggcaggggatggtatttccatagcatggttccaattgacatatcagacctttctggaactcaggcaagcagattcctccctgaaagctctaattctcctggagaaaaatgttacataatatgtgccccaaagctatgtaatggacagttttgccagctagaatatggtttactgatctataaaacactttcatagtttctatagttatttcatttagtaatgcttagttacttcttcaaggcctaaaaagtaagaaaagctcctaattttgtcttgtagttcacaaagatcccacttacttctatctttgtttagttctgttggagaattctgatggcttctgctatcactgctgccagaatttcttctttttcttttcccttttatcaaaacacttctatacacctttagagaaacaatgagaaggggacataaactagtatttgttgagcacacccttggtgataggaccttcacatatgttacttggttttcacaataacctgtatagcaatagttgtcctcagaacaggttgagaaacataactcaaattataacagatccaggattcaatcagagcccatctagcatcacatgccaagtactacctgcagtactacactgcagtgacagcacccaaccataatgtcaagtcattctaagtaagatacacagatctggccgatttgcctctcagagatgaatggtaataaaggcaaagtgggttttaaatttccatgtgacattctgttggttaaacctacagtatgtttactaaaccagaatgaaaggtgacatagaaaccaagtaacttcttaattcctatcttgtgatttttctgaattaagaaggcaatcaaatatttaacattgttgccttttgaggaaaagagaccttaatcaacatgtgacatcaagaataaagattaaagtagaaacttcccttaagtagagtcccaggtgtttatcttggaaaaaaggccacagagtcaactatggttaattttttgtattcatcacagactttaagctttatttttcagcccatagagaaaatgtagttacctggctccgggcctgcggctgagtcctataacaacgcataatgttctggaaggacttatcttcttttgtgacctggcaaacaataagagtgctctgagagacatggcaactaccaccataatagtgtgaggagctctgtgaacctgctgcccagtaaaaggggtgaaaattatataaaagctatttaaagtctctggaaatggtattaacggcatatagcaaatgaagatacatcgattcaagaatatctattaaaattcaataaaaacaataggagtctatagtatgtgaatcaagacttagaggccaggtgcggtggttcacacctgtaatcccagcactttgggaggctgaggagggtggatcacttgaagtcacgagttcaagaccagcctggccatcatggtgaaacccagtatctactaaaaatacaaaaattagccgggcatggtggcacatgcctgtaatcccagctactggggaggctgaggcaggagaatcacttgaacctgggagatggaggttgcagtgagctgagattgagccactgtacagcctgggtgacagagcaagactctctctcaaaaaaagacttggagtagaaaagtacagtaaatgaaatgaaaaattcactagaagctagggaaaacagatttgaactag

SEQ ID NO: 2420 - DNA, 489 bp, Homo sapiens
cagagcagtgggaaaggaaaggagggatttgaaattgggagtaattgaatcaaacttgcattcgagatctgatggctgccaagtaaagaatgatcagaacagggtgagaaaaagactgagcctattgcaattgcctgggcaagagagagaggtgtcagctgaaacaatggcagtgaggtgaaaaggagggcgtagatcagagtgacactaaggaggcagaatctataagacttgatgatacagacttgaagatttgatgagggtgaggggcaaaagagagggaggaattcaggataataggaaattgagggcaagacgctgatctgtaggaaaatgtaagttaaaatgtgtccatcttcagatgagatgttcttggcatggccaggtggagatatccctcagttaaagtctatatgtaacttcaggatctgttctgggctggagatagagacttgggagtcatttacatttggtggtgcttgaagccag

SEQ ID NO: 2421 - DNA, 693 bp, Homo sapiens
gatccattccctgcaactgaagattctaaggaactgggtttctcagtatacaatgggaatggttgggaggaggtaaagagtagaagacagtatcaagaatccagagcccagcacctgtagtcctaactattcagattccttgagcccaggagtttgagtccagcctggacaacatattgagacccccatctctctaaaaaaaaagagaaagaaagaaggaaagaaaaaaagaaagaaagaaagaaagaaagaaagaaagaaagaaagaaagaaagaaagaaagaaagaaagaaagaaagaaagaaggaaagaaggaaagaaggaaagaaagaaagagaaagaaagaaaagaagattgtagctagggggagagtaggtgaaaagatgaacaacatgaccgggaagatttcctaatctcaccacagcctggctctaccttaaggtaggtagatggacaagtatagctacctgggtcacagatgctaagatgacatccagacaggtcagaaattaagaagaaaggcagatgaggaaggataaaccctatcttataagacaaattcctggcactcatttcttttttaagtttcctttttgctttccctagtcctgcatttttgttgaaggcagaagattagagagagacaaagaatggctgagttgatatccttgtagttacagtctgagttcccag

SEQ ID NO: 2422 - DNA, 353 bp, Homo sapiens
aacaaatatatagacaggtgggacagagaactctctagatcttaccatgctaccatttagttcttacatatttgagtgtacaaccaattgtttaccaagaacttatgtccttcttctaatattcttgttttatatattcttcaattgcactcttattctagtgataatatattcgggtgatttgggaaagtgaggtgcatgtcctactgaaatagaattccaaattttgcacttaaatttgcacacatttcagaggaagaaagcatttatatttgccgagtttcttaagggtttttaggcccaaattattaagaacaatttttctgtgtttcccatgttcagttataccattt

SEQ ID NO: 2423 - DNA, 353 bp, Homo sapiens; identical to SEQ ID NO: 2422

SEQ ID NO: 2424 - DNA, 353 bp, Homo sapiens; identical to SEQ ID NO: 2422

SEQ ID NO: 2425 - DNA, 4006 bp, Homo sapiens
ggacttatatctttcaggtcccacatcgtttcccagttggagatggggaaagagccctgggtgcctgacagtgtggatatgacatcagccatggccagaggggcttatggcaggcctggctctggtaagcagcgatgggagctaggggaggatgtgacttcaccactgtgtttacatcataccagcatcttctctcctattcatcatcatttgataccaatgccagtagccagaccacgtctctgcttttccttccccgtgcttgacacattatctacttgtcattattattctgagttgggccccttggctgtgccccacttttctggcctccgtttctctctttcagcttcctctgcggcactttccaacactggcctacacttaatgtgttgtgagatacgtgcttttccttgatgtgcttgaacaccagctactcagttgcaggttttgctgggtctagatgctctcactgcatagccctcacaggttaccagcagcccaggccctgccaaaaggcctttaaagagaagtgagtgggagaccctgcctctctgcccaatactgtcccccatccttgtgtccctggtcctgataaggcctcctgtattttgtgacctggccaggcacagtatggcggagcagattattccttaccctgacctgagccttcttgtgttgccaacaatcccatgggcttattcttgggtcagccaagcataggtgatggggctctttccttctattaaagtttatacgaacttcaccagcatttctctgctttcagatttttgccatggaacagagggcaaggacttaccttctgagcataacgtttctgtagaaggagtggcacaggacaggagtcccgaggcaactctgtgcccccagaagacctgcccctgtgacatatgtggcctacgtttgaaagacattttgcatttggctgaacaccagacaacacatcccaggcagaaaccatttgtgtgtgaggcatatgtgaaaggctctgagttcagtgcaaaccttccccggaaacaggtgcagcagaacgtacacaaccctatcagaacggaggagggccaggcttcccctgtaaagacctgcagagaccacacatcagatcagctttccacctgcagggagggtgggaaggactttgtggccacagcagggtttctgcagtgtgaggtcactcccagcgatggggagccgcacgaggccaccgaaggtgtggtggattttcacattgcactaaggcataacaagtgctgtgaatctggggatgccttcaataacaaatccactcttgttcagcaccagagaatccacagcagagaaaggccttatgaatgcagcaaatgtggaatcttcttcacttacgccgctgacctcactcaacaccagaaagttcacaatagaggaaaaccgtatgagtgctgtgaatgtggaaaattcttcagccagcactccagccttgttaaacatcgcagggttcacaccggtgaaagccctcacgtgtgtggtgactgtgggaaattcttcagccgaagctccaacctcattcagcataagagggttcacactggtgaaaagccatatgagtgcagcgactgtgggaagttcttcagccagcgttccaacctcattcatcataagagggttcatacgggcagaagtgcccatgagtgcagtgaatgtgggaaatctttcaactgcaactccagcctaattaaacattggagagttcacactggagaaagaccttacaagtgtaacgaatgtgggaaattcttcagccacattgccagcctcattcaacatcagatagttcacactggcgagcggcctcacgggtgtggtgagtgtgggaaagccttcagccgaagctctgacctcatgaaacatcagcgagttcacactggtgagcggccttatgaatgcaatgaatgtgggaagttatttagccagagctccagcctcaatagccatcggagacttcacactggtgaacggccttaccagtgcagtgaatgtgggaaattctttaaccaaagctccagcctcaataaccaccggagacttcacaccggcgagcggccttatgagtgcagcgaatgtgggaaaaccttcaggcagaggtccaatctgaggcagcacctgaaagttcacaaaccagacaggccttacgaatgcagcgaatgtgggaaagccttcaaccaaaggcctaccctcattcggcatcagaagattcacatcagagaaaggagcatggagaatgtgctccttccctgttcacagcacacaccagagataagctctgagaacagaccttatcagggcgctgtcaactacaagttgaaacttgttcatccaagtacccaccctggggaggttccctaggaatgctagctgtgttggaagctttctggagacaagttacattctcttactgtagagtttatcagcgttttttcactgctggggttgtgatagaagccatgtcagcaccacacactgcagctctccaaagagtgtgtccaccactccactgtgctcagggaaggcagacctctcctctctctttccaatccctaaagggaattaggagtagtctgaagccttgggaagatgtcattcccgccctgtatggctggtttagccatggacatgaccagcttttggctgtgaagacctgagcagggttttgccaacagcttgttctagagaaggtttccctttttctgggacattgttggtctcatgttatgcctgtgaaggatttgtccagccttcatgttactctacacaacaacttatctcctgtgtattgccctggttcatgtgatgataatggccttatgataaagccgcctttagtcttccatgttctgatcactgtgtggggtggttcaagagcagagttaagatctaccaaactgaaggggtctccagattatcttggaggggacaggaggatggcagagaaacaactgtcaatccagatttgacctcatttgcattgccaccaaggcctcctaggaaaaattgtaggaatttatgggtataatattgtggtctgaatggcgtgaatttttatcccgaggagggggcagttgtgacaacctccagtgcatgtgggaacagcatgaattgggtcccttattcccagggggtgccccatattccccaatactgtaaagcagatgctgtttagcacctgccaaggagccatatgcccctgaagttcagcattaggcaggtatctcttaactgtaagacataccaggcccagctgggaccataatttgtacagaaacactggatgtgattaatagggagtaggcgagattatagcaaaccagcagaaatggaactctgctaaatgtgcatccgtgaatgctcccttgaatgtggctgtgcaggattcagggtttgcagaaattctcaggacctcagacctctgtcctatgactaatgttactggcagagcaaataatctaaaggttttggttttgtggattaccatctccgtgctgtgcatctgaaggccagtgctgtgctggcaggaaaatagggactgagaaaaagcagatcctatactatagggactgtagtatctatgacgtagccagccattctttgctcccaaggcaagaagaaagagatgacagagtcaatatagggttgccaaatcggattttctaaaatgagtaggaagttggatttttatgtgcaacagtttcttttaatgctttgttgatatgtgattgtcatgcaataattattcatatttggtaagttttgtacatatattatgtacactcagggaaccaataccataatcatgataatgaacgtatccatcacctgcaaagctacctcatgcccctttacattccctccttgccttccctaggaaaccgttgatttacattttttactttagatttgtttgccttttctagaattaacacaattggaatcataaagtatttatactctc

SEQ ID NO: 2426 - DNA, 194 bp, Homo sapiens
cgggtgtggtggctcatgcctgtaatcccagcactttgggaggctgaggcaggtggatcacgaggtcaggagatcgagaccatcctggctaacacggtgaaaccccatctctactaaaaatacaaaaaattagctgggcgtggtggcaggcgcctgtagtcccagctacttgggaggctgaggcaggagaatgg

SEQ ID NO: 2427 - DNA, 348 bp, Homo sapiens
gtagaaagcagggaaaggggctgagttctgggtgtgagttaatctgggatggagatacaggaagagccatgaaaccagcacagcccaataaagatacaacccaaggtgcggatgtaatttttcatgatctagcagccatttaaaaaaagataaaaagggctgggggcggtggctcacgcctctaatcccagcactttgggaggccgaggcgggcgtattgcctgaggtcaggagtttgtgaccagtctggccaacatggtgaaatcctgtctctactaaaaatacaaaaaaaaaattagctgggcctggtggtgtgcgcctgtagtcccagctactcgggaggctgag

SEQ ID NO: 2428 - DNA, 13274 bp, Homo sapiens
tcacagccgccctaaatacagccacccagacccgctccccgagaccctcactatctcctgcagggtgtcacagagcctgccgctctgtcagactcacctttgtcttctctgtgagaaggaccaggctcctgatttttggctgatttttcagtcaagcccagatggaaaattctagaaagggaggaggcttcatttggatttttaatttctgctgcaatctcagaatcctgggtcccttttgggacctaagccccatctcctggcaggattttctatcaccggaatacagtagattttccctccttttttttttttttccccagcaccttaactctcagcttcccagactttctccaatgacagagctgggtgggtggaggaggagaggggttgcaagaaagcttgccggctggggtgaggagactgtgtgtggagcaggcgtgagcgtgggccgcgtgggaaagaatgcgaggctgccgtcaagcccagcgtccacacgaggaggcctgcgatggcgtctgagggagcaaggtgagtgccaccaaggggtctctgtctcctgggggtgcctggtgatgagaatgtgtctcactgtctgtgcccacctacctgtgcacaaataaatgtatctgtgttcacaggggcctatacacatgtatgtgtgtgggttggggtgggcgggcatctgtgcatgatgagggcagcttccccacacgtatggcagtgaaagcaaccctgtgtgaactgtgagaacacatggactgtggcatttgggacatatgtgtacatgggcatgacagagggcataggagggtctgtctgtgtgatatggatgaatggggcgggggagcagagaggagtgtgggaaaaattagtgggggctcggtgtgggaggagaccactctcctgaagtcccccagccagtgggagccctggtgctgggaaggctgagtctccctgtccccttcccctgtgtgcgctccagagggtatcaagtcaggccgagggcatgtccacagtcagggaggcaagatcctggaagcaggaggggtcttgtccaggagggtggcaggccctccccatgcagagatttcaaccctttgcagaggatgtgcaaggcaaggccaggagggaggtgagtttggcacatgctaatgctggagaaagtgggattttctctgcaaaagacagtgggaggaactgggaagggggtactgaatgagaagggacagagaaccatgatggggactaaaacattttagagagggaggccacatacacgtgcaagttctggatgaattcactgctgtggggcaaactctgcccgcaggccagggcttcgctgctgagttcacggaggcctaggagagcaggtgttctgtagaaagcagggaaaggggctgagttctgggtgtgagttaatctgggatggagatacaggaagagccatgaaaccagcacagcccaataaagatacaacccaaggtgcggatgtaattttttatgatctagcagccatttaaaaaaagataaaaagggctgggggcggtggctcacgcctctaatcccagcactttgggaggccgaggcgggcgtattgcctgaggtcaggagtttgtgaccagtctggccaacatggtgaaatcctgtctctactaaaaatacaaaaaaaaaattagctgggcctggtggtgtgcgcctgtagtcccagctactcgggaggctgaggcagggaaattgcttgaaccagggaggtggaggttgcagtgagccaggatagcgccactgcactccagcctgggcaatggagcaagactccatctgaaaaaaaaaaaaaaaaaagataaaaaggctggtgctgtagtgcatgtcctagctactcgggaggctgatgcaggaggatcccttgaggccaggagtttgagaccagcctgggcaacacagtgagaccctatctctacaaaaaaaattgcaaaaattagccagatgtggtggtgagtgcctgtaatcctagctacttggtggctgaggcaggaagatcacttgagtttgaggtaacagtaagctatggtcatgccactgcactccagcctgggcaacataatgagacctcatctcaaaagaataaataagtatctacaggtaaaactaattttagcaatgtcttttatttaacctaatgtatccccaaatccgatcgtttcaccattacactgaggtacatctcagtttggactagccacatcttaagtgctcagtagccacatggcctgaggctgctgtactggatggtgcagctctaggcagcagttccgtaccaaagatcatacaaatttaggcttccactcccaattcacagggagagattgaactttttacaaggtgcaggtggaaatggagttcatttagcctgaatcttaggggccagggagaccccagggacctctggccttgtgggattgtgtgtgcttgcatgcaataatgtgtccatccttgggagctgccagagtgtccagttcccacaaattctcacaacagccccaaggcggttatgatgatcatcttatgagtaaactaaccctcagctggctgagccagctgttgtgtggcaggatcatgattccagtcctgctccggggcagcgtgcagcagggggctgaggccggccctaggtggcgacttgagtcaccaggtctggctgatagagaggtggtgagggaatgtctgagcgtcaggccacgtgtgggtgctgtgtttagaaggaaggtggaggccacccactgggtaacaggggcaatgccatcatgggactggaggagacaggggtggagcagagtgtgcagctgggccaagtctcccggtggaggtggcggtgggggcggctgcccttctttgtcctgggctgtggggggtggagcttgactgctggctggaatcttgcacgccagggaggggctgttgcccagtggggaggcgctaagtatgtctgtgccctcccggcatgctgccgggggcctctggacgtgtgtgcccaggcagggctcagcgtcttctgcaggcacgccatcctcccagctacttgtctgggccgcttcctctcaggccggcagccaggctcccgtgtgctctttggagctgagcagagagaaaggcgctgccaagaccccaaggcaaagccgggaagtgaggagctggccttgcactctcccagccctggccagcacaggaagagcacaggaggcccaagagctgcctggctgcagggggcgagcccagagatgaggggtgggcagcctcctcctcaagggagcagggatcaaggagccaccccaggcagcaggctggctgctggagcctccggtctgcgcaactcctggtttccttcaggagaaagaaagaaatagccaaggagaagccagaggcacccgctagtcaaagaacccgtttggttatggcgtgggcacctaaagagctagtcattcaacaggcaattattaagcacgtacactacacctcagcctgcctcagcagatgctcacgaaaccagtgtttgatgagttgattgactaactaatgggtacagggaggctcaggagataatggaagaagctttagccatggccttgctcaacccctgtgccctgagaaggggagcaacctccttaagaacactgagcacaggaacggtagctcacagcggtcatcccagctactcaggaggctgaggcaagaggaccacttgaggccaggagttcgggaccagcgtgggcaatgtagtgagaccctggctctaaaagaaagaacgctgagcaaacccagacacatggtatcccttcatgccttccttcagaacatccttcctgagcactcactgtgtgcaggcactgcacctgctgcaggctgaaagaatcgtatgttctagtgcggaagaggactcggaatatgtgagccgagacagcgcgaatcctctcagagagcaggaaggcctcgcagggcaggcagtgggaccgcagtgggaccacagcggggacagggaaggcctctctgaggaggtgccctttgggcaaagacagaacctgcagtgaggggctagttgtgtggatgtgggagccagggcctcccagcagaggaaaaggagaaggaggctggagtggtgatgccagcccttgtctgtgttctctcggagttgccactaggggagggccttgccagctatccctcttttagccgggcccctctcgggctgagtccctggcctgtcctcacgtgggagtgggagtatatgagcctggacatggccagatggcagtgatcggggcagaatcggccccatttggttgtgtccacctgggaaaaacaagctcaggccttctcatggccagctgagctcttctgagctcgtgtggggtcaagctgtgctagcaccactcagtccaacaagggtcccaggctgtgctgtgtcctctgcacccctgcccatctctggaggagctcagcaaggcggggggtagtccttgagcctagggcattccgggacccgcattccaacctccctctttccatatctttttttttttttttttttttttgagacagagttttgctctgtcacccaggctggaatgcagtggtgtgatctcggctcactgcaactccacctcctgggttcaagtgattctcctgcctcagcctcccgagtagcagggattacaggtacgtgccaccatgcctggctaatttttgtatttttagtagagatggggtttcactatgttggccaggctggtctcgaactactgacctcaagtgatctgcctgttttggcctcccaaagtgctgggattacaggtgtaagccaccacgcccggcctcgctctccatatctagattggcttctctccaaacacaacagacagagggactctccttccagggaatcttgaggtgccaaagaaatctacaggtaagggtctggatttcctgcttccagaacccctcaaccctgtagaaggcagggtggaggcagaagtgccagggtcaaattcaagctttgccacttgcttgttctgtagccttgggtaagtcactgactctcccttggtctctgtttccttgtctgtgaaatggggatagtgatccaggcatacctcactaccaggttcgtgggagggctacagatagcaggtccttccctctttcttccagagaatttgagaaaacagcaaaatgccaagagtccaaagggcaggccggcaggcactggctgcctatggggcctcccagaaagcacaaagggaaacagagccagtgaggacgggagaggctgccagcagcaattggtgagcagagcagcagatatttattctgaatgtccttactccacacactctcaccccaccccaccccctctccctgcttgtttagagcctgggttccaggagggccaggagctggaatcagcaggtgggatgtgccactcgtggtgtggacagagaagggaggatgaagtcagggctggacctggaaccactgtgggaagagagagtggagggctgagagggccagatgctggttctcctgacttccccaccctgacactccaactgcgagtgcttggcattggggtcatagccctggcactggtgaggacccccagcagcggcctcagaggggcagacaagtctatgtgcctcttcccctgacctctcccagaccccaccatttgccccagccttgtgataaaggccatcttgttcccagaaataaggctggcatcacccaccagacctacctggctaggctgtcagtgctggtccagaatgaggggcacctgggcgctgtccacgcggggaggcagccgctcacctgtgtgcacattgaacatgggcagggtggagagtggccggggcacctcgcggctggccgccatctgccgcagctcctctgtgttcccgtggatggtgcagtggtggaccatctggatgctggaggcacaggtggggagtcatcagctctgggagtcagctgccctggagtacagcctggaactgcctctgagccaccctgcggtcctccccaccacttatgtggggagagactcagacacatgatgcaggggcagaaaacaaacagaaagctctatggggccgggcgtggtggctcatgcctataatcccagcactttgggaggccaaggcaggcagatcacttgaggtcaggagttcgagaccagcctggccaacacggtgaaaccctgtttctacaaaaaataaaaataaaaattagccaggtgtggtggtgggcacctgtaatcccagctactcaggaggctgaggcaggagattcacttgaacctgggaggcggaggttgcagtgagctgagatcgcaagagactccatctcaaagtaaaaaaaagaagaaaaaaaacaaaaaaaagaaagctctatggtgcctgctcagtgcccagtggtcaagacataggctgtgggtgtagacagcctgggttcaaggctgtgtgtcttgggcaagttgcttaaccactccatgccttagtttgctcaacggccaaatggagataataacacctaccaccaggccgggcgcagtggctcacacctgtaatcccagcacttcgggaggccgaagcgggtggatcacttgaggccaagagttcaaggccagcctgaccaacatggtgaaaccccatctctatttaaaaaaaaaaaccaaaacctacctcctaggactgctgtgaagattgaaagagaaaatgtggctgagtgtttacaacagtgcccaccacgtgataagcgctcacaagatatggagacatgaatagacatccacaggggccatattcttccagaagccagtgtttgctgagctttatattatgtttttatattatttatttatttttaagagatggggtctcactttgtcgccaacttcagtgcagtggcacaatcgtagctcactgcagcctctacctcctgggctcaagcgatactcctgcctcagcctcctgagtaactgggactataagtgcaagccaccatgctcggctaatttaaaattttttttgtagagacaggtgtcttactatgttgttcaggctggtcttgaactcctggcctcaagggaccctcctgcctctgcctcccaaagtgctgggattacaggcatgagccactgcacccagccaagaattggttttcttagaggagctggggccccaggcagggctgaagcgaccccacttgccacttggttactgatgagatgagggaggagaagtgatccccacccatgttcaggtcccaattagtggacacagactccggttagagcctgacagtttagactgcagaaaagacctagcttcacgctgaatgggccatgctcctcctgcggggaggccagcaggaagaggtggagtcaccatctaaggccaggggagggtcaagatgagctcttgagtctggaattcagtgagctgagttgtccgaaacccaattttctattcccaggcaaggggagactgaggggaaagaaagcaaccagtgtgtggatgctgagatagagacagctgggcaggtgaggccctggcagaggaaggcctcagtcagtgggccccctccttattcccagccccacatctggacctcattactctggcaacacacaggtggaaaaatgtgctggggatgtttttctagagcaagagcagaggccagaccccgcagtggcttccccacggtccttccacatcagcacttgggcagacagacaaacggcaggcattcctacacactcaggcacacgcacagacacacacacacgtggcctaggtctcacccacacccactccaccaccaacacacagtcccgaaagcactgcctctggcacagaaatccccaggagagggtcgtggggcctggaggactctgtgaccgctgaaatctgatctaggtgaaaagcaggcagcagaatcataacttgtggataatctgaaaagtggcagacattgaacaagtgaaaaattggattttgtagaaatacatcaacgtgaaatccaaaccagccaaggctaacgttgcacatggtaaaacggttattgatttcacattgactgaggcagcagatttttctgacaacatcagagctacagagttgacccggggaaggctggatgtggaggaaatactggtcacaagagaatatccccagtgccagtagatgttagtgtttaaatttggttcagtccaaaaaaattgaggaataaaatcttcctagtgaaatgtacatgaaaaatcactgatccccatggggaaaaattctataaaattgaaaacagaaaataaaagcaaagccttttaactgctttgtatagaaagttgcttgaggaattaagtcaacttagcgtaagtcaacttagcgtacatctctgttcactttggaaactatattccccataaaaattcataaatgttggtataaccctgatgcctgcaaagcttgtattcttcaacccagtggctcaaaaacccagtgggtcaagatggtgggatcaaaatggtgagtttaaaactgggggccaggccaggtgcagtagctttagtcccagctactcaggaagctgagatgggaggatcgcttgagcccagggagtctgaggttgcagtgagctatgattatgccactgtgctccagcttgggtgacaaagtgagaccctctctctaaaaattttttaaaaaataaaatccgcccaggcatgtgcacacacacatgcatatgtgcacgcaccgtgcaggcccgctgtctggcccacaagcgcagccctcctccccaggacacctggcatgttacatgcctccaccatctggcatctccggtccacccctccccggaggaaacaatggggccactgtgacccacacagaattctggtagcctctgaggtcaccacagagataacctcaccaacccctgcaccaagagcacaagtctgtggaggccagccgtgggtgaccgtccttgatcctctttctggccacacaggtaaaggtgagggccggagctcaagaggaagcctcagcgaggaccaggaaccgggacacacctcagccatcctgtgaggggcagcccagtggagacttccagccgccctggaggtccttgcacccaagacacttcacctaccccagggagagaagcagaaaggcacttcgccactgtctccatcagtgctgttgaactcaaatactgccatgggtggaggccagcagggcagcgtgtccctagcaagacagcgactgggcaacgcacctgtgccaaaccctgccagaagcccagcacgtccaaggtgatcctgagggctgtggcggacaaggggacctgcaagtatgtgtccctggccaccctgaagaaggctgtttccaccacgggctacgacatggcccgaaatgcctatcacttcaagcgtgtgctcaaggggctggtggacaagggctcagcaggtgaccggcaggggggcctcaggctccttcaccctgggcaagaagcaggcctccaagtccaagctcaaggtcaagaggcaacgacagcagaggtggcgctctgggcagcgcccctttggacagcacaggtcactactgggctccaaacaggggcacaagcggcttatcaagggggttcgaagggtggccaagtgccactgcaattaatgaggcaggccaggcaagcagtcaggggtgccaagaccgccattggctcagtgcagtgggaataaaaggaacataacttatttcacatctgcctcctggaatctagggttcagggtattgggagaggaagagggctgggggcacataggaggggtaaggccatgagtaggggaaaccaggccaaaataagagaggaaggatttggaaagggctggcagaattggaagcactcatagacaccagctagtccaacctcgtgatcttgcaggtggagcatctgaagccagaaagaagggtgacagagtaattgtgtggcagagcctggcctggaccgcaggtgtctgactcatactgatactgggagtctcttaagttgcttctcaagccctttcccccagagtggcagcaggtcccattcccctgtgtcacaacaggcttttcttttttgggggaaagagtttcactctgtcgcccaggctggagtgccgtggcacgattacggctcactgcagcctcaatctcccaggctcaagcgattctcctatctcagcctcccaagtagctgggaccacaggcatgctccaccacgcctggctagttaaaaaattttttttttgttgagatggggtctcactgtgttgcccaggctggcctcaaacttccaggctcaaccaatcctcccacctcagcctcccaaagtgctgggattacagaggtcaagggaaggggtgagcatcaccctggagttatttattttgtctctgctgttcatggcatagtttggtggcggggtccaacaactgtctaggtgggctcccaccccacccccagctttcctttactcactcggaggtagccaggtctctcttcagcctgtggaaaagtgaaggagagggttagcccagctctgggtttcgccccaaggtgccccagggctccaatgtgagtggaggtctgtgtgcaattatccacaatgccctcctggtgccaggccaggcaggtctcaagccccaagttgcctagaaaggggccccacactccttttgtgcctgagaaccccattcccatggtgtctgggtcccatacagcacaagtgccactgtgagtcccatgggtgtgagctccagcaggtgctcccccgcccttcatgcccacattcaccttccctcccgccggcagcacatgacataggccagcagcaaggtgagaagcagggccaccagcaggggcaccaggagggtgaccagagcatccaccaagaagtcacggtctggggcctcagtgggtgggcagaagaacgggtcatgctccaggatcccatcacctggggtgggcacctcatctgcaggctccggcactgacttatccacctgcacagagagctcagggctgacgcaggaagtggctggctggacacagaggtccccaggaacatggcaggggccaggactaggaggcaggagacacaaagtccagcagaggcgggacagtgcactggttagcgcacagctctagggtctgacctcctggtttgaatccagactcagacaagtgcttagctaggatgattatgtgcctctgtttcatcacctgtaatgtcagaaggataatagtagcacctgtctcctggagtggtggtgagcataaaatatgttgatgggacagtgccaagcacatagcaagtgctcaagaatgttgtcaattaccagtcgctggctgtggaccctgaatgagtccctgctctgttggtcaattcacaggaacagtgtacaccagccgtgggatcctgtgaacctcagctcagtatccaaagagctgttgtgagcatctttggtttatagtgtgaagagctatcagatccttgttgtaagtgggtttgctaggtggcaccttacagaaaagcagacagagctgtcacgcagaggcccttggtagggaaagggtttgggaactggactgtgatatagctgttgacctgggcagatctggggcgcgggagttggagaccccacatgcggattgcggactctgttgccctcttgtgggggaaaggtagaacttcaggggtgtgtgtgtgtgtgtgtgtgtgtgtgtgtgtatcctcagactaagcctgtgggcaatactgagagcatcagggaaagaaatggtgactggagcaatcagagagacggagataggaagcagcatgggagggaagggggactgggatgggggccatgccccaccccacccccggacccagggtccctcctcaccagggtcacattgcaccagtcaacgcggaagtggggtgccaaggtgtcgtagcaagacagaagtggaggctggccctgggcacagcgggcgtggctatcgggggatgccaccatcttcaggcaagtagaaaaaggtgaggcagaacccaccttaatgtataccctgggaccagatagaagtcactgtcagcagagtgggggcagggggcacgaggcaccactctgccaggggttgttgaaactttcctaattgtaggctatgacctggggatgggatgagggagacgcctaagagggaggattaagggaggaacatggcacagctggggtctggcaggagtcacagtcctcccagagatctgagatcatggtgagagtacacagggcaccccattcttctagggggtcttaccctccctactaaggaatgtcttttaatggatgtatctggtacgtcctcatgaggcaccaggaagtacagagttcagggtaactagggtctaggctctggaaggacaaggagatgcgggtatagccagaggagagtggtgaggggtgtgaagctgggaggtggagatgtgcgtggtaaagccccacctggaaattagggagacccttgttctatgcccgccacaagctgcatcctcctctttcaggaagtcctctagggttgcacacctacccttcttttcggccctcaatgggaagggggacacggcccccacggtccaaggcagaggtgacgttgagcagctgaagctctccgggctcccagagtccccccaaggctgagaggaagcggctggcaggtgttgagggcagcacctcctccgcatcgtggctgcgcaccaggaactcggcttggtatggcagcagggggcctgggaaggccaggtggacacctcaggctgcacccagccccagctctgccccgcaaagcctccttgaagctcctccccacatccctgcacaccccttcaggcccctcaatgccccatccatcacagaccccaacaagccaagtcccaatagtctctgcaacgcagcgagtaacagaactccagagcctggaatcccagcccagcacccattccctgagagccttgtccccactttccaggatgccctgctccactcctctccaagcctctcctgtccacagccccctccccctccgggagagattccccaagactggcattggtggggaagggatggggcacagctagaggtaccttctgggtccccaatctccagcaccagcctctgccgagtggtatcaaagctg

SEQ ID NO: 2429 - DNA, 289 bp, Homo sapiens
ggaaaaattagtgggggctcggtgtgggaggagaccactctcctgaagtcccccagccagtgggagccctggtgctgggaaggctgagtctccctgtccccttcccctgtgtgcgctccagagggtatcaagtcaggccgagggcatgtccacagtcagggaggcaagatcctggaagcaggaggggtcttgtccaggagggtggcaggccctccccatgcagagatttcaaccctttgcagaggatgtgcaaggcaaggccaggagggaggtgagtttggcacatgct

SEQ ID NO: 2430 - DNA, 106 bp, Homo sapiens
cacgcctgtaatcccaacactttgggaggctgaggtgggcagatcatgaggtcaggagattgagaccatcctggctaacacggtgaaaccccgtctctcctaagaa

SEQ ID NO: 2431 - DNA, 11749 bp, Homo sapiens
agctctttggattcactgaacggtacggagcagtgttctcatcccgggagcagcccaaactggctgggtttcagcaattcctgcagagcctgcagcccaggacgactgaaggtgaggcaggagggtgggcaggcagagccggctgcacgcatgggcaaggacttctgttcctcatgtgtggacctgaccagagggaggcctcctccccgttctgctctgtgcagctcttgcagcccctgcagacgagagtcaggccagcaccctgcgaccagcttctccactgatgcacatccaaggcttcctggcagctctcactacggccaaccaggacggcagggtcatcctgagccgccaaggtaatcaggtggttcttggccaggttcagttcccaggaaggagccaagctgagcccgggagccgcagcgtgaaaggattctttccttccatcctgggaacttcctgggttaggaggaagcagtgcagtgggcactggcctgctgtgacctgggcaagcagtggaggtggatgggaggagatcgaagggctgggatgggggtcccgtgaccagggtaagcagtggaggtggacgggaggagatcgaggagctgggatgggggtcctctagggcaggggtcctagggaaacttctactgtggggtaggtgggctttggtttgggtcatgattttgtcatctatgagccttgtgatttggactattttctttctcaacttcagtttcttcatatgaaaatggagaggataggccgggcgcggtggctcacgcctataatcccagcactttgggaggctgagggggggcggatcgtgagttcaggagatcgagaccatcctggctaacacagtgaaaccccgtctctactaaaaatacaaaaaattagcagggtgtggtggtgggtgcctgtagtcccagctactcgggaggctgaggcaggaaaattgcttgaacccaggaggcggaggttgcagggagccgagattgagccactgcactccagcctgggcaacagatcgagactccatctcaaaaaaaaaaaaaaaaaaggatggagaggacagtgtggtccacctctgtgggctggttgtcctagagattaaatggtgtttaatttaaagagaaagcactagcacttgtgcctcagacctggactcacctgggggaccccctttgctgggacgacagaagtgtctgttgggcttgcactcacctcccaccgatctgtttttccaggcagcctcagtcagagcaccctgaagtttttgctcctgaatccagctgtgcactttgcccaagtggtgaaggaatgccgggcagtggtcattgcggggggtaccatgcagccggtaaggacacctttcccagcccctcgtgccccaggtgttgggatgagatgggggcttgggagagatgcattatcagtcctgttctctcctggggccccaagccagaaagggtcagctcgagcaggcccagtggtgtccgctgggtgacactgctattctctcactgctgtgccttttaggctgcaggagcagtggagactcctctgctgctccattctgtagccccaggatcacatgtctcccagagaaagctgttctgtggtttcaaactcaaggaaaaaaatcatgattccacttttaaaaggttcattttgatgtatatgaatataatagtctttgtaggcgtaatttttacttatgtgcatagctgttttaaaaacaaaagtacggctccctccatgtgctgtcactggaacttgctcttttcactcagcagccagagggtcataaaccctgtctccttgtcagcaagcatgcacgtatttcagtatcccagctgtgctggattccagttacacagatatatagcatttcatgtagctgcttctctcttgttaggtgtgcaagctatttgcagttttctgttttgagcatgactgtgataaatataaccgcatttctgcacagtggtgactcctacctagcgaagggcctcctggacaaaaagctgctgggaatcctgaagcagtgcttcccagccccagctgccttagcttttgatttttatatttttgtatggatagattcatagttttattcattcggcatattaaaagttgtttacagtaattattgtttctgacgttcacattgtgagagccccttcctgctagctcaggtcctccccgtggcccggtcagtctcgcctccagcacagcagaatgtcatgggatcaccatgggtgtcctttccccacactggattgattcatttctccaagctgctctggtttcttgtaatggggaatgacatttagaagtcaagctgtgggtgctagggtgtttgtcgtgctcctggggcgttttggtagacagatctaggaaatgttttcagaatgaatccatactggtatttctttctttctttctttttttttttttttttttttgagacacagtctcgctctgtctcccaggctggagcgcagtgacctgatcacggctctctgcaacctctgcctccggggttcaagcgattctcatgcctcaacctcctgagtagctgtgattacaggcatgtgccaccacacccagctaatttttgtattttagtagagatggggttttaccatgttggccaggctggtcttgaaatcaggtgatccgccagccttggcatcccaaagagctgggattacaggcatgagccaccacgcctggcccatattggtgtttctaagtaaaaatcaaaggatttgtttacttgaccttttattgtacctctttttctcttaagcctgaacatgtgtgctacattaacatacttatctgctctatcctataatatacttaaaagttttgaaatcatagtaccaatattacttctaacaatagatctgattgaaattgcctttcctctttgcctttagagtgtaacccactaaggatgcctggtcactaggctctaaagtcacgtggaaccaggcttctctccgtgtgcttctgttgtcagtttcatagataactaggctgtttttgtttcattttcttttcaattttagaatttgcttttttcttttctgacttgtagtttttaaatatgtaaatatttgtatggctcaaaagtcaaagcaatataaaaagatctattcaggaaagcctcactctcatccctttccagcccattccccacccccatagggaatccgttttactagcttatcctttcagtctttctttttcccctaaataagcaaaaacgtgtcttcatttttccctttcctgttttatttacacagaaggcatcttagtcagttgtctgaccatcgctcctctagtgggctgcgtggttctctgttggacagatgtagggagcttatccaaccagtaccctctggataggcaggcgcatgattacagggaaaggtccgggggcacatgctgtttggtatttgtgggctgtatcttctcactggactcctaaatatgggattcctgggttaaaaagtataaatatgtttaatttgttaactactgtgaaatttcatgagaattgtaccattctgtatcccaccagtactgtctaggaatgcctgtttctccagagtggttacttttggatttttgccagtctaacaggtgaaagcctggagattcttattcagtagtttgggctggggcctggccatgtgtatttttgaaaattttcgctggtgattttgctgcatggccagggttgataatgactgtgccagatttgctggatttcctttgctgttcctgcacatagtttaaacgagactgccagcactgggtatcagtcaccatttttctttttgttagtttgccatcagccttttctttgacctcttctttcagtttgtgtgtacttgctgtctcttagcccagacttctcgcttcctttctgctgggcctctgaggggtcatggggccgtgacgctgtggccttggtctacaggtgtctgacttccggcagcagctgctggcctgtgccggggtggaagctgagcgcgtggtggagttttcctgtggtgagaagctgtgcccagggtggggcaggctagaggtcaggttctggcccccgttttctgtgggtaatacctcatactgcgaccaggcacaggggcggaggagaccccggggtgggagcctcacccttcgtgcgctcgcccaggctctcctgctttgctccctgctgcctgctgcccagtgtgactggtgatggtgggcgggtgagcgctgtcagtcgctgttcctgtgctggatgatggggcagggaaatgccctctctgcagtgtcttgcagcacacctgcatctccagttttcggcccctccctggctcttaccaggtcacgtgatccctccagacaacatcctgcccctcgtcatctgcagcgggatctccaaccagccgctggaattcacgttccagaaaagagagctgcctcagatggtcagtcccagccagctcgccgcaccacagcctggcctcaggcagcaaagggttttctggggcaggggcgctctggcccaccctgagtgttttcagtgttggggaaattgcacagggacacccgcttagagccacacagaatgagcggcgtcgatctagatgcttatggaggaaggtctgagcttccccgcccctcacgccttaggctgcgaaatatgtattcataaaacctccaggcatcctctgaggacgcctcacacaggagaaagctgctagttccctttggctctcttgccctttggttatatctgcccctgccgggggtagggatgtggggcttgggggcatctcctgtggtgtgcctggggtgtgcagcccctgattgtcgttgtggtgcccatcaggaccctggacagaagaagggaggactcagtgccagggcaatagggaggccccctagggacgctagtgctgtgacatgtgtcagaaaggcgcagtcagcagcagcggctgggtgtgtttggtgggaggtggcacctaccaccccgtggttcccacccaggggagccaagtcctcttccttggctgtagtcctgccgagggtctctcctcagttttgagtctcaaggtgaagacgcggtttgtgggtggctgaggggttgctccatgggggctccctccctccctcctttccttccttagatggacgaggtgggtcgcattctctgtaacctgtgcggtgtggttcctggaggggtggtctgtttcttcccctcctacgagtacctgcgccaggtccatgcccactgggagaagggtggcctgctgggccgtctggctgccaggaagaaggtgagtggcctgtcggcagccttcccacttgtgaggacagtgccactgagtcctcctgggagctctcgtgctcatcgggtcaggacaggcttctggctcctcatccccaccgctcccagtccctgactacagaggatttcccccaaagtccctggctgtgaggttctccagtcccctggccagaaaacacaaggccacgagcagactcgagacctggcaccctgaacctgtctctgggaaatgtcctctgtctttctcagatattccaggaacctaagagcgcacaccaggtggagcaggtgctgctggcatattccaggtgcatccaggtgcgggcgtcatgctgggcttgggtctgagatcgtgtgggggtggcagctggaaacgttgtgggtgtcatccaagttttggctcagcaactcagcgtctgggtttctcctacaggcctgtggccaggagagaggccaggtgacaggggccctgctcctctctgtggttggaggaaagatgagtgaagggatcaacttctctgacaacctaggccggtaagtagtggttctgctcgtctcctgggccgtgatacatggccggccctcactcccagcagctgggcccctgcctgctctctgctgccattagagcccacagctgggctgcgactgctcagaccagccagctggagggaggggctcagcagctctgggtttggtcctgggagagcagttggattttaggctacccattgctgtatcaggacccagtcaattggcctagacgggatctctcagccgaacaagccctctccaggtggtaggtacagagtggagagaggctgagttttgatcacagtcggagaggctgagggaaggggtagaacggagcagctggtgacgtgggtgatgacccgggaggtcctgacgtccacctgctgggctcttgtctcccccgcccaggtgtgtggtgatggtgggcatgcccttccccaacatcaggtctgcagagctgcaggagaagatggcctacttggatcaaaccctcgtgagtgaccccagtgtcacagagggtgacaggagagtaggcagtgggtgggagtggcatcacccccagggctgatacagccaggccttccccgctgcgctggcgtctcctgccccctccggaagcttggatgcccctccacaccctcttgatcttccctgtgatgtcacctggacccctgctgctggcattggccacgaagcctcctggtctggctccaaagcctggcagggtcttttcccagggggagctgcaggcagggaacagtcctgatgggtcttccccttcactcccagcccagagcccccggccaggcacccccagggaaggctctggtggagaacctgtgcatgaaggccgtcaaccagtccataggtgagcctggctgcctccagctgggtggacagatgggggctggagaaagggagaacaggaaagaggggttgcctgccctgtttcctatataagtctgaggaaggggagggggtcgccgtgggaatgtgctgtaggggggaggcaggtgttgctcggagccccagcctctgttcctatgcaggcagggccatcaggcaccagaaggattttgccagcgtagtgctcctggaccagcgatatgcccggccccctgtcctggccaagctgccggcctggatccgagcccgtgtggaggtcaaagctacctttggccccgccattgctgctgtgcagaaggtcagtcctacctttttctttctgagagcctccccaccccgagatcacatttctcactgccttctgtctgcccagtttcaccgggagaagtcggcctcttcctgatgggcaaccacaccactgcctggcgccgtgcccttcctttgtcctgcccgctggagacagtgtttgtcgtgggcgtggtctgcggggatcctgttacaaaggtgaaacccaggaggagagtgtggagtccagagtgctgccaggacccaggcacaggcgttagctcccgtaggagaaaatgggggaatcctgaatgaacagtgggtcctggctgtccttggggcgttccagggcagctcccctcctggaatagaatctttctttccatcctgcatggctgagagccaggcttccttcctggtctccgcaggaggctgtggcagctgtggcatccactgtggcatctccgtcctgcccaccttcttaagaggcgagatggagcaggcccatctgcctctgccctttctagccaaggttatagctgccctggactgctcactctctggtctcaatttaaaatgatccatggccacagggctcctgcccaggggcttgtcaccttcccctcctccttcctgagtcactccttcagtagaaggccctgctccctatcctgtcccacagccctgcctggatttgtatccttggcttcgtgccagttcctccaagtctatggcacctccctccctctcaaccacttgagcaaactccaagacaccttctaccccaacaccagcaattatgccaagggccgttaggctctcaacatgactatagagaccccgtgtcatcacggagacctttgttcctgtgggaaaatatccctcccacctgcaacagctgcccctgctgactgcgcctgtcttctccctctgaccccagagaaaggggctgtggtcagctgggatcttctgccaccatcagggacaaacgggggcaggaggaaagtcactgatgcccagatgtttgcatcctgcacagctataggtccttaaataaaagtgtgctgttggtttctgctgagttttttattgatatgtgctgctgttttctctggaagcctctttagggaatcgaggagcgcactggtgcaggggctgggtggagccatcctccgatggagcacaggcagacggaagcccccaccccagctgcgtggcctcaagccagcctcccgctccccgaaggtggtctccacacagacctgggacagtttcatccccgccccttccagggcagcagggctgaggatcccattctggctgtgtccacgtccgggccatggctagagtctgggtttaggggaggaaggcatggcggcgcccgctaggatttccagttgtcctcttcttcctctgcctgtggctgctgggggttagcagagacggtttgttgtctgacatacgggctctctcctcccggcccctcaccagccccagaggtgaaaaggctggaggggaaagggtgagtgagggaggtctgtggggagcactggtttccccaggccccagagacttaaacacaggaagaaaaaggcaagagagaattaacgatgccacagcccatggcagacagcggccctgcctcctacccttgcgtctcaggaccagcttgttgaagagatcccacatcagttccctgccttggcttacggctctcactgcaataggaaagccacggagtggggtgtggggttcagtcacatttgacccccggctccgtgttcctgtcccctgtagtgtttttgttattagacccttttttctccttggtttaggaatgggggccccagggccacccttgtccaggctccctctaccgtagaggtgagaattccagggagctacaatttgaaaaccactattttatgagccaagtagaacaagaaatgacaactattaaaaaaaataagggatttctgaccagctaacaaccccacagaaaatccgccagggatccagaaatgagactgaggtggcctcagagagctccctcctgaaggggatgctgctgctgtcgtcctgcccggcgccttggactgcagtggccggggcctggggtggggatgagggtgcactgaccagcaccgcagcagctgggggaggttggggtgctgttaacgtgccatcttataggtaggaagtggaaatgggagaaagtgtggggtgcctagggaaggaggtgactgagcagggagcctggctgccatcctaacacccagctcactgggcttgagcgacttgagcctggtgccagggcagagtgggtgatgctggggcccaggctggcaccatacttgaggtctgccaggcaggtcaggtaggatggcacatcgaccttgggggacttggcccaggtctggcatgtagaagtagttctctgggacccatgggattaggtggggacatgtgagaggtgacagggacctgcaggagcagctagcgagacctcatgtgcaccctgcacagctgtggtggcataagggattcaatagagcctctcctagagaggagcctggcagggcccccagcccttgcacctgcccctccctctccaccttctgctccagctgctctctcactgatggacaaggggcactgaacagtttatctgtctctacccccagcatcacatgggtctttgttacagcaccagccagtccgtctgggaagacagacttcttgtatctacaggggcgacgtggaggtcaggcaagccggcacctgctgtcctgggaccatgttcctgacctacctctcccatgtcatcagggacactgcactgaggggtcccaggccactgagccaagccaccctggtcaccttctggctcccacctctgtgctgcacctgagtgtgatgccctaggaccccattaagtcaggctgagtcttgcacccacaccctgcgactccattttctgctacacaggatctctctgatgttgacgagcagcatggagacctggggagaccccccaagcgcctcctccatgtcatccttgggctccagcttggcgctcacacacacaggaaaggacttcagcttctcctgggagggctgggtggctgaggggtggtggatttcggagttggactagcagctggcctagaggctactggggaggagggagcagggagcacccactcctgatccagattcactgcttccctcgcatctgtcatgaccccaaagaagcagatcctgaacctgggctcttgtctttacctttgttctcttccactctggggtaattaagaatgatttgctggccaggcgcggtggctcatgcctgtaatcccagcactttgggaggctgaggcaggtggatcacaaggtcaggagatcaaaaccatcctggctaacacggtgaaatcctgtctctactaaaaataatacaaaaaaaattagccagtcgtggtggcacacatctgtagtctcagctactcgggaggctgaggcaggaggatggcgtgaacctaggaggcggagtttgcagtgagtggagattgcgccactgcactccagcctgggcgacagagtgagactccgtctcaaaaaagaaaaaaagaatgatttgctaattaattatgcaggcagctgatccagtgctgtgtaaccttgggggccaccagatgccaatcaatcagtagaatgggagagaaggatggaggaagtgaggacaaggggcaaggaggaaggtctgtccacctgtctcttctgtgcaggaggtgtccaagcaggaggagcacgtcacatccccactgaaaaagcccacagaaaatgaaaagcccacatgcttgtccattgctgcaggatgggggcaagtggagggggagaggtgtcggcgctcccaccttactcccagtcatggctgactcctccctttccttcgttcttgttcctaatctgtcaccatgtcctgtcgttttctttgtctcacccaaccctctctgcctgaaaatcccctgacggcagcctcatccctgtcacctcctgactgtagttggtgacagaagaggaggctgcactagtgaaggagcagggactccaggtctggcaacaaccagggatggggccgggtgggggtgacttggaccaggagaggggcctgagtcaggcagtcacatacttcatgctggggtcccccaagtgaagcacatttagcaagatctgaaatacagggaaacagtcttgtttcttcaataaataaattgcaaaggagaaacaattgatgaaaggagaaacctatagatccagaaatactaacaggcaaatcaaacaatcataaggagagactttatttggattttgattcaaacaaactaacaaaaaaatgaaattactggaaatttggagacagtagggtagttggtagtattaaagaatagtagtgtgcgatggttggtatgataatggtattgcaattttgctttttttttaaaagagttcttggctgggcacagtggctcatgcctgtaatcccagcattttgggatgctaaggcgggaggctcatttgaggccaggagttcatgaccagcttagccaacatggcaaaaccccatttctactaaaaaaaaaaaaaaaaaaaaaaaatacaaaaaat

SEQ ID NO: 2432 - DNA, 30420 bp, Homo sapiens
ctgaggccacccgccagtttcaaattcagtggcgtttgccctgattcccggggcctggctttcagcgtagcaattctgccggcgaagaaggtgagcgcagtgctgtgtggcagcagaggtccttaggacgaggaacagcgggacgaggaagggcagactggtgaaatcgcaaactgggcgtctgttccggcaccggacccctgtttgcaaaggtgggtggcccgtccggagcggaaaaacattccggaagtggagggccgggccagcgtgattgacaagcgggaacccctgtgtggggacggggccggcctaggaaggttgtgcctgcggtggaacggcgcggtgcgcaggagtcggcattaacagcagccgcgtgtctgggtcttagatttggcctagctgtgttgagcttttcatggattatgttacgtagataagacactgcaacagtgagtgagcgcttgtaacccacctgtctcttacagaaactgagccccagcgatactaactttagcaaggatacagctgggatcctaaacttggcgatcagagcccagagccgataaagttagctgcgtgagtctagcttcccccggggcgggaatcgaggcggagcagggtacagtacggaggccagggatgagtgcagttgaccagattgttgacggaagtgtcataaaagtggacttaaatgttgataagcagctggttgggttccacacaggttgcgagctcaggatgcacgttggaggggacacagggccagagcaaggtgggaatgcgggtattatgggccaggccatcctccagctggtggagcaccgcagcactgcagtgtgtggccctggcttaacagcagtgcggaaaagcttttctcttggggctgtggtgctttccaggtgtgtgaagttaaaacattttagggccatacggtaggtagtacctgccacatagttgtcttggtcagccccggctgccgtgacaaaataccataaactgggtggcttagacacagaaatgtgttttctcacagtcccagaggcttgggatgtccaagatcaatgtggggaggacacaactgagcccacaacaatagtctgtactcggtaatgagtgataattggggactgaagaaaatgaacacgttaagaactaatatgttcctgaagtgctttcacaactctaacctcgttttatgagcgtgagctttgctgtcctggtgtgtgccttggcactgggaggtgatggttgtcctccacacagccaacctgaagagggctgaacaagtcgctgcaaatgtttttaatagggcttagtgaatccgttatactcagatttatctaaacctctatgatttagcctgtgctgcttctggaataatgagatccataattaccactgatggggaagtgaaataatacttaacgtttcttctgtattgtttagtgttgtcattctagagtttggtcaccaaatctgtcttttttatcccacttaccctggtgggaggaaaagtgaggagatagaaagtttcaggtggcttgggggtctggcagatgtggttcaaatcctgagttcaagcacttgctgagtgaccttgggcaagtcatataagtttactgagtctcagtttctttctctataaaatagagcttataaaaataccacacagggtttttgtggggttatctgaaaacggtttgaaaccattaaagaactggccatttaactaataggtattcaagtcatgggacctccgttacccagcctcggaagagaaacctttacttacagccccgatgtctggctggctcctcattcattcatcagatttttgttgaatgcctatgaggtgttgaagcacctagttctgagtcctggagccagagaagagcaagacagacaaggttcctctatttatggaatgtatattccagtgaggaagaataaataggttcagatggtgctaagagctatgaataaattaaatacagagtaatgtgatttttaaaaagtgacttagagcaagctagggggtgaggagtgggggtggtgtttgaccactgtccagcggccagacagccggagaggcttctctgaggaggtgagccaaagcctggatattgaggaggactccttctccaggccaaggggagcagcaagtgcaaggcccgagctgagtagatgaggctgggagccagaccagtcttaggctgaccagtgctctgtcttgagaggagctgctggtcagctttttgtcttgggattcagaacgaggagacataaagactttttacttggcagtgggagctgaagctgaaaggtccaggggctgatgaggccacgtgtaagcgaaagtttgggataagcagaaaccgagtgcgctgagggagtgagattgtggctgtatccggcgcctggctgagcaggagagtgaaccccgtgggtgtgtgtttgctggtgacgttcctggagctgtcttgaagtccgagctgccttgcagctctagtctgcttctgtttttggctttcccagatagtttcaattcttactctcagtttgtgaacctcccttcagtgaacctccctttacttatgctggatatctcttgcgactggatgagcttcactaaagcacagtcatttggatctggattcgaatccctggttttccactttttagctgtgagtttgagcaattatttaatttctgtaagcatcagtatccagtagctgtatccttatagtgttgtacagattaaatgagataataaaagcaaaagaccactgtagagtgtttaacacataggaggtactcaaaaatttgttaggtacctttcctcccctttccttcatgtgttaaagctttttcagtacatacccctctctcaggattgaattgtaagtcatattttttaattacccttcttgtaataattcctctacctctgtagtcatgtttttcttttttcattttttcttgtccccagaatgtctaacaaaacagccaaatatacctctgtaaagacagagggtaaaataatgctagttctgtgagttctctcttcttgtgcaaatccataaactgccaccaatctgtagtcattttaattgcccctaaaccgaagagcatcatggcaactacctttcccctcgtagagtgacactatcactagtcttactgaggccaaagttataaagatgggctctcgatctactaatattagtaaaatgggtttgggacttactaacatttgtgcttagaagagacagacctggcaaagagcttggagaagtgagttccaaagagagaggtgtgggaaccaggatggaagagtcaggcctccagatagcgtttacttctcctttcttccttgaatcactgtctcagagataattaggttcagaagaggaggaaaaaaaagatgacgtcaacatggagcagagtttttcttagaccttagcctagcaaggaaagagaaatgcctggtctcagtgctgggaagctgtttcagccagagccccgtggctgtgaagagagctctcctgtctggagccaaacagaaagctcataggtcttgaggccagaaaagttagtaggtggcggctctggtcggtgctggaaatggaggccaggatgaactaagaagcaaactaaagatacttgtaatataaggacgtgtaggctgggtgcggtggctcacgcctgtaatcccagcacttcgggaggccaaggcgggcggatcacgaggtcaggagatcgagaccatcctggctaacacggtgaaaccccgtctctaccaaaaaaaaaaaaaaaaaaaaattagccggccgtggtggcgggcgcctgtagtcccagctactcgggaggctgaggcaggagaatggtgtgaacccgggaggcgagcttgcagtgagccgagatcgcgccactgcactccagcctgggtgacagagtgagactctgtctgggaaaaaaaaaaaaaaaaaaaaaagataaggacgtgtatgttaacttgcgctatccaaacaagctgtgcttatggtcctctgcctgtgcgtcatgattttccaggacttcacaacgggataaagtgaagtagcttcggcttgtgaatgtgcattgcagagacgtgggagaagaaagctgcaaaagtcattatgagcaacacccttgatcttaggggtgctggtctttgagaagagagctctaagccttttgtagaggcattagaaaggtatcggcgccacggtgaaatgcaggggagattgggtttaggggctttcctggtctgcattctgctacagccgttaaatgccgctagatggagtgcgtgattctggtatggcctcatgtggacctgcgaaggatggagagaacatggtctctgcttcccagaaaaaaaggagaaatttggtaacaagtgtggagactgctcttaaataatgctccagatttcaagccacttcttcctggaccatgagagagctccctaatgttgtatttatttttcctaggtccatggctaatgaaacacagaaggttggtgccatccattttccttttcccttcacaccctattccatccaggaagacttcatggcagagctgtaccgggttttggaggctggcaagattgggatatttgagagtccaactggcactgtgagtatgaacagtgagagatactgaaaaggacaacttaacggcagctgtgctagcttttcctgtttgcccatccagagattttcatagtttgaagttgggcagagtagtctctctcagtttatctttctgagtaatagtcgcttcctctattaaaatcttttttttttttttttttttttttttgagacggagtctcgctgtgtcgcccaggccggagtgcagtgggacgatctcggctcactgcaagctccgcctcccgggttcacgtcattctcctgcctcagcctcctgagttgctgggactacgggtgcccgccgccacgcccggctaattttttgtagttttaatagagacagggtttcaccatgttagccaggatgatctcagtctcctgacctcgtgatccgcccacttcggcctcccaaagtgctaggattacaggcatgagccaccgtgcctaaagtcttaaacatagctctgtggtctgagaaaaattaggctgaagtcattggtgcctacctattacggtagatgagatggctttcttaccaactcttttccctccggttccccatccttcaaatataattctaagttttagtctctgctgagtgaaccagtgcgttatgattatgttttgaacataattttgtcttgaacaatatgtcttaatattctgttttctctagttaataattgcccttttaaagttagtttagtttttaatatacctatgccagttcctcccacatcatccagtggcctctcaatatgattttccatacagataactcctgtcttagtcggccaggactgccatagtaaaataccatagactgggtgacttaacaggaatttattttctcaccattctggaggctggaaagttgaagatccagattctggcagggttctggttctggggagggggtctcttcctggcttgcagatggctgcgttcttactgtggagcaagaaaagaggaggaggagaaaaacaaatctttggtgtctctttctcttttatgaggacaagggctgctcccttatggctgctcctttatgacctcctttacccttgaaggccagatctgtagtacagtcacatggcggggttaggatttcaacatatgtttgtttgttaagatgggcagtctcactatgtggcccaggctggtctcgaactcaagcgatcttcccctctcagcctcccaagtacctggtggctggcaagatccaagattactggtgcacaccaccatacacagcttcttttgtttggtttttgttctttaaaaacttttttttaacatgcattttggtggggatacaattcagtccacagcagtgaccaattccatttttaccttggagccctcctggaatcctccatcctttccctgtcatttgaattagttgctcctcagactgacttgacagatttcagcatgagtgttagtggggacagacggccgcacccacaccacatcagggtatatgtccgtttggaggctttcctcaaacgtctggcagccctggactgcctgtgtatgctgaagaagagggcacagaaaggctgagtctgcagggcaggctggctgtggctgccaggctgggctcctttgttgggggcctccagttgccagcacatctgtgggattttccctagagtcttcggtctctccagagcaggtgcctctgagctctggcccagcaggtacagacgctgaagcccaatagccggtcttccgggaggtggtctggggaaggggatccaggtggagagtccccctcagtgcctgctttcagcctgaccctcctctccctccctcttgcctcctcaatctgccagttgcctccagggctctcctagctcagcttccacttagagcccacttcctgtgttctgcaaggagcaggagcagggattgcaacctgggaatctaattgttcttaaacagaatttcaacccgtccctttgttttcagtggcctgctgtgttcctaccacttcctgagtctttctgagaatgagtgggggagatctctggggacacttgggcttgagtgtctctgccgaatcacttccatgtctctgccttctttccctctctcctaaaacatattactccttccactttctttgtttttgtgggtgtaagcctccatattactttggttaattttagtgtgctttggaacacagatgagtgcatgttcattctgccttgtttaattttagagacagggtgtcgctctgttgcccagggccgagtgcagtgttaagatcatggttcactgcagcctcgaccttctggcatcaagtgatcttcccacgtcagcctcctgagcagctgggactacaggtgtgcgccatcacacctaactaattttttaatttgtagaaatgagatctcactatgctgctcaggccggtggtcttaaacccctaggctcaagcaatcctccctccttggcctcccatagtgctgagatgacaggcgtgagccactgtacctgaccccttttaccttgtttagcctgacaacccatcttctccctctcaggtctttccatctcagtcttctgcactccaggcttctgcatcttcctcctatgctcagcctttaattgtcgatgtttctggttctatagcttcatcttcttgtgtgcactctctgtgaatgtaccctgtggctttattacctttgacattcttctgtcttctaaatcatctcctgaatagagtgttttctcctgtcctgggtgtcccccagcccataggagcagccatgctgtgggacaccctgagtggggtctgtgttacctgttgtgcctaccatgcccttccccgccttggatgcacaggtgccccaccttagctgcccgagatgctgtttatccttgatagtcaccttttaagccttctacaggtctatcaagttgagtcaccattaccacttggtgtgtgctgtgccttgtgtaacactgcagttccgggagtcctccaacctggaatgcatgctttgcggggatctatgatgccctcgaattgtatgttacatgtgaacctgtgagcattttctaggggctctgcacctttgtgttctcagctctgagccccatgcttgctgcaaccagcaggtgttcagagtgaatgaatttgcttatcttggcataaatcatgtaactgttgatgataccccaggaaggtgagcctttggttataaatccttttaacattttccagtctaaaagttttgtggtcttattacaggatgtagaaaacagtgggcctcagttattcttttgctgttgtgccggagtataccacggttgtttttgaaagataactttgaccatacccttaggaacttcctcagctcactttcaaatggagggcactggctttctaaccattgtgtctcccagcccagtgacagctgaagctgtctgcttccgatatcacaggcagcacagaagagccgccctccaggtgctgctgggaaatgctgcctggaaccctttgccatttactttctatcaaaagctgagggaaatggtacatatggggctttcctaaaaatatgggatccatccatttgtcagcaatgtcattctatcctatcccagggcctttcaagattttggtgaaaactaatagatcccatattccagaataatgctattaataattttattattattacttaatgatagcaaaaagttagctaactccaaccgctcacttgttatttgccaggtaatcctctgatccagaggatttggccttttgtgtgtgttaatgtcctgcttgcaccagctgtatgaggaaggtgccactgttgtcatttccatttctgcactcgtggaaacaagcgtagtgaggccagcctgagccacagagctgcaggtaggggaggcagctggaaccctggcgcctggctgtggagtttgaggctctgactcctgcgccgcgctgctgccccaaccctagtcatacgaggtgtttcaccccgccctggatactctgagatcccctctgggttcagcaggctcagagagctgactgcctggagcagaaggcatggggtcctccagagactcccctgagctgagttcccctgtggacaccagggccgcctccttgtggcgctccctgaagggtcctctctggaagaactgtattggttccctggggctgctagaggaaagcttcacaaactggggcttaaacaacagaaactgacatcccacagcgctggaggctggagtccgagatcaaggtgtcagcatgcttggtcccttctgagggtcgcgagggaaagatctcttcaggcccctttccttggcttataggggcgtgttctccttgggtatcatgacatcgcctgccttctgtgcatgtctgcatccacgtgtcccctttccaataaggatattagccctttaggctgggtcccgtcctagtagtctcatcttaactaattacatttgtgacagtcctatttccagataaggccacattctgagatgctgggggttaggatttcaacacaggaatttggaggaatacaattcaatcaggcttatggacaattctggtcttaagtcaagagtagtgttctccagtctgtatgtggaggcgcacacctatggtcccagccacttgggaggctgaggccagagaattgtgtgagcccaggaggagttccataccagcctgggcaacatagcaagacctcctctcaaaaacagacaaaaaaagtggtgttccagagtgattagtttgctttaaaaaaaaaaaaaaacaaaaaaacaaaaaaaaaaaaacacaaaccgtaaacactggcactcgtgactgatcatcctgtatccacgcacgagctgcacgaaggccgcgcggtcactgtggctccccgttggcgagtacctgggatttcttgctcagcagtttggggccttaattcttttaggggactttttgtctaatgtctccccttcttctaattatgtgcgatatttacatagaatctgataaactgcttcaaatttgttttcagaacagtgagctggataattaaagaagctttttcctgcttcttgggcccagtttccatttcttccttttttctgtttttcctggctattctagtgctagtttccttcctttcctttcctaggctggccttagagcatcctctcctatgtacagccagaccttctttcaagcttttattaaaatggggaaaggtcatttgggaggctttgttgttttcctgtttctaaagatcatttttcttcctgcaggggaagtccttaagtcttatttgtggggccctctcctggctccgtgactttgaacagaagaagcgtgaagaagaggcacgactccttgaaactggaactggccccttacatgatgagaaagatgaatccctgtgtctgtcttcctcctgcgaaggggctgcaggcaccccgaggcctgctggagaaccggcctgggttactcagtttgtgcagaagaaagaagagagggacctggtggaccgactgaaggtgagacctggggtatccggaagtgggagtgctggaggaaacagggcttcagcgattgttgtggggcgattccgagactcaggcagtgcatgctcccctgccgttgctgtgcctctcagctcttccctcagctccttgggtcgatggtgctgccgctgtgctgtctcttttgagctggaggtcagcagggccttctccacacaaggaactgttggtgcccatttattactcacctgggaaaggacctgatcgttgccattggcagcatggttcaatggctgcaaatggatctgatggagagcgtgtggctttgggaggagcgtgccgccttccacagtgagcagcgaggctgggacctgcagggatgaggtcccgggaggggatgcggcagcccttgagtgctggtcggggaaggagagctgcccgcagtgaggaggcgccgggctgagtggcccagactccttaggagaggcctggttttgggcttcctggtgattttccttcatgtctgcctcctgtaggtggagcaggccaggaggaagcagcgagaagaacgcctgcagcagctgcagcacagggtgcagctcaagtatgcagccaagcgcctggtgagcctcatttcttggggggcaggattatgtccaggcagggtcgccctgcttggaggctcatgggtgcgtggccagggtcttggtctcccctccatgaccctcactggctatgtgctcccgtacagaagctgggctgtgagtggttgaggcgtggatcctaggagtcgacctctctccagccaggcagccaggcctatgtgaatgggcgtggtgtgctttgtctctggcacgtggggaggtgggtactggtgctgagacttcttcctccctccccacctccactgcccctgtccagaggcaggaagaagaagaaacagagaatctcctccgcctcagcagggagatgctagagacaggcccggaggccgagcggctggagcagctggagtctggggaggaggagctggtcctcgccgaatacgagagtgatgaggagaaaaaggtggcgagcgggtgagacagaggcggtagcactaccctgccccaggccaggggacacccttgaagacagctctttccctcatgccacagatgccatgaagcacctggcaagaggcatggtggcctctgccctctgctctaagccgggtccctcctagggtccatgagtgccagtggcagtgaggacagtcaccggcctggcctgtgtcctctcagctgtcctcacagcagctcaggcagggcaggaacatttgtgtctgcaccttatacacaaggaggctgcagccccacaaggagagactccttggctgaggccacaagcctcggcagtggagagctgggctagaactcagccggcctggctctacatctcaggctctgaggcagctgactgcactgggtaacctttgaggtgccaaccgtcaaggcgtccttagcctgagctttccttctcccataaagcctctgttggtccagactcaaggtttccacttgatgagccatgagctgctgggtgacttagccctgagcaggccacccaggccatttcgggcccacaggatccctggtgacagccccgtttccattcacactggaacctcaccaccatccctgagtgtctgctctgagtatggcactgtccagatgctgtggacgtagaagggaagaagacatggaggggacagttaatagacatgaaaacaaatagcacctatgtgaagtcagcatgtttgcctacaaggaaaacaaaatggtgatgtggatggggtggggggctgcacctgatgatgagtcccgtgtgtcctgtgacatcctggccaccacatctgtgggagggtaactgcaagaccagagaccctccgtggatattcctgaaggttcatccccggccttcacggtctgtctgcagggcgccttctgacgccacctccagccgccatccaccagacgccagcttccccgctgccctgaacttcctccagcgcaccaggccttcctctgtcctgtctgaggatttgctcatgcaacgtgctgtggccaaacaccctgccctcctcccttggcagatgtcttcctctcctttaaggcctggctcaggtgtcgtcttggtggcttcgggtgtcagctgctctgttttgctcacgcacctgcttgtgcttctgttgttgcctcctctccctggctgggctcgagctgcttcagggcaggaaccacgtctttacagtttgatgttcccagagctgacccagtgtttggcataggggtgtgctcaataaaatcgagttgacatgaatgagcagatgctgcctcgttgcagtctggtagtgtaattccaggctgcccatgtggacttcgacttctgcccctgcccagggcagagaccaccgtgttgctttatgcctcgctggtgagagggggtcataaacagtttgtgctccatgaaccgttcctgcccacctccaaggtcgtgtttctgctccctctcttctcccttagagcccatggggacaaggcagagaacttgagtggagatgaaggtggtgaatattagaggaacaaagtgctccttcaggtctgggcaagagccgtggatcctgtaggtcagcttccggggcttcccatgccctcacgtttcaggagataacgtgagcctcagaggacctgagttctgaatagaaaatttttgctcttcatttcttcacacacccagcctctcagtgagctcctgctggctttgtccagcatgcgacataagattgaatccaagccttttaagatagagccgcctgctctttagtgaccatgaagccaagcctgtaataattactcttctgatagcccaagacaattgtattctgctttgttagaaaggaatttcgaggtgaacaaaaatgttttctttttatgtgatgttgccataggtggcgtgtgcctgtcagatggttttgtgttttctgaggagcatagactagtagagctagctcagcttcaggccatgggatgcagggctggcttccctgccaacgcctggcgctgatggattcttcccgcattgctggaaagggcagactgaggcgctgacaaaagaagagttgcagctggtcataagtgacagcatcctctgttcactcgattggtcagttgtagcttcatccaggagatggtcatggggttcctgctgcataccaagctctaggtgaggccacggggactcagcagaaacaaggccgacctgggtcctcccttgtggacatgacagtctggggagatagaccgagaggaagcaattttgaatgagatgggtgtgaaggggccatgaatctgtgtcagagcagccagacctaccagggaaggtcaaagaaggcttcctggaggaggtgatgtttctgctgctatctcagagttgactgggagctggtgaggggagacaacattccaggcacagaacatccgaaggcccgagatgatgaagagcaaatatcccccctggggcctcagaggggtccagcttgctggagggagggcagagaggagagcagcctgccatgagtcccgaggcttccaactcaagacttgggtttggggtgctgagctcatgtctcctttttacatttccctacccacagacctgagcggccacgggaggttggggttggcatttgcctgggggagtttctgagcaagcagcacctgctaccttggtggaacccattgctgggaatggccagggctcagcaccagcgctcagcagatgctcagtgcgttttgctgagtttgctgagggaagactgttttctattctctctcacacacacagagtggatgaggatgaggatgacctggaggaagaacacataactaaggtaacacgagtgtcctcagctggtgctgtgctgggggctgtgggctgggctgtgtacccttggggaagaggctggagtcactcggctacttctcaccctcctctccacaaaggaggagcttccagcacttggactctgttgcttcttgcacgcaaccctggtcctgagttgctcccttggtcagctgcagtggaccctggagtcctctcctggggtcagggcctggggagtcctctcctggggagacctttcctgggagcagggccatgcttgccaccccagggcatagaggaacagctgttctgggctgaagtctgggtgttttctgtccctgctgggtggtgctggatatgactcgtggaaggagctgcctgtggggcattcccttgaacttctggagctgtgggtgacttgggaatccctgggtccctcgatagatgcctgacatgggacattgctgtcctgcctcggctttgtgcattgggagccactccctttccctcagcctctcaggccctggcgtgccttgatgttagagaatgctgtgggatgttttggttccctctttgaagtgcctttctttctctctgctagatttatcactgtagtcggacacactcccagctggcccagtttgtgcatgaggtgaagaagagcccctttggcaaggatgttcggctggtctccctcggctcccggcaggtaaacagtagccagtatttccaccaggggccatcctgctcctttccccacaactttgtcctgctcgtccaggcctgggagacgctgggtctgtgacaggctgaaccgtgtgaggagcagccccctccctggcctggccggcccatcactggaaggcaaaggagaggtggcgggggcaggtccacgtgtgttggtaggatgtcatttagctggcaccatctctttgcctctttctttctcctttgttgcagaacctttgtgtaaatgaagacgtgagaagcctaggttctgtgcagcttatcaacgaccgctgcgtggacatgcagagaagcaggcacggtagccaccgggaccatggtgtagccgcaggtggtctggagagagtgaggcaggggtggcagtgactgaagaccattcagtgtctttcatagaaagaatggcagaggagaccccagttccttcctgagtcccctctccttgggaaaaagtgttcctactctctgggtgagcgtctggtccgaatcgttggcttggagatgattttacgggctctttctggagaacaaaagtaaaaccttagtgttccgatgagacacagtaggcagtacttgggagggtcttatagaccccaccctgtggaagtgggtctcaacattacacaaccccctctcgggcccgtggacagttgctgtcttctctgttttctctctttgtgcctgtgccaccctcagagaagaagaaaggagctgaggaggagaagccaaagaggaggaggcaggagaagcaggcagcctgccccttctacaaccacgagcagatgggccttctccgggatgaggccctggcagaggtgaaggacatggagcagctgctggcccttgggaaggaggcccgggcctgtccctattacaggagccgccttgccatccctgcagccaaggtgagggccctgcagggccagaaagccgctcttggctctcactgtggtctaggccatgaggggcgtcctcatcacactgtagtttgggggatgccccccaccgtggtcaggttgatggcaccttaacccattctctcctgatgcgtgagttggaggaggcgcgtgggatcccttggggtctccaggcagcagggccagttggcattactggggatggtatttaggagccaggaaagccggtgcattcctagtgaaaccacagggagaggggggatgccaggagctgagaagagtgtgctgcatacatctatttacaaatggctttccaagtgatgctcccaacttccatgcctatgatgtgatggaggatgtcagtgatagaaccattcagttttccagtttttcctttttgtaatatcagtactcttaactggaaagctttccctaacttacacctacctgcagcacgtgagaatactgtcttctctgccacaacttctcttgatttttaaacagaaggaagaactgctaatgtagcagatgaaaagtagtatctcactgttacttggtgggtgcagtttcactatttccttgctacttctttaacttgagtgactttggaaacgggatatcactagtggaaaattctgtataatccagaaaaaaatgtaaggttttaaaagattcagggaactaagtaaccgtttgcacagcagctaaatgctcaccagcatacctgctgagctgtgtgggcgctggcagagaaactgaggaaagctgccaggccccatggtttcccaggccttccctccggtctgtttgcctttagagcaagattagtgctataggcatttatacacaaataccataatatggcccaaaatctttacgatttttgaatttgtaaagtactttgaccatattttgcttttatgttaatagtattccagtgaaattccgtgcatggggacactggagcccagaaaagttaagtgactcatattttctcaccaagcgtgggtgatggagccattcagttttccgatattttattttttatatgagtattcctttaactggaaactttcctaacaacaaacacctaaagacctgcagagttgcttttatttttgttaccccagctccacgccttaaccctcactttgaaataggatgtatcaaccctattttgcagatgaggaaagcaagggtcagagaggttagacaactcttccagagtcacacagctgggaagtagcagctccaggagcagaagctggggccgcttcctggtgcaccgatggtcttcaggtgttttgtggaaactcgggggcctccggggcgaccttgaggacatggacaaggctaagcaggggttcccttcacccagccctgcccttggtttactcaggagtcagaccagccctagtttcctgtgtttcatgtattggcttttcatgtgaaactcgaggagagcttgtccgttgtcagaagctgttttttgaacgtctctacacagtccaggcaggaaatagaagcactcacatcaggagctcagtgtcaggcaggcaagcctcctgcaggggagccccgccctgctcaggtggcctcatctcccctcccagctggtggtgctgccctatcagatgctgctgcatgcggccactcggcaggccgccggcatccggctgcaggaccaggtggtgatcatcgacgaggcgcacaacctgatcgacaccatcacgggcatgcacagcgtggaggtcagcggctcccaggtgcgtgggcctcccctccccaggccagggcctgccgtgaggtaaagggacttggatggttcctccagacacccgggccaagaattcctccggaggtggggcttgctacagggtgcacgagtcaaggcggtgacctcatcggaggctgaccatggctttccagtgcatcccagaactctggggaccccgctatgacagagtgcctcatttccctgcacctcacctgcccccatgctcctgagtccctccagccctggatgccagcagccagttctgcaagccagggagatggcatgtgtgaggcagaagtcccctcaggattggattttgtcattactgaagttgtctggaggggactgaattgaggaatgctcaagatcagtgcaggctcctcctgctgccctatcatgcgccatgcatggcaccaggtgtctctggtcttcacgctgactctgccatgggggtggtgttcctgttttacattggaaacttggagattcaaagatggtcaagctctgtcctgaggtcatgcagctcatgagtgtggagctggggtgtgcccactggtttctgactgtgaaacccccacgacatcccaccagctctactgacctgtgcctgggctgaattgaggctgggatgtgatggtgaccttgaaccatcactctttgtagactccaggtcttttcccaacccggtggaaactagcaggcagattccatacttgaggaattcagcctcttgctttttctctgacccacagtggacactggaggaaaccttcccttccttcccttttctcttagctcccaccagcctaagggctgtggaaaccagtaccttttgtctgcacccagccccctctcctccctttggtggcttcctgtgtgtccagggctagcatcttctaggtgaatctaagatgtcagtaccttagccctcggctgcttgctcagagcctggtttgtgttctttccccagctctgccaggcccattcccagctgctgcagtacatggagcgatacgggtgagatgtgactctctgaggtagtgggacagtcccttggtggccccctgcatgggcctctgagaggcagcactttggttcccacctctggcccgtgctgtggcggggtggagctgcatgccattcatgtcctaggcacatgatggtgtgtgctgcacacagacctggaaggctggggactgaccgctggctctgaggcctggggccgtggccagcctgctctctgggaaaggatttgtagcttgtgacccagtttgagaggcaccgggcagcaaggcttccactggggtgggcggggcgagtcgccatcagggcaccaccacttaatgtccgttggcttcttctcaggaagcgtttgaaggccaagaacctgatgtacctgaagcagatcctgtatttgctggagaaattcgtggctgtgctagggggtgagagcctcgccccccggctaacccccggcctgcaaaacccaccgggctgctttttccttggatgcccatcaggacgcctcagttctctgtgtttttaagaagggtcggccgggtgtggtggctcacacctgtaatcccagcccttgggaggccgaggcaggtggttcacctgaggtcaggagttttgagaccagcctggtcaacatgatgaaatcccatctctactaaaaatacaaaaaaattagctgggagtgttgccgtggcctgtagtcccagctgctccagaagctgagacaagagaattgcttgctcaaacccgggaggcggaggttgcagtgagccgagattgtgccactgcagtccagtctgggcgacagagtgagagtcagtctcaaaaaaaaaaaaaagaaccaaaaaaaaagaagggtcttggtcattgatttagaaaattcttgttctttgtagcttagttgagttgtctgacttgagctttttttagacccatgggttctttgcccatgttctgaggactttttatttcaggcgctgctctggggggatattaaggatacagcatcacatggacacacggtgtttccgtgataggcatagttctgtgggttgttcgaagcacttgcatatgcggttttgtgtgccctgtgagaacgcagtgctggtatttgaatccttgttgatagacgcataaactagagctcggagcaagggctgctcccagcacgggagcctgggatcttctgactccagctcccacgcctctttgcgtgaccctgtcacgtccccttcttttatgatggggcacccccttgctggaaggtgtctgtggaagtggaagctgcagaaagcctgtgggagctcctggcgggagctggtctcgtgttgctgctctgagccgccagctctgctttgcctcaggctcaccagtggcctgggcagctcctctgtgctccggtgccctgcataccttggtctggctgctgtgtcccggcctcctggagaaggggtgaaaaacatgaacttacagggctttgggttccacgtgcaagcacgtgagtcagacgtgggaggctcctggacccacctgccctctaagtgggtccgttgcatgctataaacagtgaaaagcaaaacaaagccgttcaaatacagatgctcttcttacttgatgtgcagtgtggagggagagaagatagggaagggttggggggcctgagaaccaccattgtgacctatttccattctcttttttagggaacattaagcaaaatcccaatacacagagtctgtcacagacaggtaagagagttgccctcagagggcccagagctgatctgagccacttccgagcttaaccctgggactgaaacctgaggcttagggtgaagctcccaaggcccttcatgtgtttgttctcagggacggagctgaagaccatcaacgactttctcttccagagccagatcgacaacatcaacctgttcaaggtagaggtttccaccttgccatgttccacatccagtttccttcctgtcaccacctgtgggtagagtactatgttaagactatagaaggaagaaaaagcaaaacagacgtgtaattacttaacccttaacgcaacacgcctgtgagacaaaagtcatcatcttttagagtgaaggccacagggatgagggatgggtgagaaagggacctttcttggtgccccatagaacagatagagactccaggtccttgctgtctcaccccatcttctggcacagtctccctcaggcttatggacaggaataggacgttgatttgttctgtgcaacccctgtcacgtcttcgcacttgggccttgggtgtggttgcagcctcagacctctgctcgctccaggtctgtgtacccagcgctccccagatgaaacacggccactgccgcctgaacccccagctcgtaactcaaatcagcaacagtgactgcccctgggtacagggttctgcctctgttctaggcggcatgccacgtgctgtgctctgagctaggatatccttttgccccggcaaggaaagcaaacaggcccatggaggtgacttcaggagggtggcgagcacaggcttcccacaagtgagccaatagcaagtggcagagacagcgtccaaacctggctgcactgacttggggccccacattcttcccatcgtgcctgccttttttttcttaaaaccagcttttcccctgaattacacatttgggtcactgtcactgccaccatccctgccagacaggctggatccacgtcatccttgatgcctttctccccttgtctcccacatgcctgtgacagccgccaggcctgacagcctcagacagtcctgccgtccccgcgcttctcccacagctgggacatgggtgcaggcactccttctctcgccttccctttgccctccttgctttccttctcccttcttcccatgggtctcgggtctcatcacccaccattgagggaatcctcatcgaaggacgtcgctctttttagaaaccggtttaaagcctccaaactcctcatctctgcatcccaagctaagatgtggcaccaaaccacacacattggatgcaccgactgagtggcactgccccagcccctgagcaggtcccagccatcatctcctctgtggctttgctcatagaagttcctttgttttaactctctgtcacctggaaggaaagccaaggggacctagattttactgggcactcttagacttgggagagacatttggaaagagggtctcccccctgaggaggacactgcgttgtgggcaggggcagtagaggagggggtggcctcggagaggggatgacaaggttggtggcaaggaggctccaggtgcctcagaaggtagcactgcgttgtgctgcctgggtggtagaagtggtgttttttgttttgtgtttaagattacagcttgctcagtttgcacacatgcctacagctgggcttggtttttgcaggtgcagcgatactgtgagaagagcatgatcagcagaaaggtaactgctcccatcttgtggtcctgaacaagacccagctgtgccccaaccccctgccgttgccatgctttcctcccctgccctcagggaactccagagtccccttcgtctccaccctccttggtgcagtgggccttgctggggtggtgggatgtgcgcttcaggtgtcttgagcctggcagagcctccgatccacccagcctctctctcatggctgttcctcgttcctctccactgctctctctcatcccacccagctctttggcttcactgaacggtacggagcagtgttctcatcccgggagcagcccaaactggctgggtttcagcaattcctgcagagcctgcagcccaggacgactgaaggtgaggcaggagggtgagcaggcagagccggctgcaggcatgggcaaggacttctgttcctcatgtgtggacctgactagagggaggcctcctccccattctgctctgtgcagctcttgcagcccctgcagacgagagtcaggccagcgtcccgcaaccagcttccccactaatgcacatcgaaggcttcctggcagctctcactacggccaaccaggacggcagggtcatcctgagccgccaaggtaatcaggtggttcttggccaggttcagttcccaggaaggagccaagctgagcccgggagccgcagcatgaaaggattctttccttccatcctgggaacttcctgggttaggaggaagcagtgcagtgggcactggcctgctgtgacctgggcaagcagtggaggtggacgggaggagatcgaggggctgggatggaggtcctctagggcaggggtcctagggaaacttgtattgtggggtaggtgggctttggtttgggtcatgattttgtcatctatgagccttgtgatttggactattttctttctcaacttcagtttcctcatatgaaaatggagaggataggccgggcgcggtggctcacgcctgtaatcccagcactttgggaggctgaggggggcggatcgtgaggtcaggagatcgagaaccatcctggctaacacagtgaaaccccgtctctactaaaaatacaaaaaattagcagggtgtggtggtgggtgcctgtagtcccagctactcgggaggctgaggcaggaaaattgcttgaacccaggaggcggaggttgcagggagccgagattgagccactgcactccagcctgggcaacagatcgagactcctctcaaaaaaaaaaaaaagagagagatggagaggacagtatggtccacctctgtgggctggttgtcctagagattaaatggtgtttaatttaaagagaaagcactagcacttgtgcctcagacctggactcacctgggggaccccctttgctgggacgatagaagtgtctgttgggcttgcactcacctcccaccgatctgtttttccaggcagcctcagtgagagcaccctgaagtttttgctcctgaatccagctgtgcactttgcccaagtggtgaaggaatgccgggcagtggtcattgcgggggggaccatgcagccggtaaggacacctttcccagcccctcgtgccccaggtgttgggatgagatggggacttgggagagatgcattatcagtcctgttctctcctggggccccaagccagaaagggtcagctcgagcaggcccagtggtgtccactgggtgacactgctattctctcactgctgtgccttttaggctgcaggagcagtgcagactcctctgctgctccattctgtagccccaggatcacacttctcccagagaaagctgttctgtggtttcaaactcaaggaaaaaaatcatgattccacttttaaaaggttcattttgatgtatatgaatataatagtctttgtaggcataatttttacttatgtgcatagctattttaaaaacaaaagtgcggctccctccatgtgctgtcactggaacttgctcttttcactcagcagccagagggtcataaaccctgtctccttgtcagcaagcatgcacgtatttcagtatcccagctgtgctggattccagttacccagatatacagcatttcatgtacctccttctcttttgttaggtgtgcaagctatttgtagttttctgttttgagcatgactgtgatgaatataaccgcatttccgcacagtggtgactcctacctagcaaagggcctcctggacaaaaagctgctgggaatcctgaagcagtgcttcccagccccagctgccttagcttttgatttttatatttttgtatggatagattcatagttttattcattcggcatattaaaagttgtttacagtcattattgtttctgacgttcacatggtgagagccccttcctgctagctcaggtcctccccgtggcccggtcagtctcgcctccagcacagcagaatgtcatgggatcaccatgggtgtccttgccgcacactggattgattcatttctccaagctgctctggtttcttgtaatggggaatgacatttagaagtcaagctgtgggtgctagggtgtttgtcgtgctcctggggcattttggtagacagatctaggaaatgttttcagagtgaatccatactggtatttctttctttctttctttttttttttttttttgagacacagtctcgctctgtctcccaggctggagcgcagtgacccgatcacggctctctgcaacctctgcctccggggttcaagcgattctcatgcctcaacctcctgagtagctgtgattacaggcatgtgccaccacacccagctaatttttgtattttagtagagatagggttttaccatgttggccaggctggtcttgaattcagttgatccgccagccttggcatcccaaagagctgggattacaggcatgagccaccacgcctggcccatattggtgtttctaagtaaaaatcaaaggatttgtttacttgaccttttattgtacctctttttctcttaagcctgaacatgtgtgctacattaacatacttatctgctctatcctataatatacttaaaagttttgaaatcatagtaccaatattacttctaacaatagatctgattgaaattgcctttcctctttgcccttagagtgtaacccactaaggatgcctggtcactaggctctaaagtcacgtggaaccaggcttctctccgtgtgcttctgttgtcagtttcatagatagctaggctgtttttgtttcattttcttttcaattttagaatttgctttcttcttttctgacttgtagtttttaaatatgtaaatatttgtatggctcaaaagtcaaagcaatataaaaagatctattcaggaaagcctcactctcatccctttccagcccattccccacccccatagggaatccgttttactagcttatcctttcagtctttctttttcccctaaataagcaaaaacgtgccttcttttttccctttcctgttttatttacacggaaggcatcttagtcagttgtctggccatcgctcctctagtgggctgcgtggttctctgttggacagatgtaggaagcttatccaaccagtaccctctggataggcaggcgcatgattacagggaaaggtccgggggcacatgctgtttggtatttgtgggctgtatcttctcactggactcctaaatatgggattcctgggttaaaaagtataaatatgtttaatttgttaactactgtgaaatttcatgagaattgtaccattctgtatcccaccagtactgtctaggaatgcctgtttctccagagtggttacttttggatttttgccagtctagcaggtgaaagcctggagattgttattcagtagtttgggctggggcctggccacgtgtatttttgaaaattttcgctggtgattttgctgcatggccagggttgataatgactgtgccagatttgctggatttcctttgctattcctgcacatagtttaaacgagactgccagcactgggtatcagtcaccatttttctttttgttagtttgccgtcagccttttctttgacctcttctttcagtttgtgtgtacttgctgtctcttaggccagacttctcgcttcctttctgctgggcctctgaggggtcatggggccatgacgccgtggccttggtctacaggtgtctgacttccggcagcagctgctggcctgtgctggggtggaagctgagcgcgtggtggagttttcctgtggtgagaagctgtgcccagggtggggcaggctagaggtcaggttctggcccccgttttctgtgggtaatacctcataccgtgaccaggcacagaggcggaggagaccccgggatgggagcctcacccttcgtgcgctcgcccaggctctcctgctttgctccctgctgcctgctgcccagtgtgactggcgatggtgggtgggtgagcgctgtcagtcgctgttcctgtgctggatgatggggcaggtaaatgccctctctgcagtgtcttacagcacacctgcatctccagttttcggcccctccctgatcttaccaggtcacgtgatccctccagacaacatctgccccttgtcatctgcagcgggatctccaaccagccgctggaattcaccttccagaaaagagacctgcctcagatggtcagtcccagccagctcgctgcaccacagcctggcctcaggcagcaaagggttttctggggcagggacgctctggcccaccctgagtgttttcaggtgttggggaaattgcacagggacacccacttagagccacacagaatgagcggcgtcgatctagatgcttatggaggaaggtctgagcttccccgcctctcacaccttaggctgcgaaatatgtattcataaaacctccaggcatcttctgaggacgcctcacgcaggagaaagctgctagttccctttggctctcttgccctttggttatatctgcccctgctgggggcagggatgtggggcttgggggcatctcctgtggtgtgcctggggtgtgcagcccctgattgtcattgtggtgcccatcaggaccctggacagaagaagggaggactcagtgccagggcaatagggaggccccccagggacgctagtgctgtgacatgtgtcagaaaggcgcagtcagcagcagcggctgggtgtgtttggtgggaggtggcacctaccaccccgtggttcccacccaggggagccaagtcctcttccttggctgtagtcctgccaagggtctctcctcagttttgagtctcaaggtgaagacgcggtttgtgggtggctgaggggttgctccatgggggctccctccctcccttccttccttagatggacgaggtgggtcgcatcctctgtaacctgtgcggtgtggtttctggaggggtggtctgtttcttctcctcctacgagtacctgcgccaggtccatgcccactgggagaagggtggcctgctgggccgtctggctgccaggaagaaggtgagtggcctgtcggcagccttgccacttgtgaggacagtgccactgagtcctcctgggagctcttgtgctcatcgggtcgggacaggcttctggctcctcatccccactgctcccagtccctgactacagaggatttccccaaagtccctggctgtgaggttctccagtccgctggccagaaaacacaaggccacgagcagacccgagacctggcaccctaaacctgtctctgggaaatgtcctctgtctttctcagatattccaggaacctaagagcgcacaccaggtggagcaggtgctgctggcgtattccaggtgcatccaggtgcgggcgtcatgctgagcttgggtctgagaccatgtgggggtggcagctggaaacgtgggtgtcatccaagttttggctcagcaactcagcgtctgggtttctcctacaggcctgtggccaggagagaggccaggtgacagaggccctgctcctctctgtggttggaggaaagatgagtgaagggatcaacttctctgacaacctaggccggtaagtagtggttctgctcatctcctgggtcgtgatacatggccggccctcactcccagcagctgggcccctgcctgctgtctgctgccattagagcccacagctgggctgcgactgctcagaccagccagctggagggaggggctcagcagctctgggtttggccctgagagagtagttggattttaggctggccattgctgtatcaggacccaatcaattggcctagacgggatctctcagccttacaagccctctccaggtggtaggtacagagtggagagaggctgagttttgatcacagtcggagagggctgacggaaggggtagaacggagcagctggtgacatgggtgatgacccgggagttcctgacgtccacccactgggctcttgtctcccccccacgtgtgtggtgatggtgggcatgcccttccccaacatcaggtctgcagagctgcaggagaagatggcctacttggatcaaaccctcgtgagtgaccccagtgtcacagagggtgacagagtaggcagtgggtgggagtggcatcacccccagggctgatacagccaggccttccccactgcgctggtgtctcctgccccctccggaagcttggatgcccctccacaccctcttgatcttccctgtgatgtcacctggacccctgctgctggcattggccacaaagcctcctggtctggctccaaagcctggcagggtcttttccccgggggagctgcaggcagggaacagtcctgatgggtcatccccttcactcccagcccagagcccccggccaggcacccccagggaaggctctggtggagaacctgtgcatgaaggccgtcaaccagtccataggtgagcctggctgcctccagctgggtggacagatgggggctggagaaggggagaacaggaaagaggggttgcctgccctgtttcctatataagtctgaggaaggggagggggtcgccatgggaatgtgctgtaggggaggcaggtgttgctcggagccccagcctctgttcctatgcaggcagggccatcaggcaccagaaggattttgccagcatagtgctcctggaccagcgatacgcccggccccctgtcctggccaagctgccggcctggatccgagccagtgtggaggtcaaagctacctttggccccgccattgctgctgtgcagaaggtcagtcctacctttttctttctgagagcctcccaaccccgagatcacatttctcactgccttctgtctgcccagtttcaccgggagaagtcggcctcttcctgatgggcaaccacaccaccgcccggcgccgtgcccttcctttgtcctgccctctggagacagtgtttgtcgtgggcgtggtctgcagggatcctgttacaaaggtgaaacccaggaggagagtgtggagtccagagcgctgccgggacccaggcacaggcgttagctcccgtaggagaaaatgcgggaatcctgaatgaacagtgggtcctggctgtccttggggcgttccagggcagctcccctcctggaatagaatctttctttccatcctgcatggctgagagccaggcttcctgcttggagtccgcaggaggctgtggcagcagtggcatccactgtggcatctccgtcctgcccaccttaagaggcgagatggagcaggtccatctgcctctgccctttctagccaaggttatagctgccctggactgctcactctctggtctcaatttaaaatgatcccgtggccacagggctcctgcccaggggcttgtcaccttcccctcctccttcctgagtcactccttcagtagaaggccctgctctctatcctgccccacagccctgcctggatttgtatccttggcttcgtgccagttcctccaagtctatggcacctccctccctctcaaccacttgagcaaactccaagacaccttctaccccgacaccagcaattatgccaagggccattaggctctcaacatgactatagagaccccgtatcatcatggagacctttgttcctgtgggaaaataaccctcccacctgcaacagctgcccctgctgactgcgcctgtcttctccctctgaccccagagaaaggggccgtggtcagctgggatcttctgccaccatcagggacaaaccgggggcaggaggaaagtcactgatgcccagctgtttgcatcctgcacagctacaggtccttaattaaaagtgtactgttggtttctgctgagtttttta

SEQ ID NO: 2433 - DNA, 23030 bp, Homo sapiens
taattagcaggtgagctcctggcagggctggggtttcatcttctgggctctctgcaaggtcgtgcccggcacgggccaggaacaatttcataaactcgtcatctagacggcctttgactgacaccatctctccgtgtggaggagccgctggggtgcacggggcaggtgtcgtccgtttcaaaggtaaaataacccagctgcagacctccagaggccgactagagccggggtcagaaaacaggttttccctctcggggacagcgcccaggggaccggcattagaacatcggctgatgtttcatctggtcagggaaccatccagcgcttagtacacctggcgctaatcggcggggattaatctcacaccccgcagctggcggaaagcagcgggaggaggcacctagccctggggttgagatcccagttcccgcgtgcgcaaaccacgcccctgtagattctcgctgctgcgtgttcgcgcgcgtcccggagtgcgcatgcgcagcggcgggggttgttccggctgcctttcactgaggggacccgccagtttctaactcagtggcgtttgccctgattcccggggcctggctttcagcgtagcaattctgccggcgaagaaggtgagcgcagtgctgtgtggcagcagagctccttaggacgaggagcagcgggacgaggaagggcagactggtgaaatcgcaaactgggcgtctgttccggcgccggacccctatttgcaaaggtgggtggcccgtccggagcgggaaaacattccggaagtggagggccgggccagcgtgattgacaagcgggaacccctgtgtggggacgggtaggcctaggaaggttgtgcctgcggtggaactgggcggtgcgcagaagtgggcattaacagcagccgcgtgtctgggtcttagatttggcccagctgtgttgagcttttcatggattatcttacgtagataagacactgcaacagtgagtgagcgcttgtaacccacctgtctcttacggaaactgagccccagcgatgctaactttagcaaggatacagctgggatcctaaacttggcaatcagagcccagagccgataaagttagctgcatgagtctagcttcccccagggcgggaatcgaggcggagcagggtacagtacggaggccaggaatgagtgcacttgaccagattgttgacggaagtgtcataaaaatggacttaaatgctgataagcagctgtttgggttccacacagggtgcgagctcaggatgcacgttggaggggacacagggccagagcaaggtgggaatgcgggtattatgggccaggccatcctccagctggtggagcaccgcagtactgcagtgtgtggccctggcttaacagcagtgcggaaaagcttttttcttggggctgtggtgctttccaggtgtgtgaagttaaaacattttagggccatacggtagatagtacctgccacatagttgtcttggtcagccccggctgccatgacaaaataccataaactgggtggcttagacacagaaatgtgttttctcacagtcccagaggcttgggatgtccaagatcaatgtggggaggacacaactgagcccacaacaatagtctgtactcagtaatgagtgataattggggactgaagaaaatgaacacgttaagaactaatatgttcctgaagtgctttcacaactctaacctcgttttatgagcgtgagctttgctgtcctggtgtgtgccttggcactgggaggtgatggttgtcctccacacagccaacctgaagagggctgaacaagtcactgcaaatgtttttaatagggcttagtgaatccgttatactcagatttatctaaacctctatgatttagcctgtgctgcttctggaataatgagatccataattaccactgatggggaagtgaaataatacttacgtttcttctgtattgtttagtgttgtcattctagagtttggtaaccaagtctgtcttttttatcccacttatcctggtgggaggaaaagtgaggagatagaaagtttcaggtggcttgggggtctggcagatgtggttcaaatcctgagttcaagcacttgctgagtgaccttgggcaagtcatataagtttactgagtctcagtttctttctctataaaatagagcttataaaaataccacacagggtttttgtggggttatctgaaaacggtttgaaaccattaaagaactggccatttaactaataggtattcaagtcatgggacctccgttacccagcctcggaagagaaaccttcacttacagccccgatgtctggctggctactcattcgttcatcagatttttgttgaatgcctatgaggtgtcgaagcacctagttctgagtcctggagccagagaagagcaagacagacaaggttcctctatttatggaacgtatattccagtgaggaagaataaataggttcagatggtgctaagagctatgaataaattaaatacagagtaatgtgattttttaaaagtgacttagagcaagctagggggtgaggagtgggggtggtgtttgaccactgtccagcggccagacagccggagaggcttctctgaggaggtgagccaaagcctggatattgaggaggactccttctccaggccaaggggagcagcaagtgcaaggcccgagctgagtagatgaggctgggagcctgaccagtctcaggctgaccagtgctctgtcttgagaggagctgctggtcagctttttgtcttgggattcagaacgaggagacatgaagactttttacttggcagtgggagctgaagctgaaaggtccaggggctgatgaggccacgtgtaagcgaaagtttgggataagcagaaaccgagtgcgctgagggagtgagattgtggctgtatccggcacctggctgagcaggagagtgaaccccgtgggtgtgtgtttgctggtgacgttcctggagctgtcttgaagtccgagctgccttgcagcttgtagtctgcctctgtttttggctttcccagatagtttcaattcttactctcagtttgtgaacctcccttcagtgaacctcccttcacttatgctggatatctcttgcaaccggatgagcttcactaaagcagagtcatttggacctggattcgaatccctggttttccactttttagctgtgactttgagcaattatttaatttctgtaagcatcagtatccagtagctgtatccttatagtgttgtacagattaaatgagataataaaagcaaaagaccactgtagagtgtttaacacataggaggtactcaaaaatttgttaggtacctttcttcccctttccttcatgtgttaaagctttttcagtacatacccctctctcaggattgaattgtaaatcatgttttttgattacccttcttgtaataattcctctacctctgtagtcatgtttttcttttttcattttttcttgtccccagaatgtctaacaaaacagccaaatatacctctgtgaagacagagggtaaaataatgctagttctgtgagttctctcttcttgtgcaaatccataaactgccaccaatctgtagtcattttaattgcccctaaaccgaagagcatcgtggcaactacctttcccctcgtaaatagagtgacactatcactagtcttattgaggccaaagttataaagatgggctctcgatctactaatattagtaaaatgggtttgggacttactaacatttgtgcttagaagagacagacctggcaaagagcttggagaagtgagttccaaagagagaggtgtgggaaccaggatggaagagtcaggcctccagatagcgtttacttctcctttcttccttgaatcactgtctcagagataattaggttcaggagaggagaaaaaaaaagatgacgtcaacgtggagcagagtttttcttagaccttagcctagcaaggaaagagaaatgcctggtctcagtactgggaagctgttccagccagagccccgtggctgtgaagagagctctcctgtctggaaccaaacagaaagctcataggtctagaggccagaaaagttagtaggtggtggctctgttcggtgctggaaatggaggccaggatgaactaagaagcaaactaaagatacttgtaagataaggacgtgtaggccgggtgcggtggctcacgcctgtaatcccagcacttcgggaggccaaggcgggcggatcacgaggtcaggagatcgagaccatcctggctaacacggtgaaaccccgtctctaccaaaaaaaaaaattagctgggcgtggtggcgggcacctgtagtcccagctactcgggaggctgaggcaggagaatggtgtgaacccgggaggcggagcgtgcagtgagccgagattgcgccactgcactccagcctgggcgacagagtgagactctgtctcgaaaaaaaaaaaaaaaaagatagggacgtgtatgttaacttgcgctatccaaacaacaagctgtgcttatggtcctctgcctgtgcgtcatgattttccaggacttcacaacgggataaagtgaagtagcttcggcttgtgaatgtgcattgcagagacgtgggagaagaaagctgcaaaagtcattataagcaacacccttgatcttaggggtgctggtctgtgagaagagagctctaagccttttgtagaggcattagaaaggtatcggagccacggtgaaatgcaggggagattgggtttaggggctttcctggtctgcattctgctacagccgttaaatgccgctagatggagtgcgtgattctggtatggcctcacgtggacctgctgcgaaggatggagagaacatggtctctgcttcccagaaaaaaggagaaatttggtaataagtgtggagactgctcttaaataatgctccagatttcaagccacttcttcctggaccatgagagagctccctaatgttgtatttatttttcctaggtccatggctaatgaaacacagaaggttggtgccatccattttccttttcccttcacaccctattccatccaggaagacttcatggcagagctgtaccgggttttggaggctggcaagattgggatatttgagagtccaactggcactgtgagtatgaacagtgagagatactgaaaaggacaacttaacagcagccgtactagcttttcctgtttgcctatccagagattttcatagtttgaagttgggcagagtagtctctgtttatctgagtaatagtcacttcctctattaaagtcttttttttttttttttgagacggagtctcgctgtgtcgcccaggccagagtgcagtgggacgatctcggctcactgcaagctccgcctcccgggttcacgccattctcctgcctcagcctcttgagttgctgggactacaggtgcccgccgccacgcccggctaattttttgtagttttaatagagacagggtttcaccgtgttagccaggatgatctcagtcttctgacctcgtgatccgcccgcttcggcctcccaaagtgctaggattacaggcatgagtcaccgtgcccggcctaaagtcttaaacatagctctgtggtctgagaaaaattaggctgaagtcattggtgcctacctattacggtagatgagacggctttcttaccaactcttttccctcccgttccccatccttcaaatataattctaagttttagtctctgctgagtgaaccagtgtgttatgattatgttttgaacataattttgtcttgaacaatatgtcttaatattctgttttttctagttaataattgcccttttaaagttagtttagtttttaatatacctatgccagttcctcccacatcatccagtggcctctcaatatgattttccatacagataactcctgtcttagtcggccaggactgccatagtaaaataccatagactgggtgacttaacaggaatttattttctcaccattctggaggctggaaagttgaagatccagattctggcagggttctggttctggggagggggtctcttcctggcttgcagatggctgcgttcttactgtggagcaagaaaagacgaggaggagaaaaacaaatctttggtgtctctttctcttttatgaggacaagggctgctcccttatggctgctccgttatgacctcctttacccttgaaggccagatctgtagtagagtcacatggcggggttaggatttcaacatatgtttgtttgttaagatgggcagtctcactatgtggcccaggctggtctcgaactcaagcgatcctcccctctcagcctcccaagtacctggtggctggcaagatccaagattactggtgcacaccaccatacacagcttcttttgttttgtttttgttctttaaaaacatttttttaacatgcattttggtggggatacaattcagtccacagcagtgaccaattccatttttaccttggagccctcctggaatcctccatcctttccctgtcatttgaattagttgctcctcagactgacttgacagatttcagcatgagtgttaatggggacagacggccgcacccacaccacatcagggtatacgtccgtttggaggctttcctcaaacgtctggcagccctggactgcctgtgtatgctgaagaacagggcacagaaaggctgagtctgcagggcactggctgtggctgccaggctgggctcctttgttgggggcctccagttgccagcacatctgtgggattttccctagagtcttcagtctctccagagcaggtgcctctgagccctggcccagcaggtacagacgctgaagcccaatagccggtcttccgggaggtggtctggggaaggggatccaggtggagagtccccctcagtgcctgctttcagcctggccctcctccccctccctcttgcctcctcaatctgccggttgcctccagggctctcctagctcagcttccacttagagcccacttcctgtcttctgcaaggagcaggagcagggattgcaacctgagaatctaattgttcttaaaaagaatttcaacccgtccctttgttttcagtggcctgctgtgttcctaccacttcctgagtctttctgagaatgagtgggggagatctctggggacacttgggcttgagtgtctctgccgaaatcacttccatgtctctgccttctttccctctctcctaaaacatattactccttccactttctttttgtgggtgtaagcctccatattactttggttaattttagtgtgctttggaacacagatgagtgcatgttcattctgccttgtttaattttagagacagggtgttgctctgttgcccagggccgagtgcagtgttaagatcatggtttactgcagcctcaaccttctggcaacaagtgatcttcccacgtcagcctcctgagcagctgggactacaggtgtgcaccatcacacctagctaattttttaatttgtagaaatgagatctcactatgctgctcaggccggtggtcttaaacccctaggctcaagcaatcctccctccttggcctcccatagtgctgagattacaggcatgagccactgtacctgacccctttcaccttgtttagcctgacaacccatcttctccctctcaggtctttccatctcagtcttctgcactccaggcttctgcgtcttcttcctctgctcagcctttaattgtcgatgtttctggttctatagcttcatcttcttgtgtgcagtctctgtgaatgtaccctgtggctttattacctttgacattcttctgtcttctaaatcatctcctgaatagagtgttttctcctgtcctgggtgtcccgcagcccatagaagcagccatgctgtgggacaccctgagtggggtttgtgttacctgttgtgcctaccatgcccttccccgccgtggatgcacaggtgccccaccttagctgccccagatgctgtttatccttgatagtcaccttttaagccttatacaggtctatcaagttgagtcaccattaccacttggtgtgtgctgtgccttgtgtaatactgcagttccgggagtcatccaacctggaatgcatgctttgcggggatctatgatgccctcgaattgtatgttacatgtgaacctgtgagcattttctaggggctctgcacctttgtgtcctcagctctgagccccatgcttgctgcaaccagcaggtgttcagagtgaatgaatttgcttatcttggcataaatcatgtaactgttgatgataccccaggaaggtgagcctttggttataaatccttttaacattttccagtctaaaagttttgtggtcttattacacgatgtagaaaacagtgggcctcagttattcttttgctgttgtgccggagtataccacggttgtttttgaaagataactttgaccatacccttaggaacttcctcagctcactttcaaatggagggcactggctttctaaccattgtgtctcccagcccagtgacagctgaagctgactgcttccgatatcacagacagcacagaagagccgccctccaggtgctgctgggaaatgctgcctggaactctttgccatttactttctatcaaaagctgagggaaatggtacatatggggctttcctaaaaatatgggatccatccatttgtcaacaatgtcattctatcctatcccagggcctttcaagattttgatgaaaactaatagatcccatattccagaataatgctattaataattttattattattacttaatgatagcaaaaagttagctaactccaaccgctcacttgttatttgccaggtaatcctctaatccagaggatttggccttttgtgtgtgttaatgtcctgcttgcaccagctctatgaggaaggtgccgctgttgtcatttccatttctgcactcgtggaaacaagcgtagtgaggccagcctgagccacagagctgcaggtgggggagacagctggaaccctggcacctggctgtggagtttgagactctgactcctgcgccgcgctgctgccccaaccgtagtcatacgaggtgtttcaccccgccctggatactctgagatcccctctgggttcagcaggctcagagagctgactgcctggagcagaaggcatggggtcctccagagactcccctgagctgagttcccctgtggacaccagggccgcctccttgtggcgctccctgaagggtcctctctggaagaactgtattggttccctggggctgctagaggaaagcttcacaaactggggcttaaacaacagaaactgacatcccacagcgctggaggctggagtccgagatcaaggtgtcagcatgcttggtcccttctgagggtcgtgagggaaagatctcttcaggcccctttccttggcttataggtggcgtgttctccttgggtatcatcacatcgcctgccttctgtgcatgtctgcatccacgtgtcccctttccaataaggatattagccctttaggctgggtcccgtcctagtagtctcatcttaactaattacatttgcgacagtcctatttccagatcaggccacattctgagatgctgggggttaggatttcaacacaggaatttggaggaatacaactcaatcaggcttatggaaaattctggtcttaagtcaagggtagtgttctccagtctgtatatggaggcgcacacctatggtcccagccacttgggaggctgaggccagagaactgtgtgagcccaggagttccataccagcctgggcaacatagcaagacctcctctcaaaaacagacagagtggtgtcttccagagtgattagtttgcttaaaaaaaaaaaaacaaaacaaaacacaaaccgtaagcactggcgctcatgactgatcatcctgtatccacgcacgagctgcacgaaggccgcgcggtcactctggctccctgttggcgagtacctgggatttcttgctcagcattttggggccttaattcttttaggggactttttgtctaatgtctccccttcttctaattatgtgcgatatttacatagaatctgataaactgcttcaaatttgttttcagaacagtgagctggataattaaagaagctttttcctgcttcttgggcccagtttccatttctttcttttttctgtttttcctggctattctagtgctaatttccttcctttcctttcctaggctggtcttagagcatcctctcctatgtacagccagaccttctttcaagcttttattaaaatggggaaaggtcatttgggaggctttgttgttttcctgtttctaaagatcatttttcttcctgcaggggaagtccttaagtcttatttgtggggccctctcttggctccgtgactttgaacagaagaagcgtgaagaagaggcacgactccttgaaactggaactggccccttacatgatgagaaagatgaatccctgtgtctgtcttcttcctgcgaaggggctgcaggcaccccgaggcctgctggagaaccggcctgggttactcagtttgtgcagaagaaagaagagagggacctggtggaccgactaaaggtgagacctggggtatccggaagtgggagtactggaggaaacagggcttcagcgattgttctggggcgattccgagactcaggcagtgcatgctcccctgccgttgccgtgcctctcagctcttccctcagctccttgggtctatggtgctgccgctgtgctgtcttttttgagctggaggtcagcaggccttctccacataaggaactgttggtgcccatttattactcacctgggaaaggacctgatcattgccattggcagcatggttcaatggctgcaaatggatctgatggagagcgtgtggctttgggaggagtgtgccgccttccgcagtgagcagcgaggctgggaccggcagggatgaggtcccgggaggggatgcggcagcccttgagtgctggccggggaaggagagatgcccccagtgaggaggcgccgggctgagtggcccagactccttaggagaggcctggttttgggcttccttggtgattttccttcatgtctgcctcctgtaggcggagcaggccaggaggaagcagcgagaagaacgcctgcagcagctgcagcacagggtgcagctcaagtatgcagccaagcgcctggtgagcctcatttcttggggggcaggattatgtccaggcagggttgctctgcttggaggctcatgggtgcgtggtcagggccttggtctcccctccgtgaccctcactggctatgtgctcccgtacagaagctgggctgtgagtggttgaggcgtggatcctaggagtcgacctctctccagccaggcagccaggcctatgtgaatggggcgtggtgtgctttgtctctggcatgtggggaggtgggtactggtgctgagacttcttcctccctcaccacctccactacccctgtccagaggcaggaagaagaagaaagagagaatctcctccgcctcagcagggagatgctagagacaggcccggaggctgagcggctggagcagctggagtctggggaggaggagctggtcctcgccgaatacgagagtgatgaggagaaaaaggtggcgagcaggtgagacagaggcggtagcactaccctgccccaggccaggggacacccttgaagacagctctttccctcatgccacagatgccatgaagcacctggcaagaggcatggtggcctctgccctctgctctaagccgggtccttcctagggtccatgagtgccagtggcagtgaggacagtcaccggcctggcctgtgtcctctcagctgtcctcacggcagctcaggcagggcaggaacatttgtgtctgcgccttatacacaaggaggctgcagccccacaaggagagactccttggctgaggccacaagcctcggcagtggagagctgggctagaactcagctggcctggctctagatctcaggctctgaggcagctgactgcactgggtaacctgtgaggtgccaaccatcaaggcgtccttagcctgagctttccttctcccataaagcctctgttggtccagactcaaggtttccacttgatgagccatgagctgctgggtgacttagccctgagcaggccacccaggccatttcgggcccacaggatccctggtcacagccctgttcccattcacactggaacctcaccaccatccctgagtgtctgctctgagtatggcactgtccagatgctgtggacatagaagggaagaagacatggaggggacagttaatagacatgaaaacaaatagcacctatgtgaagtcagcatgtttgcctacaaggaaaacaaaatggtgatgtggatggggtggggggctgcacctgatgatgagtcccgtgtgtcctgtgacatcctggccaccacatctgtcggagggtaactgcaagaccagagaccctccatggatattcctgaaggttcatccccggccttcacagtctgtctgcagggcgccttctgatgccacctccagccgccatccaccagacgccagcttccccgctgccctgaacttcctccagcgcaccaggccttcctctgtcctgtctgaggatttgctcatgcaacgtgctgtggccaaacaccctgccctcctcccttggcagatgtcttcctctcctttaaggcctggctcaggtgtcgtcttggtggcttcgggtgtcagctgctctgttttgctcatgcacctgcttgtgcttctgttgttgcctcctctccctggctgggctcgagctgcttcagggcaggaaccacgtctttatagtttgatgttcccagagctgacccagtgtttggcataggggtgtgctcaataaaatcgagttgacatgaatgagcagatgctgcctcgttgcagtctggtagtgtaattccaggctgcgcatgtgaacttcgacttctgcccctgcccagggcagagaccaccgtgttgctttatgcctcgctggtgagagggggtcataaacagtttgtgctccatgaacccttcctgcccgcctccgaggtcatgtttctgctccctctcttctcccttagagcccgtggggacaaggcagagaacttgagtggagatggaggtggtgaatattaaaggaacaaagtgctccttcaggtctgggcaagagccatggatcctgtaggtcagcttctggggcttcccatgccctcacgtttcaggagataacgtgagcctcggaggacctgagttctgaatagaaaatttttgctcttcatttcttcacacacccagcctctcagtgagctcctgctggctttgtccagcatgcgacataagattgaatccaagccttttaagatagagccgcctgctctttagtgaccatgaagccaagcctgtaataattactcttctgatagcccaagacaattgtattctgttttgttagaaaggaatttcgaggtgaacaaaaatgttttctttttatgtgatgttgccataggtagcgtgtgcctgtcagatggttttgtgttttctgaggagcatagactagtagagctagctcagcttcaggccatgggatgcagggctggcttccctgccaacgcctggcgctgatggattcttcccgcattgctgggaagggcagactgaggcactgacacaagaagagttgtagctggtcataagtgacagcatcctctgttcactcgattggtcagttgtagcttcatccaggagatggtcatggggttcctgctgcataccaagctctaggtgaggccacggggactcagcagaaacaaggccgacctgggtcctcccttgtggacatgacagtctggggagatagaccgagaggaagcgattttgaatgagatgggtgtgaagagcaggggccatgaatctgtgtcagagcagccaggcctaccagggaaggtcaaagaaggcttcctggaggaggtgatgtttctgctgctatctcagagttgactgggagctggtgaggggagacaacattccaggcacagaacatccgaaggcctgagatgatgaagagcaaatatccgccctggggcctcagaggggtccagcttgctggagggagggcagagaggagagcagcctgccatgagtcccgaggcttccgactcaagacttgggttgggggtgctgagcccctttctcctttttacatttccctacccacagacctgagcggccatgggaggttggggttggcatttgcctgggggagtttctgagcgagcagcacctgctaccttggtggaacccattgctgggaatggccagggctcagcaccagcgctcagcagatgctcagtgcgttttgctgagtttgctgagggaagactgttttctgttctctctcacacacacagagtggatgaggatgaggatgacctggaggaagaacacataactaaggtaacacaagtgtcctcagctggtgctgtgctgggggtataggctgggctgtgcacccctggggaggaggctggagtcacttggctacttctcaccctcctctccacaaaggaggagcttccagcacttggactccgttgcttcttgcacacaaccctggtcctaagttgctcccttggccagctgcagtggaccctggagtcctctcctggggtcagggcctggggagtcctctcctggggagacctttcctgggaacagggacctgaggagacctctcttgagtttggggcctggggagacatctcctgggttcggggcctggggagacctctcctgggggcagggccatgcttgccaccccagggcatcgaggaacagctgttctgggctgaaatctgggtgttttctgtccctgctgggtggtacgggtaggacagacatgagtcccctgccctttgggtctctcatggtgtgcttctccctttgtctgtgttcccatttgcatggagggctatgggttgtgtatggtctgacatttcccatttggtttcattgatttatgacttgttttctgtcggaagtaggtattttctttgtattttctttttttctcccttcactcttgccttagaggagtagagagagggtattctggtcagccttcctttttccctttggggatgtgtgtgacacactccctcccctcccaccaacaacccaccctccccaagtggggaccctttgccacgggagatggtcacccatgtccaaagattggccaaccccccaaaagcggttgattagaggctggatatgactcgtggaaggagctgcctttggggcattcccttgaacttctggagctgtgggtgacttgggaatccctgggtccctcgatagatgcctgacatgggacattgctgtcctgcctcggctttgtgcattgggagccactccctttccctcagcctctcaggccctggcgtgccttgatgttagagaatgctgtgggatgttttggttctctctttgaagcgcctttctttctctctgctagatttattactgtagtcggacacactcccagctggcccagtttgtgcatgaggtgaagaagagcccctttggcaaggatgttcggctggtctcccttggctcccggcaggtaaacagtagccagtatttccaccaggggccatcctgctcctttcgccacaactttgtcctgctcgtccaggccttgggagacgctgggtctgtgacaggctgaaccgtgtgaggagcagccccctccctgacctggccggcccagcactggaaggcaaaggagaggtggcggggcaggtccacgtgtgttggtaggatgtcatttagctggcaccatctttttgcctctttctttctcctttgctgcagaacctttgtgtaaatgaagacgtgaaaagcctaggttctgtgcagcttatcaacgaccgctgtgtggacatgcagagaagcaggcacggtagccactgggaccatggtgtagccgcaggtggtctggagagagtgaggcaggggtggcagtgactgaagaccattaagtgtctttcatagaaagaatggcagaggagaccccagttccttcctgagtcccctctccttgggaaaaagtgttcctactctctgggtcagtgtctggtccgaatccttggcttggagatgattttacgggctctttctggagaacagaagtaaaaccttacagtgttccgatgagaccacagtaggcagtacttgggagggtcttatagaccctaccccatggaagtgggtctcaacattacacaaccccctcttgggcccgtggacagttgctgtcctctctgttttctctctttgtgcctgtgccaccctcagagaagaagaaaggagctgaggaggagaagccaaagaggaggaggcaggagaagcaggcagcctgccccttctacaaccacgagcagatgggccttctccgggatgaggccctggcagaggtgaaggacatggagcagctgctggcccttgggaaggaggcccgggcctgtccctattacgggagccgccttgccatccctgcagcccaggtgagggccctgcagggccagaaagccgctcttgactctcactgtggtctaggccatgaggggggtcctcatcacactgtagtttgggggatgccccccaccgtggtcaggttgatggcaccttaacccattctctcctgatgtgtgagttggaggaggcgcgtgggatcccttggggtctccaggcagcagggccagttggcattactggggatggtatttaggagccaggaaagccggtgcattcctagtgaaaccacagggagaggggggatgccaggagctgagaagagtgtgctgcatacatctatttacaaatggctttccaagtgatgctcccaacttccatgcctatgatgtgatggaggatgtcagtgatagaaccattcagttttccagtttttcctttttgtaatatcagtactcttaactggaaagctttccctaacttacacctacctgcagcacgtgagaatactgtcttctctgcctcaacttctcttgatttttaaacagaaggaagaactgctaatgtagcagatcaaaagtagtatctcactgttatttggtgggtgcagtttcactatttccttgctacttctttaatttgagtgactttggaaacgggatatcactagtggaaaattctgtataatccagaaaaaaatgtaaggttttaaaagattcagggaactaagtaaccatttgcacagcagctaaatgctcaccagcatacctgctgagctgtgtgggcactggcagagaaactgaggaaagctgccaggccccatggtgtcccaggccttccctcccgtctgtttgcctttagagcaagattagtgctataggcatttatacacaaataccataatatggcccaaaatctttacaatttttgaatttttaaagtactttgaccatattttgcttttatgttaatagtattccagtgaaattctgtgcatggggacactggagcccagaaaagttaagtgactcatattttctcaccaagcgtgggtgatggagccattcagttttccgatattttattttttatatgagtattcctttaactggaaactttcctaacaacaaacacctaaagatgtgcagagttgcttttatttttgttaccccagctccacgccttaaccctcactttgaaataggatgtatcaaccctattttgcagatgaggaaagcaagagtcagagaggttagacaactcttccagagtcacacagctggggagtagcagctccaggagtagaagctggggccgcttcctggtgcaccgatggtctgcaggtgtttgtggaaactcgggggcctccggggcgaccttgaggacatggacaaggctaagcaggggttcccttcacccagccctgcccttggtttactcaggagtcagaccagccctagtttcctgtgtttcatgtattggcttttcatgtgaaactcgaggagagcttgtccgttgccacaagctgtttttcgaatgtctctacacagtccaggcaggaaatagaagcactcacatcaggagctcagtgtcaggcaggcaaggctcctgcaggggagccccgccctgctcaggtggcctcatctcccctcccagctggtggtgctgccctatcagatgctgctgcatgcggccactcggcaggccgcgggcatccggctgcaggaccaggtggtgatcatcgacgaggcgcacaacctgatcgacaccatcacgggcatgcacagcgtggaggtcagcggctcccaggtgtgtgggcctcccctccccgggccagggcctgctgtgacgtaaagggacttggatggttcctccagacacctgggccaagagttcctccggaggtggggcttgatagagggtgcacgagtcaaggcggtgacctcatcggaggctgaccatggctttccagtgcatcgggggaccccgctatgacagagtgcctcatttccctgcacctcatctgcccccatgctcctgagtccctccagccctggatgccagcagccagttctgtaagccagggagatggcatgtgtgaggcagaagtcccctcaggattggattttgtcattactgaagttgtctggaggggactgaattgaggaatgctcaagatcagcgcaggctcctcctgctgccctatcatgcgccatgcatggcaccaggtgtctctggtcttcacgctgactctgccatgggtgtggtgttcctgttttacattggaaacttggagattcaaagatggtcaagctctgtcctgaggtcatgcagctcatgagtgtggagctggggtgtgcccactggtttctgactgtgaaaacccccacgacatcccaccagctctactgacctgtgcctgggctgaattgaggctgggatgtgatggtggccttgaaccatcactctttgtagactccaggtcttttcccaacccggtggaaacttagcagggagattccatacttgaggaattcagcctcttgctttttctctgacccacagtggacactggaggaaaacttcccttccttcccttttctcttagctcccaccagcctaagggctgtggaaacccgtaccttttgtctgcagccagccccctctcctccctttggtggcttcctgtgtgtccagggccagcatcttctaggtgaatctaagatgtcagtaccttagccctcagctgcttgctcagagcctggtttgtgttctttccccagctctgccaggcccattcccagctgctgcagtacgtggagcgatacgggtgagatgtgaccctctgaggtagtgggacagtcccttggtggccccctgcgtgggcctctgagaggcaggcagcactttggttcccacctctggcccgggctgtggcggggtggagctgcatgccattcatgtcctaggcacatcatggtgtgtgctgcacacagacctggaaggctggggactgaccgctggctctgaggcctggggccgtggccagcctgctctctgggaaaggatttgtagcttgtgacccagtttgagaggcaccgggcagcaaggcttccactggggtgggcggggcgagtcgccatcagggcaccaccacttaatgtccgttggcttcttctcaggaagcgtttgaaggccaagaacctgatgtacctgaagcagatcctgtatttgctggagaaattcgtggctgtgctagggggtgagagcctcgtccccctgctgaccccgggcctgcaaaactcgctgggctgctttttccttggatgcccatcaggacacctcagttctctgtgtttttaagaagggtcggccgggtgcggtggctcacgcctgtaatcccagcacttgggaggccgaggcaggtggttcacctgaggttaggagttttgagaccagcctggccaacatggtgaaatcccatctctactaaaaatacaaaaaaattagctgggagtgttgccgtggcctgtagtcccagctgctccagaggctgagacaagagaattgcttgctcaaacccgggaggcggaggttgcagtgagccgagattgtgccactgcagtccagtctgggcgacagagtgagaatcagtctcaaaaaaaaaaaaaaaaaaaaaaaagaagggtcttggtcattgatttagaaaattcttgttctttgtagcttagttgagttgtctgacttgagctttatttagacccatgggttctttgcccatgttctgaggactttttatttcaggccctgctctggggggatattaaggatacagcatcacatagacacacggtgtttccgtgataggcatagttctgtgggttgttcgaagcacttgcatatgcggttttgtgtgccctgtgagaacgcagtgctggtatttgaatccttgttgatagacgcataaactagagctcggagcaagggctgctcccagcacgggagcctgggatcttctgactccagctcccacgcctctttgcatgaccctgtcacgtccccttcttttatgatggggcacccccttggaaggcgtctgtggaagtggaagctgcagaaagcctgtgggagctcctggcgggagctggtctcgtgttgctgctctgagccaccagctctgctttgcctcaggctcaccagtggcctgggcagctcctctgtgctccggtgccctgcataccttggtctggctgctgtgtcccggcctcctggagaaggggtgaaaaacatgaacttacagggctttgggttccacgtgcaagcacgtgagtcagacatgggaggctcctggacccacctgccctctcagtgggtccgttgcatgctataaacagtgaaaagcaaaacaaagccatttaaatacagatgctcttcttacttgatgtgcagtgtggagggagagaagatagggaagggttgggggtcctgagaaccagcattgtgacctatttccattctcttttttagggaacattaagcaaaatcccaatacacagagtctgtcacagacaggtaagagagttgccctcagagggcccagagctgatctgagccacttccgagcttaaccctgggactgaaacctgaggcttagggtgaagctcccaaggcccttcatgtgtttgttctcagggacggagctgaagaccatcaacgactttctcttccagagccagatcgacaacatcaacctgttcaaggtagaggtttccacctttccacattccacatccaatttccttcctgtcaccacctgtgggtaaagtactatgttaagactgtagaaggaagaaaaagcaaaacagatgtgtaattacttaacccttaacgcaacatgcctgtgagacaaaagtcatcttcttttagagtgaaggccacagggatgagggatgggtgagaaagggacctttcttggtgccccatagaacagatagagactccaggtccttgctctctcactccgtcttctggcacagtctccctcaggcttatggacaggaataggacgttgatttgttctgtgcaacccctgtcacgtcttcccacttgggccttgggtctggttgcagcctcagacctctgctcactccaggtctgtgtacccagcgctccccagatgaaacacggccactgccgcctgaaccccaagctcgtaactcaaatcagcaacagtgactgcccccgggtacagggttctgcctctgttgtaggcggcatgccatgtgctgtgctctgagctaggatatccttttgccccagcaaggaaagcaaacaggcccgtggaggtgacttcaggagggtggcgagcacaggcttcccacaagtgagccaatagcaagtggcagagacagcgtccaaacctggctgcactgacttggggccccacattcttcccatcctgcctgccttttttttcttaaaaccagcttttcccctgaattacacatttgggtcactgtcactgccgccatccctgccagacaggctggatccaggtcatccttgatgcctttctccccttgtctcccacatgcctgtgacagccgccaggcctgacagcctgagacagtcctgccgtccctgcgcttctcccacagctgggacatgggtgcaggcactccttctctcgccttccctttgccctccttgctttccttctcccctcttcttcccatgggtctcgggtctcatcactcaccattgagggaatcctcatcgaaggacgtcgctctttttagaaaccggtttaaaggctccaaactcctcatctctgcatcccaagctaagatctggcaccaaaccacacacattggatgcaccgactgagtggcactgccccagcccctgagcaggtcccagccatcatctcctctgtggctttgctcatagaagttccttttttttttttaactctttgtcacctggaaggaaagccaaggggaactggattttactgagcactcttagacttgagagagacatttggaaagagggtctccaccctgaggaggacactgcgttgtgggcaggggcagtagaggagggggtggcctcggagaggagatgacaaggttggtggcaaggaggctccaggtgcctcagaaggtagcactgcgttgtgctgcctgggtggtagaagtggtgttttttgttttgtttttaagattatagcttgctcagtttgcactcatgcctacagctgggcttggtttttgcaggtgcagcgatactgtgagaagagcatgatcagcagaaag

SEQ ID NO: 2434 - DNA, 418 bp, Homo sapiens
ctgcactccaggcagacgtttctgttcttgtgcaaagaacagcgcaatccattcaagttcacaggggcgggtggcacttgaaaatgtcagggtcaacttgcagggcagaagttagcagggaagtaagtcttcctgggggagtgggagagcccagcagagtttaggaggagggaggggcaacatcggggcaatcctctgagtctctctttcctcctcaggaactgtccaggaagaccctgcagtctctctgcaggctcatgggagctcccagaactgagacaacacacagatccaggcctgcttcgaagtcagtgggatgcggcccttgaaagtcgatgtattgggttcctagggctcttgtgaaaacatgccacacctggctggttttaaacaacaggagtttattctgtcagttgag

SEQ ID NO: 2435 - DNA, 636 bp, Homo sapiens
ggtttaggaatgggggccccagggccacccttgtccaggctccctctaccgtagaggtgagaattccagggcgctacagtttgaaaaccactattttatgagccaagtagaacaagaaatgacaactattaaaaagaaataagggatttctgaccagctaacaaccccacagaaaatctgccagggatccagaaatgagactgaggtggcctcagagagtggctccctcctgaaggggatgctgctgctgtcatcctgcccggcaccttggactgcagtgggcggggcctggggtggggatgagggtgcactgaccagcaccgcagcagcttggggaggttggggtgctgttaacatgccatcttataggtcggaagtggaaatgggagaaagtgtggggtgcctagggaaggaggtgactgagtagggagcctggctgccatcctaacacacagctcactgggcttgagagacttgagcctggtgccagggcagtgggtgatgctggggcccaggctggcaccatacttgaggtctgccaggcaggtcaggtaggatggcacatcgaccttggggacttggcccaggtctggcgtgtagaagtagttctccgggacacacgggattaggtaggga

SEQ ID NO: 2436 - DNA, 363 bp, Homo sapiens
atcacttagagcgtcgcccttcagccctgctgtgagtgtttttggtgctgaatccccttgtcttcacctcacccattcacggcgactagaaagactcgctgcaggacctttcagtaatgggagcagctgctccagagggacgcggactttctaggacacactttgcctgcatcacaagtgcacagtgacaggggattcattccacactccatctgacaatgtgaaacacaatggaaaaagggaggcagtcagtgggtggaaaatgtttaatttttttaaattttatttttactctctggttcaccaaagcttatttaactacaccactctgaaatcccttttaaggaaaaggctgtagattgt

SEQ ID NO: 2437 - DNA, 363 bp, Homo sapiens; identical to SEQ ID NO: 2436

SEQ ID NO: 2438 - DNA, 89 bp, Homo sapiens
catgtggcggaggttgcagtgatttgagatcacgccactgtactccagcctgggctacagagcgagactctgtctcaaaaaaaaaaaaa

SEQ ID NO: 2439 - DNA, 419 bp, Homo sapiens
atctgtaacatgagggaataaactagtattatctaagcattctctagacttaaaatatgattcctagaccactgaggagattaaaaatgaggtgagagggatttcaaaatgaagcgacctgccagacatggtggctcacagctgtcatcccaacattttgagagactgaggcagggggatcgattgagcccaggagttcaagaccagcctggacaacatcgcaagaccctgtctctacaaaataaaaaaaatgtaaaaatagctaggtgtggtggcacacacctatagtcccagctactcgagaagcagaggtaagaggatcatgtgagcccaggagttcgaggctacctcaagctatgattgcactactgcactccagcctgggcaacggcaagaccctgtctcttgaaaaaaaaaaa

SEQ ID NO: 2440 - DNA, 1462 bp, Homo sapiens
aaaaaaaaaaactcccatgataaaagtttacctacataacaaacctgcagttgtaccactgaacttaaaataaaagttaaaaaataataataataatttttttttgtagagatggggtgttgctatggtgcccaggctggtctctcaaattcctgggctcaagcaatcctccgacctcagcctccaaaagtgctgggattacaggcatgagctacctcgtccagcctagatacattcttgaatatgtaactttgggaagatttattaattgattaaggactaggaggtccagctaaaatgcaattggatttataaggtacttaaatccagatttaaggtatgaaatcaagaatggcgaagaaatcaatgaactgaggtcttaaagaatcaattcattttattgactagctgaatacaagggatgattgacacaagatgaaaattgagtgttaagaaagaataacaatgggcaagtatgaatgattaggacataaaagggagcaaaagaagaatgtaagaaaaaatgtaaatagcatatttatcaaacctttttatattgcatttcttgactaacatgatatatttgtaatttagtcatacttagtatttaggaagtaaagtcatcaaataaaatatgaatgtttgatttctaagaagtttaactttttgtataaggaaatgattataagagaatctaatattaaaataacatttggggggcttatatatatagtctgactttctggaataaattttccagattgaaatctacttcatacacagtttttaagcaatctttcagtcattttttcatcagaagaaatcaaggcagtttagaaacagtaaaactttatatttgcctaaactcaacaactaggttttttatattataaaacagtcatgttggattaaatctgattattattttattgaatgcgtattcctaacactgaattttaaagctatcttctctagttaatagagcctttttgtttttaagtatttatattccagaaacaagaatcaagcaaaagcacattttaatctttcctgtaaatgttatatatttggacactttataagacttcatagtagggtaataaaaaaattaccatgtttcgccaggcatggtggctcatacctgtaatcccagcactttgcgacaccaaggcgggaggatcatttgaggccaggagtttgagaccaacctggccaacatgatgaaaccacgtctgtaaaaaaaaaaaaaatacaaaccttagctgggcgtggtggcacaggcctgtagtcccagctacttgggaggctgaggtggaaggatagcttgagcctgggagaaggaggttgcagtgagctgagatcacgctactgtactccagcctaggtgacaaaagaagactctgtcttaaaaaaaaaaaaaaaaattaccatgtttagtgaaattgtcatgcatttattttag

SEQ ID NO: 2441 - DNA, 1462 bp, Homo sapiens
aaaaaaaaaaactcccatgataaaagtttacctacataacaaacctgcagttgtaccactgaacttaaaataaaagttaaaaaataataataataatttttttttgtagagatggggtgttgctatggtgcccaggctggtctctcaaattcctgggctcaagcaatcctccgacctcagcctccaaaagtgctgggattacaggcatgagctacctcgtccagcctagatacattcttgaatatgtaactttgggaagatttattaattgattaaggactaggaggtccagctaaaatgcaattggatttataaggtacttaaatccagatttaaggtatgaaatcaagaatggcgaagaaatcaatgaactgaggtcttaaagaatcaattcattttattgactagctgaatacaagggatgattgacacaagatgaaaattgagtgttaagaaagaataacaatgggcaagtatgaatgattaggacataaaagggagcaaaagaagaatgtaagaaaaaatgtaaatagcatatttatcaaacctttttatattgcatttcttgactaacatgatatatttgtaatttagtcatacttagtatttaggaagtaaagtcatcaaataaaatatgaatgtttgatttctaagaagtttaactttttgtataaggaaatgattataagagaatctaatattaaaataacatttggggggcttatatatatagtctgactttctggaataaattttccagattgaaatctacttcatacacagtttttaagcaatctttcagtcattttttcatcagaagaaatcaaggcagtttagaaacagtaaaactttatatttgcctaaactcaacaactaggttttttatattataaaacagtcatgttggattaaatctgattattattttattgaatgcgtattcctaacactgaattttaaagctatcttctctagttaatagagcctttttgtttttaagtatttatattccagaaacaagaatcaagcaaaagcacattttaatctttcctgtaaatgttatatatttggacactttataagacttcatagtagggtaataaaaaaattaccatgtttcgccaggcatggtggctcatacctgtaatcccagcactttgcgacaccaaggcgggggtgatcatttgaggccaggagtttgagaccaacctggccaacatgatgaaaccacgtctgtaaaaaaaaaaaaaatacaaaccttagctgggcgtggtggcacaggcctgtagtcccagctacttgggaggctgaggtggaaggatagcttgagcctgggagaaggaggttgcagtgagctgagatcacgctactgtactccagcctaggtgacaaaagaagactctgtcttaaaaaaaaaaaaaaaattaccatgtttagtgaaattgtcatgcatttattttag

SEQ ID NO: 2442 - DNA, 398 bp, Homo sapiens
gttatctgcccaacacagtacctaataatgagaataattttctgtattcaaaggttcttagtggttgttaatgtcttaaaagagaccatttaactggaatggaagtgttttctttggagaaaagcaggaaacattggatagatcttaattatacagaccttgatacttaggcagaaagtagagattctacttaggaaactagaaattactttttttttttttttttttgaaacaaggttttgctctgtcacctgggctggagtggagttcagtgcagtggcatgattatggctcagtgctgcatcaaactcctgggctcaagtgattcctcccacttcagctcctgagtagctggtattacagatgcccagctgatttttaaattttttgtgtggggg

SEQ ID NO: 2443 - DNA, 319 bp, Homo sapiens
gagtacttgataaactactctgccagttttttattgaatacggacacaatcgctttgaaagagaaaatcaagtgatgacatcggaaacaggattattagagagctcctgactgagtaaagaaaaatctaaatgacaaatggccggtcgtgcaggtggagattgcgttctgtggttgcctgcgccatccctgagagcatccagagaaaacagggaaaaatgtccactgcaaccttccacccgccgcctgaatgtgagggctgcagccacgtgtcacctgctgctgtggagacagaatctgagccgcacacctgagaattt

SEQ ID NO: 2444 - DNA, 319 bp, Homo sapiens; identical to SEQ ID NO: 2443

SEQ ID NO: 2445 - DNA, 319 bp, Homo sapiens; identical to SEQ ID NO: 2443

SEQ ID NO: 2446 - DNA, 448 bp, Homo sapiens
cagcgaatgtaaactaagttcacacatatgaaactatccatatgtaagagtgtataataaacaagtaggcttaaatgtttataagagaatatgaaatacagctcaaatgcttatgttttcaaagacagtaaaataagtgttttctggagaaatataaatttcaaaattgactccatataaatctgagtagacgagaaaagaaatttagaaaaatcacccaaaatggcttttgaccagttttataggtcagttgttttgaggcacaaataaatcatatactgtaagaacttttcttgagcaagaaaaagtttggcaatgatgtttaaggacacaaaaaaagcagaagttttgaaaaaaatgataaattgaatatcagagtaaaacttatttttttcaaaagacatttattaagaaaataaagacaaattaggatttcaacataaatttg

SEQ ID NO: 2447 - DNA, 443 bp, Homo sapiens
cagcgaatgtaaactaagttcacacatatgaaactatccatatgtaagagtgtataataaacaagtaggcttaaatgtttataagagaatatgaaatacagctcaaatgcttatgttttcaaagacagtaaaataagtgttttctggagaaatataaatttcaaaattgactccatataaatctgagtagacgagaaaagaaatttagaaaaatcacccaaaatggcttttgaccagttttataggtcagttgttttgaggcacaaataaatcatatactgtaagaacttttcttgagcaagaaaaagtttggcaatgatgtctaaggacacaaaaaaagcagaagttctgaaaaaaatgataaattgaatatcagagtaaaacttatttttttcaaaagacatttattaagaaaataaagacaaattaggatttcaacataa

SEQ ID NO: 2448 - DNA, 450 bp, Homo sapiens
cagcgaatgtaaactaagttcacacatatgaaactatccatatgtaagagtgtataataaacaagtaggcttaaatgtttataagagaatatgaaatacagctcaaatgcttatgttttcaaagacccagtaaaataagtgttttctggagaaatataaatttcaaaattgactccatataaatctgagtagacgagaaaagaaatttagaaaaatcacccaaaatggcttttgaccagttttataggtcagttgttttgaggcacaaataaatcatatactgtaagaacttttcttgagcaagaaaaagtttggcaatgatgtctaaggacacaaaaaaagcagaagttctgaaaaaaatgataaattgaatatcagagtaaaacttatttttttcaaaagacatttattaagaaaataaagacaaattaggatttcaacataaatttg

SEQ ID NO: 2449 - DNA, 324 bp, Homo sapiens
ctctcatagtgctgggattacagacataaactactgcacccagctaagattatatcatatttttactgcatcttttctgtgtatagatatgtttagatacacaaatccttcccattaggttactgttgtctatggtattccctatagtaacaagctgtacaggtttggagcctaggggcaataggctgtaccatttattaatagcctaggtgtgtagttggctataccatctaggtttgtgtgagtacactctctgatgtttgcataatgaccaactcacctcatgacacatttctcaaaatgtatccccttcattaagtgatg

SEQ ID NO: 2450 - DNA, 462 bp, Homo sapiens
ctaaacattttttctgagtataaaattactaagtgtagaaaatctggaaaatatacaaagaaaaatcaagattttgcattttgagtggcacagcttaagaaagctatttgaattggtctgattccctgaaaacaatatatgcatgtatttctgagccaggtttggttatagggagaaaaaaacagaaaagacaataaatctgggcattaataggcttaaatagtatttagttatttgggatctgaagaagaatctccaaaggaagcttgtccaaaagtggaaattttagcatttatatttaggtccaatttgggttgctttaaatgtcttttttgtttttttaagttaaaaatggagacagtctaaatgcaatgtgggattctggattggatcctggaagagaaaaaggacattagtggaaaaactggtgaaatctaaataaagtctagagttttgtacata

SEQ ID NO: 2451 - DNA, 304 bp, Homo sapiens
tcgcttgaacccgggaagcggaggttgcagtgagccgagatcgcgccattgcactccagcctgagcaacaagagtgaaaccccgtcctcccccacccccaaaaaaagaagctggagttcttggatggaaaactccagaggacattgggcaactgggaggaagctaaaaaggggggaaagggaaaaaaaaagatgggggtcttggatggaaaactccagaggacattgggcaactgggaggaagttaaaaatggggtgaaagggatcccaaaataaatggatatgacacatggtcagtgaaggct

SEQ ID NO: 2452 - DNA, 383 bp, Homo sapiens
ggagaacgtcgcatttagggagggtcaggccctctggcctggggtagatctcgggactgcccgagggcctctgacaacttttcagcatctgccccagggctgccccagctggagtttttgggacgcttttgtgggggcaccgctgagtccggatagtgggacccaagtcgtcctgctcggcccctggggaataatcgtgtggggcgcaaggtctgtgggaagggacttggagaggagggaagatgtcacgggagtctgcacagggtttccatgtgttccaattttgtcccataattgaaagcttgtggcattctgtggcggacggctacggagctagctcttccctttactatttcgcacttggtcttggaaaagtatgttgt

SEQ ID NO: 2453 - DNA, 9122 bp, Homo sapiens
aaaaatatactaagtctttttttttttttttttttttgagatggagtcttgctctgtcgcccaggctggagtgcagtggcgcgatctcggctcactgcaacctccgcctcccgggttcacgccattctcctgcctcagcctcccgagcagctgggactacaggtgcccgccaccacacccaggtacttttttttttttgtattttttagtacagacggggtttcaccatgttagccaggatggtctcgatctcttgacctcgtgatctgcccgcctccacctcccaaagtgctaggattacaggtgtgagccaccgcgcccggcgaagccgacttttcccattatttttaacggtaattcataaaatccttgttaggtttgatgacaggtaccatattaagggcagcattttataacccatatcttaaacatcatctctggaagttgagagcctccaatgggttttctatagagtgcacatgataccacactcaggcagttcatggagtgtaagacatatcttagtgctttgtcatttgacattttaactgagaaaaaaatacactttgataaatttgacttacacttcccttccccttcaggtatctactgagcgtttcagtcaacaatacagctcgtgttcgacaatattccttgatgacagcacagccagccagcattatcttacaatgacaataatatcgtgagtacaactatgctgccgagggacagattcctttattcggaaattatttcagccatttggttgtcctcttcagcaatcagcttaagaaattggagtcaaccatatattgatatccagattctcaatattaagtatcagtttctcttttaatcttagacgtcgtggtggaaggaaaaatcagttagcaaagaagcaaacccagaaacagtgtatctttttgatgcctttatgcctttagacaatgttgaacacagtgagaaggataggttccctttattgaatgttttttgtggaaacttagtttttcaatgcatcataggcccaaatcagtgtgcactactttggacattatccttggaagaaggaacagcttttcttcttctggcaccacagtgtatctgcatttgaatttctcccattgtgcatgagcacctcgtgggccacaaagatgcgctttgagagcaccctgagatgaagtttattttaaaaggaacaacaaccaacaccaccaccagctccacaggggccgtccagtgtacattattctcatctccttgggttattagtcttgatttttagaacacagtttggaaagtcctaatttagaatattaatgtctttatctttaatttaacttttcattctgtaaacataactagcttataaacaattttgtttcagatgcactagcctttttagctaattcaattgtcaataacttttacttcaattaaaagtggcaagtttacactcataataatgtcactttcctccctcccttttaacaatagttgagaggaaattgtgtttcgaacaaaaactggactcaaactctgtctcaagtcctgagctttgggacctattgagtaatcactaaatgtctgtagtcagccaagtctcttaaatctttgagcacacatacacaaaaattactttgactagagtccctggcttcttctgagttccaaagattttgataagttagcatataattcaaaagcagctttgaagattaattttgctgaaactaatttcgtgcttttttcctcattattctactttttagaagtctacttttgagagtatagtaagttttaatttgccaccagcaagtttgagaaataatcatttggtgtattcactattggtgaaataaagttattgaacaaattaatagggcaaattggcttcaagaagatattttgaaaaatgttttatcatgaatcagtagtgcactgttgtcagtgggataggtggcactcgctgagatcacttatgcaaggtttttttcaaaatgcaagtctgcaaatacatgtatcttcccatctccactttccctctatctgtaggcactgagaagccttttaggaaaatcaggatggatgtgaggcatctttctgtgaagaaaagcatcccagaagattctgattttcaccccagctcaatcattccaaactttgctgctgattgaaatcacctgggaaacgtttaccaagaaccttgatgcccaaagccatacccaatactaattaaattaaaatgtctcatgtggaagatgaggcagatattaaagcttctcaggcgattttaatgtgcagcaaagtttgagagccactgcttaatttgagtttaggacgagaaactgctcctatttggtgggaccttgggcaagtcagttttaaggtttgtttccctgatctgtaaaacgagtgttgaattaaatgtcacataaggtcattggtcctttccagcatgtaactttaaattctgtgattttaaaattatttcagagatgaaaactacttgaagcactatagacatatccatctcacatgctaatgttacaggctttttaaaaagtgctaatattgtgtagacctattagtagaattgagatttaccttccctcagttgttttgagcctcactctacaaaattagctgggcgtggtggtacatgcctgtaatcccagccacttgggaggctgaggcaggagaatctcttgaacccgggaggcagaggttgtggtgagccgagatcacaccattgcactccagcctgggcaacaagagcgaaactccacccacccaccccccccaaaaaaaattatctgggcatagtggcgcaaacttgtagtcccagcttcttgggaggctgaggcgtgagaatcgcttgaacctgggtggtggaggttgtgaggagtcaagatggcaccactgcagtccagtctgagcaagagagacagactctgggtcaaaaaataaataaatacataaaataaatcgcatgggacgaaaggtttcatcggtagaaaagcatataacagggaaatctgttattatttatatattgtaatcaccaacagaaacgcgtcttctaacggcatatttccttgcattttggttctcatatttttgtaaaaaacaaagaaatgaaaacaaagtgcccttatggtactgttctgaactagaagatttgaatttcagggccgctaggagagtttcctctgccccccttttaaaaaatgtcttcaggcctaacaaatgataacatctattgttatgaattttttttccttccacagtgtgaccttggagatacctcatcatatcacacaaaggtgagctttttagaaacctgtcttgttattctagctaattactttgcaagatatcaagctcagtgttaggtcacagctctagacatcataagctgtattgtgcctactaaaatatcgaagcaaattatttgtattttctttgttccttaagactctcataattcttaaatgattgagaatctcaaagagtatatgcttatattgattatattgatatttagtgtggtagaattatacaattgaaattttttcaaaatctatttttagtttagatttcacagccttaccactgttgatattatgggctagataatgctttgttgtaaggactgtcttgtgcattgcagagagtttagcagtattcatggcctctaccaactagatgtcagtagtaacccatgacccaggttataaaaacagaaaatattccttgagaacagtattgttaacagaagtttttcattgaaaaaaaacttttctacaacaaaaagttgagtaaaaagtgtgtcatttgtttatattatttaaagtctctcatgttgagcttaataggagacaaatggattctctagagctttctttgcaatttgcttcaaagaagcaatatgaggctgggcacagtggctcacgcctgtaatcccagcactttgggaggctgaggcgggcggatcacaaggtcaggagatcgagaccattctggctaacacggcgaaaccccgtctctactaaaaatacaaaaacttagctgggcatggtggcacgcacctgtagtcccacctattctggaggctgaggcaggagaaccgcttgaacttgggaggcggaggttgcagagagctgagattgtgccattgcactgcagcctgggtgacagagcaagactctgtctaaacaaacaaacaaaaaaagcaataagctggtggggcgcagtggttcacacctgtaatcccagcattttgggaggctgaggtgggtggatcacttgaggtcaggagtttgagaccagcccgaccaacatggtaaaacccgcctctactgaaagtacaaaaagtggctgggcatggtagtgcatgcctgtagtcccagttacttgggaggctgaggcaggagaatcgcttgagcctgggaggtggaggttgcagtgagccgagatctcgccattgcaccccagcctgggtgacagagagagactctgtctcaaaaaaagagaaaaagaagcaataagatgacctaacctcatgcaaatatgtagttggtagaaggtgtatttttaaagttttcagacagttgtgggtatttgttaaaacactaaatcaaaacttcacaagtggtggtttcttaaattagttacggtggcattttacatattaataaatttattccatcagtactcattgatctttcttgcacagtaaatggatcttttgctccatacttgcatttataatatcatgcattagttacttggaatatattggcttatgttttattgtgtcaaaaatcacttttagtttaaccaccaatcttactttaacacgcctttaagtattgaaaagctgccaagcctacagtagaaggaacaagtttttcaaagtccacaggaaagcttaaattttatcattgggaacaaatacgtatttcccttgaagtgacaacctctcacttcatttatttttgagaatgatagttgaactggttttttagaccgagtttcactctgtcacttggctggagtgcattggcatgatctcagctcaagcaatcctctcacctcaggctcctgtgtagctgggaccacagatgtgtggcaccacgccaggctaattttcttatatgtttgatagagacacagtttcgttacgttgcctaggctggtcccgaactcctgaaggagctcaggccatctgcctgctttggcctctcaaagtgctgggattttacaggcgtgagccactgcgctggcccagttgtacttttaaataaaaatgatgttctgtgaaaaaagtgatttttcagttcacagttaaatcacggattctttaaaaacaaaaaaaaaagcacttctcattaactttccacttattcagaatattagagacatgtcaagatttaacaacattaatttttattgcttcatcaaagacgttcttaagaaattcaggctatgttttttacctgtaggggacagtgaaagggactactaatgtaattggtaccactgccttgatttatgctgagaaaccagccattgtacctacttttgcttttatacaatcatggcaagtgtcaacgaaaaagcaggcaatgactttgtattactttcacaaatttttaaaatttttcatcagctttctcaggtttaattagtatgattcagaacagtgttggccaggcacagtagctcaggcctgtaatcccagcactttggaggccgaggcaagtggatcgcctgaggttaggagttcaagaccagcctggccaacatggtgaaaccacatctctactaaaaatacaaaacttagccaggagtggtggcaggtgcctgtaatccctgctacttgggaggctggggtaggagaatcacttgaacctgggaggcgaaggttgccatgagccgagatcacaccattgcactccagcctgggcaacaagagtaaaacttggtctcaaaaaaaaaaaaaaaaaaaaaaaaaagaacagttatgacctcttaggccttctggaaggggtcttcgggatcccgagaggtccacagagcacatttggagaaccactggtttatacacaggcacaatgcattagttttacaaagtttaaagttcctcaaagactggcctcttaaaaaggcagatgagtttgtcattcagacaacagaaaatacataaaaacatcatgagagtatactacagagaactaaagagaaaggaagctaggaaatctgaatcacatttacatttattaaagtttactactactgctttgtagaacattcttgtgtttcaatgtgtggttagaagagtgaaaatatgtttggtttattgccatggcctgttagggagagtcaatattcatgggcatttctgactggttatcatataaaaggcttcacggtacaggccatgatgtgctgagaaagaagaagtcaggaaaccctctgcaagtcaggatccaggagaagaatttgtaaaaactgctttggtaaagtaaacaccaaagcacacaggaggaagtattttactcaacaaatattatactaagatattaacagtttttgaagtaatgcactttcttattttatagagatgcagatagatctttgagcatacctgatgaacagttacactcatttgcggtaagtggcacttttattgaggttctattttcatcgtacacttgtatctgtttcatgctgaagtcaaagccatctttttttaaatcttccccatttcatgttgcatttagtcatcttaagtgttgtaaaaagaatgtgctggagtaagaactgatctgcagctctgtttagttagtgagctagtatgagtaaatatactatccaaacaacagaaaatgtatctttttttttttttgatggactctctttctgtagcccaggctggagtgcaatcgcgcgatcttggctcactgcaggctctgcctcccaggtccctgttcaagcaattctcctgcctcagcctcccgagtaactggaattacaggcatgtgacaccatgcccagctaatttttttttcttttttcttttctttttttttttttttttgtaaagacagggtttcaccatgttggccaggatggtcttgaactcctgacctcgtgatccacccaccttggcctcccaaagtgctgtgattacaggtgtgagccaccatgcctggcccagaaaatgtatctttttaaaaggtaattgtaagctgtctataggaccctgcaagccactacccaatttttgaagccattcctccttctgttccacacaggtttccaccgtgcacattacgaagaacagaaatggaggtgggagtttaaataactattcctcctccattccatcgactcccagcaccagccaggaggaccctcagttcagtgttcctcccactgccaacacacccacccccgtttgcaagcggtccatgcgctggtccaacctgtttacatctgagaaagggagtcacccagacaaagagaggaaagccccggagaatcatgctgacaccatcgggagcggcagagccatccccattaaacagggcatgctcttaaagcgaagtgggaaatggctgaagacatggaaaaagaaatacgtcaccctgtgttccaatggcgtgctcacctattattcaagcttaggtgattatatgaagaatattcataaaaaagagattgaccttcggacatctaccatcaaagtcccaggaaagtggccatccctagccacatcggcctgtgcacccatctccagctctaaaagcaatggcctatccaaggacatggacaccgggctgggtgactccatatgcttcagccccagtatctccagcaccaccagccccaagctcaacccgcccccctctcctcatgccaataaaaagaaacacctaaagaagaaaagcaccaacaactttatgattgtgtctgccactggccaaacatggcactttgaagccacgacgtatgaggagcgggatgcctgggtccaagccatccagagccagatcctggccagcctgcagtcatgcgagagcagtaaaagcaagtcccagctgaccagccagagcgaggccatggccctgcagtcgatccaaaacatgcgtgggaacgcccactgtgtggactatgagacccagaatcctaagtgggccagtttgaacttgggagtcctcatgtgtattgaatgctcaggaatccaccgcagtcttggcacccgcctttcccgtgtgcgatctctggagctggatgactggccagttgagctcaggaaggttatgtcatctattggcaatgacctagccaacagcatctgggaagggagcagccaggggcagacaaaaccctcagtaaagtccacgagggaagagaaggaacggtggatccgttccaaatatgaggagaagctctttctggccccactaccctgcactgagctgtccctgggccagcacctgctgcgggccaccgctgatgaggacctgcagacagccatcctgctgctggcacatggctcccgtgaggaggtgaacgagacctgtggggagggagacggctgcacggcgctccatctggcctgccgcaaggggaatgtggtcctggcacagctcctgatctggtacggggtggacgtcatggcccgagatgcccacgggaacacagcgctgacctacgcccggcaggcctccagccaggagtgcatcaacgtgcttctgcagtacggctgccccgacgagtgcgtgtagtatctgttttatttgactgcagtctccttggtgcaaaaacaaaatgggaaaaataaggataactcagaatttcaaaaggaaatcacaaattcagctagtaatagcattttcagtacttttcataaactaagtaaatacacaaaatgttgatttttctgaccataagacatattttatgtccttttgccaaggtggatgtgttagtctcaggccctcctggccacattgcccaagtcacacaggcttctgtattatgtatttagataaaatgtgtgaaaatatatttgaaaaaaaagttcataaatatgcattgatttttgtaca

SEQ ID NO: 2454 - DNA, 6114 bp, Homo sapiens
ctgagcaagagagacagactctgggtcaaaaaataaataaatacataaaataaatcgcatgggacgaaaggtttcgtgggtagaaaagcatgtaacaaggaaatctgttattatttatatattgtaatcaccaacagaaacgcgtcttctaacggcatatttccttgcattttggttctcatatttttgtaaaaaacaaagaaatgaaaacaaagtgcccttatggtactgttctgaactagaagatttgaatttcagggccactaggagagtttcctctgccccccttttaaaaaatgtcttcaggcctaacaaatgttaacatctattgttatgaattttttttccttccacagtgtgaccttggagatacctcatcatatcacacaaaggtgagctttttagaaacctgtcttgttattctagctaagtactttgcaagatatcaagctcagtgttaggcacatcataagctgtattgtgcctactaaaatattgaagcaaattatttgtattttctttgttccttaagactctcataattcttaaatgattgagaatctcaaagagtatgtgtttatattgattatattgatatttagtgtggtagaattatacaattgaaattttttcaaaatctatttttagtttagatttcacagccttaccactgttgatattatgggctagataatgctttgttgtgaggactgtcttgtgcattgcagagagtttagcagtattcatggcctctaccaactagatatcagtagtaacccatgacccaggttataacaacagaaaatattccttgagaacagtattgttaacagaattttttcattgaaaaataacttttctacaacaaaaagttgagtaaaaagtgcgtcatgtatttatattatttaaagtctctcatgttgagcttaataggagacaaatggattctctagagctttctttgcaatttgctttaaagcagcaataagaggttgggcacggtgtctcacgcctgtaatcccagcactttgggaggctgaggcgggcggatcacaaggtcaggagatcgagaccatcctggctaacacagcgaaaccccgtctctactaaaaatacaaaaacttggctgggcatgatggcacacacctgtagtcccacctattctggaggctgaggcaggagaaccgcttgaacttgggaggcggaggttgcagagagctgagatggtgctattgcactgcagcctgggtgacagagcaagactctgcctaaacaaacaaacaaaaaaagcaataagctggtggggcgcagtggttcacacctgtaatcccagcattttgggaggccgaggtgggtggatcacttgaggtcaggagtttgagaccagcccgaccaacatggtaaaacccgcctctactgaaagtacaaaaaatggctgggcgtggtggtgcatgcctgtagtcccagttacttgggaggctgaggcaggagaatcgcttgagcctgggaggtggaggttgcagtgagccgagatctcgccattgcaccccagcctgggtgacagagagagactctgtctcaaaaaaagaaaaaaagaagcaataagatgaccgaacctcatgcaaatatgtagttggtagaaggtgtatttttaaacttttcagacagttgtgggtatttgttaacactaaatcaaaacttcacaagtggtggtttcttaaattagttacggtggcattttacatattaataaatttattccatcagtactcattgatctttcttccacagtaaatggatcttttgctccatacttgcatttataatatcatgcattagttacttggaatatatcggtttatgttttattgtgtcaaaaatcacttttagtttaaccaccaatcttactttaacacgcctttaagtattgaatagctgccaagcctacagtagaaggaacaagtttttcaaagtccacaggaaagcttaaattttatcattgggaacaaatacgtatttcccttgaagtgacaacctctcacttcatttatttttgagaatgatagttgaactggttttttagaccgagtttcactctgtcacttggctggagtgcattggcatgatctcagctcaagcaatcctctcacctcaggctcctttgtagctggcaccacagatgtgtggcaccacgccaggctaattttcttatatgtttgacagtgacagggtttcgttatgttgcctaggctggtctcgaactcctgaaggagctcaagccatctgcctgctttggtctctcaaagtgctgggattttacaggcgtgagccactgcgctggcccagttgtacttttaaataaaaatgatgttctgtgaaaaaagtgatttttcagttcatagttaaatcacggattctttaaaaacaaaaaaaaaagcgcttctggttaactttccacttattcagaatattagagacatgtcaagatttaacaacattaatttttactgcttcatcaaagacattcttaagaaattcaggctatgttttttacctgtaggggacagtgaagaatagaatgactactaatgtaattggtaccactgccttgatttatgctgagaaaccagccattgtacccacttttgcttttatataatcatggcaagtgtcaacgaaagagcaggcaatggctttgtattactttcacaaatttttaaaatttttcatcagctttctcaggtttaattagtatgattcagaacagtgttggccaggcacagtggctcaggcctgtaatcccagcactttgggaggccgaggcaagcggatcacctgaggttaggagttcaagaccagcctggccaacatggtgaaaccacatctctactaaaaatacaaaacttagccaggagtggtggcaggtgcctgtaatccctgctacttgggaggctggggtaggagaatcacttgaacctgggaggcgaaggttgccatgagccgagatcacaccattgcactccagcctgggcaacaagagtaaaacttggtctcaaaaaaaaaaaaaaaaaagaacagttatgacctcttaggccttctggaaggggtcttcgggatcccgagaggtccacacagcacatttggagaaccactggtttatacacaggcacaatgcattagttttacaaagtttaaagttcatcaaagactggcgtcttaaaaaggcagatgagtttgtcattcaaacaacagaaagtacataaatacatcatgagagtatactacagagaactaaagagaaaggaagctaggaaatctgaatcacatttacatttattaaagtttactactactgctttgtagaacattcttgtgtttcaatgtgtggttagaagagtgaaaatatgtttggtttattgccatggcctgttagggagagtcaatactcacgggcatttctgactggttatcatataaaagacttcacggtacaggccatgatgtgctgagaaagaagaagtcaggaaaccctctgcaagtcaggatccaggagaagaattcgtaaaaactgctttggtaaacaccaaagcacacaggaggcagtattttactaaacaaatattatactaagatattaacagtttttgaagtaacgcgctttcttattttatagagatgcagatagatctttgagcatacctgatgaacagttacactcatttgcggtaagtggcacttttattgaggttgtattttcatcgtacacttgtatctgtttcatgctgaagtcaaagccatctttttttaaatcttccccatttcatgttgcatttagtcatcttaagtgttgtaaaaagaatgtgctggagtaagaactgatctgcagctctgtttagttagtgagctagtatgagtaaatattctatccaaacaacagaaaatgtatctttttttttttttttttttttttttatggactctctttctgtagcccaggctggagtgcaatcgcgcgatcttggctcactgcaggctctgcctcccaggtccctgttcaagcaattctcctgcctcagcctcttgagtaactggaattacaggcatgtgccaccatgcccagctaatttttttttctttttttttttttgtaaagacagggtttcaccatgttggccaggatggtcttgaactcctgacctcgtgatccacccacgttggcctcccaaagtgctgtgattacaggtgtgagccaccatgcctggcccagaaaatgtatctttttaaaaggtaattgtgagctgtctataggaccctgcaagccactacccaatttttgaagccattcctccttctgttccacacaggtttccaccgtgcacattacgaagaacagaaatggaggtgggagtttaaataactattcctcctccattccatcgactcccagcaccagccaggaggaccctcagttcagtgttcctcccactgccaacacacccacccccgtttgcaagcggtccatgcgctggtccaacctgtttacatctgagaaagggagtgacccagacaaagagaggaaagccccggagaatcatgctgacaccatcgggagcggcagagccatccccattaaacagggcatgctcttaaagcgaagtgggaaatggctgaagacatggaaaaagaaatacgtcaccctgtgttccaatggcgtgctcacctattattcaagcttaggtgattatatgaagaatattcataaaaaagagattgaccttcagacatctaccatcaaagtcccaggaaagtggccatccctagccacatcggcctgcgcacccatctccagctctaaaagcaatgacctatccaaggacatggacaccgggctgggtgactccatatgcttcagccccagtatctccagcaccaccggccccaagctcaacccgcccccctctcctcatgccaataaaaagaaacacctaaagaagaaaagcaccaacaactttatgattgtgtctgccactggccaaacgtggcactttgaagccacgacatatgaggagcgggatgcctgggtccaagccatccagagccagatcctggccagcctgcagtcatgcgagagcagtaaaagcaagtcccagctgaccagccagagcgaggccatggccctgcagtcgatccaaaacatgcgtgggaacgcccactgtgtggactgtgagacccagaatcctaagtgggccagtttgaacttgggagtcctcatgtgtattgaatgctcaggtatccaccgcagtcttggcacccgcctttcccgtgtgcgatctctggagctggatgactggccagttgagctcaggaaggttatgtcatctattggcaatgacctagccaacagcatctgggaagggagcagccagggacagacaaaaccctcagaaaagtccacgagggaagaaaaggaacggtggatcctttccaaatatgaggagaagctctttctggccccactaccctgcactgatctgtccctgggccagcagctgctgcgggccaccgctgatgaggacctgcagacagccatcctgctgctggcacatggctcccgtgaggaggtgaacgagacctgtggggagggagacggctgcacggcgctccatctggcctgccgcaaggggaatgtggtcctggcgcagctcctgatctggtacggggtggacgtcatggcccgagatgcccacgggaacacagcgctgacctacgcccggcaggcctccagccaggagtgcatcaacgtgcttctgcagtacggctgccccgacgagtgcgtgtagttctgttttatttgactacagtctccttggtgcaaaaacaaaatgggaaaaataaggataactcagaatttcaaaaggaaatcacaaattcagcttataatagcattttcagtacttctcataaactaagtaaatacacaaaatgttgatttttctgaccataagacatattttatgtccttttgccgaggtggatgtgttagtctctgtgccctcctggccacattgcccaagtcacacaggcttctgtattatgtatttagataagatgtgg

SEQ ID NO: 2455 - DNA, 23934 bp, Homo sapiens
  SITE (1026): n equals a,t,g, or c
gagggcattgtgaagtgtggggtggggcattgtgtgccacatgcctgggctcccacctggggccagtgggcttcagtctgtaggtgactacagaaggaggaggagctccgtctgttctctcttcaggcagttgttgtgtctctcagcacttgttgggttcacaacctattaaataagccggctggtcttcaccctcccagacaagtcaactcaggggaggcagcagggtgcgggccttggcccgcagccctagccggggccggggccagggccagggccagggctggtgcccggggccgcgctgtgaggtgggcaggcgaggagcgggaagaccatctctgcaagtgcagcatagcctcggcctaggacagcgggagtgcgtggccaaagctgtgagcagaggcacaggtggtggcagacagtagaggcgccccatggggaacatactgacctgtcgtgtgcaccctagcgtcagcctcgagtttgaccagcagcaggggtcggtgtgtccctctgaatctgagatctatgaggcaggagctggggacaggatggcaggagcgcccatggctgctgctgtacagcctgctgaggtgactgttgaagttggtgaggacctccacatgcaccacgttcgtgaccgggagatgcctgaaggtgaggaggtgataggtgccatctaccctcggtttgcctctggctgctactgtccccaaggttccctttgaggcatcccccacttcgagctcctttctgcttgtagccagctttcccgggagctggccaggaacaaaagctggctctgccttgaattcccaccccttagtatttccccaccgagtccagtcagtttcttttcgcctcccctcccaatcgcccagttcttgctctctcatctcattctcccaggctggcatgggaccatttatttatggctcttgtcgaataagcagcagttgaataaatgagttgataaatttttataaatgattacatcttttttcttttctccctctatacatatangctttggagtttaacctttctgccaatccagaggcaagcacaatattccagaggaactctcaaacagatggtgagacaacagtgtctgtagctctgtttattatcctgtgggactttgtttaggcttctttgagctattctcttccttttctcaataaaaactcaaatatcccaacttttcagtacccatcttattttttctttgtacctatccagatggtacctaagtgaaggaaccaggtaagtgcctaattgtttcctttgttaaagtagccaaatctcaagacagttcctattcaaatatttggggatttcttatttaaaatcagaatggagtttgccatgggagaggctatatggtattcttaatgggctgctttaagtcaccttgatagaagctgcttagtttcttctaactgtaatttgaacacagaaggaaaaagaaaaaaggagagtgcttaaaataattgtgaaaggtgtgaaatgtcacagccggggctgcagaaaaatggttgtgtgtgtgtgtttggggtttctcaaaggagtttacctatgaagctcttttctgttaaagttcttactttaacagaaaatgtgtctccagatttattctggtgacttaacagactttatttacctccttgttctaaaagagaggtggggattggttcatggtcaaaactttcaaaagacatgaaacgtcaatgtagactttcaatgtgtaatataaagattgcaggttaaaatgtcagaccttccctgtaagagtgtttgttgccatggctccccctttgtcccttcccctcctgacaatagcatcttgttcaaagataagaaagttacagttttggctgggcttggtggctcacgcctgtaatcccagcactttgggaggccgtggcaggcggatcacctgaggtcaggagttccagaccagcctggccaacatggtgaaacgctgtctctactaaaaaaaaaatacaaaaattagctgggcgtagtggcacatgactgtagttccagctactcacaaggctgaggcaggagaattgcttggacctgggaggtggaggttgcagtgagcagagatcacgccaatgcactccagcctgggtgacagagcgagactccgtctcacaaaaaaaaaaaggaaagaaagttggagttttttagtctctacactgctggcagaggcaggggatgggagccggtagaaaagagaaaacaattagttcgtttgcctctaaaattttgcaaagagatgaatctaagtaaaagtaattctgggtaataatatggttcttgaataaaaactgaaattttcaaaatagaaaacattgcatcataaacatattacatccagtaggcttattgttttcatttaaatgccagagatttcatcactgtagaggaaatgtcttatagctcttctatttaaactttggttgcgctcttaatttttaaagaggtaggataattaagactcattatgagtgtgactttgtaacttggaagtactatcttcacatttcaagatatttaaggattgctttagaataaacaaatgtattatgtgaattaattgattgtacctttatacacaaagcatgtaagtacttgtgtaaacttatactctgcttggtgatgttcggaaagcctgatggatgttacacaccagttagtagatgggtagtgttggatgagagcccaaaaatggctctttattgtcattctttaggattacaacacagtttatgtatgtctcacttggccctttccaatacaaataaggcctgtgtatgttctccctatgtgttgctaacgaagaaatgaaaacttagagatatcacatgactatggaagacagctactcaagagaactaaggttctgtgtcctcagaatgaaatggaagtgacagatatgatgaatttactttttaaaaattttaaaaactctagaatacatcttatattttgcctataaaatagacctgtcttttaaaacttactgccatcttgatttattttatgcaaagttgattttacacaactcaaagccaaaatttacctcttctttttttttttttttttaaataaaggagggtgtcattatgttactcatgctggcctcaacttcctgacctgggttcaagtgattttcccatctcagcctcctgagtagctgggactacaagcatgtgccatcttgcctggctctctcttatgtctatacattcatttcaatggataagaatcaaagtagagatagtgaaatagcctaaatgcagcagtcgaataaacgagttgataaatttttatcaatgattacatctttttttcttttcttcctctatgcatatagctttggagtttaacccttctgccaatccagaggcaagcacaatattccagaggaactctcaaacagatggtgagacgacattgttttttccaccaagagaaagaataaaagctcttgtttgatcaggttatagaaagtatttagaaaaactcatattggtttaaaattttcatcttttcacatgttcccttgtcttattttaatatgtgatatactttcctttagttgctatgatgttagtgaaaacgtgtaacctttttgtttatacattttgccatctttttatcaacacaattattttgtgatgtgatggaggagtcatggatttctctttataattcttggatttatctttatttataattaatggattcatctttatttacaatcccttttcccttgctccaaaaagtacattttaaagatgaatgatagaacttcagcttggttttcatttaaacaaattaaaaaacatagtcgtttatcatcagggattgaatctgtgatttgggcctcctcttacacagtcctctgaccacattcatttaccacatccaagtttacgctactcaaaagttttaggttattaactttttcatttgatataatgtaaatttaaacatgccttactcctgcttatttcccttaatgttatattaaatcctcatttatttgccaacaagccatacacagccaagttttccagttgacttaaacagcaagaacacaagtgagggttctattataatgtgcgaagtaatgcagcacagtaaaacacgggagtttgtaacctttgtttttatagtttgagtagactttgcccatcttgagtcagttatttctggttagaatttgtcttcattttttacattactataaagagatacctaaggctgggtaatttataacaaaaagaggtttaattggctcaaagattttcaggctgtacaaacatggctttaacatctgcttctggtgagggcctcagcaaacttacaatcatgataaaaggcaaaggggaagcaggtggttccacaccgtgaaagagggaggagagaggggaagggggaaggtaccacactctttttttttttttttgaaatggagtctcactctgttgcacaggctggagtgcaatggcacgatcttggctcactacaacctccatctcccaggttcaagcaattctcctgcctcagcctcccgagtagttgggactataggtgggcaccataacacctggctaatttctgtatttttggtagagacagggtttcaccatgttagccagactggtctgaaactcctgacctcaagtgatctacccgcttcagcctcccaaagtgctgggattacaggcttcagccaccgcacctggccagtaccacagtcttttaaattaccataatgagaatgtgcttattaccatggggatgggaccaagccattcataaggaatccactgccattacccaaacgcctcccactaggccctgtctccaacattaagggtcacatgttaacatgagacttggaggggcaacatatccaaaacatatcagaattgtatttcccagttccttccagaggcatgggcttctcacacctagagagcatggaagcagtaaaagaaaagctattccatgtccctcactcttcagtggtagtaacttttgcctacaaggccctcccagcatcaaaggcagaggcagtgtaggaaacaaagcatggcccaagtccctcttggggcttttattattctggcctctttttagggaaaaaaaatgattttttgtgctgcagacaccatgtccaattaggtttgtatacttattttaacatcaaaatttaggccaggctctgtggcttacacctgtaatcccaactctttgggaggttgaggtgggtggatcacgaggttaggagatcaagaccatcctggctaacacagtgtaactctgtctctactaaaaatacaaaaaacaattagctaggcatggtggcacgtgcctgtggtcccagctagtccggaggctaaggctgaagaattgcttgaacctgggaggcagaggttgcagtgcgctgagatcccgccactgcactcgagcctaggtgacagagtgagactccatctcaaaaaagaaaacaaatttaagataggttactttccagttgtgtaaagaccattttttaattttgttttgtttttagtgacatattagtagataaccactaagtgtggttcaagatgcttacagggattctgttgcatctagagataggtgtctggtcaggaagtagtttttagaactgttagctcttagagtctgataattaaagtaagctatgtgtaaatgcagaatgagagaatactaatggatcatggctcatatatgcaacagttaaactttttattagctaaatttttcatctggcctaatttttttgcccttttcttttgtacatgaggattctttcatttgtgtgtaatagaaacaaaaagtaaactaaatgaaaatctaagtttttagatttgacttatgaaattaatcatgccagataatttaaattatatgttattgaaaattttttttttaatggaattttgtctcatttttcataggagtaatcagtaagatgttaacaactacttttattttatggtatttgtatcagaagtgaccagtttttttttttttattcttagttgtagaaataagaagaagcaactgtacaaaccatgtaagtaaacactcaaatagttaagaaattgatagtttgacataaaaggatgtctctcttgatttctttaaattacaatgtggacctggtggtggtagcatggacctctttttgtggattttctaaatctcttctattttcctgagtattaaatttatccagaaaagtgcttagtttagcgtgtccaccttttaaagatttctgacatttaagttaaatttcaatagtccggttcaaaagatctgccttaaggctgggcatggtggctaacgtctgtaatcacaacactttaggaggccgaggcaggctgatcatctgaggtcaggaatttgagacaaccctgaccaacatggtgaaattctgtatctactaaaaatacaaaagtagctgggcgtggtggtgcatgcctgtaatctcagctactcaggaggctgaggcaggagaatcacttgaacccaggaggcggaggttgcagtgagccaagatcgcgccattgcactccagcctggacgacagagcaaaactctgtctcaaaaaaaaaaaaaaaattgccttaaatatttaatcttatttttaatgaaagaacaaaaatagaatagctaagttaattgccagcactgtctattgactttctgtcacagcaggtaaaagcataccttccccgctacaccatgatcttatgtttctccctgtgtttcttccaattgtagcacactttttaattaaatcagtaatatttacatgattatgactctgcaaatattattcactgctaagtcatatggtgttttcactgtgcctctgcattccatgtccttcatcctgtctctgaaacagttctgaaatctgagcacttctgcaattctcctggatcttcttttttcctagcctacgttagtttatctatccaaatatcgttaagtagcctctgggtgctctgtttgctttcacatccattattttttagcatgaagctaattttctgactatattcatttgcctgttttctaacagctgttttcccccaagtattgtagcatttatcacatgcctttcaaagatattttccatctgcgaaaacacatctgttcctttttatgtttgtgtggggggcaactttctttggccttttgtcatcctagttcaatatagcgtgggtttccctagatatgctcaatgtctgcttttctgggctaactctttaaagtcttttggtatctcatgtaactgctgtcttgtgtgggatcgcctgagtcctagattctgtgtttccttctgtcctgttatcgtctctagttgtacttgaacacattttcctgtgtggagatgttaaaatccctcctctttgatagagagtacacctctaggttgaatctaaattgtatggttctgaagacattttgcagttgtgctcttattacagtgttgttcttgaatctattgccagtgtgtgatatgttatttacaaccaggttttagttatctgcggaagctttttagaatctctctctctaaggttctgaaattttataacagcttgttggggatcttttcattttattgaggctactaaacctgcagactatctcttcttgagaatttttttttttattttctctgttacttttttactgatagtcttgttattcagatgctaggctgcttagaccagtacgcctgcattgatttttaatttttccccttgtatttttttcagtttgtctttttattctagttctgggatattctgtgactttatcctctactatttctattgaattttatattttttgagagtgttttaagatttttttttaaagttttgctcctgattttgactggtcctatcaattccttttttctattgttttgatctcttttcttggaggcttccctccaatgtgtggtggttcctggcctgctttatttggaagcaggatttctgttaactgatagcactcagtgtgaggccttagaagcctgactagcttttcatttgggagacctcagtgtattatctggggatcttttttgaagacatttcagtttcttctgagaaggatctcccagttttctgcctggaaagtaaaagcaggcctggaaaggaaaagcagagttagcgaagaaagttggagttccatttttggtgtacagttttctttatatctcaggtttaagccatggtatctctgagccagaaattctcaggtttgatatatccagagaacacacatctaagtttcttgtcagatggaaggacaggtggacttggggctctagttagagatttgcaactgaccttgctggcttttttttttttttcacattttaccctactttccaaagtgccatttgcctgtaagttcacaacctgcctttagttctgcaagacaaactggctcgcttctgttccagtcactttctgtaggcaccaaagttgtgtttctgtgttatttaccactcctttatctactttttatgtctcagcatttattaaaaattatctctgtcaaccttctgtgctggtcatgggtgtaacctttattttatgactgatgaggcttccggagggagacgaaataaatttgtggtcaatctattatatttaatccaaatttaggacctgtgtttaaatcaaagtctaatttgagtataattaatgatattaagccagagaattttttaaattaatgtatctataataagcatattacacttttctcctaaggccttgtttaatattttcattcaaagtttatccactgccatatacttcccattacttcacaacatagatggagctgttttcctgaatgcccaaagtgttagaaatatttaagttaattaagatttgttcatttttagcctggtcaacatcgcaagtcctcatatctacaaaaaggttaaataacaaattagccaggcctggtggcatgcgcctttcgtattacctactcaggaggctgaggcagaggatcgcttgagctcaggagtttgaggctgcagttaactataattgcaccactgcactccagcctgggcaacaaagggagaccctgtctcggaaaaaggaaaaaagttactaattctttaaaaacctatctaaaatttgtcctgcccaaaaggagagtgaaaaatatgaactttagtctttgttttattttatgtttgctgagaaaaatgctgtactttatttatttatttattatttccataggtttctgggggaacaggtggcatttggtgacatgactaagttctttagtgatgatttgtgagatttaggtgcacccgtcacctgagcagtatccgctgaacccaatttgtagtcttttatccctcaccctcctcccagcctttcccccaagtccccaaagtccattgtatcattcttatggctttgcatcctcatagctcagctcccacgtatgaaagagaacatgatatttggttttccatgctgagttatttcacttagaataatagtcttacttccatccaggttgctgggaatgccatgaatttattccttattatggctgaggtggtattcctcatatatatatatatatgtatgtatatcacggtttctttatccactcattgattgacgggcatttgagctggttccatatttttgtaattgtaatttgtttgagttcctcatagattctggataatagccctttgtcagatgtatagactgtgaagatttcctcccactctgtggttgtctgtatactctgctgattgttccttttcctgtgcagaagctctttagttaagtctcacctatttgtttctgttgcatttgcttttgtgttcttggtcatgaagtctttgcctaagccagcgtctagacgggtttttccaatgttatcttctagaacttttatggtttcaggtcatagatttatgtccttgatccatcttgagttgatttttgtgtaagctgagagttgaggatccagtttcattctcccgcatgtggcttgccaattatcccagcaccatttgttgaatagggtttaccttcttcactttatgttttaggtggctttgttgaaaatcagttggctataggtatttgagtttatttctgggttctctattctgttccattggtgtatgtgcctatttttatatcagtaccatgctattttggcgactatggccttatagtatagtttgaaatcaggtaatgtcatgcctccagatttgttgtttttgcttagttttgttttggctgtgccggttcttgtttggtccatataaatttcaggattgttttttctagttctgtgaagaaggatggtggtattttgatgggagttgcattgaatttgtagattgcttttggcagtatggtcattttcacaatattcattctacccattcatgagcatggggtgtctttccatttgtttgtgtccatgacttcattcagcaacgttttgtagttcccaacggcatatcaaaaaataatcgggccaggcacggtggctcacacctgtaatcccagcactttgggaggctgaggcggacggatcatgaggtcaggagttcgagaccagcctggccaacatggtgaaatcccatctctactaaaaatacaaaagttagccgggtgtggtggcgctcacctgtaatcccatctactcaggtggctgaggcaggagaatcgcttgaacctcggaggcagaggttgcagtgagccaagatcaccacactgcatattccagcctgggcaacagagcgagactccatctcaaaaaaaaaaaaaagataatccaccatgatcaaatgggtttcataccagggatgcagggatggattaacatacacaagtcaataaatgtgatacaccacataaacagaattaaaaacaaaaaatcacatgatcatctaaacagatgcagaaaaagcatttgacaaaatgcagcatccttttatgattaaaaccctcagcaaaatcagcatacaagggtcacagctcaatataataaaagccatctatgacaaacccacaaccaacatgatactgaaagggggaaaagttgaaagcattccccccgagaactggaacaagacaaggatgcccactctcaccacttgtattcaacatactactggaaggcctagccagagcaatcacacaagagaaaacaataaaaggcatgcagatcagtaaagaggaagtcaaactgttgctgtttgatgatgatatgatcatatacctaggaaaccctaaagactcctccaaaaagctcctagaactgataaatgaattcagcaaagtttcaggagacaaaattaatgtacacaaatcagtagctctgttataccccagaagcgaccaagcttagaatcaaaccaagaactcaaccccttttctgatagctgcaaaactaaactaaactaaaataaaatacttgggaatagacctaaccaaggaggtgaaagatgtctacaaggaaaacaactttagtatttttaatgggttaaaatgagaggcagcaggtacagcagaagaagtcagtgcgtgggcatccgcatccaatgggtactgcacctttgatggtaaggctttggttttgacttactaaattactaggtacgattattttctagtttttgtcattaaaccttaaaactactaagtaaccccttccatttcttgttaaatattgtaaaatttcatactctcatttatgctgcctgacgttagagtgtttgtttctattttgtgactaccttaaataatacctataaagagtaaactgttagtagtgtttttgctgtaattaaatgtagtaagacttaccttccaaatgataactgaattgtcaaacacttgtcgaagttttggatttactcaaaattctatgctcagcagctggaggtaggaagagtaagggccctcccttactcttatggagaggcatactttctcacaaggggaatactctgcaggaattagcatcttgtaagcagtggtgaattcaactaattagtgtataaaaatacattttttggtgtggctgccgacaaagagatccaagagggtagatggagtcgagcttgctgaagcaaggaaagagaaaagcagtattctaggcagagagcaggggtagagcaggaaaatggctaggtgcaggtcagatgatttatagaatgcaattgatcaagttttgaagtgaatgcaaagtattctccgagagtctcatttgagtcatgtcttggcagtcttatttaaacatgaagtgaaagttagattttttaagttgtcatttgttttcagggtgtgagagaatatgtaagtgatactctttttatcctccacataagaaaataggactagagaaacctatggcttcctcacttgttggtggcctagcagccctgacacacagagcctctgaatctgaaacacttcttttgtaacaatatcacctgaaataatacatttaggattagtaatttagtaaatgcattagtcttgtattcactgcaataaaatgctcttgtagcaggattatttaatacattacattttatcgtagtaaataaataatagaagggctgggcgccgtggctcacgcctgtaatcccagtactttgggaggctgaggcaggcagatcgcgaggtgaggagatcgagaccatcctggctaacacggtgaaaccccgtctctactaaaaacacaaaaagttagccgggcacggtggtgggcgcctgtagtcccagctactcaggaggctgagtcaggagaatggcgtgaacccgggaggcggagcttgcagtgagccgagatcgcgccactgcactccagtctgggcgacagagcgagactccgtctcaaaaataaaaaaaagaaagaaagagaagacatagagaggatgtggtacacacagaccaagaagggagaaaagaaagcaaatgacaacaaaacatgaatacagaaagacagactttttatctccatgctgtcagaatggatgtaaggattcctctccaaagctgaaatgcataggcattcatgtaatgccctctttattctacattcaacaaagaaaaatttctaaaaccttgttttacattgaataaggacaatttcttttgagagagcagcagggtcaatccccctttgcaaagggtagtgcatctcttttcacggcatcacatttccatctggtggccttttaggatatcatggacaaggactcaagatttacagcgaaggcagggcaaatatttcctgctggcatctgtcttgtttgagcattaaatccaggcctcagatgggggcggtctgcactcctatggcagattgtaatgagaggtgtggaagaagacatcgaacccaaccctgtgaatttcattttaggatggactgaggaacaacattcacatcaaaaacaagcattttatcatgagatttattaaactttgtcagccactcctactaggtcttcctatagatattaatgattaaaaaaaaaaaaagcactaacacccaaagtaaatttttctgggagattccagattggcctattatgaagttgaattgttcactgtaccgacactgaaacatttattgcaatacattacagaacaggtttaaactgcataggcacacatacacacatacacccgcctactccaaactcatgtctgagtactctattcttcctaaataaaagacaaaagctttggtggtatttttttaagtgtaatttagggatttaagatggggcaagaaaaatatctgaaaggccctcccctccatgctgtgcccttataaatgatagaacagatagagaaattaaattactgactatacaattgggcttgaagtcataaaggggagtgcttgggatcacagaaataaacaaggaagttcttaagaagccatgggagaagccaaggcccaggtaacctgagtctgcacccacctgggaatgctgcagaatcctgagactcaggtggagaattggaaaccagaaatctagtgtgcattgaagaagtgccagatgtctgaggaagcccactgctatgaaagagaaataacaaatagagcaaatgaaaaatcttctctacaaccaaaggtcaattaaagcaagtacatttaataccttcagcaaaacaggggaaaataaaaccaagcaattatgaaaaagaaccaattagagatctcaaaaattaaagcccaagttattgaaagaaaaacctcaaaagataggctgagtaacagcagagacacactgaagggtccattagcaaaatggagcattcagttgagggagtcttgcaggttaaagaacaaagagaaaaaggtgaaaaggttaagagccagaaagtctgggtgaccgcattcaagctttcgtctagtaggaattccaaaggcagagagagaatgggagaaagtagtatttaattaatagctaaaaattccccaaaagtgaagaaagctatgaaaatagagaaaaaaatgttaaaagctaccaaagcataaaaaaaaaaaaaaaaaaaatttgtttaaattcaaagaaataaggatcagattttcctcattaatttcattagcaacactagatacaggccaatgaagccatgtcttcaatgagctttggaaaataactaattgatgctgaattctataacccagctacagaatcacttaagggcacagtgaaacaaagccatttttttcttttttgagacagggtattgctctgttgcccaggctggagtgcagtggcatgatcaaagctcactgcagccttgaccttcctggctcaagcaatacttccatctcagcctctcaagtagctgggactacaggggcctgctaccacgcccggctaattttttgtatttttagtagagacggggtttcaccatgttagccaggatggtctcgatctcttgacctcgtgatccgcccgcctccacctcccaaagtgctaggattacaggtgtgagccaccgtgccccgcgaagccgacttttcccattatttttaacggtaattcataaaatccttgttaggtttgatgacaggtaccatattaagggcagcattttataacccatatcttaaacatcatctctggaagttgagagcctccaatgggttttctatagagtgcacatgataccacactcaggcatttcatggagtgtaagacatatcttagtgctttgtcatttgacattttaactgagaaaataatacactttgataagtttgacttacacttcccttccccttcaggtatctactgtgcgtttcagtcaacaatacagcttgtgttcgacaatattccttgatgacagcacagccatccagcattatcttacaatgacaataatatcgtgagtacaactatgctgccgagggacagattcctttattctaaaattatttcagtcatttggttgtccttttcagcaatcagtttaagaaattggagtcaaccatatattgatatccagattctgaatattaagtatcagtttctcttttaatcttagacgtcgtggtggaaggaaaaatcagttagcaaagaagcaatcccagaaacagtgtatctttttgatgcctttatgcctttagacaatgttgaacacagtgagaaggataggttccctttattgaatgttttttgtggaaacttagtttttcaatgcatcataggcctaaatcagtgtgcactactttggacattatccttggaagaaggaacagcttttcttcttctggcaccacagtgtatctgcatttgaatttctcccattgtgcatgagcacctcgtgggccacaaagatgcgctttgagagcaccctgagatgaagtttattttaaaaggaacaacaaccaacaccaccaccagctccacaggggctgtccagtgtacattattctcatcttcttgggttattagtcttgatttttagaacacagtttggaaagtgctaatttagaatattaatgtctttatctttaatttaacttttcattctgtacacataactagcttataaacaattttgtttcaaatgcactagcctttttaactaattcaattgtcaataacttttacttcaattaaaagtggaaagtttacactcataataatgtcactttcctccctcccttttaacaatagttgagaggaaattgtgtttcgaacaaaaactggactcaaactctgtctcaagtcctgagctttgggacctattgagtaatcactaaatgtctgtagtcagctaagtctcttaaatctctgagcacacatacacaaaaattactttgactagagtccctggcttcttctgagttccaaagattttgatatgttagcatataattcaaaagcagctttgaagattaattttgctgaaacaaatttcgtgcttttttcctcattattctactttttagaagtctacttttgagagtatagtaagttttaatttgccaccagcaagtttgagaaatgatcatttggtgtattcactattggtgaaataaagttattgaacaaattaatagggcaaattggcttcaagaagatattttgaaaaatgttttatcatgaatcagtagtgcactgttgtcagtgggataggtggaactcgctgagatcacttatgcaaggtttttttcaaaatacaagtctgcaaacacatgtatcttcccatctccactttccctctatctctaggcactgagaagccttttaggaaaatcgggatggatgtgaggcatctttctgtgaagaaaagcatcccagaagattctgattttcaccccaactcaatcattccaaactttgctgctgattgaaatcacctgggaaatgtttaccaagaaccttgatgcccaaagccatacccaatactaattaaattaaaatgtctcatgtggaagatgaggcagatattaaagcttctcaggcgattttaatgtgcagcaaagtttgacagccactgcttaatttgagtttaggacgagaaactgctccaatttggtgggaccttgggcaagtcagttttaaggtctgtttccctgatctgtaaaacgagtgttgaattaaatgtcacataaggtcattggtcctttccagcatgtaactttaaattctgtgattttaaaattatttcagagatgaaaactacttgaagcactatagacatatccatcttacctgctaatgttacaggctttttaaaaagtgctaatattgtgtagacctattagtagaattgagatttgccttccctcagttgttttgagcctcactctacaaaattagctgggtgtggtggcacatgcctgtaatcccagccacttgggaggctgaggcaggagaatctcttgaacctgggaggcagaggttgtggtgagccgagatcacaccattgcactccagcctgggcaacaagagcgaaactccatccaccccaccccccaaaaaaacattatctgggcatagtggcacaaacttgtagtcccagcttcttgggaggctgaggcatgagaatcgcttgaacctgggtggtggaggttgtgaggagtcaagatggcaccactgcaatccagtctgagcaagagagacagactctgggtcaaaaaataaataaatacataaaataaatcgcatgggacgaaaggtttcgtgggtagaaaagcatataacaaggaaatctgttattatttatatattgtaatcaccaacagaaacgcgtcttctaacggcatatttccttgcattttggttctcatatttttgtaaaaaacaaagaaatgaaaacaaagtgcccttatggtactgttctgaactagaagatttgaatttcagggccactaggagagtttcctctgccccccttttaaaaaatgtcttcaggcctaacaaatgttaacatctattgttatgaatttttttccttccacagtgtgaccttggagatacctcatcatatcacacaaaggtgagctttttagaaacctgtcttgttattctagctaagtactttgcaagatatcaagctcagtgttaggtcacagctctagacatcataagctgtattgtgcctactaaaatattgaagcaaattatttgtattttctttgttccttaagactctcataattcttaaatgattgagaatctcaaagagtatgtgtttatattgattatattgatatttagtgtggtagaattatacaattgaaattttttcaaaatctatttttagtttcgatttcacagccttaccactgttgatattatgggctagataatgctttgttgtgaggactgtcttgtgcattgcagagagtttagcagtattcatggcctctaccaactagatatcagtagtaacccatgacccaggttataacaacagaaaatattccttgagaacagtattgttaacagaattttttcattgaaaaataacttttctacaacaaaaagttgagtaaaaagtgcgtcatgtatttatattatttaaagtctctcatgttgagcttaataggagacaaatggattctctagagctttctttgcaatttgctttaaagcagcaataagaggttgggcacggtggctcacgcctgtaatcccagcactttgggaggctgaggcgggcggatcacaaggtcaggagatcgagaccatcctggctaacacagcgaagccccgtctctactaaaaatacaaaaacttggctgggcatgatggcacgcacctgtagtcccacctattctggaggctgaggcaggagaaccgcttgaacttgggaggcggaggttgcagagagctgagatggtgccattgcactgcagcctgggtgacagagcaagactctgcctaaacaaacaaacaaacaaaaaaagcaataagctggtggggcgcagtggttcacacctgtaatcccagcattttgggaggccgaggtgggtggatcacttgaggtcaggagtttgagaccagcccgaccaacatggtaaaacccgcctctactgaaagtacaaaaaatggctgggcgtggtggtgcatgcctgtagtcccagttacttgggaggctgaggcaggagaatcgcttgagcctgggaggtggaggttgcagtgagccgagatctcgccattgcaccccagcctgggtgacagagagcgactctgtctcaaaaaaagaaaaaaagaagcaataagatgacctaacctcatgcaaatatgtagttggtagaaggtgtatttttaaagttttcagacagttgtgggtatttgttaacactaaatcaaaacttcacaagtggtggtttcttaaattagttacggtggcattttacatattaataaatttattccatcagtactcattgatctttcttgcacagtaaatggatcttttgctccatacttgcatttataatatcatgcattagttacttggaatatattggtttatgttttattgtgtcaaaaatcacttttagtttaaccaccaatctttctttaacacgcctttaagtattgaaaagctgccaagcctacagtagaaggaacaagtttttcaaagtccacaggaaagcttaaattttatcattgggaacaaatacgtatttcccttgaagtgacaacctctcacttcatttatttttgagaatgatagttgaactggttttttagaccgagtttcactctgtcacttggctggagtgcattggcatgatctcagctcaagcaatcctctcacctcaggctcctttgtagctgggaccacagatgtgtggcaccacgccaggctaattttcttatatgtttgacagtgacagggtttcgttatgttgcctaggctggtctcgaactcctgaaggagctcaagccatctgcctgctttggcctctcaaagtgctgggattttacaggcgtgagccactgcgctggcccagttgtacttttaaataaaaatgatgttctgtgaaaaaagtgatttttcagttcacagttaaatcacggattctttaaaaacaaaaaaaaaaaaagcgcttctggttaactttccacttattcagaatattagagacatgtcaagatttaacaacattaatttttactgcttcatcaaagacattcttaagaaattcaggctatgttttttacctgtaggggacagtgaagaatagaatgactactaatgtaattggtaccactgccttgatttatgctgagaaaccagccattgtacccacttttgcttttatataatcatggcaagtgtcaatgaaaaagcaggcaatgactttgtattactttcacaaatttttaaaatttttcatcagctttctcaggtttaattagtatgattcagaacagtgttggccaggcacagtggctcaggcctgtaatcccagcactttgggaggccgaggcaagcggatcacctgaggttaggagttcaagaccagcctggccaacatggtgaaaccacatctctactaaaaatacaaaacttagccaggagtggtggcaggtgcctgtaatccctgctacttgggaggctggggtaggagaatcacttgaacctgggaggcgaaggttgccatgagccgagatcacaccattgcactccagcctgggcaacaagagtaaaacttggtctcaaaaaaaaaaaaaaaaaaaaaaaaaaagaacagttatgacctcttaggccttctggaaggggtcttcgggatcccgagtggtcccacagagcacattggaagaaccactggtttatacacaggcccaatgcattagttttacaaagtttaaagttcatcaaagactggcgtcttaaaagggcagatgagtttgtcattcaaacaacagaaagtacataaatacatcatgagagtatactacagagaactaaagagaaaggaagctaggaaatctgaatcacatttacatttattaaagtttactacaactgctttgtagaacattcttgtgtttcaatgtgtggttagaagagtgaaaatatgtttggtttattgccatggcctgttagggagagtcaatactcacgggcatttctgactggttatcatataaaagacttcacggtacaggccatgatgtgctgagaaagaagaagtcaggaaaccctctgcaagtcaggatccaagagaagaattcgtaaaaactgctttggtaaagtaaacaccaaagcacacaggaggcagtattttactaaacaaatattatactaagatattaacagtttttgaagtaatgcgctttcttattttatagagatgcagatagatctttgagcatacctgatgaacagttacactcatttgcggtaagtggcacttttattgaggttgtattttcatcgtacacttgtatctgtttcatgctgaagtcaaagccatctttttttaaatcttccccatttcatgttgcatttagtcatcttaagtgttgtaaaaagaatgtgctggagtaagaactgatctgcagctctgtttagttagtgagctagtatgagtaaatatactatccaaacaacagaaaatgtatcttttttttttttttttttttttttatggactctctttctgtagcccaggctggagtgcaatcgcgcgatcttggctcactgcaggctctgcctcccaggtccctgttcaagcaattctcctgcctcagcctcttgagtaactggaattacaggcatgtgccaccatgcccagctaatttttttttctttttttttttttgtaaagacagggtttcaccatgttggccaggatggtcttgaactcctgacctcgtgatccacccacgttggcctcccaaagtgctgtgattacaggtgtgagccaccatgcctggcccagaaaatgtatctttttaaaaggtaattgtgagctgtctataggaccctgcaagccactacccaatttttgaagccattcctccttctgttccacacaggtttccaccgtgcacattatgaagaaaagaaatggaggtgggagtttaaataactattcctcctccattccatcgactcccagcaccagccaggaggaccctcagttcagtgttcctcccactgccaacacacccacccccgtttgcaagcggtccatgcgctggtccaacctgtttacatctgagaaagggagtgacccagacaaagagaggaaagccccggagaatcatgctgacaccatcgggagcggcagagccatccccattaaacagggcatgctcttaaagcgaagtgggaaatggctgaagacatggaaaaagaaatacgtcaccctgtgttccaatggcgtgctcacctattattcaagcttaggtgattatatgaagaatattcataaaaaagagattgaccttcagacatctaccatcaaagtcccaggaaagtggccatccctagccacatcggcctgcacacccatctccacctctaaaagcaatggcctatccaaggacatggacaccgggctgggtgactccatatgcttcagccccagtatctccagcaccaccagccccaagctcaacccgcccccctctcctcatgccaataaaaagaaacacctaaagaagaaaagcaccaacaactttatgattgtgtctgccactggccaaacgtggcactttgaagccacgacgtatgaggagcgggatgcctgggtccaagccatccagagccagatcctggccagcctgcagtcatgcgagagcagtaaaagcaagtcccagctgaccagccagagcaaggccatggccctgcagtcgatccaaaacatgcgtgggaacgcccactgtgtggactgtgagacccagaatcctaagtgggccagtttgaacttgggagtcctcatgtgtattgaatgctcaggaatccaccgcagtcttggcacccgcctttcccgtgtgcgatctctggagctggatgactggccagttgagctcaggaaggttatgtcatctattggcaatgacctagccaacagcatctgggaagggagcagccaggggcagacaaaaccctcagaaaagtccacgagggaagagaaggaacggtggatccgttccaaatatgaggagaagctctttctggccccactaccctgcactgagctgtccctgggccagcagctgctgcgggccaccgctgatgaggacctgcagacagccatcctgctgctggcacatggctcccgtgaggaggtgaacgagacctgtggggagggagacggctgcacggcgctccatctggcctgccgcaaggggaatgtggtcctggcgcagctcctgatctggtacggggtggacgtcatggcccgagatgcccacgggaacacagcgctgacctacgcccggcaggcctccagccaggagtgcatcaacgtgcttctgcagtacggctgccccgacaagtgtgtgtagtatctgttttatttgactgcagtctccttggtgcaaaaacaaaatgggaaaaataaggataactcagaatttcaaaaggaaatcacaaattcagctaataatagcattttcagtacttttcgtaaactaagtaaatacacaaaatgttgatttttctgaccataagacgtattttatgtccttttgccaaggtggatttgttagtctcaggccctcctggccacattgcccaagtcacacaggcttctgtattatgtatttagataaaatgtgtgaaaatatatttgaaataaagttcataaatatgcattgatttttgtaca

SEQ ID NO: 2456 - DNA, 311 bp, Homo sapiens
ataaaagacttcacggtacaggccatgatgtgctgagaaagaagaagtcaggaaaccctctgcaagtcaggatccaggagaagaattcgtaaaaactgctttggtaaagtaaacaccaaagcacacaggaggcagtattttactaaacaaatattatactaagatattaacagtttttgaagtaatgcgctttcttattttttagagatgcagatagatctttgaccatacttgatgaacagttatactcatttgcggtaagtggcacttttattgaggttgtattttcatcgtacacttgtatctgtttc

SEQ ID NO: 2457 - DNA, 8900 bp, Homo sapiens
agacggggtttcaccatgtttgccaggatggtactccatctcttgaccttgtgatccgcccgcctccacctcccaaagtgctaggattacaggtgtgagccaccgcgccccgcgaagccgacttttcccattatttttaacggtaattcataaaatccttgttaggtttgatgacaggtaccatattaagggcagcattttataacccatatcttaaacatcatctctggaagttgagagcctccaatgggttttctatagagtgcacatgataccacactcaggcagttcatggagtgtaagacatatcttagtgctttgtcatttgacattttaactgagaaaataatacactttgataagtttgacttacacttcccttccccttcaggtatctactgtgcgtttcagtcaacaatacagcttgtgttcgacaatattccttgatgacagcacagccatcagcattatcttacaatgacaataatatcgtgagtacaactatgctgccgagggacagattcctttattctaaaattatttcagtcatttggttgtccttttcagcaatcagtttaagaaattggagtcaaccatatattgatatccagattctgaatattaagtatcagtttctcttttaatcttagacgtcgtggtggaaggaaaaatcagttagcaaagaagcaatcccagaaacagtgtatctttttgatgcctttatgcctttagacaatgttgaacagagtgagaaggataggttccctttattgaatgttttcttgtggaaacttagtttttcaatgcatcataggcctaaatcagtgtgcactactttggacattatccttggaagaaggaacagcttttcttcttctggcaacgcagtgtatctgcatttgaatttctcccattgtgcatgagcacctcatgggccacaaagatgcgctttgagagcaccctgagatgaagtttattttaaaaggaacaacaaccaacaccaccaccagctccacaggggctgtccagtgtacattattctcatcttcttgggttattagtcttgatttttagaacacagtttggaaagtgctaatttagaatattaatgtctttatctttaatttaacttttcattctgtacacataactagcttataaacaattttgtttcaaatgcactagcctttttaactaattcaattgtcaataacttttacttcaattaaaagtggaaagtttacactcataataatgtcactttcctccctcccttttaacaatagttgagaggaaattgtgtttcgaacaaaaactggactcaaactctgtctcaagtcctgagctttgggacctattgagtaatcactaaatgtctgtagtcagctaagtctcttaaatctctgagcacacatacacaaaaattactttgactagagtccctggcttcttctgagttccaaagattttcatatgttagcatataattcaaaagcagctttgaagattaattttgctgaaacaaatttcgtgcttttttcctcattattctactttttagaagtctacttttgagagtatagtaagttttaatttgccaccagcaaatttgagaaatgatcatttggtgtattcactattggtgaaataaagttattgaacaaattaattgggcaaattggcttcaagaagatattttgaaaaatgttttatcatgaatcagtagtgcactgttgtcagtgggataggctggcaaacctcgcctgcagcaatcagctctatcgcacaggcttttttttcaaaacacaagtctgcaaacacatgtatcttcccatctccactttccctctatctctaggcactgagaagccttttaggaaaatcgggatggatgtgaggcatctttctgtgaagaaaagcatcccagaagattctgattttcaccccaactcaatcattccaaactttgctgctgattgaaatcacctgggaaacgtttaccaagaaccttgatgcccaaagccatacccaatactaattaaattaaaatgtctcatgtggaagatgaggcagatattaaagcttctcaggcgattttaatgtgcagcaaagtttgacagccactgcttaatttgagtttaggatgagaaactgctcctatttggtgggaccttgggcaagtcagttttaaggtctgtttccctgatctgtaaaacgagtgttgaattaaatgtcacataaggtcattggtcctttccagcatgtaactttaaattctgtgattttaaaattatttcagagatgaaaactacttgaagcactatagacatatccatcttacctgctaatgttacaggctttttaaaaagtgctaatattgtgtagacctattagtagaattgagatttgccttccctcagttgttttgaggctcactctacaaaattagctgggtgtggtggcacatgcctgtaatcccagccacttgggaggctgaggcaggagaatctcttgaacccgggaggcagaggttgtggtgagccgagatcacaccattgcactccagcctgggcaacaagagcgaaactccacccaccgcccccctccaaaaaaaaattatctgggcatagtgacacaaacttgtagtcccagcttcttgggaggctgaggcatgagaatcgcttgaacctgggtggtggaggttgtgaggagtcaagatggcaccactgcagtccagtctgagcaagagagacagactctgggtcaaaaaataaataaatacataaaataaatcgcatgggacgaaaggtttcgtgggtagaaaagcatgtaacaaggaaatctgttattatttatatattgtaatcaccaacagaaacgcgtcttctaacggcatatttccttgcattttggttctcatatttttgtaaaaaacaaagaaatgaaaacaaagtgcccttatggtactgttctgaactagaagatttgaatttcagggccactaggagagtttcctctgccccccttttaaaaaatgtcttcaggcctaacaaatgttaacatctattgttatgaattttttttccttccacagtgtgaccttggagatacctcatcatatcacacaaaggtgagctttttagaaacctgtcttgttattctagctaagtactttgcaagatatcaagctcagtgttaggcacatcataagctgtattgtgcctactaaaatattgaagcaaattatttgtattttctttgttccttaagactctcataattcttaaatgattgagaatctcaaagagtatgtgtttatattgattatattgatatttagtgtggtagaattatacaattgaaattttttcaaaatctatttttagtttagatttcacagccttaccactgttgatattatgggctagataatgctttgttgtgaggactgtcttgtgcattgcagagagtttagcagtattcatggcctctaccaactagatatcagtagtaacccatgacccaggttataacaacagaaaatattccttgagaacagtattgttaacagaattttttcattgaaaaataacttttctacaacaaaaagttgagtaaaaagtgcgtcatgtatttatattatttaaagtctctcatgttgagcttaataggagacaaatggattctctagagctttctttgcaatttgctttaaagcagcaataagaggttgggcacggtgtctcacgcctgtaatcccagcactttgggaggctgaggcgggcggatcacaaggtcaggagatcgagaccatcctggctaacacagcgaaaccccgtctctactaaaaatacaaaaacttggctgggcatgatggcacacacctgtagtcccacctattctggaggctgaggcaggagaaccgcttgaacttgggaggcggaggttgcagagagctgagatggtgctattgcactgcagcctgggtgacagagcaagactctgcctaaacaaacaaacaaaaaaagcaataagctggtggggcgcagtggttcacacctgtaatcccagcattttgggaggccgaggtgggtggatcacttgaggtcaggagtttgagaccagcccgaccaacatggtaaaacccgcctctactgaaagtacaaaaaatggctgggcgtggtggtgcatgcctgtagtcccagttacttgggaggctgaggcaggagaatcgcttgagcctgggaggtggaggttgcagtgagccgagatctcgccattgcaccccagcctgggtgacagagagagactctgtctcaaaaaaagaaaaaaagaagcaataagatgaccgaacctcatgcaaatatgtagttggtagaaggtgtatttttaaacttttcagacagttgtgggtatttgttaacactaaatcaaaacttcacaagtggtggtttcttaaattagttacggtggcattttacatattaataaatttattccatcagtactcattgatctttcttccacagtaaatggatcttttgctccatacttgcatttataatatcatgcattagttacttggaatatatcggtttatgttttattgtgtcaaaaatcacttttagtttaaccaccaatcttactttaacacgcctttaagtattgaatagctgccaagcctacagtagaaggaacaagtttttcaaagtccacaggaaagcttaaattttatcattgggaacaaatacgtatttcccttgaagtgacaacctctcacttcatttatttttgagaatgatagttgaactggttttttagaccgagtttcactctgtcacttggctggagtgcattggcatgatctcagctcaagcaatcctctcacctcaggctcctttgtagctggcaccacagatgtgtggcaccacgccaggctaattttcttatatgtttgacagtgacagggtttcgttatgttgcctaggctggtctcgaactcctgaaggagctcaagccatctgcctgctttggtctctcaaagtgctgggattttacaggcgtgagccactgcgctggcccagttgtacttttaaataaaaatgatgttctgtgaaaaaagtgatttttcagttcatagttaaatcacggattctttaaaaacaaaaaaaaaagcgcttctggttaactttccacttattcagaatattagagacatgtcaagatttaacaacattaatttttactgcttcatcaaagacattcttaagaaattcaggctatgttttttacctgtaggggacagtgaagaatagaatgactactaatgtaattggtaccactgccttgatttatgctgagaaaccagccattgtacccacttttgcttttatataatcatggcaagtgtcaacgaaagagcaggcaatggctttgtattactttcacaaatttttaaaatttttcatcagctttctcaggtttaattagtatgattcagaacagtgttggccaggcacagtggctcaggcctgtaatcccagcactttgggaggccgaggcaagcggatcacctgaggttaggagttcaagaccagcctggccaacatggtgaaaccacatctctactaaaaatacaaaacttagccaggagtggtggcaggtgcctgtaatccctgctacttgggaggctggggtaggagaatcacttgaacctgggaggcgaaggttgccatgagccgagatcacaccattgcactccagcctgggcaacaagagtaaaacttggtctcaaaaaaaaaaaaaaaaaagaacagttatgacctcttaggccttctggaaggggtcttcgggatcccgagaggtccacacagcacatttggagaaccactggtttatacacaggcacaatgcattagttttacaaagtttaaagttcatcaaagactggcgtcttaaaaaggcagatgagtttgtcattcaaacaacagaaagtacataaatacatcatgagagtatactacagagaactaaagagaaaggaagctaggaaatctgaatcacatttacatttattaaagtttactactactgctttgtagaacattcttgtgtttcaatgtgtggttagaagagtgaaaatatgtttggtttattgccatggcctgttagggagagtcaatactcacgggcatttctgactggttatcatataaaagacttcacggtacaggccatgatgtgctgagaaagaagaagtcaggaaaccctctgcaagtcaggatccaggagaagaattcgtaaaaactgctttggtaaacaccaaagcacacaggaggcagtattttactaaacaaatattatactaagatattaacagtttttgaagtaacgcgctttcttattttatagagatgcagatagatctttgagcatacctgatgaacagttacactcatttgcggtaagtggcacttttattgaggttgtattttcatcgtacacttgtatctgtttcatgctgaagtcaaagccatctttttttaaatcttccccatttcatgttgcatttagtcatcttaagtgttgtaaaaagaatgtgctggagtaagaactgatctgcagctctgtttagttagtgagctagtatgagtaaatatactatccaaacaacagaaaatgtatctttttttttttttttttttttttttatggactctctttctgtagcccaggctggagtgcaatcgcgcgatcttggctcactgcaggctctgcctcccaggtccctgttcaagcaattctcctgcctcagcctcttgagtaactggaattacaggcatgtgccaccatgcccagctaatttttttttctttttttttttttgtaaagacagggtttcaccatgttggccaggatggtcttgaactcctgacctcgtgatccacccacgttggcctcccaaagtgctgtgattacaggtgtgagccaccatgcctggcccagaaaatgtatctttttaaaaggtaattgtgagctgtctataggaccctgcaagccactacccaatttttgaagccattcctccttctgttccacacaggtttccaccgtgcacattacgaagaacagaaatggaggtgggagtttaaataactattcctcctccattccatcgactcccagcaccagccaggaggaccctcagttcagtgttcctcccactgccaacacacccacccccgtttgcaagcggtccatgcgctggtccaacctgtttacatctgagaaagggagtgacccagacaaagagaggaaagccccggagaatcatgctgacaccatcgggagcggcagagccatccccattaaacagggcatgctcttaaagcgaagtgggaaatggctgaagacatggaaaaagaaatacgtcaccctgtgttccaatggcgtgctcacctattattcaagcttaggtgattatatgaagaatattcataaaaaagagattgaccttcagacatctaccatcaaagtcccaggaaagtggccatccctagccacatcggcctgcgcacccatctccagctctaaaagcaatgacctatccaaggacatggacaccgggctgggtgactccatatgcttcagccccagtatctccagcaccaccggccccaagctcaacccgcccccctctcctcatgccaataaaaagaaacacctaaagaagaaaagcaccaacaactttatgattgtgtctgccactggccaaacgtggcactttgaagccacgacatatgaggagcgggatgcctgggtccaagccatccagagccagatcctggccagcctgcagtcatgcgagagcagtaaaagcaagtcccagctgaccagccagagcgaggccatggccctgcagtcgatccaaaacatgcgtgggaacgcccactgtgtggactgtgagacccagaatcctaagtgggccagtttgaacttgggagtcctcatgtgtattgaatgctcaggtatccaccgcagtcttggcacccgcctttcccgtgtgcgatctctggagctggatgactggccagttgagctcaggaaggttatgtcatctattggcaatgacctagccaacagcatctgggaagggagcagccagggacagacaaaaccctcagaaaagtccacgagggaagaaaaggaacggtggatcctttccaaatatgaggagaagctctttctggccccactaccctgcactgatctgtccctgggccagcagctgctgcgggccaccgctgatgaggacctgcagacagccatcctgctgctggcacatggctcccgtgaggaggtgaacgagacctgtggggagggagacggctgcacggcgctccatctggcctgccgcaaggggaatgtggtcctggcgcagctcctgatctggtacggggtggacgtcatggcccgagatgcccacgggaacacagcgctgacctacgcccggcaggcctccagccaggagtgcatcaacgtgcttctgcagtacggctgccccgacgagtgcgtgtagttctgttttatttgactacagtctccttggtgcaaaaacaaaatgggaaaaataaggataactcagaatttcaaaaggaaatcacaaattcagcttataatagcattttcagtacttctcataaactaagtaaatacacaaaatgttgatttttctgaccataagacatattttatgtccttttgccgaggtggatgtgttagtctcaggccctcctggccacattgcccaagtcacacaggcttctgtattatgtatttagataagatgtgtgaaaatatatttgaaaaaaagttcataaatttgcattgatttttgtaca

SEQ ID NO: 2458 - DNA, 221 bp, Homo sapiens
attgtgtagacctattagtagaattgagatttgccttccctcagttgttttgaggctcactctacaaaattagctgggtgtggtggcacatgcctgtaatcccagccacttgggaggctgaggcaggagaatctcttgaacccgggaggcagaggttgtggtgagccgagatcacaccattgcactccagcctgggcaacaagagcgaaactccacccacc

SEQ ID NO: 2459 - DNA, 413 bp, Homo sapiens
tgagcagcagcaagatttattgcaaagcgcaaaaaaacaaagcctccacagtgtggaaggggacctgagctggttgctgcccctggctggggcagcctgcttttattcccttatctgaccctatctcctattacaaatagtaggaggccgggcatagtggctcacgcctgtaatcccagcactttgggattctgagatgggtggatcacctgaggtcaagagttcaagaccagcctgatcaacatggcaaaaccccatctctataaaaatacgaaaattagctgggcatggtggcacatgcctatagtctcagctactcgggaggcttagacaagagaattgcttgaacccgggaggtggaggagatcgcaccactacactccaatcttggcgacagagcaagactctgtctc

SEQ ID NO: 2460 - DNA, 12562 bp, Homo sapiens
tggtgggggggtagtgtttgtgtgtgtgtgtgtatatatatatttatatattactagtccattgctgctacaacaaactaccactatgtcagggcataaaacaaatttattacactcctgtatgtcagagtatgatgtggatctcactgggctaaaatctaggtggtggaaaggctaccttcatctctagaggctctaggggatcttttttctcgccttttccacattctggagtctgcctgcattttttggctttgggctcttctccactctcaccattagcaaccttgcatcccatggacccttcttctgtggccacatgtctctgtggctctttccttcccccttctcttccactgttaaggactcatgtgcttacttagtcctgaatggacacaccgtcatcatccacatgagcccactgtcctaatccatacaggctgctacaaggaaatgcattagaccaggtagcttataaataacagaacttcgtttctcacagtcctggaggctgagaaatgcaagatcaaggtgccggcagtcttggtgtctggtgaaggcctgctttctcatagaggcttccttcttgctgtgtcttcgcatggtgagaggaacaaacaagctcccttgtgcctgtaataaggtgctaatcccagtcatgagggcagagtctcccgtaaggcttaacctcctaataccatcaccttgagggttaggattttaacacatgaacattgacggaacacaacgttcattccatagcaccagggtagtctcctcatgtcaaggtctttacctgaatcacatgcatgatgtaccgttttcatgtaaggttctaggaatctgtggacatctttggggggccattattttgccaatcacatattacatatattttaatatcctagactagtatgaaaacaatgccacttccattgctttatatatgtatatatatatacacattgtctaatgctataattaaaaaaaagttgtagacacaaatatacccatttaaaaaaaaacccatttttttctattttacttcatactgccaactcctttttcctgaaactgcttcaactctggaattcttttttgctattagttttattttattgaagtattcatgaacaagcatacacttgtatatggatttaaaattcacagtaatgttttcatgaattcatctgtgaataacattttatagacaaaatgtctgcactaggacaagagaaagatgtataattaccttgttctaaggtaccgccattcattgttattattttaaaatacgagtgtcgactgatgttaaaacacaaaatggggccgggagtggtggctcccgcctgtaatcccaacactttgggaggtgggtggatcacctgaggtcaggagtttgagaccagcctggccaacatggtgaaaccccgtctctactaaaaatacaaaaattagctgggcatgtgttgcgcgcccgtaatcttagctacccgggaaactgagtcaggagaattgctggaatctgggaggcggaggctgcagtgagccgagatcacaccagtgcactccagactgggtgacagagcgagactctgttcttccccccaccccccccaaaaaaaaaccacaaaaagggataattggccgggcacagtggctcatgcctgtaatcccagcactttgggaggccaaggtggacagatcacctgagaccgggagttcaagaccagcctgaccaacatggagaaaccctgcctctactaaaaatgcaaaaattagccgggcatggtggcacatgcctgtaatcccagctactcaggaggctgaggcaggagaattgcttgactttgggaggtggaggttgctgtgaaccaagattgcaccattgcactctagcctggacaacaacagcaaaactctgtctcaaaaaaaaaaaaaaaaaaaaaaaagatttataactggggcaatggaattgaaaatcatttttaaaaatatccaaaatatctaaggaacttgtataaataaataggaaaaaaaaaaagaaaaacatcaagaagcccacaaaaaagcagatttgtaaatgggcaatggatttcaatagacatttagccacagaagatatccagttggtgaaaaggcatatggaaaggtgctcagcatcactgattatcaggaaaatgaaaatcaaaaccaccacgagtggtttagaccatagcggcatgcatgaaagttttcagacctccagttgttgggagtggctgaggagattggggagcttctgtctgagttggaagagtggagtctcaacaagaaccattgtattctggacatgtgtgggccctggagtgtgcaaggctggatgccttgtctgcctgtgccttacagagtgacaccattgtggtgtggttgatcagaggtttgtttgcccacggatgaaagcaaaagtgagttggcttcccaagaacttttaccagtagcctgttttgctacaattctcgacccagactggggtcccaaggcatcatagcccacagcttcttagcaagtgcatgttcagttggatcccccagctcagcctgggtcatccccaccttttgcctcttgggccatagctcagctctgcacactgagccatcatcctatggtgagcaagaccccattcttgggcttcagtctctttccttgcagcaggcaatcaaggtggtggctggaaagggccaaggagccacatctcacagtgccctgctgcctgaacaaggaccagaggcctgtggaacacatggctctcagatttctcccatttgatgactcatcagctgcccccacatggcttcctagctcacagcagatctagccttctctgagcagtgaagatgggatgttttgtggtcattttccctggtgcgcagagcccaagtggagttcttcagcaccctacaccatcccctcactaacacccccacctgtccagtcttacctgccttcatatcaaaagcacacagttaacccagagggcttctgccctgccctgcctgactttctgggaaacccccctctccacccaccctaatcaggacactgtctgaaggttccccctcatcattttaaaagaaagaaatttttctgccacagaggttctggtgaagtggcctgctcccacatcacagggtgatggcggtttgggctggaccaggatcagacagtgctgtcctgaggctggccgtctgataaggggctacagaaagggcagtggtggagccctgggaggctttctgctctcctgatcgcaggtttttggtgagaggacctattggccactagggtgtctgcgtgcgtgcgtgcgtgtgtgtgtgtgtgtgtgtgtgtgtgtgagatgtgtgtttacttggattgacttctttcagcatgaagcccactgttttgctgaatgtatctcactgtttcctgaaactcagtacattcagctggcttaagggtcctggggcctcgctgtgtcatatttgcacaagcctagtgtctgtgcagactgtacactggagttcagttgtaagacccttttgatcccttattctgttcctgtagtagaaaaggcatttcactcaatggaatagaaacccagatccaatggagagatgttctaatctgccatacactggggcagtggccagtgatttggactttgtggcacagatggaaatttccaggttctctaggtggtaggcagaggcctcactttttaagaaactcccccactccacccctgccaatgaggacgttgcttagaggtatttctatcagtgttgagtagaagagatcatttcttgatgttgaatttcaggtaaggatgccagcttctgcgtatcagggtggtgatgcttgggctgagacaggtctagacagcactgtctgaaagggggctcaaggaagtagctgtgaaaggcccctgggatgttttctgctccccttcctgcaaatcccctggagggagatcctgttagtcactacgggatgtgtgtgtgtgtgtgtgtgtgtgtgtgtgtgtgtgtgtgttcatcacttgttgcttgggggtgggaagagacaacaacaacctacagaatccagagttctcagttcatctcccatcctagtccaatcatggcctaacatccttagctaccgatcgcagaggagactgtgcatttgtgttcatgtggccttggatgttggcagattcagattggtgccccaggcatctgtgcctgtaactgcagtttcagcgggctcaggaccaggctaaagggcctccaagcttcctccagtttcctggtgcatgcatgtgcaatatgctcccctggcctgggtctttcctgccgcttcttgccagttgggtcagaactagcttattaaccagttttttctgagctttaatcgaactggctccaaccagttggagacttgaaaagggctacgtgatagttatagatttttaaagatatattattattttagagtagtattgagtgtacagcaaaatggagtacagggtccagagatctcatatggcctcaattcctgtatactctcgggtcactccaccaacaacctcctacaccagagccactttgaaacattagaaaatatatttgagcattcagaaatgtataaactaggcagccccagactgcaagcagctcagaggtcccacagagaggcttagggagggtgggggaagaattttatatggtgaatgtggaagaaaaagaaaatacttgattgggtgaagtggagcagtggcctcatttggaacattacagtggaaggtctctagttagatgttagttggtggtttctgactggttaaacttaagtttccttttattatttacactgagtcaagttttgggttatttaaggaggaattgagtgcactgcagccacctcagcctcatggccacctgtttatttgattatttttaacagagaagatcctttaaaaaatatctgttaccctggctggagtgcagtgacgtgatcacggctcactgcagccacaaccttccagctcaggtgatcctcccacctcagtgctccccaccctgagtagctgggactacaggcatgtgccaccacaccaccatgctaggctaatggtttgtatttgtttgagagatgcagtttccctaagttgcttaggcttcttttttagactcaaataatctgcatgcattggcctcccttagtgctggaattacaggccatctaaatcttttatctcaggtttgccttgtgacaaaaggaggggtactttttctgacatgaggcagagaaaggtgaggtgggcgcatcctgtgcatatgattttctcaggtgatgggaatatggttggctcttgactaatgggatatattttctctttgaatgatttggcaagatatcagatgagagaagttgaatgaatgttagaagaacatagaaaaaataggttatacacgttgggtttctgaagaaatgatgtctttggagaaacaaaacttttattgatttctggaaacatttagggccaattttttatgtaagtaatttgaatttatgatgatatctctgaccactttttgatattttttctggttcaggtgagtggtgtcattgagcaaacacaaagtcgggctcatccaaggatgagattttgccagagaaaggacgagcagcaagtcagggagcttaaggtaattatgggaatgtgactatctgcaattgcttaggtagaaggagacagattggatttttgtgtgtttggtatttgggataagagggatgtgggtgtgtacttgacatgggttgtttattctctgtctctctctttttctctctttttttttttttttttttttttttgagagggagtctcactctgtcgcccatgctggagttctgtggcacagtcttggctcactgcaacctctgcctcccaggttcaagggattctcctgcctcagcctcccgagtagctgggattacaggtgcctgccaccacgcccggctaatttttgtgattttttttttagtagagacgaggttttactacgtaggcgaagttggtctcgaactcctgacctcagatgatccacccgcctcagcctcccaaagtgctgggattacaggcgtgagccaccgcacctggcctgtttattctcttaagagagaaaatgaggggattagtggactgtagttctggacaaggtggaaaactcttaaagtggaagtattggggcaagtgctctgacaggctaggatggtgcagtcagtcccttcacccagaaatcagtagaatgttaacagttcagactcaaaccttgtgaaaaacaggttctagaaaggaaatccctcacagcaactggcaccataatcaagacagaatttttgcagaataaatagagttacctgctttcagccccaggtcgtagctattgtctgccctgctgatatgtgataataatttgtgatcctgttgtcttaaaatggggtcactcatctccagtagaattaagtccacagtgaagttgtccccccatccccagagataaacatatatgaatgaacttacgtgataacaactactgctgcctgggatcatgagagacctgaactgaactgataggaagtgaaaggtggctgaggtaatgagaatagacccatctgcagaggatcataaaaccagcaaagacaagatcttgtctaagatgccttcacaaactttgtccatgagaactgtaaggtcttctccagacctgttggctgctgctgtgatctctgcccaagaggagcttctgaccaacatccaaagggcttctggacccactggactcctctggaggtaccttggtctcccgatccatggctgtgtttttttactccctttatcgctgcctgtgtgtagaatgataattgcacaattgatagtgtgaagacctcttgataaatggtaaatctgagcatatgtatttggctgacatgtcattgtgaaacctcacagcttcagtcagtgtcagcacagctagggagcatgtacctaatgcacatatcactgggcatagtctacaggcacctaataacccaggtaccttaacagtcactaatgcgtgtctctccaaggtctaaacaatggaagactgtagaagatgttattcattaagatatctcaagaatgtggaagactattattcgcttctaaagggacaggacttcatagggcacctgaagaaactcccatgaaaaatcacttttacaaaatgtcaagttatgatatccaagatgaaaccaatgagtcacaacattcacataatacactgtacaaccctgatctcttgactgtcatcaaatgtttcttacctctaaaccaaagtttcattttataatttaatttttctcattttttctgttctcttagcttaagaaaagatcattacagactttttgtaagtttttcatatatgcttgcaaagggttgtaaaactttattgtgattattcttgctttaagctgaaacttccctaatctttctttagagattgtggcatagcatgttagtttcttttccatatccaattgttttctgtaatgaatacagaaatatgggcactattttgtaactttaaatagacatcatctcaagtctacaagaattatccaaaatggtatttaatgacatttctaggtcttcagacactattaatgcagattgtagcctctaggtcctgaagattttactagatactggttactgaaactgagctttcttgaattatttttccttccactgtggtttcccgcatttcaacacatcacctatttttgtcctcaaacattacttaaattttttccacagaattaaattaaatatgaatcatccctcctctgatttttgaaatgaccctttgcttcctatgataatgattcttctggtccattttgtagttatatgttagagtttgtaaatagtcacacattttgcaactgcatataattttcttattattttttcctcttcctctaaacctgctgttatttcttttaactttttgtgggaaaaattaaacccatctttcactttgttgatatacttatttataattgaactccttgatttttgctcaaattgcttttcaagttacccacttttagggaagacattatttgggttttgtttagtgtatcaggctttttttagttagttgtatcaagaagtgtagacttttctatacataatatcctttttcccacagtagttttttttttttttttttttttttttaaagtctggccgggtgcagtggctcacgcctgtaatcccagactgtgggaggccgaggcgggcagatcacgaagtcaagagacggagaccatcctgcctaacacgttgaaaccccgtctctactaaaaatacaaaaaattagctggacatggtaacgggtgcctgtagtcccagctaatcaggaggctgaggcaggagaatggcatgaacccaggaggcagaggttgcagtgagccgagatcgtgccactgcactccagcctgggtgacagagcaagactccatctcaaaaagaaaaaaaaagtctgttaaaataaaggtcatcaaaagatcttttcctaaacctttcctttaccagaaatatctctagagtcacatggtcctttctcccttcttgcttttgtaggagtccaaagctaatctgtccctgatccagattgcaggcacctgtgccttttggggcccttctgcattagttcttccttctcttctaacctcaaaaatgtgttttctctgttggctctttccctttaacatagaagtatactcacgcttttgttgaatcttggaataaaagtcttcctttaccacatatctccctttaatactacatctctcttctcagccaaatacttgggaagagaagccctgagtttgtgtcattgttttctcacctccagttcactactttacccactgcctgacatccagctcgctcacacacacacacacaagcccaatcactaagttgccatagctaatttgtggctttcctgccctcctggcaaaatttgactctgcattgggataatacatgttgagtacctattgaacaggcactgtgctaggtgctgctgttatagatatgaaaagaaggcatcatctcctttctaacaactcacaggagcagccattcctgattcatatgcaggtctcttgagtctcagtgctcacttttgcaagcttcacttaatgccgtgcaaatcaccctattctccaggtcttctttcttcccagttctccttactatacacagcttctcagggcagtcacctccacacccatggcttcaattgctttctccattctctgagaacaacagaattttaaatggcttttttttttcatgtattagctttattttatacaaggtgcctcaattgctgtaaccatagattcaaagttgctccatgaaactaataaatgaaaaatggtgattttttagcatgtaaattttaggaaatttccccagttacgcttaatggcttgatttagtatgtatgttatttttgaaaacatatgttgggatgtcacaaatggacttagcctacagagatttatattcaacttttgaccagagagttccattttaatgtgacactgagagtaaaaaactgtcttttcctccttacctatttctcttcctacattcttggccaggaggaaggcactgctacatacccagtcttccccagcagagcctgagcagctctgttttccttctacttcccctcttctttcacatctcatgaccaagcacttcctattctgtctcccaaatgatcacagactttttcctccgcttttgtcactgccactgcccttagcattactctgcctttagagaaagtctcttaatttgtttggttgcttccttcagtccttattatacagaccactacacacacatctgacagagacttttcaccttttcatggttcaatgactgaaattcccagaataaaattaaaaccaccccagcatcaaatttgaggtcaaatagaggtgggtttgtatcccaggttcatatactgtccagcagtatggtctcagaaaactgacctccttaaggctttgtttgtgtatctgcctacactcattgagagttgggactatttcacacatacagtgcctggcatgtagaagggacttaatcaatgttgaaagaaggggaggcattttaaaatccacatcaaaaaaatgttgttctgttcgggagtggtggctcacgcctgcaatcccagcactttgggaggccaaggcaggtggatcacctgaggtcaggagttcgagatcaacctgagcaacatggtgaaaccccatctctactaaaatacaaacattagctgagcatggggttgggctcctgtaatcccagctacttgggaggcttaggcacttgaatgagaatcacctggacccaggaggtggaggttgcagtgagcaacgattgtgccactgcctgggcaacagagtgagactctgtctcaaaaaaaataaaaaaaaaattcttttaaaaatatacgaatctggctgggcacggtggctcatgcctgtagtcctagcactttgggaggctgaggcgggcctgaccaacgtgcagaaaccccgtctctactaaaaatacaaaattagctgggcatggtggcgcatgcctgcaatcccaactacttgggaggctgaggcaggagaatcgcttgagcccaggaggcggaggttgcagtgagccaagatcatgccattgcactcctgcctgggcaacaagagagaaactccgtctcaaaaaaaaaaaaaatagtgttcagcaaggttgaagcataaaaggttaatagccagaatcatttatcaattgtatttctatacatctacaagacacaatctgaaaatgaaattagagaaacaatttcactgggcaacaagagcaaaacttcatctcaaaataataataataataataataataatcatcatcatcatcatctacaatgtcatttcccatccaagcttgacttctacctttactttctgatatggttttgccatgcccccacccaaatctcatcatgaattataatccccataatcctgatgtgtcgagggaggggcctagggggaggtgattggatcacgggggcagttatcctcatgctgttcttgtgatattcagtaagtcctcatgagatcttatagggttttgttttgttttgttttttgggatggagtcttgctctgttgtccaggcaggagtgccatggcacgatcttggctcactgcagtctctgcctcttgagttccagtgattctcctgcctcagcctcctgagtagctgggattacaggcatgcacaaccacacccagctaatttttgtatttttagtagagacaggatttcactacattagctaggctggtctcaaactcctgacctcagttgatccacctgccttggcctcccaaagtactagggttacaagtgtgagccaccgtgcccagctgagatctgatggttttatacatgtttgacagttgctccttcacatgttcccactctctgtgcggccaccatggaagtcggacctgcccttctgccatgattgtaagtttcctgaaggacttccccctctgccatgattctaagtttcctgaggcctccccagccatgtgaaactgagtcagttaaacctctttcctttaaaaattacccaacctgaggtatttctttatatcagtgtgaaaacagactgctatactttctgataatcatgcttaagcaactggggaattcagactagctgggatcaaactatggccccacccttagcagtcatgtgaccttggggaggttgcttaccttctccgtctcaacaacttctgcaaaatctgtaacatgagattgtttctgagggttaaatgagcatagcacagtggggacactgtcaggcacacactacttgccagatgtcgagtattcatctttattgaaataggactgtggtaagccactttatggctctcgattttgtatgagaaaatcatgcttagtgccttgttagtaaaagaaagaaaacctgaaagtccctgccacggaaggaagaaatagcggggagaaaagggagttggtaagtttcagcatttcagagcttggaggggcaagttaggtttctattttatggagaaggaggtggaggcaggatgggtcctaaggtgtcattcaaaacacacagccataactctttattgagagtagagctagggccccagggattgctgtggtcaagttgcggacaaaaatgaccactcgttggaagacaggagaggagtgtttagttacaaaagcagtcaacaattcaggtgtatctatatttagtcagcaaataaaagttgttcaacttggttgctaattggacccactctactgaggctttgtatagaactcatagaggaagatggcttcaagtaatgaactaccctttgcttttcttaggac

SEQ ID NO: 2461 - DNA, 209 bp, Homo sapiens
aaagaatgtgctggagtaagaactgatctgcggctctgtttagttagtgagctagtatgagtaaatatactatccaaacaacagaaaatgtattttttttttttttttttttgagggactctctttctgtagcccaggctggagggcaatcgtgcgatctgggctcactgcaggctctgcctcccaggtccctgttcaagcaattcttc

SEQ ID NO: 2462 - DNA, 474 bp, Homo sapiens
ccaataggcaggttgtaatcggtgcctgtcagtgtgatatttgacagactctggccttgcaggtgaggttcagctttcgttcataggcccggtttctattacccatatggccaagatgcagccattttagacaatttttttttcttcagactttccttattttctgacacctatcaagaaagtaaatttgaccaggcacggtggctcacgcctgtaatcccaacactttgggaggctgaggtgggtggatcacctgaggtcagaagtttaggaccagcctggccaacatggtggaaccccatctctattaaaaatacaaaaattagccaggcatggtggtgcacgcctgtgatcccagctactagggaggctggggcaggagaatcgcttgaacctgagagatggattttgcagtgagctgaggttgtgccagtgcactccagcctgggcaacagagtgagactccatctcaaa

SEQ ID NO: 2463 - DNA, 357 bp, Homo sapiens
ggacaagttcagcaatcagtaaatattaatcagtgagtgaatgaattccgtttaacacccctatgaagttggtactgtcatttcctccagttcacaaagaataaagggaaacacagagaggctgcgtgacttgctggtcacacagccgtgagtgacggagccggatttgacccaacccagagcagggctccgcacgtggtgggggcttaagaagctcagtctggcgggttcacacaccaggcctcaggcctctctctgctccaaaattccgctgagtccaagaggtgggatgatccagggcacagcctctgctcagagttgctgcagaaacactgggctcagcaccttgagcctgaa

SEQ ID NO: 2464 - DNA, 355 bp, Homo sapiens
  SITE (249): n equals a,t,g, or c
ggacaagttcagcaatcagtaaatattaatcagtgagtgaatgaattccgtttaacacccctatgaagttggtactgtcatttcctccagttcacaaagaataaagggaaacacagagaggctgcgtgacttgctggtcacacagccgtgagtgacggagccggatttgacccaacccagagcagggcccgcacgtggtgggggcttaagaagctcagtctggcgggttcacacaccaggcctcagcanctctctgctccaaaattccgctgagtccaagaggtgggatgatccagggcacagcctctgctcagagttgctgcagaaacactgggctcagcaccttgagcctgaa

SEQ ID NO: 2465 - DNA, 357 bp, Homo sapiens; identical to SEQ ID NO: 2463

SEQ ID NO: 2466 - DNA, 327 bp, Homo sapiens
gaaacgtcatttttatttctctcccttccctctctccattggttttctcttggaagtcccaggcacctatgtctctgacaccaactgttctcttatggccattagtgggtttcaaacagctcatttgatcccttcttataaacctggagtgagcgtaaggacctcagcatgctgcagaatgagagtttgaggcagggtgtgctgtggcttgtactgatgagggacgtgccaatattcttactcttcatttccgataccctgaaagtcttttccgcttctcattttattttgcagtgtagacgttgacctgtgtatctacagccttca

SEQ ID NO: 2467 - DNA, 327 bp, Homo sapiens; identical to SEQ ID NO: 2466

SEQ ID NO: 2468 - DNA, 327 bp, Homo sapiens; identical to SEQ ID NO: 2466

SEQ ID NO: 2469 - DNA, 606 bp, Homo sapiens
atttaaccaaaacaaggacgcctttctctcattactcttctaccaccttcccatgttcctcacaacccgtgagtcagggtcggctcagctctatgcactttaactatgagagacaggagcccgcctcccctcctgaggtgctgtagctggaaattgcttgtgcaacccgatgacaacttttctatatttagcagaaaaagtggtggcaaggatctgtccagctcaattttttttacagtttcaatgttcgaaatctctcagacaatctcctgaaaggcacattggccttgacagtatctgagcggaaggaaattttccccatctcacagggctgtccactggaagccgggacgtggagatccactgtagagcagagacttgacatgccaaacgctcctcccacaccttgctctacaccccacgaaacggggagacactggtcccgttgaagcttcgatggcttttaagtgttattctaagaagggaaaataagcatgaaagattcaagggggaaatggactatctcttaattgtttatgcctttaattgacatgtatggcacttggtttttatttcttttcaatgtggcatgcaaaaaaaaaaaaa

SEQ ID NO: 2470 - DNA, 606 bp, Homo sapiens; identical to SEQ ID NO: 2469

SEQ ID NO: 2471 - DNA, 361 bp, Homo sapiens
ggggaagggcgccaacaaatgctgagcacttagtagtgccatgtactttactcctcacatgaatcctagtgatgctgcgagaggaatattattttacccacatcttctatatgaggactctcaggctcagagaagttaagtaattaactccaaatcaaacaaagggtaagtgataaagctgggatgccaacccatgcctgtttggctccatatctcacagtctccctccacgatacaacagtgttttccaaagcaatgataggggagaaactctgagcacagactcctggggtagggctccttctacccttttcttgcaaattattgatgctttatgacattgtaagcaaataccatcatc

SEQ ID NO: 2472 - DNA, 361 bp, Homo sapiens; identical to SEQ ID NO: 2471

SEQ ID NO: 2473 - DNA, 304 bp, Homo sapiens
ggggtatcacatttgaggaagacactttggaaaaaagtctaacaaacaacagaagaaccagaagacagaagaaataaagtgagcaatgaactcaaactgtggtgtgtgttctttccccgcttgtccccttctcttcctcagcagattttaccattgtggaaaagtgttcatttcattgactgacaccccaggcggaaaaggaaaaggaaaaggaaaaaaatctcaaattgattgttttaacctcaaatgatcataagaatgtggaacatttcttaggaaatcagagttttgtattataatttat

SEQ ID NO: 2474 - DNA, 304 bp, Homo sapiens; identical to SEQ ID NO: 2473

SEQ ID NO: 2475 - DNA, 1254 bp, Homo sapiens
accttgtacacttctgtgaatgtttttttaaaagcatttttccttttattttttataaattacataaggggatactgggaagatggtgactggaatattttttggtatacttccacacccagttccagtctaggtgcttttcttaaacccaattcagaaaacaagagtataggtaagctgtgaagccctggggctgggagggcagaggagaaccagaaagccacggatccaggggagactttggccgtctcagggagaaagtacaggctcagcacaagtatactcagtctccttggcctccaaaaagtcaagaaggagtttaatgggttcgctgagtcttccctgctgttgaggctgggagatctttgagaggccagataacaggggtggcttccttcagttgctgcaaaagggcaatggctttctgcctgctcctccacttgccaccttgacatgatctttgccttgcatcctgcaagaccactgccatacagagttctctagcaaccagaagtgaaccaactgagccaaaaggaaaaataacatcctatttaaatagggtcaggagccagaggagctgacccagcagaacaatcactgaaatagaacttctgggagaagaaaaaggaaaccttgaattcaaaaataataagagcacccaaagaaataaaagtgttgcacaaaagaggctctctggagctaagaaaaaattccaaataaataatttagtagaggaactgggggaggagatgctatgctcactgttgaaatctgaaatagttgtctagaaatcaggaccaagacatttcttgaagtacagagtaaaaatataaaaagatggaaatctgggggagatacttaggaaatatgtccaggaggcctaacatgtgagtaatagtagttccagaagaagaaaaaaggaagccaataataaatagtcaagacagtttccataagacgaagaaaaaggctgggagtggtggctcatgcctataatcccagcacattgggaggccaaggcaggcatatggcttgagcccaggagttcaagaccagcctaggcaacatagtgagaagctgtctctacaaaacatacaaaaattaaccaggcatcatggtgcacacctgtagtcccaactattcaggaggctgaggcaggaggattgcttgagccctggaaatggaggttgcagtgagctgagatttggccattgcattgcagcctggacgacagagagagaccttgtctcaaaa

SEQ ID NO: 2476 - DNA, 1253 bp, Homo sapiens
accttgtacacttctgtgaatgtttttttaaaagcatttttccttttattttttataaattacataaggggatactgggaagatggtgactggaatattttttggtatacttccacacccagttccagtctaggtgcttttcttaaacccaattcagaaaacaagagtataggtaagctgtgaagccctggggctgggagggcagaggagaaccagaaagccacggatccaggggagactttggccgtctcagggagaaagtacaggctcagcacaagtatactcagtctccttggcctccaaaaagtcaagaaggagtttaatgggttcgctgagtcttccctgctgttgaggctgggagatctttgagaggccagataacagggtggcttccttcagttgctgcaaaagggcaatggctttctgcctgctcctccacttgccaccttgacatgatctttgccttgcatcctgcaagaccactgccatacagagttctctagcaaccagaagtgaaccaactgagccaaaaggaaaaataacatcctatttaaatagggtcaggagccagaggagctgacccagcagaacaatcactgaaatagaacttctgggagaagaaaaaggaaaccttgaattcaaaaataataagagcacccaaagaaataaaagtgttgcacaaaagaggctctctggagctaagaaaaaattccaaataaataatttagtagaggaactgggggaggagatgctatgctcactgttgaaatctgaaatagttgtctagaaatcaggaccaagacatttcttgaagtacagagtaaaaatataaaaagatggaaatctgggggagatacttaggaaatatgtccaggaggcctaacatgtgagtaatagtagttccagaagaagaaaaaaggaagccaataataaatagtcaagacagtttccataagacgaagaaaaaggctgggagtggtggctcatgcctataatcccagcacattgggaggccaaggcaggcatatggcttgagcccaggagttcaagaccagcctaggcaacatagtgagaagctgtctctacaaaacatacaaaaattaaccaggcatcatggtgcacacctgtagtcccaactattcaggaggctgaggcaggaggattgcttgagccctggaaatggaggttgcagtgagctgagatttggccattgcattgcagcctggacgacagagagagaccttgtctcaaaa

SEQ ID NO: 2477 - DNA, 299 bp, Homo sapiens
aaagagcaagatctaaccacatactgtctgtaagaaacccacttttaaagatacagatatgttggaaaaaaagatagatggaaaaagtaatattagcagtaatcaaaaggaaaccaaaatgactatattaatatcaaccaagtaggtatcagagtgtttcacccaccaacagagtagacattcttttcagctatacacggaatatcaccaagacatgctatatttaatgtcataaaatcaatctcaatattaattttaaaaggttaaactcatataaaatgttattttactatactaaa

SEQ ID NO: 2478 - DNA, 299 bp, Homo sapiens; identical to SEQ ID NO: 2477

SEQ ID NO: 2479 - DNA, 183 bp, Homo sapiens
cctgtaatcccagcactttgggaggccaaggcgggcagatcacgaggtcaggagatcgagaccatcctagctaacatggtgaaacctcgtctctactgaaaaatacaaaaaattagctgggcgtggtggcaggcgcctgtagtcccagctacttgggaggccgaggcaggagaatggcttgaa

SEQ ID NO: 2480 - DNA, 105 bp, Homo sapiens
atcccagcactttgggagccaaggcgggcagatcacgaggtcaggagatcgagaccatcctagctaacatggtgaaacctcgtctctactgaaaaatacaaaaaa

SEQ ID NO: 2481 - DNA, 285 bp, Homo sapiens
aaggcacagcccctgttgaacaatgctcccctgctgttacattctttccagattctgggaactccttccaggttacctaggaaacataggtaatggcttccgactgttgctagttcctgggcatctcatcatcctttactaatttcccttaatcccacgcatctttgtagatagtcaatttcttgacctcagctcagttttccctctcacaggtaccactagtctcccactgaaccctgactggtgctgttgtttctagttcagatgtccaggttccacatgaaa

SEQ ID NO: 2482 - DNA, 285 bp, Homo sapiens; identical to SEQ ID NO: 2481

SEQ ID NO: 2483 - DNA, 285 bp, Homo sapiens; identical to SEQ ID NO: 2481

SEQ ID NO: 2484 - DNA, 129 bp, Homo sapiens
tttttgtatttttagtagagatggggtttcaccatgttagccaggatggtctcgatctcctgacctcatgatccgcctgcctcggcctcccaaagtgctgggattacaggcgtgagccactgcgcccgg

SEQ ID NO: 2485 - DNA, 185 bp, Homo sapiens
tttttttttttttagacagagtcttgctctgtctcccaggctggagtgcagtggcacaatctcagctcactgcaacctctgcctcccaggttcaagcgattctcctgcctcagcctcctgaatagctgggattacaggcacctgccaccaggctcagctaatttttgtattttcagtagagatgg

SEQ ID NO: 2486 - DNA, 129 bp, Homo sapiens
tttttgtatttttagtagagatggggtttcaccatgttagccaggatggtctcgatctcctgacctcatgatccgcctgcctcggcctcccaaagtgctgggattacaggcgtgagccaccgcgcccgg

SEQ ID NO: 2487 - DNA, 129 bp, Homo sapiens; identical to SEQ ID NO: 2486

SEQ ID NO: 2488 - DNA, 185 bp, Homo sapiens; identical to SEQ ID NO: 2485

SEQ ID NO: 2489 - DNA, 270 bp, Homo sapiens
taaaaatcttccctccgctcccctcctctccttccatgtttttattgagaagaaaaataagaaaaaaagtgctgggttggggccaggcgtggtggctcatgcctataatgccaacacgttgggaggccgaggcagccggatcacaaggtcaggggttcaaaaccagccagcctggccaacattgtgaaacccaatctctactaaaaatacaaaaattagccaggtgaggtggcacatgcctgtaatcctagctactggggaggctgaggg

SEQ ID NO: 2490 - DNA, 270 bp, Homo sapiens; identical to SEQ ID NO: 2489

SEQ ID NO: 2491 - DNA, 540 bp, Homo sapiens
ccgctaactgacagactacctcttcaagtgggtccctgacccccgtgcctcctgactgggagacacttcccagcaggggtcgacagacacctcacacaggagaactccagctggcatctagtgggtgctactctgggacaaagattccagaggaaggaataggcagcagtctttgctgttcttcagcctttgctggtgatacccaggcaaacagggtctggagtggacctccagcaaactccagcagacctgcagcaaaggggcctgactgttacaaggataactagcaaacagaaaggaatagcatcaacatcaacaaaaaggaaatccattcagagaccccatctgaaggtcaccaacacaaagaccaaaggtagataaatcaatgaagatgaggaaaaaacagtgcaaaacggctgaaaattccaaaacccagaatgcctcttctcctccaagtgatcacaactccttgccagcaaaggaacaaaactggacagagaatgagtttaacgaattgacagaagtaggcttcagaaagtg

SEQ ID NO: 2492 - DNA, 273 bp, Homo sapiens
gattttttaaaatgtattttgcatgttatgattttctggtggctatacagaaatcttcctgctttttttcccctattcacagtattcaaagtagtccatgtgacctagatattgaaaatctaggtagagtgtgctgcattgctgatatttactgtgaaaccttagaaacattctggtaccacatgctggaattacagggtgcacactgtttaatattgctggtatttttgtgacagtctatatgatcatttttctaagctggcattaaaattg

SEQ ID NO: 2493 - DNA, 273 bp, Homo sapiens; identical to SEQ ID NO: 2492

SEQ ID NO: 2494 - DNA, 540 bp, Homo sapiens; identical to SEQ ID NO: 2491

SEQ ID NO: 2495 - DNA, 301 bp, Homo sapiens
caccctgggctcagaaatcagtcatggcacccggcacctgcgtgccctcaccaaattcaacctgtcctccccagctccattgtcagccactctccctcccactgccctgaagatggaaatgtacccaaccttcaagcccctgtcggtccagctcgcgaagtttccggctgaagattcattatcagatggatgagatgttcatctccacttacacagcctacggcttgtgtgtggagaaagatgttgagccaacaaaatgatctgcaacacaaaattctactctcctcttcactctttattg

SEQ ID NO: 2496 - DNA, 422 bp, Homo sapiens
tatttttcaagcgatccctttggaatgaacacttgggtcccctggaagctgaaaagcatagcacaaaactcaacatcacttaacaggctgtttggttctcaatccccaccttcactctcctcccagttgtgtttacctgaagaacaacagagcccaggaggaggcggcagccaaagacctttcttccaggatttttatcaggtcccagaaatgttctagaaaccaaggacacccaaatccatgcaaggaagccaattatgctcaaggaaaaccagaacaagacagggaccctgctctacaggccattagcaggtcacagcaaatatcaagacaatagcatgaagtgattcaagaatttcaactggccttccctgcaagcccttaacagggaaacccaatatagggaccaccagagctctgcc

SEQ ID NO: 2497 - DNA, 362 bp, Homo sapiens
ggctagaagaagaaatgggatatcccaaaattgcaacaggataagcaacccttttaaaaaaaattgatggttagatttttgtcagatgccacccatttatctaaaacttcaattttaagtcagagaattatcaattaataaaaattgatttatatttactaggtataaggcaccacacaggatgctgttggggaattgtaggtaaatgagatatggatattttttcagttactacagcagaggacctcagtgtccagcgtgaagtgaccagagacagagtggaatgggaggaggtcacagcagtggccaggaccagattacaggggccttggaggccacagggaggaatttggatttgattc

SEQ ID NO: 2498 - DNA, 203 bp, Homo sapiens
aagaatctcaaaacatgaagacaggtcttttaaaataattttaaaataagacaaaaataattaaaaagaatgaataaagcctttgagatgtctgggactacataaaatgagcaaatttatgaatgatcagtactcccaagggtgaggaggtatcaaaaagtatagaaaatctgtttaagaaaataattgatgacaacttccca

SEQ ID NO: 2499 - DNA, 203 bp, Homo sapiens; identical to SEQ ID NO: 2498

SEQ ID NO: 2500 - DNA, 364 bp, Homo sapiens
aaagcaacagtggaaagcagtaagaactaattacagatatcagctgctacctactgtatgtggaacagatttcaaatttcaagaccaagcaagataattgtctacttgaactaaaaaaataaaaataaaaatttaatgctcaaaagaacgaaacagagtaactgcaatgtattatctacactattgagttttcaaaaattactagacagaaaagtatgacctatacttgtgggggaggtgctgagggaggaagccattagaaactgactttaaatggatcgatctgttagatttagcagacagagacttcaagtcagctattatatatatgttcaaggaattaaaatctgtttttaaattaaag

SEQ ID NO: 2501 - DNA, 504 bp, Homo sapiens
aagtagtataaatcattctactatcaagacacatgtccatgtatgttcatcacagcactattcacaataacaaggagataggatcagcctagatgcccatcagcagcagactggataaagaaaatgtggtacgtgtacaccatggaatactacacagccataaaaagaatgaaatcatgtcctttgcagcaatatggatgcagttggaggccattatcctaagcaaattaactcaggaacggaaaaccaaataccgcatgtcctcacttacaagtgggagctaatcattgagtacaaatggacgctaaagggaacgatatacactggccctactggaaggtaggggatgggaagaaggtgagtactgaaaaactacctatcaggtactatgctcattacctaggtggcaaaattatcggtataccaaacccccgatacacaatttacccatgtagcaaacctggccatggaccccctgaattaaaaataaagggtggaagggag

SEQ ID NO: 2502 - DNA, 166 bp, Homo sapiens
cagcaataggaaatttaaagaagaaatactggcagcaagagaaacacacagaaaaagtgagagccaaattctgagtgtaaattcttaccaaattcatgcctgacaactaaattatgcatatggaagtgggggagggaccccagagaggccagtgaagaagcaggca

SEQ ID NO: 2503 - DNA, 411 bp, Homo sapiens
ccgtcatttgattgcggaacacatatcgagctggcgcacagcctggggttaaaaacgatcgctgaaggcgtcgaaactgaggagcaggttaactggctgcgcaaacgcggcgtgcgctattgccagggatggttctttgcgaaggcgatgccgccgcaggtgtttatgcaatggatggagcaattacccgcgcgggagttaacgcgcgggcaataaaattacaggcggtggcgataatcgctgggagtgcgatcaaactgccgacggaaaacgcgggagaaggtctgctgcgagacataacccaggtccattgcgatatcaaaaatcggacgctcggtggtgcgcaactcaacggcggccagtaacaggcggcgttggcgaatgtaatcgccaagcgtctgatgcgtcacc

SEQ ID NO: 2504 - DNA, 352 bp, Homo sapiens
agtagtatgtggtgaactataaactgttacaatgggaggagttttttttttaaacctcttaaaagttgatgtatatatatccttaccactaagcatatcttttcaattaggcatgtggcaattcctttcttgatgtttttagggaaaatgagccaaataatattttaaaaaatgtataagccaagctggtttctatcctttcttctattaaactcaggatcacacaagtaggcatgagtgtgcacaatatttatgccttgcattgttctgagaattagtaaaagaatatcttgaaagcatgatataactttgtatttgtatccaaaaatatacaaagttgttgaattaaaaa

SEQ ID NO: 2505 - DNA, 352 bp, Homo sapiens; identical to SEQ ID NO: 2504

SEQ ID NO: 2506 - DNA, 352 bp, Homo sapiens; identical to SEQ ID NO: 2504

SEQ ID NO: 2507 - DNA, 251 bp, Homo sapiens
cgcggtggctcacgcctgtaatcccagcactttgggaggccgaggtgggcagatcacaaggtcaggagatcgagaccgtcctggctaatacggtgaaaccctgtctccactaaaaaaaatacaaaaaattagccgggcgtggtggcgggagcctgtagttcccagctactcgggaggctgaggcaggagaatggtgtgaacccgggaggtggagcttgcagtgagccgagattgtgccactgcgctccagc

SEQ ID NO: 2508 - DNA, 180 bp, Homo sapiens
aaaaaaaatacaaaaaattagccgggcgtggtggcgggagcctgtagttcccagctactcgggaggctgaggcaggagaatggtgtgaacccgggaggtggagcttgcagtgagccgagattgtgcccctgcgctccagcctgggcgaagagtgagactccgtctcaaaaaaaaaaaaaa

SEQ ID NO: 2509 - DNA, 252 bp, Homo sapiens
cgcggtggctcacgcctgtaatcccagcactttgggaggccgaggtgggcagatcacaaggtcaggagatcgagaccgtcctggctaatacggtgaaaccctgtctccactaaaaaaaatacaaaaaattagccgggcgtggtggcgggagcctgtagttcccagctactcgggaggctgaggcaggagaatggtgtgaacccgggaggtggagcttgcagtgagccgagattgtgccactgcgctccagcc

SEQ ID NO: 2510 - DNA, 3705 bp, Homo sapiens
gttcaagcaaataattctattgtgaagatgcttggccgggatctgtgcctcctgccccagactccagccagtactgcccaggggagagtctgagtcgttctcctaatgagagcttcccaggagatctccgcctagcaagtgcaaaaggcattgactggcctgtgggacagttaagaaacggtagcagttactccctttccaccttcacggcccaggagttcgatagcagatgaagacggtgagtcttcttctaaccctatggttctcccaaactttctcctttaacttattttttgccccacctcattctcttcttcagagttctatttttttctctgtgtcttctataactactgtacaccctatcctggtctttttttttgcattctttagaacttgattgccacatctgtaatcccagctactcaggaggtcagggcagggggatcacttgagcccaggattttgaggctgcagtgagctacgatcacaccactgtactccctccagtctgggcaacaaagtgaaaccctgtctcttaaaaaaaaaaagaacttgatggcctttaactaaaacatagacagctttgtaatgctttcccccaagctctctgggcttcctgacgtccttgcccttttgtttgttcttcctttcccaccccacccagactcagtacccaactctacatctgtgtcttttcccctgactactatttttgttcatgggggtcatgtatgactatctttacccttttatcctttctcttcctaagtgtggggggtaaagccagaggaggatttaggttgagcagtggaagaaagattgtgtcaaaaatgagccattaatatttggaaaattgttttaagtttaaaggcctgagaaatgcataaaattgaaatttaattgatataggcaagtggttatgcaaatgatttttgcccatcctcccattttagtcaggcaattttttagaacaactttcaacaactactttcttcagttgtctttgagatttttataaattaaagaaaaagaaacaggaaaaaaaagtgatttggaagctcatttaaagtcactgtggttgaaaaggcaattatgtggctcctggcagttgtaggagagtggctgtccccaaatcgagctaccaaggacagattgccaaagcccaagaagaatcattgtgtaaacattagagctcagctggaccttcagaggcctaagtgagttgtttaccctgtgtaaatcccatgcagtgttacagcttcctgcaaatcactggcataggaaggtctgagtgttgctgccaaggtttgatgtctgctgcttggagctctgaggagcacaattagcatgtggttccaccatgagcagaaaccacaagatttctgcacagctgagcccactctagcattgttttaaagggcctttggagaaatactgaaggccgagcttcaggtgctaggtaatagacaatttgagaaacatttcatttaatgtgtcttaactatattgagcacacttgtcccatttggctggctctagtgtggagaaatgcagacatgctccttacactgttttcccattccttggtatttctaactgcatacccatcatccccagtgttgacttagcctcccaggagaaggcagcaaggaacagcaactattaatagaaggtgtagaggccgggcagtggctcatgcctgtaatctcagctctttgggaggctgatgcgggtggatcacctgcggtcaggagttcgagaccagcttgacaaatatggtgaaaccccatctctactaaaaatacaaaaacaagctgggcgtggtggcaggagcttgtagtcccagctactcgggaggctgtgacaggagaactgcttgaacccgggaggcaaatgttgcagtgagccaagatcgcaccactgcactccagcctgggcaacagagtgagactctgtctcaaaaaaaaaaaaaaaagaaaagatgtagcaagagtgactcaatgttatccattgtccctggagaccagcaagaggaaaactagaaatgtgaggcaactcagaaaacttgcttaaacatcactgagggcgaggggatgcaaaaatcgggcaaaggcttcaggggctggaaattggcctggccagcagtgcagtgcatgccttgagtttcaagacagcatctttctctgcctcttccataataacatggtaatagaatagccagtctttcagctttcccaggattgggcagatgaagctggggtgaaagaacacagtaggcatctctgtcacggggctactagatgacatagggaagtggaatctgaaagaccttaaatccatttctgctttgtctgtctcactctgcagctaagggcaaatcttctcaacctacttgggctttcatttccttgtctgtaaaatgaggtatttagttcctcttggagttttttgcaagggtgaagtgagatgacgttagtaaattaccagccattgttagtcacttaatactgggagctacaattattatttttattcataagctgaggtaaaatatccttccattagatttacaagacaagcatcgaaaattaaaataatggattttacaagccctagaacttgtcctgtgttatagttgttcagatgaatctgtatgacttgtttgtcctgttaaaagttcatgagctgaaatccacatatcagaacctgtggaccctttgggagaaatgaaaacttgttcacagatactctcctgccctgtgttagcctggcgtgggtgagatttctctactgacactgaataagaaacaagtgttttttgttttttttttctttagagacaaagtcttgctctgtcatgtcacccaggctggagtgcagtggtacagtcatagctcactgcagcctcaaactcctagactcaagcaatcctcccacctcagcctcccaagtagctgggactgcaggtgtgtgctgccatgcatggctaattttttaaaaatttttttgtagagatgggatctcgctatgttgcccaggctggtcttgggtttctggcctcaagcaatcttcccgccccagcctcccaaagcactggggttatagatgtgagccaccaggcccgtccaagaaaggagctttaagcacattcagttcttcagacgcctctgttacctgcatcccccaactccaactttcctgcttctccctctccttttcaaagtacatacattgttaaacttcccaagtagtgctgtttttttccgcatcttataagaactatttctcattttcttcttcttactttttttttttcttttcaagacagagtctcactccatcagccaggctggagtacaggggcacaatcttggctcaccccaacctctgcctctggggttcaagcaattcttctgccttagcctcccaagtagctgggactacaggtacatgccaccacgcctggctaatttttgtatttttaatagagacggggtttcaccatgttggtcaggctggtctcaaactcctgacctcaagcgatacacccacctcagcctcccaaagtgctggggttacaggcatgtgccaccacgctcaaccagtatttctcattttcttctaataaaccttctagagttccacattagaaagctctagatagaaacattttttaaagagctcaggcttaaaaaaaaaaaa

SEQ ID NO: 2511 - DNA, 432 bp, Homo sapiens
cttgtctcttctgaaacttaaaatgatttgcatagaaacaaggacttgattaacacgaagtcaccaccatacagtggattctttgacttgtctttgcaggttagttcatgtgctttcctaaagttgtcatgaactttagggaaggaattgggtcttcattccatgtatgtgaattttgaatccagattagcaagatgttagaaatgggaaaggctaactatttcagactaactctttttggtgtagtgctttggagggaccatcatggatgtagtgactagataaagtgcattttcaggacagtcccactttaaaaacctgttcccatcaatgtgcctgtggtctgatttttagttcagaagatacagccacttccacaagggcttcaggtcttgtataggttctgcaagttttagaacccagtgtctagcc

SEQ ID NO: 2512 - DNA, 324 bp, Homo sapiens
atggtgcctggaaatatatagttagggacccagcacggtggctcatgcctgtaatttcagcactttgggaggccgaggtgggcagatcacctgaggtcaagagttcgagaccagcctggccaacatagtgaaaccctgtctttactaaaaatacaaaaaaaaaattagccagtgggcgtgatggcaggcgcctgtaatcccagctacttgggaggctgaggcaagagaatcacttgaatctgggatgcagaggttgcagtgagccgagatcgcaccactgcactccaccatgggcaacagagtgagtctctgtctcaaaaaaaa

SEQ ID NO: 2513 - DNA, 719 bp, Homo sapiens
gttgttttctttgataagcagctatttatgattctggaagattaaggcagataggaaaccccatctgagattttaataaatccctcaaacaataaaccacatcatggacatacagctggaccctgccagagatgacctgcctctcatggccaacaccagccacatacttgtgaagcactatgtactggatttggatgtggattttgaaagtcaagtcattgaggggaccatagtgcttttcctcgaggatggaaacagattcaagaaacagaatagctctattgaggaagcctgccaatcagaatcaaacaaagcctgcaaatttgggatgcctgaaccctgccatattcccgtgacaaatgcaaggaccttctcatctgaaatggaatataatgattttgcaatctgtagtaaaggtgaaaaagatacttctgataaagatggtaaccatgacaaccaggaacatgcttctgggatttctagctcaaagtactgctgtgacacagggaatcatgggagtgaggattttttgctagtgttggactgctgtgatttatctgtgttaaaagtcgaggaggtggatgttgctgctgtgccaggtctggaaaaatttacaaggtctcctgagctcacggttgtttctgaggagttcaggaatcagattgtacgtgaacttgtgactttgcctgcaaatcgttggagggagcagttagactatt

SEQ ID NO: 2514 - DNA, 719 bp, Homo sapiens; identical to SEQ ID NO: 2513

SEQ ID NO: 2515 - DNA, 315 bp, Homo sapiens
agggccaggcgcggtggctcacgcctgtaatcccagcactttgggaggctgaggcgggtggatcacaaggtcaggagatcgagaccatcctggctaacacggtgaaaccctgtctctactaaaaatacaaaaaattagctgggcatggtggtgggcgcctgtagtcccagccattcgggaggctgaggcaggagaatggcgtgaacccgggaggcagagcttgcagtgagccaagatcgtgccactgcactccagcctgggcgacagagtgagactccgtctcaaaaagaaaaaaaaaaaaaagaaattaaagag

SEQ ID NO: 2516 - DNA, 635 bp, Homo sapiens
gcagaccttgctctaacaattgttcagatttttaaaaatctttttcttattgtctttcctccaacagttgttcagatttttttaaatttgagaattttaaaatcaaactttattgattcctccgtattttacctatttgtgctaaagtactgcaaatcaatatggtaattattgcagagcttggatggaggaacgttgacctctgttagctgggtttgggagccttcttttatagcgttgtatttccttaattgaagcagtggtcttcggcaattgcttacatgtctccctcaattcatcccccaaaacaccttgcagctatagttttttaaagcctcactttgactttgagctctaattattcattccttgcctctaatcttaccttctgttctggtctctcaccctgctcagaatgagttcacttcctgtcttatttctgttagagtctgaggcagccattgtgaaattgcagggttggtgcaaacttacctcagtacaaaagcgtagtgatttatttatagaataccttattagatagtttttggagactgtgaaagaatgaaacgggtgttcttattgtatcttcacacttttttgagattattaaagatgggaatttcaatacaatataa

SEQ ID NO: 2517 - DNA, 484 bp, Homo sapiens
gagcaagtaattttagcttttttagagccttgtgggtccatttcaagttagtttagtgcctaatgtgttaatagcacagtctctgcatgaggattgcaatgttaaacatatccttgccctctgcttgacctcacacctgaactcaccttccttaatatctcacccatccatcgcttttgctacagctgagatctctggatcctctcatctttcccagtttttccctcaccggtttgtcacctggcctgcctgcctcctctagtcttggcctctcttgcccacccttcactcaattgccagagttatctttcaagtatctctctgatcagatcacttttctgcttaagtcccttctgtggtttccctttgccatgagattatgcccttctcctctgtgggcaaatgagttctgagccttgcggcccctgcctgtccccaaggctgtttccctttcctccactttcactctgtgcttcataaacac

SEQ ID NO: 2518 - DNA, 796 bp, Homo sapiens
gatggagttgggggcaaaggagggtgcgcaggaagatgggatggggacgccccacttaagttgtgtagatctctcctacacttcttcaagctggcaaagaaagataaatagatatagacaataaatttaaaataaaggcgcctgtatatctgtgccaaagcaaagagaagacttctgaggctgctgataaaggtgtatgagatcctgaggttctacccctcccacccagggaccaccttccccaggcttcccctaccccagatttggggggcagagttggccagtggcagaagaacgctccccttccctccttccctccctgtatctcagcttccccagtcccctcccaccctccctccctcaccgcccctgctgctcctgaaagaaatacatacatacacactatttaaaaacgcatttttaaaagccacgttccgaactgacaatcgctgatctcggctcgcgcagagactgcgggagcgtcggggccgacagagacggattacgtcaagaaatagttcctccacctacctcggtcggcctccccgcccctgcggggctcccgcgcccagctcggccctgggggtccgagaaccctggcttcggggactggcattttcaccccattaaaaaatcctcatggttggggggaggccatctgcttatgggtggacatgggcacaggggcttctcagatgagctaggagccgtcctgagggggtgaccggtgccttgggtccagagttccggacccccaggaaatcgcaggtcgcggggagcagcagagagaaggggg

SEQ ID NO: 2519 - DNA, 2930 bp, Homo sapiens
gggaaagaagggcaggcgtggccgggtctgggaagactcctaccctgctgcctccagagcctgcatctcaacctcagctcctgtctattttccctggccacagactgggactcttcctttctgaccctgaaattgcacccctcctttaaattcactctaccctgcctaagtgcaccatatttctgggggtttcacctgtccctttctccccaccccccagccaacctccatgccccctcttcttcacccaccctgataatttcctacttgactaaagcccccctttactacaccaccatgggacagtctgatgcaaagcagagggctgggcacaaaccctcaattgaaggaggagggtagcaaccaacttattggggggaggaatccaagttgtctgatattcctctgcaatcacactgccccctctggaattcctgcatccgaccccaaagaaattgctttctcctgttcctccgttgcttttttcccgttccaaaaacagcctacaattttatttaatgaaagatacatttatgaacaatcaaatgatcctcataaaaattttattgagggacgtaaaaacaagctacttgcccacgaccgaggtcgctcttttgccttgcccgctctcaccctggctctctgcagacagagcccgggagcgactttttggggggagtgggggtggggaagtgtcgcagagatggagttgggggcaaaggagggtgcgcaggaagatgggatggggacgccccacttaagttgtgtagatctctcctacacttcttcaagctggcaaagaaagataaatagatatagacaataaatttaaaataaaggcgcctgtatatctgtgccaaagcaaagagaagacttctgaggctgctgataaaggtgtatgagatcctgaggttctacccctcccacccagggaccaccttccccaggcttcccctaccccagatttggggggcagagttggccagtggcagaagaacgctccccttccctccttccctccctgtatctcagcttccccagtcccctcccaccctccctccctcaccgcccctgctgctcctgaaagaaatacatacatacacactatttaaaaacgcatttttaaaagccacgttccgaactgacaatcgctgatctcggctcgcgcagagactgcgggagcgtcggggccgacagagacggattacgtcaagaaatagttcctccacctacctcggtcggcctccccgcccctgcggggctcccgcgcccagctcggccctgggggtccgagaaccctggcttcggggactggcattttcaccccattaaaaaatcctcatggttggggggaggccatctgcttatgggtggacatgggcacaggggcttctcagatgagctaggagccgtcctgagggggtgaccggtgccttgggtccagagttccggacccccaggaaatcgcaggtcgcggggagcagcagagagaagggggtgggagagggggaaaagaaggcaaggaaaaaaaagcccctgcgcattgatccgcgccgtatttttgggtaaatacgatcacgtgggggccggggagccaatgagctgtggggaaaaggctggaaaataattacctgacttgattgttctgtgagcagataaaaagtacatatacagttcatacaattaatcttatgtatgtaaaaccccgttacgatgtcggcgacggggcccatcagtaactattacgtggactcgctcatctctcacgacaatgaagacctcctagcgtccaggtttccggccaccggggctcatcccgccgccgccagacccagcggtttggtgccggactgtagcgattttccgtcctgtagcttcgcgcccaagccggcagtgttcagcacgtcgtgggcgcccgtgccctctcagtcgtccgtggtatatcacccgtacggcccccagccccacctcggcgccgacacgcgctacatgcggacttggctcgagccgctgtccggcgccgtctccttccccagcttcccggccgggggccgtcactacgccctcaagccggacgcctaccccgggcgccgcgcggactgcggcccaggggagggccgcagctacccggactacatgtacggctcgcccggggagctgcgcgaccgcgccccgcagacactgccctcgcccgaggcggacgcgctcgccggcagcaagcacaaagaggagaaggccgacctggaccccagtaagttgggagcaattttcctttacaaccggcgcgggaggggaggggaggacgggcgggggcagccgaattacagccctcccgaaccgtgcagggagcgcgggagaggggcgagggggcgaggactcaataaaagcgaattaccttggggagctttcaggggcaggaggtctgagaatggggcccagggagacaggttgggagagggccgaggggagctcctctctcaggagctggctttgatgagagacccctgccccctcctcccagcccaggctttttggctcagtcaccactttcgaagaaaggcggacagggccaggggatggggctgggggcgaagttcagtttatgatttgagatgggacagggaagaggtgaggaggacactgggggcacagaggagatacccccagcgagaatgacccctgcttcccagtcagcgtggaggtcctcaccccactagagattcacaaaacagaaggtccatggacttctcccccaggagcactgggtgaggggtctgaggtatttcgaagcctgagaacttggagagatcaggactttcaaagagaagtggggataaaagtggggtctgagcctccttaaacttgagaaccctcttctgagggtcttggaggggaaggattgagaatggggatcagggatgaggagtggg

SEQ ID NO: 2520 - DNA, 3222 bp, Homo sapiens
  SITE (1480): n equals a,t,g, or c
ttgttctgtgagcagataaaaagtacatatacagttcatacaataatcttatgtatgtaaaaccccgttacgatgtcggcgacggggcccatcagtaactattacgtggactcgctcatctctcacgacaatgaagacctcctagcgtccaggtttccggccaccggggctcatcccgccgccgccagacccagcggtttggtgccggactgtagcgattttccgtcctgtagcttcgcgcccaagccggcagtgttcagcacgtcgtgggcgcccgtgccctctcagtcgtccgtggtatatcacccgtacggcccccagccccacctcggcgccgacacgcgctacatgcggacttggctcgagccgctgtccggcgccgtctccttccccagcttcccggccgggggccgtcactacgccctcaagccggacgcctaccccgggcgccgcgcggactgcggcccaggggagggccgcagctacccggactacatgtacggctcgcccggggagctgcgcgaccgcgccccgcagacactgccctcgcccgaggcggacgcgctcgccggcagcaagcacaaagaggagaaggccgacctggaccccagtaagttgggagcaattttcctttacaaccggcgcgggaggggaggggaggacgggcgggggcagccgaattacagccctcccgaaccgtgcagggagcgcgggagaggggcgagggggcgaggactcaataaaagcgaattaccttggggagctttcaggggcaggaggtctgagaatggggcccagggagacaggttgggagagggccgaggggagctcctctctcaggagctggctttgatgagagacccctgccccctcctcccagcccaggctttttggctcagtcaccactttcgaagaaaggcggacagggccaggggatggggctgggggcgaagttcagtttatgatttgagatgggacagggaagaggtgaggaggacactgggggcacagaggagatacccccagcgagaatgacccctgcttcccagtcagcgtggaggtcctcaccccactagagattcacaaaacagaaggtccatggacttctcccccaggagcactgggtgaggggtctgaggtatttcgaagcctgagaacttggagagatcaggactttcaaagagaagtggggataaaagtggggtctgagcctccttaaacttgagaaccctcttctgagggtcttggaggggaaggattgagaatggggatcagggatgaggagtgggcatctccccagattagagaattctacacacacacacacacacacacacactcactctcactcactcactccaatcagggagacaggcgccttctgaggattgcacaggagggctagggtggggggcaggtgggagctgcagggccagaaaaaggggaaagaaggagaaacagcaggggagggggtgcagancccctgggtgtgaggaagtgtctgggggagtcccaggagggggctgcaggaaatcttttcctccagccccataaggggccagggcctaattatactcctctgaaggcttccctccctgccctcagctactcccataaacctgaaattggaggcttggctcctgcagagcctgtcctggggctggcaggaggggggcactggaggccaaacaggaaaactaagatataggggagcctgtccccaaggccagcggctctctggggagaggagaaagacttttcccgtctcagcatcaccctgagaattcgcctcagcagggttgaactccaagcgggaggatggtgctgcagagggtggtgaggggtttagggattctcagggtcaggaagcagaactgctaaaatttcaggacttggtcgtgggctgggaggatgggagggggcagaggaggagggaggtggggaggagagagaccttgctataaaaataaaaaacaagagagagaagcgtttatgggcctatgaaacggttgggaatttggactttttatgaggatattctcaaattactactcttgaagctgaggaccagactagaggggctttgatagctttggatttcctacagttttaggtgctggaaactgaaaagggggaagctggggaggggacagaatgcaaaacgaggaaggaggaaaattcctaaagcaaaatgtgtccaaattcaggttcagttattgcatttggggagcctggctaagtctaggggtagagtagcagaagtcctgggctggaaaggggctccactgacccctgcttgtgtttggccctccaggcaaccccgtggccaactggattcacgcccgctccacgaggaagaagcgctgcccctacaccaagtaccagacgctggaactggagaaggagtttctcttcaatatgtatttaaccagggaccgtcggtatgaggtggcccgggttctcaatctcaccgagcggcaggtcaaaatctggtttcagaatcgaaggatgaagatgaaaaagatgaataaagagaaaaccgacaaggagcagtcctaaaccctacccagcctgctgcctcagcacagccaagggaaaaacaaaaaccccacaaaataccccaacacaggcgggggagagacgaaaaagaaaaggaaagagcaagatagacaaaagccaatcagcttaaaaagaaaaacaaggaaggggaaaagaaaactcttgcgatttgggagggttcagtgttgagatattggtgttttagagttagttctacccagcgaggaggaggcggggagagaaactgcgttctctttccccagcgcaaccgaaataaatgacacatacaaatgtgatttttttcctcctttcttcagagaagccagtacttgaatcgctatatttctatttttttttccctgtatcgtatttggtccaggtcatccctccccgggcctggggcgctctgcgtgcagattttgtacaaaaaaaaaaaagacacacacacatacatgataatgattcccagcccaggagctgaggggtgagggctggggaccatgccgcgggctaggtcgggcccgtgcaggccggcgccttgggctgtacatagtgttccctctcatccccagggttcgtccccagcgtccgtcctgtaacgtgcttctgtttgttatggtagaacagccctgtgttaatatattgaagtcacttaaccagaaa

SEQ ID NO: 2521 - DNA, 2299 bp, Homo sapiens
gggctgtggctgggcctggccaaggcgggcatggaggccgcgctgctcaacgtgaacctgcggcgcgagcccctggccttctgcctgggcacctcgggcgctaaggccctgatctttggaggagaaatggtggcgggtgaggccaggcgtgggcatcaggtgggcggggacccaggactggcccctgggcgggcggggagatgctgcgccccaggcctcggaaggcggccgccctggacgtgggcatgaggtgcacggtctgggtatgccccgggcagggagttggtgcatcccaggcctcgggagggggcctgtccggcggtgaccatgacccatgtgttggggaccacagcggtggccgaagtgagcgggcatctggggaaaagtttgatcaagttctgctctggagacttggggcccgagggcatcttgccggacacccacctcctggacccgctgctgaaggaggcctctactgcccccttggcacagatccccagcaagggcatggacggtgagtcaagggtgggacccctgctctatcaactggtttcctacccgcccaggccccgcccccaacttccaggccccaccccccaatgctcaggccccacccctaacacctgtatctcctgcagatcgtcttttctacatctacacgtcggggaccaccgggctgcccaaggctgccattgtcgtgcacagcaggtgaggggcccacaggcataatgccctcagccgctgagagtgacccaggctatcttgccagcctgacctgcccctcagctcctgtgggcatctccatgttaccctggggacagagagggcagctggtgtttcctgagcacttgctctgtgtccagaccagggccaagccctccacgtgtaaactcattgcaaccctcataactgcttggggctggacaaaggcatcacacccattttcacacccatcttgggacccggttgccctgtgcccactactctggggcccctctcatccccccacctgttcaccacatccatcccaccagcaaaacccgtcctctccatctgtctacttttttccatgccccccatctggacctgtgccagcccctcctcgggctcctcctgctccccccactctctcctccacccacgatggcccagctcctgtcagcagctacaggaggtttgaaaatcctaaatcagacctcccctgtcccagacctccctgcatctaccgtgaccctcagaataaaaccctctctcgggctaggcgtggtggcttacgcctgtaaccccaacactttgggaggctgaggcaggcgggtcacttgacgtcaggagttcgagaccgtcctggccaacgtggcgaaaccctgtctctactaaaaatacaaaaattagctgggcgtggtggcacatgactgtaatcccagctactcgggaggctgaggcaggagaatcgcttgaacccagaggcggaggttgcagtgagctgagatcccgccactgcactccagcctggatgatacagcaagactccctctcaaaaaaagaaacaaataacaaacaaaaaccctctctcagtttgggtggcttctgccacttccctgatgtcattttcctccccttcaccccgtactcactcctcctcagccccccaaactcttcaaacccatacactccttccggcctcagggccctcacatgtgctgtgcctgggcactcttccatagctcgcccccacagctctttcttgctaggtctcggatcacacttcacctccctagacaggatcccccaacccccctggctgcattaccatcagcccctctatgccccttgaccctattatatccctcgtgacacctaacaccaccaacaattgttggttgcgtgtttccttcctgccagcctgtgaactcatgcgaactgggctggctttgcctgggtccacatgcagcatgcttccccatgcctgtaccctgggggatttaggtcccagcctctgccctcccggctccccctccccctgcaggtactaccgcatggcagccttcggccaccacgcctaccgcatgcaggcggctgacgtgctctatgactgcctgcccctgtaccactcggcaggtactacggcctgggtagggaatggtgggtgggggcgggggaccccttaccaaggccaccctctgcaggaaacatcatcggcgtggggcagtgtctcatctatgggctgacagtcgtcctccgcaagaaattctcggccagccgcttctgggacgactgcatcaagtacaactgcacggtc

SEQ ID NO: 2522 - DNA, 1400 bp, Homo sapiens
gagggtttcagtgctgtaatgtggggcaggatacaggaaatacaggcgggaggtacaggaaacaggtatggagcccggagggaatagcaaggctgactgggaaggattgggtgagaggttgtccagggactgtggcaagttggcagatgcagattggacagatggggcccagagagattcaggccaggtcacacagctgagcaggggttgggggctctgggctgagcatcttggggtataccacaaggtccacagctgtgcttggcttcgcttttgaggagttttggttctgtttggagggtcttgggaaaattactaatctgcatgttgaaatgcaaaagtatatttttattattattattattttttgagacaggatctcactctgttgcccagactggagtgcagtggcgctatcatggctcactgcagctttgacctcctgggctcaagtgatcttccagcattggcctcccaagtagctgggactacaggtgcgcaccaccacgcctggcccacttttgaattttttttgtagagaagaggtttcgccatgttgcccaggctggtctcaaactcctgggttcaagcaatccacccacctcggactcccaaagtgctgggattacaggcatgagccactgtacccagcccaaaattatcttttaaaaaaaattacagagagtagcaaatacacataaaagtggacagaaaagtatagagagttctggtgcacccctcagctggacccagaggctatcagataccctgtcctgcccctccccacctccccacatcctcccctcggtgatggcataaagcatccctcagacggcatcatgtttcctgtgtagctgtttcactataacctttgaaagatgagtacttgttttttcaaattaaagtgaaattcatataaagtagccatattacacgtcgaaaaatttggccaggcacagtggctcacgcctgtaatccctgtacttcgggaggctgagatgggcagatcacttgaggtcaggagtttgagaccagcctggccaacagggtgaaaccctgtctctactaaaaatacagaaatgtagcctggcgtggtggttggtgcctgtaatcccagctactcgggagactgaggcggaagaatcgcttgaacccgggaggcagaggttgcagtgagccaagattgcaccactgcactccagcctgggcgtgacagagtgagactccatctcaaaaaaaataaaaaaaaaaaatttggccgggcatgatgatacacacctgtaatcccagctgcctggaaggctgaggcaggagaatcgcttgaacctgggaagcggaggctgcagtgagctgagatcgggccactgcactccagtctgggtgacagagtgagattccat

SEQ ID NO: 2523 - DNA, 104 bp, Homo sapiens
tttttgtatttttagtagagacggggtttcaccgtgttagccaggatggtctcaatctgctgacctcatgatccacccgcctcggcctcccaaagtgctaggat

SEQ ID NO: 2524 - DNA, 458 bp, Homo sapiens
ggctgtaaccgtttccattgctgtgactcgattcacgaagtcctgtattcagtgctgacaaaatagccgccagcaagcagtcatttactgcaatctcataacaggtagtgaatatgatcaccattcgtgatgtagcgcgtcaggctggcgtctctgtggcaacggtttcccgggtgctcaataacagcacgctggtcagtgccgacacgcgtgaagcagtaatgaaagccgtgagtgagctggattatcggccaaacgccaatgcccaggcgctggcaactcaggttagcgacaccattggcgtggtggtgatggacgtttctgatgcgtttttcggcgcgctggtaaaagcggtggatctggtcgctcagcagcatcagaaatacgtgctaatcggcgatagctatcatgaagcggaaaaagagcgtcacgccattgaggtgttaattcaacaccgt

SEQ ID NO: 2525 - DNA, 720 bp, Homo sapiens
gagatggagcggagtttcactcttgttgcccaggctggagtgcaatggtgcgatctcggcacgctgcaacctccgtctcccaggttcaagtgattcttgtgcctcagcctcccaagtagctgggattacaggcatgcgccaccatacctggttaattttgtatttttagtagagacagggctttaccatgttggtcaggcaggtctcaaactcctgagtcacctcaggtgatccacccgcctcggcctcccaaagtgctggctgggattacaggcgtgagccaccgtgcccagcaagttttttttaaataccattttttttgtttttctgaactgaacattcaactaaaggacaaattaaagggggtacttttctcctcttctgtttcttcttttttgaaataaagaataagcttttccaaagctagaattgtttctagcacctattccaacccagtacattatcattgatctgaaatgtgatgattattggaatgcataaacattgacgtattttggaatgtattaaaactgaaatggataaaaattagtatatatgtttattttgttctatctcctttggttgtatttttctctgcagtattaaacatttggaagagactaaaggtatgcaaaaataatgtcttattttcattatgtgtgcttccatttgacacatgggaaattagattaatttcactattaaatagtactttataca

SEQ ID NO: 2526 - DNA, 16084 bp, Homo sapiens
ttacaataactcactagcagttttattgcttaaatattcaaactacaatattttttctgcagttatttgaaatgtctttgtctttaaatgtttataagcagtcagtaaatactttaccaacttaacttttaagtacttaggtgacttagaatataagccaaatatatctatatacatataaaattaaggagagaaatagaaaaatacctggcaatcctgctctcttattcagtgtgatatttttagtcataagttgttatgaaaacacactacaaaagcagtttgatacaggtctcctttctatatccagattttatagtctgcagtaatagctagctattattgattggttttaagaaaatatccacttgggtcaaaatatgtgtacctgaaccatgttaaagagctgtgttcatttaagtttctcttttcattttgcttatataatcaatacagaatggttagagaacgaatgttgcttttggtctaagtatcagattcttttattgagctatggaatttgcatatctgtacatttagtaggcatggttagaactcttaaggttttaatccacattatctcctctttcctgagtttctaagagccatgattatgaagcctcagcagtgtttttaacaaagtacactgtaaattgtaaccagaaggcagcggctttaaaggagtgcttatttgcctaaatggctgttgacatacttaatagttttgtatctgattctagtatgctaaagcatttcagtattatgagaatacaatttacacactggatccccttgtactttttctttcagttgtcaaaatgttaccattattgctgggattctaagaaatctctacaaatgcctctgatgacatcagaaacaattggttctaatcctgtgaactctcttgtgaagaaagcatgagactccttcggtttagaagccatatctttcaggtcatccagaggtgcccaagccacaccaacagagaagatagtgattcctacaatgaaaacattttaaagtgaattgaaaatcaggtctagctaatatatggaattatgtctatatgttttccatacactgttacatagttgcagcgaaaactgcttactaatttctggacaattaaatcccctgaacaaattaagttttcacagtcattgtgacgagagtggcaaaagagtggtccaaaccagaaactctgctatatctgtaattcgccacattaacaggtaagtcatcactgataagaaataatttgataaagttcaatatccattaatgacagaacacacctataaactaggaatagaagaagacttttaacctgatccacagtatcttttttaaaatcctacagtaaatgcggatggtgaaaattttccgtatgaggttggcctgcatcaaacagtatactggagtcagagtcacaatccattaaagcaaggaagaatggcacaagagatgggataagtaaatagcaaaagtgttcaaaggttgcattgtttgaggaatggtgactagtcctctgataatgaaaaatcctcttccatttcaatctttatattggcaaactgtctaataatcagaaaatgtcagcctataatcccaaagcaaaactagtgactaaaaagtactgcccaagagggatcttatgaaactggagtaatttcttccagtttcattgaggtattctatttccattcactttagttactagaaggcttttagtacaactgtacatttagggtaataatacattagttggattcaccccaatcccaattgtagaagttttcatttaatcttttttttttttttttctcagacagggtctggctcttttgcccatgctggagtgcagtggtacaatcaaggctcactgcagcctcaacttcctgggctcaaactatcctcctcagcacccccatcctcaaatagctgggactacaagcgcatgccactaagcccagctaatttttaaatttctttgtagagatggggtttcaccatgttgttcaggctggtctcatctcgaactccagggctcaagcgatccatctgcctcggcctcccaaagtgctgggattacaggcataagccaccacacctggcctcatttagcagattcttagtgtagagtaccatctatctaatgctgggtgcaattttctataacttttggagtttctgtaatagttttcctctacagatctaaggtttcattccccttctagtggtatacagtgctcagagtggtaaatacctaagatatgcagcaggtttagatgatgtaaaagctacttggaacaatgtccaattgttccagtctccttttcctgactctcactccctggttaaaaaaaaaaaaagtcaaaatatttttttcctccccctcagttttcctcacttcttttcagttctacattctagttcagattgtttagctcaagcccagcatataattacagttaaaaaaaaaaataatcacaccactgtactccagcctgggtgacagagcaagaccctgaaaataaataaaaactgttgtgatctacccctaaaatcctaccctattttctggcttttgcaactttcaatatcactaagggataattttcacgaatcaatattggtgtagtccagcctcctgaactttaatcaacctaatcactttatagcctgaatacaatcctgttaactataagttcagtaagctaagtattaaggaatatgatagtaaacaggtctttacttcacaggctagttgctgatgtataaaaaatactttttacaagctagatgtggaacttaaattgcatgtgttctctgttttaagaataatctttcatcagtatctgtaaaaatatgtgagtacattggcagaggtactaatgtgtagaaaggaaaaaggttatgtcattaggaattaagtagggaaaatgaggtacagaagagtgttaaaaaaaacaagtccattgattcttccctcctgtcactcagttatatcctcagaaagggaatcttagctttttgttggcctatttgatctctaacacattacgttaatgtcttcaggaacgaggcctgtgccaaaagtaatattaaggctggggtgaggaagaaagaaacccttcttatacccttttataacaccagagtgtgtttttattatcttaagcgggggggaaaaagtttttttttttttttttttttctttttgagacagagtctcactctgtcgcccaggctggagtacaatggcacgatctcagttcattgcaacctctgcctcctgggttcaagtgattctcgtgcctcagcctcctgagtagctgggattacaggtgtatgttaccacacccagctaatttttgtatttttaatagagactgggttttaccatgttggcccggctggtcttgaactcctgacctcaggtgatcccgcccacctcagcctcccaaagtgctgaattacagatgtgagccactgcacctggccaaggaaattttgatgggataggtaaagtctatgggagaccttatcttaggaaactcatgccagacaaaacttgactaaaataaaagttagggttgggtgtggtggcttatgcctgtaatcccagcactttgggaggccaaggtgtgaggattgcttgagcccaggagtttgagatcagcctgggcaacaaagtgagacccccgtctctccccaaaaaaatttaaaaattagccaggggcagtggcatgtgcctgtcgtcctagctatttggaaggctgacacaggaggattgcttgagcccaatagttggaggttgtagctcactacatgccactgcactccagcctggtgacagagcaattacctgtttcatacacaagaaagttaggataaattactgaatggcagattcatggtaggttataagctggctatttggagatatagtccaagtttgagctaaatatgagcaccttaattgtatatgtataagcatatttccttaatgtgacatggttctcatggcaattctcccaacaatacagtggttaggaatgtgcactctggagccagaatgcctgggtttggatcttggccttgccacttactagaaatgtcatttccaggaagtttgcttccttatctgtagaatgagatgagtagggctgctttaacagttaatattgggtaaagccacaggtgtttgtttaatgaaataaatgcttaaatttttatttactcctaaattcactgaaccgttttttctgttcccttctcctataaagaacaaggaccttacctgcatcatgtgcagcagctgcagggccttggacatcatcataggactgcccatctgtgacaattactaggaagttcttgttggggctctcccttatagggccaaacacatttctaacagtgaaggaaatggcatcaccagtagctgttccaccactcatatagcggatgtttctgatgacagctaggacattctctttggtgctatagtcagtgaaactgaactccgtgcgctgatcataagtaaactgtacagcagctatcttggcaccaatgtccgagatttcaaaagtcttggctatgttggaaacaaattcaagcatgaggcggaaattgctatctccaacactgctggagccatcaattagaaaggcaatgttcactgagttataacaggtcttgctgcacatcatttgttcatgagtgcacagcttctgtaccagaggctttacgtattttgtggtgccaaaccagttgggcatgtggtaagagaagaagccattattccgacagacagcctaatgggggagacacataaaagatatccaaaaggatcaaaagttgtttcttcttaaaaactggaaaatcctgaatgtttcaagttaatctagataagaggcagtcagcactgcacttagaggtccaaaatggaatacccatcactgtaacagaagataaccctcaccactttaccttgtcaacaaatgtgacatcctgaaccatccccagttcttcagggataggcttggccacagaaactataaatacattgacaccaaactctctggccacaatgcctgcttcctcgatgtcatcagaaggccaaccatcaataaataccaccaccactttggggatcccttttcttactccagcatctaccgtgaagaatttctgagcagtatgcttcaaggcttttcctaaatttgaaaaagaagcaaacaaatagcctttaccactgctcaaaccacatttctgtttccctgtagcatttgatgctgcaaagtttaagaattatatatagaactggcagtggggcggggcacacaaaaaagaattatatagaacccagttctgtaacagatgcatcagctgggaaagtttaattatctaccaggcctatttatcttcacaagccatattagttccccctccacctcctagaagcctcacatttgtttaccccacatcaatcgccagttagaaacacaaaactgattcccacttccatgcatgtgctctctatgtagccctttggtgactgattagtacctctaagaagtctctcttcagagtcaacggtagtgctactcattctttctgccacatctgcattcattagataagtctgttgattttcacttctttttagcattacaaagagatacttctccaatgttatatctagtcaatccaatgtatgagaattctaaatcaccatgctttatattttttaaaataagaaatatcaacactttggtatacttccattataaattgaaaatttatctcagatgatcaaatgcagacctagccaagatttcagttccaggaggatttcacatctgctcatataaaatagcataatactgttttacatgtctgatcactgataaccctctcctatgttacatcccaggtatcaaagtctacttacctgtattggaattaccccctctgaaacctacttcctttatggcaaacaaaacatctttggctgatgtaaagtttttcaagtaaaattctattttgggatgttcactgagtggaagaaagaaaatgttattcagggagaattaaaaaggtaaaataagcaacattacatgccttaaaaaacagttttaaaaccagacaacacacaagtttctttcttaattccatagtacatagtcaactgaggcattgcatccttacttgaattattggagatatttcagaggtgtaacaaataattgccatattgaggatttattatattctgggtaataagccaaaagcataacacatgtaaaacctcatttcatcatagctctataaggttggaattatcccaattatgtaaatgaagaaactgagtctcagagcatttagggagtttgcctgatgaaacacagctgcattttaagttcaagttgtctggctgcaaagtccatgcctaaactatacggagaacttgaaatcgggcttggctcagagcctcgggtttaacagaagtccgcagagttgggcaccaggtagctaaactaaatgaggaagtggctgggtatgagactagggtctgttccagtgtgggaccccagaggctctaagtagtgtggatctattaactcagagctctctgttcaggagaaacaatttcattgatgtgaccgtcaacatttttttaaagggacaaaggtgaaatgaattataaagttacaatattgagtttttcttataatgacaatgacatttgtgcaccttaaaattatgtgtattgtaagagttttgagatctcatttcctatatttaatattaaaggaatttcagctcacttttatataactactctgtgttcagcagagaccgttttgagtataaacaaccacagcacaatctgttgtgtttagtttctagatgagtcagtatttcctagtgcaaaatttaagatcttagcattatcagtagccattttattcaagattttttgagggagaagtagaacactgactgtatttctgcatacatacctgatggaatattgggtcataaaatcagatttcatgggttgaaaaccttttcacttgtggtcacttttcaactatccagattatgacttatgaaattagtctcatttttgtatccttgatatattctgttctttgacttacatacatataaacttgacatggtttacctattctaatggtctttctaaaacagaaaaactacaaaactttgtatgagtctacaaggtaatgaagaattcatcttcaaaaagaattgggtcaaagtagtcagaaaaaagtacaagacaaaaagtactgcaggggaatttgcctcatgggatgttaaaatgtgcaataaaactgtgataatcaaagcagcgtagaaaaaaatatgtaaggattagcatatgaatcaaagaaatagacttgctcaaactcaggtataaatgtgataccataagtcaatgaaacaaggaacacattttttttaagggtgagagacaaatggttaaattatgttaaaacagttaaattttcttctcatgccaaaaaaattctatctaatctaagagcagagccacttgtaaaaaataacagaaatgaaatggaaattaatatttgtaatagcactgtttatacaaccttacacactgctgatagtagtttaaactacttcacctttctaggaagcaatttcgctatttatttgtttttttagagatggggtctttctctgttgtccaggctggagtagagtggtgccatcatagctcactgcagctttgaactcctgggcttgagagatcctcacacctcagcctcctgagcagctggcactacaggcatgagccactgtgcatggctcaatttcactatttatatcagaggctttaagtcagaacctcacttttagaaatctaacctgatgaaataatcagagatgggcacaaagatgatataaggatgttcatcacagtgtagtgtgtaatgtagtgaagaaataataagaatgactaatcatgcagcggaatattatgaaatatttttgatgaatatttgtgatatgagaaaatgctaaaaatactaaaggatgaaaaaaacaggatgcagggcatttttaatagtctgagtttttaaaaaataatacagtcaaatatttccttaaaatactgaaggggccaggcgtggtagctcacacctgtaatcctagcactttgggagtccgaggcaggtggatcacctgaggtcaggagctcgagaccaggctggccaacatggtgaaaccttgtctctactaaaaatacaaaaattagccaggcgtagtagtgcacacctgtgatcccagctactcaggaggctgaggcaggagaatcacttaaatccaggaggcagaggttgtagtgaacaaagatcgtgccattgcattccagcctcggtgacagagcaaaactccgtctcaaaaaaaaaaaaaaaaaaaaaaaaaaaccattttatagtgattatctctagggcatatgatttagagcatttctttttttgtgctctatgtattttcaagctttctataatgagcatattctatttctaaaagcaattaataaataaatatttatttatttatttatttttatttttattttttgaaacagagtcttgctctgttgcccaggctggagtgcagtggcacgatcttggctcactgcaagctccacctcctgggttcacgccattctcctgcctcagcctcccgagtagctgggactacaggcgcctgccaccacgcccggctaattttttttttttgtatttttagtagagacggggtttccccgtgttagccaggatggtctcaatctcctgaccccgtgatccatccgcctcggcctcccaaagtgctgggattacaggcgtgagccaccgcacctggccagcaattaataaatatttttaaatgaataaaatagaaaggtcgtgcttcagatcaccaaccaagagaatatggaaagagctaaaaagaataacagaatagggaggtggaatagacatatcactgcttcttccttcagaagagagaaattaggaattgagcagagtagataagcagaggtgacttgtgtaagcaacaggactctccagtctaccttctggttcttatatagatagcacacagttttctaaattcttttattccaaaaaggaggcactcagatctactcagtctgcccaggcagtcttagatcctgaacttacagtttgggaacccagtgtgtccataactcaaatgtttatactgaactgacatgtacccactaaaagaactgatcatttgtcatcattcaagactcattcaaatctcctctcatttgatttttttcttttttttttttttttttgagacatagtctcactgttgcccaggctggagtgcagtggtgcaatctcggctcattgtaacctctgcctcccgagtccaagtgattctcctgcctcagcctcccaagtagctaggattacaggtgcatgccaccacatctggctaatttttgtatttttagtagagacggtgtttcacatgttggccagactggttttgaactcctgacctcaggtgatccacacacccacttggcctccaaagtgctggaattacaggcgtgagccactgcacccggcctcatttgattttgaatgtatccaacacaaagaaatgatcaatgtttgaggtgatggatatgctaattactctgatttgaccactatacattgtatgtatgaaaacatcactatgtaccccataagtatatataattattatgtgtcaattacaaaataattttttttttaaatctcccattttaacaaggttggtacctggcttgaacaaggcccacatgtggtccttctgttccaattcccaacattagagccacttttccaacaaaattcttctgtaaattaaatcggcgctgcccaatattaaagcttccatcaatcagaaatgcaatgtctgctttacaatctgcgaacaaccaaaccagtcccctcattagcagtctcaagaggagggagggaaaatgctaccttcccaaatggagatcttgattcttacctttattgccagttttcttctcgggtgttttctttagtcgtttacctgaaataaaagatgcacttggcattaacaaaaggaagacagttacatagcaagaaacccacatggggagaagctcataacaacagagtgccattcttgaaaggacttttttaaaaaaattaatttcctcaggattttctggactagggaaagcaatgacccaacaaataaacaaatcagtatgtaggcctacatatttgatatgccctaatccaggactttaataccccaaacccacaggtgaggcaggaactcaacattaaatcctaatgttcttaatatctttgactttaaaactgccatcgtcatacaaaaggggatccctggctatttcttacaatagacacacattccttttagtcacatgacagtgcagtaattaaaggaatttaatgaagcaaatggaactagaagttcatggtactttgaccagttcttaggcgtggtttatcaaatctgggagaaaataggacttttagagaattattaggctgggtgcagtggctcatgcctgtaatccctgaactttgggaggctgaagtgggaggactgcctgaggtcaggagttcaaaaccagcctgggcatcatagctagacctgtctaaaaaaataaaaataaaaaaaattaaaaatcaaaaaaattggctgggtgtggtggcatgtgcctgtagtaccacctactcaggaggccaaggtgagaagattgcttgagcctaggaggttaaggctgcagtgagctatgattgcaccactgtactccagcctgagcaacagagtgagaccctgtctttaaaatatacacataatgaatgtttccatatgtaatataccagtaaacttaaggtatttgctttgtttctctttaatatcaaatttctttaagaaaagcttctaccaacaacacgtttattcataacttccaaatgctgtgccgggcaactaggagataggtttcatagttcatacctgttggtggatgtgctgtggacactgcttgtcctgtggcctcctgtgtactacttttgccttctgttaaaataaaaataagcttatttttttccttttccttctttaccaaagtattatgaatctaatttagagctctctacaatgacaaatgtaatagggtaatggtgattgtagttacaaacatcctgctgcatgctagtttcagagaaccaaaatgcttatccattatatcttcaaaggatcatcaaaaatgtatttagtagtttttcagttccttggtaagtgtccgggcattctgactgcaaataattcaagtttctattgccatcatctgtcagtaagattgtcttctattcacccaaatttggcttcagtgggtacttgacccctcagtctaacctacagtttacctctataggtcagctttagtcttgatcacaggtttttccatcaaggttaaagaggctgagctaaaaaaagcagaaaacgtttggggggtgggagaatattacagaatgagaacaataattatacctactagttactgtgaaagaagcagaccatctagaaagcatttgagactggatgccattggcatctactgaggaatagttttctcgaccaggtaggctatagactcgtacaggtccccctgagttgctgattactcccctgtaacacaagaatagcagctgagatgctatccacactttttcagggcatcccactgacttatagtgccatgttgtatctattgctttgattaatcaagaaaatagctcatcagggaagtcatctaaagattctgctttatttatttatttatttgatggcgtctcgctctgtagcccaggatggagtgcagtggcgcgatctcggctcactgcaacctccacctccaggattcaagtgattctcctgcctcagcctcccaagtagctgggattacaggcatgcaccaccatacctggctaatttttgtatttttagtagagacagggtttcaccatgttggctaggtctcgaactcctgacctcaagtggtccatccgcctcagcctcccaaagtggtgggattacaggtgtgagccaccactcccagctgctgctagccttttaaaaacttgcttacacaagaacaaaatttgcctggaaaaaaatggttttgtgctgttgaacttcttaagtgttgataagaacacatttgtaatatcccattacccacaacttagaaattcagagcaccaaacaattttcctaagatactcactttagctacatgcctttggactgaatttttttagaagtattatactggctattctactacaggatagcatggcacttgctaacaatagtcaccttgggcaagatacttgacaactctctgagttcagtttcttcatctgtaactggagtaaaattctacctaccttgtagagttgtggtggaagttaaaacaataggtggcacatagtaataactcagtaatatatcacatgattaggaatgttttggaatcatagcaatctagccatcaagaggtaatgctatttgccttttgtcagaaagctttccatgtgtatttggtgtttcaagtatatccaggagaaccgtgaaaatatatccattttctgtggccacaatggcaacaaaagaaagaatgcagggaggaaagggatccagatgggtaaagcaggaaaggaaataatcacgtctgcatttctctcccaccctggtgtgtttgggcttacctgtggacagcagccccacatatgctcgatacagaagcatatactatgttcccatacacagagaattcctcaagagggcagccccctgggcagaggacatctgctttctctttcctgatgtccaagcctctggtaaaacatgtgatagcaatgggagctgaagaaaaaggagataatattgtaagcattcttaggacttcttggggcatagtggtggggagactacagtgtgagatttaagttttacttccctaatttctacacttctagttatgactattgacttatatacccttccataccattccagattttggcaagccacaaggttgttttccaatttaatatagtccccagccactataaaactctaatgtgaaagttctgggtttttatttcgtttttgtttttgaaatggggactcgccaagttgcccaagctaggctcaaattcccgagctcaagtgatccacctccaactccctagtagctgggattacaggtgtgccactgtgcctggcttctcagttcttaaccaggttggaaatacataattggaactatatctgaactagaaaataaaagtcatttaatattaattatagaaatataaaaaatcttggctgggcgtggtgactcatgcctataatcccagcactttagcaggccaagacaagaggatttgcttgagtccaggaggtcaagaccagtctggacaacatagcaagacctcatctcttctaaaaaaaaaaaattttttttaaatggccacacgtggtggtgcatgcctgtactctccgccactggagaggctgaggtgggaggattgcttgagcccgggagttcaagcttgcaatgagctatgattgcatcactgcactccatcctgggttacagaataagatcttgtctccagaagaaaaaaaaaaatttttaaatctcaactttgatgacgctatgtacacagttgcttgaggtaaagatagtaaatctggattgagcctttgtggaacattttcatagacatgtgcacaaatcaaagccatcctttccttcataggaccatttatcctagttagcctacaaatgcagatccttaaactcacacattaaggaagccaacaaaaagatgcttagattcacagaaagttatctaacttgattgttcattttatagatgagaaaattaaagccgtggggttaatttgcccaaacaacattctacaactcccgaaggacagaaaacagaaaagtgaatcccttcagaatacagcatttttatcttaattgaacctgattatttctgctccagatctgtccagtgagatttatcaagcagcggatgcatttttagaaagcactgttaatattctcaagttttacactgtcaacctaacaaagaatcagtttttactataaatgatgctaggaagagacaagctcttggcaacaagtaacaagataacataatacaacatgttaatttgtgaatttactgtcgatactaaattgagattaatgttattaaatgctatttttcaaacatgggaagttgtagttatccaaacctttttaaaacatatattaattttaaaaaccttttttttccaaggcagaggaatactttctggccatactgtccaactgagtaccttgcctgtgacaagcaccctcctctgtgccctttgtggtgacaggtaccttacattccatggaagagaaggaaggatgcaggcgcaatgcccatttcttagctctgaagcagtctagagagctgagaggttaaaatccttacccctaaacagcctcatacctatcatcaaacagccttaatccttcctcccattttccgctgagatgggggcggcatcggaatccggtgccaagaccgaccgcctttagttgcgaacactgacttttgttaagtagagcgggagaaatacagccatgagggatacttaaccctcattcctactttcaaggaaaacaaacggtagctcttaggaaagcgttgccttttacactggaaaatacaccaaaccacacacccatacccggacctctacacgtggtacaaactttttaaactctctagcgtgtagagtgagaccgcgagtgcttctgattataggggttacacctagaaacatagctagcgagtcaaacaaggtgggacagcgacgttcgcctccctctctctcggctacggcaacctgaagtcgggtctgggcggcttctcctccacccccaaacgcagcagagcccaggactggtgcgctcctcggtgaggctcaaggagtcctccttcctcgacctcctgctgccggcgctcagcgggcccggggtctggggctgtgggtgggcctggaggaggccttcttcctagtgctcttggagaacgtccccccactggaccccaggggccccctaccatgggagaaacaggtgagcaggagcagatcggctgcaggggttaacgcgggcgcgccacgcggcggctcaaccttcgcgccttcctcctcaggcggtagggctgaagcccaaggggctggatctgagtcccgcttgtacccgctggtgctcagcccctgcgaccgcctggacgcaccccagctcccccactcaccggctccctcgctgcccgcgggccccggcagcagcagcagacacacacctgcgaagagagaagcgtgagggctggctccagcctccacccagcggagcaaggggccggggtcgtgaggggcgcgcacccaccgaggccgagagccgggatccaggctgcggacatggtgactgataggctgctcacacctgggagagagggagaatgcgggcaaggccagggtgcgggaggccccgcgcgtcacctcctcagagccccgcacccttcggatccccgggcgcggcgcagaggagagaggacacagacgacccgctgctccaggccagcgcccctctaggtctgggaggcgcctcggcggcaaatcgagcgaagcccaggatcggtgtgcaaccccgcaccgcggggaggcgggggcgccaaaacgacgacagacaggctgggagcgacaaagaaacagggacagaggcgtcagggatccctcgcacccgcgcccgccgcccggggctccgcacctgctcgagatccacccggctgcgcccgagtgcggaaggcaaggcccccgcggccgc

SEQ ID NO: 2527 - DNA, 110 bp, Homo sapiens
tcaggcctataatcccagcactttgggaggccgaggtgggtggatcatgaggtcaggagatcaagaccatcctggctaacacgatgaaaccccgtctctactaaaaacac

SEQ ID NO: 2528 - DNA, 471 bp, Homo sapiens
tatcatatttctacatttatttcacttcatttccttttcagtgctgtccacaatgacaatttcaaccaggctttacttatgctaaaatactgtgcgcaggtggggactcagcccacaccaggtaacatgcctcagcccagcccccgttggacagctgagccctctggccccctctctctggacgtgctgctctcatctcacactcaacatacctccatctgatgacatcctcccacctctagctccacactcattctgagggtcccatccctgtaggtcatgtttcaagcatgctgtagaagaaactttgggatttcacttgatctttcttcacctttattcctgacagccaatcttattaactcttttcctttatttatttatttatcgtagagatgaggtctccctgtgttgcccaggctggtcttgaactcttgggctcaagcgatcctcttgccttagcctcccaaa

SEQ ID NO: 2529 - DNA, 6660 bp, Homo sapiens
tttttagaaagaaaagaggtttatttggctcactgttctgcatagaactgtataggaagcatggcgctggcatctgcttctggtgagggcctcacgaagcttacaatcatggcagaaggtgaaggggagccagtgtgtcacatggtgagagagagcaagcgagagaggaggaagttccaggctcttttaaacaaccagctcttgcataaacaaccagagtgagaactcactcattactatggggatggcacaaagtcatacataagggatccgcccccatgacccaaatacctcctactaggcccacctctaacactgaatgtcacactttgaacatgagatttggaggggacaaaacatccaaaccatatcaccacctgagaatggtacactacaggtcacagaaacttacagagtactggagttgaaagagaactgagatcacctagttcagagactaacgggaaacgttaggtcatttatggctctcagacacgttaagcctgcataacattttttaaaatcttgaaattagttcccaacacttaattgagagctttcacagaaaaatctagatatgtggcttatttttaaaaaacagaagatttgctgacttaaacactgcaaaattaaacatttatatctgaatccagcatctctttttgctttgtaaatgaggtcaaggatgaaatccagatgttcttcctttgtatttgtattgtcactgtatggaatctaggtatatccaaggaaaaataaacttaagataagcttattttccttatttcaaaaagcaaaacaaaaacccagaagatctaacaaccctggacctgtagagtggcagcaacagaccagaactcagcagtatagtccgagctggggcacctgctcgccagtgttactgtctccatcagcctgaccccagtgagcatttgatttggtctaccctactcttgccttctacagaactaaaactaacttcctgcaactttcatccattgctgccagctctgcagcataatggaagctcattccctcttctgcatgagacggcttcaacttctcaaggacaggaatcttgctctctctccagatgttctctgctccagttaaatatccctagttccttcacctattccctgtgtgacaggggttctggactcatcattctgatctcttcttctggatacacacttagtggccatcaatatcttgcttaaatttggtacccagagtgaaatgcagtatgttaggggtattttgactatggctgtgacacttctactgataaaacctgaagtaccactaatttttctgttatcatataataacaacatgaatactacttggttcatattgaacctgaggacaactaaaatcccgtcttttttatatgaaatgatataaggccaggtttcttcagcccaaacttatacaacttatttaatttaaatgagtatgttacatttctaatctgtttaatttcatctcgatggggtcattctgggactgttttcagttgccactgtcatctattatattagcaatattgggttgctccatcctcaaatcagatgtttctgatgccttcatccaaatcactgattttaaaagtaaagttgaataagacagggccctatgaaatatcaatagagaccaaaatcacattaattcagcagtcaacaatttgtttatctgggtagatgtccatgcactacaccatcaaggccatatttttcttattacaaagctgttaggaaaccctctcaggaaccaatttatactgtcgattccattcctctctctgaccttgtaatgttaacagccttatcaaaagaggaactagctgggcgtggtggcccatgcctgtaatctcagcactttgggaagccgagatgggcggattacctgaggtcaggagttcaagaccagcccggccaatgtggtgaaaccccttctctactaaaaatacaaaattagccaggcatggtgacttgtgcctgtagtcccagctactcgggaggctgaggcatgagaatcgcttgaacctgggaagtggaggttgcagagtgagctgagatcacgccattgtactccagcctgggcaacaagagtgaaactctgtctcaaaaaaaaaaaaaaaaatggaactatttggcgattacctccttttccaagtacttaaaaaccattttgctacatatacacattaagcttgtcaaaatctgcaatttccccatttctgaaaatcaggatattagaagacattagcttttttttttttgctgaagaccagctggctactttgggtatgtcaatcctatcctttcaatcttcacctaatggaagtgaagttaagatcataaagaaattctatttaggcagaattaaggactcaggagaacatccacgtagaaatcatccacgtagaaccaagagcttgccaacactgaaaaacctgacacaaagcctgttaagcagcaaatggcagacatttctttctctacattaaaactgattttcaacatgaaaagcagatttaaaagggaacatttagggtaaccacacttaatgcattcttgatccagtgactatctcaaaacaggaaaagatttttaagtaagttgaccatttggaaaccacttggtatgtcaaggtcatctcgtagaaaagcccaagttcttatgatctctgaagagctctcaaaagcagtcacagtcccaggaggctggtcctctaagaatcattttgggactcttcggagttcattcatcagccaaagagcaccagtgagcaaagccaaggagcctgactggtgagtggcggccagaggagttgggacatacatcagcagcgtgctgatgcccaagcccacctgtcacaaaggaaagaaggcaataggaaaggcagtaacccaaagttcacattgaaaatggccaggcgtggataaccacacacaaacctccacatcctcctatcagagcacttaaaatacacacatttttaatttcacaagcaaatatgcttacaatgaaagaaattcgaacaaaattgataaacctaaaattccccttattcttcaatccatcccagttccccagagtagtcactgttaccagtttctgcatacttgtactttagtatgtttatagagaaataaatatatagttttgtgcttttaaaaaacatattgttctgtcacttgctttttttcacttagcaatatacactatgtattgagatcttattaaactgctgtgcagtatcgcacagtatggatataccatagttttttttgttttgttttgttttgagacagagtttcactctgtctgccaggctggagtgcaatggcatgatcttggctcactgcaacctccacttccagggctcaagcaattctcctgcctcagcctcccaagtagctgggattacaggcgtgtgccaccccgcctggctaatttttgtattttttagtagagacagagtttcatcatgttggccaggctggtcttgaactcctgacctcaggtaatccgcccacctcggcctcccaaagtgctgggattacaggcgtgagccactgtgcccggcccatagttttttaactatttaggttgtttccaatttttcactatcacaattctatgatgaattttctcatacaaaaggtctttgttgcattggactgtttctaggactgacactaataagttcatttgctgggccaaagaattacccatttaacttttaaaagatattgccagcctgggtgacagagtgagactccatctctaaaaaaaaaaaaaaaagatattgccaaattgccttctggaaaaaactgtactgactcatgctctcaccaggaatatttgaaagtatccattttcctatgcccatggcaatacctgattatcttttttttcacttttttccaatttgataggcacaaaatggtacttattttttaaatttgctcctctctgattataagtgaagctgaacagcttttcatgtttactggccattaatcattgtttttgtggtaattgtgtattgatgtcctttacttattttccggttattaatcttttaatttattataaatatggaaaatattttctcctagtctgtcacctttccttttttttttttttttttttaaacagacagggtctcactctgttgtctaggctggggtgcagcggtgcgatcttgactcactgcagcctcaacctccctggctcaggtgatcctcccatctcagcctcccaagtagtttggactacaggcacacaccaacatgcccatctaatttttgtattttttttgtagagatggggttttgccatgttgcccaggctagtcttgaattcctggctcaagtgatctgcccacctaggcctcccaaagtgctgggattacagccatgagccactgtgcccggccccttttttaactttgtattggggatactgtcagaacaaaaagaagtggtttatacctgtgtatacgccaaagccagcagagtcactgctgccatcttggtccttctaggaaggggaattctccgagagaggaagtagagcactgtaatggcagtgactgaagtgattccctgcagggaagaaagagtctatcacattagatagaagtgccaggtttctaactcaccttacatgtatctcctctagaaccactcagcaaccatgaagtactttcctgtaccagtcacagagaacctccctgcagtcccagcctgatcactcctccacaggctgtctcttccaccatcctcttctgcttgccacttaaacgtcggtatcacccaggctccacctaagattctgtatgtactttatacaccctcactcccagtgatctcatccaccttccaatgtgggtgtccccctcatttttaattctttgcatccttatccctaaccatatctctaatcctatattcttaaagcagggctgaccccagcacatgagggttattattttcctgggctgtgagtggagaaagtgctggtgctgccagctggtgctaaaaaagacctaaagtctcattttcattcctatctcttcagaacaagggtccaggactggcaataatggtctccttcctcttccacggtatcagggagaatgttttctatcatatttctacatttatttcacttcatttccttttcagtgctgtccacaatgacaatttcaaccaggctttacttatgctaaaatactgtgcgcaggtggggactcagcccacaccaggtaacatgcctcagcccagcccccgttggacagctgagccctctggccccctctctctggacgtgctgctctcatctcacactcaacatacctccatctgatgacatcctcccacctctagctccacactcattctgagggtcccatccctgtaggtcatgtttcaagcatgctgtagaagaaactttgggatttcacttgatctttcttcacctttattcctgacagccaatcttattaactcttttcctttatttatttatttatcgtagagatgaggtctccctgtgttgcccaggctggtcttgaactcttgggctcaagcgatcctcttgccttagcctcccaaagtgctgggattacaggcatgagccattgcgcccagtgctcttatttttaaattaaatttaattttttaagagacaggctctcactctgtctcccaggctagaatgcagtaacgtgatcacagcttactgcagcctcaaactcctgctcaaacaatcctctcgcctcagcctcccaaagtgctaggattataggtgtgagccaccatgcccagcctctctattcctttaaattctctctcaaatgcatcattcttctcaagtcccactcccaccatgtaggccccatctccatcactctccctggcattacgcagcagcactatgcttctcacagtctccttactgctcatctttccccgctccaattcatcacacacaggcctccaagccaatctttgaatggcccatagcagaccctcaaaacatattcgcttaaatagaatgaaaagtactggtgaagctcctggctccttgagcttctggtttagctccgagagctacgtgcttagcagctatggtctccgcattcgcttctctactcaaccacatttctgctgaaatgactttctaggtacgtgcagaattgagggaggttatcacttgccaagtggtaaaaggcacatttgaacttttaagaagctggcaacgtcctgaaagctagaatttggctggggttggggtagggggacaggggtgaataatgaggacaaagacattagattagagaaatggtcctaaaatttcttccaaagagagcaggaaatatagttcctgctctaccctctcagtgttgccatcagtgcttcactgacaccccaaagcctatgataggctcctgtgctctctggcaggtaaccaccaactacacttaccagaatccggtgatcaaactgcaccatggtgggattctcaaaaacattcctcaggatgggggagaaggtaaagaggtcctccgggatccaggattctcccattttgggaaaggagttataaacaagcccagcatctagccctgccacaaaagcccctg

SEQ ID NO: 2530 - DNA, 31885 bp, Homo sapiens
gctcgagtaggggagcttgaagctactgacactgaagacccaaatctgaattatggacttgttgttgactgtggcagcagtggttcccggatttttgtttatttctggccaagacataatgggaacccccatgacttgctggacatcaaacagatgagagaccgcaacagccaaccagtggttaaaaaaatcaagccaggtactaatcagaatatattttgttgtcagtctcttttaaggcatgaaagaggagacaaaagaagcagaaagcaagctacccctttcttcttgagagtctgggtaatgggagggatatctctttcattgtcaccccctacctctcaaataaataaatgtttaggaccttgaggagaactttatagggtatcagtttcctgagtcttatgtgagccgctttttaaagaaagttttgtctgtttgtttgttttaacttaaggaatctctgcaatggcagacactccagaacatgccagtgattaccttcgtcctctgctgagctttgctgctgctcatgtgcctgtgaagaagcacaaggagacccctctttacatcctctgcacagcaggcatgaggcttctccctgagaggtgagatgcagggtacaggaaacacaggaaaacggtggcacaagagatgaaaggccagtttcatgcactgtcctctgtggttccctggtctatacccctaaacccaattatgacacaatcattcattcccaacttcttgtcatttgctgctttgggatcagtatctatctgggatgactatagtgattcttagtttggattgagggttgggagtagtggtgatggtaatagatttggatcatcgggcacatagagaacataattacagaataaattaggaagagggtcacctgatgacctggatacttagggactagtcagagagctctggtaggaacactaccttttctgtaactctgcctagaaccctggcaataactgggggagtccctcttcttgctgctactgcaaagctcagtctccattgccttaggcctgttttctcagccccagccagtcacatcatttccacttgacctttgcaattcagcctgacaccttgccacctgatccctcttcctgcattagaggaagaggaagagaaggctgtatttaggccagactccttgtttgtgatttctctcctttggtaccaccttgatccgtccatacttacgtaggccgggggaagaatgagctccctgactttttttttaatgatttttattttattgtggtaagcatacaacatgagagctaccctctaaccagatttttttctttttttttagagacagggtctgctctgttgcccaggctggagggcagtggtgtgatcacagctcacttcaacctctgccccccaggcccaagtgatcctcccacctcagcctcctaagtagctgggactacaggtgggcaccatcacacccagctaatttttgtggagccaggtttcaccatgttgcccaggctggtttagaactcctgggctcaagtgatccgcttgcctcagcctcccagagcgctgggatttcaagcgtcagctaccatgtctggcccaacaaatttttaagtatacaatacgttattgttgactgtgtgtacagtgttgtacagtggatcttcagtgcttattcatcttgcttaactgaaattttgtgcctatttatttcccttagcatattgtcgttagtgttcatccaccttgtcacatattgcagaatgcccttttttatttaaaaaagtctaaatagtattccactgtgtgtatgtaccatgttttctttacatattcatctgtcagtgaacatttaggttgtttccacatcttggttattgtaaataatgcttcagtgaacatgggagggctcatatctctttgagatcctgattttaaatctttggaataattagccagaagtaggattgctggatcatatgacagtttgattatttatttatttatttatttatttactgagacagggtctcgctctgttgcccaagctggagtgcaatggcatgatctcggctcactgcaacttccacctcacaggctcaggtgattctcccacctcagcctcccaagtatctgggaccacaggcatgtgccaccatgcctggctaattttttgtatttttttttgtagagatggggtcttgccatgttgctcaggctgttcttgaagtcctgggctcaagcagtctgcacgtcttggcctcccaaagtgctgaattacaggcgtgagccaccgtacccggcctatatttttaattttttgaggaacctccatactgttttgcagagctgctgcaccattttatattcccaccagcagtatgcagagtttccaatttctccacagccctgccaacacttgttgtcttttgttttttggataacagccatcctgacaagtgtgaggtgatatgtcatcggggttttgatttgcatttccctgatgactagggatgttgagcaacttttcatatgcctgttggccatttctgtgaatggagaaatgtctattcaagtctttagcccatttttacattgggttaataggatttttgctgttgagttgtaggagtttctaaaatattttaaagataaaccccttaccaaggtatagttcgcaaatattttttcccattctgtagcttgcctttttactctgttaattttttcctttactgtacagaaatttttagtttgatatagtcttacttgtttatttttggttgcctgtgccttttggtgtcatatcaatgagaccattgccaaccttaactttagaattcatcctcctggaatgttcatggtctcataggcatcaggtatttccttattagcttaaatattttcctttggtcaacagcagtttttttttttttttacaacgtttaaattttatagttggctttctttccttaaatcaacagcaaacaacaaaaacctcagccatacatgtagggctccaaggcttatgtcagacatgtagacaacataacatatagcagcaatgcttctttcagtggactttttttcacagttactggtttactgactggtttactgttgagaagcagattatttatatagccatttgtcaacatgagaggttttttagttccttattgccccatacatttcagtctttaaaaaattttttgttttgtttttacttatctttaaaaccaaactttaaatattgtaactgcagccttaactccttaagggaaatcttaaaaatgaacaaaacaatacaatacaacttacaaccctgctaccctatcaaaactgtttcgttttgttgtattccctcctttctgttcacatatatgtaatttccacaaagttgcaatcatactgtgcatgcaattaagaatttttatttgacataggtgatattcatattgttcaaaaattttagaaaccctgggaagaatatagatgacacaagagcaggtgccacatcacaaagtctataaaaggccaaggaaaggggagggaggccagagaaaaagctgacctggaggttaaaaaggcagaattgaccagctgagctgggcagaggaacccacttggtagtttggctacctttagtgtgtttggaggaaaggagattgttgcctcacctcctggcactgttcggtattacctctgtcaaagaagtttccatccaaacaaaacccactgtgtagctccaccctttttgtctaagatgttagttgtcaatgtggaaactctgaatattaatatttattgtatctaaagaatttttaaagaaatttgccttttttttttctctttcaacttgttttctggtcacctctctaaataatgcatacatctgttctaggcttataaaatcattgctgcctctaagtccaagcgagttgttggcataaatgtgactatcagtataagaacctgttttgtatgattaaaggtttgctaatttattagcatttgtaagcagattcaaaatagggttgaaccatttagactatattttgaatttattagcatttggttttatttctttgccaaaggcctggactaacagaattttttctacctcccttttattttgcagttaaaaaaaatcccttaaaaattacaccataatacaaggtggtgtttaataaaataataatttttattttaggaaatttcacttgtgtataaaagtaaagagaacagtgcagtaaatccccatttacccactacccagctttaacaattatcaacatttcgccattttaaaagcattttaaataaataaacaatattgaattttagaagatgaaagctttatcctgtcactatgtatacatgaagaatgatttgggtttttgtttttttagcataaatggaatcacattatacatactgttttgtaaaatgtattggacatctcttatcttttcatgtctatacatgtagatataagtagacttcatttcttttaacatctgtatagtattacattgcatggctgtgccataagttatttaaccaatccctatggtatggtatttccagtttttcattgttataaataattttcattgttataaataatgctgcagtatttctcttctttattttattgtttgatgatttccttggaattaatttctaaaagtataacagctggatcaaaggttaaacacattgaaacattttgaagcatggtcctggattgccctttagaaaggttgtactagtaatttatttatttatttattggagatggagtctccctctatcgcccaggctggagtgcagtggcatgatctcggctcactgcaacctccacctcccgggttcaagcgattctcctgcctcagcctcccgagtgggattacaggtgtctgtcaccatgcctggctaatttttgtatttttggtagagatggggtttcaccatattggccagactggtctcaaactcctgacctcaggttatccatgtgcctcaccctcccaaagtgctgggattataggcatgagccactgcacccagcctgtactagtaatttgcataactaacagcaacatatgttgttgcccattcttccatatcattgccaaaaccaacgaaccctctctttgaggagtttagaagcatatccaatagggacagaagaataccccttcttggtccccatttgaaattcttattgcaagaatttaatatgtataacaatgaactttttttaagaaactatacttgacattatactggaagattattacttcaaatatagatcttcactttgaagtgctaacaacattcttcatcaagtagtactgacaactgtctgagccagcagaatatttttgtattgaatattttttaatccaagataacttgtcttattttaactaacattttctctagatgcatattattacttctagctttgtttctttgctttcctttgcttgataatattgattacatgcttaaaatgttagaggaaagacaaccctatagatacaaagtttcaagtgttttccccaaattggaaatgttgttatgtcctctggattttgatcctgatctagggttttcaaatggtaagattttcacaatgaaaaaaaaatcaacccttgaaatatggaaaaggagattaaaaagttaattgtggctgggcaaggtgactcacacctgtaatcccagcactttgggaggccgaggcaggtgaatcacctgaggtcaggagttcgagaccagcctgactaacatggtgcaaccccgtctctactaaaaatacaaaattagccgggtgtggtgatccatgcctgtaatcccagctacttgggaggctgaggcaggagaatcacttgaacctgggaggcagaggttgcagtgagccgagatcatgccattgcactccagcctgggcaacaagagtgaaactccgtctcaaaaaaaagttaattgttagcttatgtaaaggattacattaaaacttgtggaaccaacagtacatcttgtgtggtaatgtgaagcattgtttctatgttgtgtaagatttgaggatgagattgtgttccttaatttaacatctttgttttacagtagtgaggaataatgtaattacatcaattttatagtttatgcaacttggctgcagtttcctgtggcttgtttgtactcagcctgtgagagtcatagaaccgtagtctcatagcctcatcttttaacactctttgaataataacatcatataaggggaaagtattactattaccatgttgccttttaggtaggaggctatacctggaggcagtttaaacttttaaaatcaaaggcggtaccaaaaagaagcagggctggacaagtagatgaggtaggtgaacagtgaggtcatgacaaggctaagtagaaggacaagttgaggcagtttatgagaagagagtttagtgactaactttgggattttttgttctttcttgcaggaagcagttggctatcttggctgacctagtgaaagatttaccactggagtttgacttcctcttttcacagtctcaagcagaagtgatctctgggaagcaggaaggtactgggccttaaggggtgcagctggttaacctctaagccaaccatggcacagcctctctaacgggtgtttagaattattctatatatcggattttaatttttctgccaataattttcttgattctgctacatagttgatttgattatttgcatattttgcattggcatctgtttagaatgctggttctggaagtcaaaaatgtatatctctttttaacttagtactaagcaatatgtttataagaatgtattagtatttaatgatttcagttggatatttggttagctaactgtacttttgaaaacatatatagttctaggagttgtattgagtttgtcaaagtcaaatgtaaggtaaattattaaagtaaggagaaactttaattccaagggatgatcagaatgagttacttttgttttgttatgccttcattgcaattactatgcagtattgataattccctggaatctcacactattgggtttgtacttttagagtgaatatgtgttctcatgcagccaaattggccagtttgatgaattatatttccatttcttataaacgagaaggagatttatatgtcttctaattgcagacatatacatgggaaaagatttaccttttaaaatttcagtattgcatttttcagttgtaaaatttctattttgatcttcttaatattctatttcttttcttttctgtttctttgctgagaccttctatctttccattcattgtaggactgcccatatttcttggttatatggttgctctaatatctttgataattccaatatatgtgtcatctcagagttggcatcttttgattgtcttttctcttgtgagttgagattttcctggttctttgtatgccaagtatttttatattccatcctggacattttgaatattacattatgagactctgggtcctgtttaaatcaaagagaactttttttttttgttttaggaggcagttgatctcaagttctgagctgctttctgtaggctgtgaatctttttttttttttttttttgagacagagttgcactcttgttaccaacactgagtgcaatggtgtgatctctgcttactgcaatctccacctcctgggttcaagcgattctcctgcctcagcctcccaagtagcttggattacaggcatgcactaccatgcctggctaattttgtatttttagtagagacagggtttcaccatgttggtcaggctggtctcaaactcctgacctcgtgatccgcctgcctcagcctcccaaagtgctaggataacaggcgcaagccactgcggccggcccgtgattctattagttcatttttcttttctttctttctttctttctttttttttttttttttttttttttgagacagagtctcgctctgtcatccagactggagtgcagtgtcgtggtctcggcccactgcaacctccgctccctggttcaagcgactctcctgcctcagcctcccgagtagctgggactataggcgtgtgccaccacgcctggctaattttttgtatttttagtagagacggagtttcactgtgttaaccaggatggtcttgatctcctgacctcgtgatccacccacctcagcctcccaaagtgctggaattacaggtgtgagccaccgtgcccagcctattcattcatttttcaaagccttggccactgctatttggatttgtcctgtgtatcagccagtggctaatctggaacctgggcagtggcctagcctgtagttcagctctcagagctgtttggatattgtttagggtcagatccatgtatttgtagcttggaggtgagcccaggggttcatacacaactttgctccctactgtctgtgatccctctgccactttctggttccttggagctccctttcatgatcctcctgtcagaataccagggctttaatttgcccactctctgccatgcacttctcatgactgcatctgcatccagggccaagcggtaggaggacagagggagcctaaataaacaataggatttgtttcacagtcttgaagctacagcttctctggtcagagaaaagaattcaaagccctcagagttttaggtacctgctcaaattctacctctgttgcctaaggttagagagaacaaaataagaaagaaaaaaaaagcaggagatttcccttattttctctgaacttttggcattcctttttctgttctttggaccagaaaatgagttgaagttcctctgttcacacctggtgtttactttcatgtttcaagctgctcttaagtctagaccaggtaatatctgagggggaaaaaatgggacactcactactggcttggtggtagtttaaaccctggtctctttcccggtgtgctcattatcatttactttcagagtttccagaaagctgctccatgcattctatctagagtttatatttgtattcagtggggagacaagattgcccagaactagaactccaaaatttacattttttcttttttttcgatatcttcgtgacattcagatgatttatacttcttagacatttgttatacaattaatttctattcattgaggaaatttagaagatgcaaataattttaaaagggaaaaaaatcacaagatgaaagatttgaaattcctacattgagagtatggaataaaatactatgattactttttccaagaaaaagaggaaagagaagccctaagggagaggtgtatacatggcatagcagtagagaattaagtgagggcttttctgtttcttacttaggggtttatgcatggattggaatcaactttgttttgggaagattcgaccacgaggatggtgagtaatattgtctttttatgacagtttacctaagggctgaagatttaagttataacctatcagtagcatgtaaatgcaaattttgagttgtttttcttttttcaaacataagatgcttcattttccagtcctaatttgctttctttgatttctttttaactttttaatatggaaagtttcaaacattcacaaaagtagaataataaaatgaacctccatggacccattacccaggctcaatatttactaatgttttgccatttctcccccatatccccccatgtattaaaggtttttttttctcattgaatgttttaaaaagcaaaccccagacatgtaatttttattttcatgtatgtcagtatgtatctacaacagataaggggtttcaaaatgaacaaaaaatatatccataatgccatttttaaatttaatagaattaacaatttctaatatcatacaatacgtatctaataccctatccaggtatagattttcctgattttctcaagaatgtttattcgtagtgggcttgttcaaatcagaatctgaacaagggtcatgcattgcatttgattaatatgtctctttagtctcttttaatctataattgttaaccttaccacctcactcccctgcctttaaaagcaagaaaaaattggatcacctggtagaaagaatttgccacatgctagatttgattgactgcatctttgtggggttaacatgttttctttaacatgtttcttatcccctcatatgtcctttaaactggaggtcagatatagatgtttgattagactcagattcaattccatctgcaagactaaatcatagaaggcgctgtgtgttttccactactcacatcaggagttttgtaatgtctggttgactcactttttgtcatgctcagactgatcaggtattgagagttcaagtattatcagcctgatctaacttagtattaaaattccttatctgcctttcatggaattgtggtaatagccaattgtgatcattgcttggacatgtttttcattagagattgcaaaatggtgatatttctaattctgtcattccttctgcatttaacagctagaatttttatgtaatgaacttttcttgatcaactctttggttaccctgacatatagttcttatgggaaagacagaataaatccttgattctttttatttatcacatttctgaataatgagttggtgtctagcaacttccaaaggtaaccagtgaaaaaaaagttttaattattattatgaactcatggattttaatatattagatgcattagagcccatcacattattagtattttaaggagcatctttaggttggctgctgtatccttttaatatgaccccaatactcttttatattccccttgctatctggtacagcaatgtattccagggtcatcttgtatactttctaccctagacctggcattggcctgtttttaaaagagccctggtttcttttagtaaaagatggtatttagagattattggtccagataccacaggtggtcattactcctgggatatcattgcttctaggcctttcagtgaacacagctaggaaatatgtattttttagaaagagaaaaataaatgagttcatagtcatatttctgactcatatgtaagattatagggtgctattaatttatttgatttttatacctatatcctttttgttctgttatgctgaatctttgttcctaaagatattgacataaacatttatttgttttattccacaatatgtttcataattttttttttttttttgagacagtcttgctctgtcacccaggctggagtgcagtggtgcaatctcggctcactacaacctccgcctgtcgggttcaagcgattctcctgcctcagccccctgagtagttgggattacaggtgtgcagcaccatgcccggctaatttttgtgttttagtagagacagggtttcaccatgttggtcaggctggtctcgaactcctgaccttgtgatctgcctgcctcagtctcccttcataatttttaaataataaaaccaacaatattgttaacaagactactgcgatgtagcttaagatatttgtttcttttgtccttaggctatatcctactagggatacgtagtcaaaatgtcatgtttaagtaattcacaagaattattctttgtgtaatatatagttgattcagttagtatacttgtttgctttcttttttttattttgagacaggttctctgtcactgaggctagagtttagtggtgcgataatagctcactgcagcctcaaactcttgggcacaaatgatcctctggcctcagcctcctgagtagctgggactacaggtgtgcaccaccatgcccagctaattaaaaaaaattttttttttttatgagagtgtctcactatgttgcctaggctggtcttgaactcctcggctcacataatcctcccaccttggcctcccagtgttttgggattacaggtgtgagccatggcacctgcctgctttcaaattttcaagggattgctgttttgggggtttgacttaattttattttttaattactagggcctttttgttctcttatttatttcagaatcagatgctgaggctacccaggaattggcagcaggacggagaaggacagtagggatactggatatgggaggagcctctctccaaattgcttatgaagttcctacctcaacctctgtccttcctgcaaagcaggtactttaccttttagggaaatttagttgctaggaatgctagtatttgagaaggaaggacactgtctttggacttagaccaacctacctggctctaaatatttgttcagatacttgctagcttgcgttatcttgagtaggttacctctctgagcctcagcttcctcctgtgtgaaaaaggaataataatagtatctacctcataaagttatgaggatgaaataataccatgtttgtaaagcatttagcaaactgtccagcataagtgttcaatacattttaacaattataactatactaggtatctcctgccattgctgaggataaacatgataatgcatttacattctggagcacagtatttgatacatatctattgttcaataaatgttattccctttccccttactgatgattccattctgggccttctaataatccttaccccactagaatgtaaagaatgtattttgagggagaagtttcatcctacacagacactttttgtacagccattatgtacacctattatgtacacccattatgtgcaaggaatagacaatattatgtacaaggaatagacatgtgagttacactgtccctaaaaacttataatttatctgtcagtggagacagcttgtgatatcagggagactgtagcagtgcttaacttgatctaaaccagggcttctcatcgttggcactcttgacattttgggtcagataattctttgtcatcaggggttatcccatgcatcatatgatatctcttgcctataccagatgtcagtaacaaccctcccccttccagttgtgacaatcaaaagtgtctccagacattaccagatgtgtggggcagggtggaaattgcccatcattgagaacatctggtttaaacagagagctgtggcaatatggggactggcagccaacttagcttgcaaagttgaatgggagccattcttgcttcatggaaggtaaagtatttacctgggccttggatgagagtaggcttttttttttttgcagagtggaggctgagggaaggccacctgcatggagggaacactatatacaaaggcacagaaaaagcagcacagaggccagaatgtccagggaatgacgaatagccttttgcagtataggattttcaggtgtgctagtagttaagactgggaagataagatggagctaaatcatgagcagtattgagtgctatcataaggggactggcttttatttccatagatagtggaaaaccaccaaaagtttttgagtaaggcagtcacatgggcctcagtttcatttataaaataattaaactgtgaaggtccttctcagctctgaattttgtgatgatgtcagttgtgtgactgtgatctgatctttttgtagtgaaaaaatttttgtgtcagtaggagaaagaatataggtcacggaaccttgagtgagaagtaataaagggctgagttagacaaagtaagtggaaatgaaagggaggggacagatttcaggggatagtttggagtgaaaacccaatgtaattgagcgattgattgtggtagtgtgagtagggtgggaggatggccagcagtgctgaggatctatcctagataaccagaagactgaggaacccagtaactgagagaagagcaacaggggtaagggcaggggtgatattaagcaaacagtattgtcctgagagatctggatgagagcgtctatctggtcttctagttcagaagttgtaaaactaatgacttcaattttggatatattgagtttaagatacccaaggaacatatatgtcagaatatccacaggactgttggaaatgtgagtttagcagtcagcagagaatttcatgctggggttggaaatgtgggggactaactaggttgtgatactttttagtctatattcgttagtatgtatttaacaggtaaaacgaaggcatggatctgatactaagaaataggtgacaagcgggactggggcttcaagtcttaaagaaatgacttttgtgtgtgtgcagatttagaaaggaacatggttatggaaagcaacactggtacggaatgcatacttgcaagcaacaaattagatttacatatagcaggccgggcacggtggctgacgcctgtaatcccagcactttgggaagccaaggcgggtggatcacctgaggtcaggagtttaggaccagtctggccaacatggtgaaaccccgtctctactaaaaatacaaaaattagctgggcagggtgggcaggcacctctaaccctgctactcaggaggctgaggcaggagaatcgcttgaacctgggaggcagaagttgcagtgagccaagatcgcaccactgcattccagcctgggtgacagagtgagaccccatctcaaaaaaaaaaaaaatagtaactacacatagcaatataatggctcttcaagatgaatcttagtgcttggtaaaaatgaaagaaactgtgagacaatggcatttaaaacattttaaataatcctgaatgcctaatatatttttttgtacaactcacaaagttatgtacattcacaaagttgtgcagccaccactattgaattccagaacatttcatcgccccaaaaagaaaccccatattcactccccactcatttcccattagcagtcactcctcattctctcctctccctacccctgacaactattcatctactttctctctccagtggatttgcctattccggacattttgtataaatgaaatcatacaatatgtggtgttttatgtctggcttcttttatttagcaaaatgttttcaaggttcagccatctcgtggtatgggtatttcattcctttttaatggctaaacagcattccattgtatgaccaaccatgctgtattttgtttatccatttatcagctgatgaacatttcagtggttttccctttttggctattatgcacagtgctgctgtgaacattcatatacacatttttctatgtacataagtttttttgtttttttttttttttgagatggggtttcactcttgtcactcaggctggagtgccatggcacgatctcggctcactgcaacctctgcctcccaggttcaagcgattctcctgcctcagcctcctgagtagctgggattacaggcacccaccaccatgcctggctaatttttgtatttttagtagagacggagtttcaccatgttggccaggctggtctcgaactcctggcctcaagtgatccaccctccttggcctcccaaagtgctgggattataggcatgagccaccatgcccaccccagtttttggatctcttggtatgtaccttggagtgaaattgcagggcacaatggtatttttcacaaattaaaaagaaatacattcaaaacaagaatcctcattttataataatacatatatacaaaaattatacataacacattagaatggttgcccatggcagagaatggaatgagattaagtatgaagataaaagagaataaataaataaagcaaaagagaggctttgccatgataatgtggaatgagctgaggaatatgattaattcagcctctgcccttgaggttcaagaaaaaaatatagcaccttttcattggcggtacaataaaattgaactttcccaatccccaaacctgtcataaggaaccttagggcttcttggataatgttagaaaaggccacagaaccgggcacagtggctcacacctgtaatcccagcactttgggaggctgagaagggctgatcatgaggtcaagagatcgagaacatcctggccaacatggtgaaacccgtctccactaaaaatacaaaaattagctgggcatggtggcacgtgcctgtagtcccaactactcaggaggctgaggcagcagaattgcttgaacccgggaggcggaggttgcagtgagccgagagcatgccactgcactccagcctggtgacacagtgagactctgtctcaaaaaaaaaaagaaaagaaaaagaaaaggccacagaatagatcttatgatgatccacagagttccttaaatttatttttattaaaggatgttttcctattaaaataacacattcccattgagggaattggaaaatacagaaaaatacatgtgagaaaatgatatctgtagtaattctacctcctatataactacagatagtgttttgggtttctaatttcatatttagttcttaatttagtgtctaatttgtaccttttagtgcagtcttgtcattttgtgtctttgtttaaaataatgctatgaggatgaaagaatgcttaagatgttttaaagagtagtcatagaaatgaagcctcgtgtattagcaatgtcatagctttctagaaggcaaccaaaactaaaattccctttttctcttggtattgtattataggaagaagctgccaagatcctgctggctgagttcaacctgggctgtgatgtgcaacacactgaacacgtgtacagggtttatgtcacaacttttctgggtttcggaggcaactttgcccggcagcgctacgaagaccttgttctgaatgaaactcttaacaaaaacaggtacatttgatatgggatctgagtttctgaaatataatgtcaggctgcagatattagggagaaatactcacatcctcctaagacagataagtccctgcttcctccttctttctgactacccctgccaatggggtagcatctcttaaagacctctattagcagtcccactctgggtgagggtgcattctgatctttgttattaggactcataaagtacagtagcttattgtgatctcttgctgtttcccatattcagacctaacatcatgggaaaagggagatgaattaaattgccagtttaaaatgtacaatatatagtgtagctgctagcagttccttctgcatggaagtgttcaagacatgtttgttgaattacagtgcagttgcatcttttgtgagagttcagttctgtagtatgtctaaaagataaaaagcaagcatagttaaaattaacttttaaaatggtctctcatcaaattcataatagtcagtttttcctttagcattggacagatcacagattcttcatttgagtaccagatgaagtagttagaccttaatgtacaaacagtggtgggatttcttgtttcttttttgttttttaagtctgtaaaattatttattttatcattaagcacactgaaggaaagcataagagaaagcagagttcttttccatcattaaatttacacaaaattttggaatgaaaccagtttaagtaattgggtgattgattgtggtggcgtaggtagggcagggaggatggccagcagtgctgagggtctagcctaggtaaccagaagggtgagaaacccagtcacggagagaaggaccacagatgaaagggcagggctgatactaagcaaacaacacacttacctacgtatacttaaccatttagctacgaacactagcttgaagaagtactggtataccccgtttgtaataatttatccacagcaatcaattatcttatatttacggcatgttgaagaaaatattgtcccataagtctattttgtttttgtaagtcttagtctctaggagttcaaggtgctttgggagaatcctggtgccctggatgattgactaatgcattaaaatcaagtggtgtgtttgtattctgaaagtactcctaaatctatacaaacattgcttgggttgaggtgctcagatgtctcctgcaggcaccatgatgtttgaagatcatttgttttgaaagtttcacaccagttttggttttccttcttcattagctgctgtgcttccttttccattttcttcttttgttctactcctttcttttctgtctgctgttttctgctgcctccaaactacttcttgccagactgcatcttcttcccatgcgttggtattttcttgccaagtagctaagtcacctacatcaggtgactgatgagtaaaaggcatatcttgtgtagctgccagtctattaacctatttcctgagatggcaaaatgatcattgtctcttctcaataacaattttctgagttttccttacagttggtgtcacatccttaaaatagtcggttccagttgttgtaaagtgttctgttgtactgcctcattccattctcaccctcggtctttacacctgtgggcgcatcctcattctaagaagtccactcttcaacatctgtctgtttaggaactgatgaataattaactgcaattggcaaagttacttggaccccaacttaatttctgtccttggacagatcttcatactcatcattttgaggaatgagaatatggttgctaggcaagtataaactcaaaataactggacctgtgttacggccatggtgggaatcaaagctttccagtcttctccccactcagaggctccaggctctgcaggtggcttcctggagctggtgctgtgcctgttctgttccagcactgctcattcagaggcaggcatgggctccatcaccattgccagccattgcacatgggccactgccgtggtctgctcttcaggaatctctccccacagtccttcccacctcaccccctaccagttgtatttttaaacattagaaccacactccgcacgataaggtccttgcacttttaggaggtacgtgggaatgaagaccagatggagaacagcagattcacatctccaatttcactacagactaggaaatacacatgttgactaaaatgtcgaacagaattgatcaccatattcctctcttttttttctaaatttaacttgctgaagttaaatgtttatgtgatgaaattgcactccatcctcgtttctagagatatcatgaaaaccagtagtaagatatttctgatgcacattgtgtttcttagactaggttgaatacaggcatgacgtgtttgtttgtttgtttgtttttgtcattgtggcagattgcttggtcagaagacaggtctgagtcccgacaatccatttctggatccctgcctgccagtgggactcacagatgtggtggagaggaacagccaagtcttacatgtccgaggaagaggagactgggtgtcttgtggggcaatgctgagccccctgctggctcgctccaacaccagccaggcctcactcaatggcatatatcaatcgcctattgacttcaacaacagcgagttctacggcttctctgagtttttttattgtacagaggatgtgttgcgcattggtggccgctaccatgggccaacatttgccaaggctgctcaggtaaattattaatgataaacatggcttatgctggcagcagccatttattgaatgcctcactctgtgccaggtgctgtgcaaagggctttgcatacagaatctcacttgttctttgcaggagccctttgaacactcattttacagatgaggaagtggacagagaacttaaggatctagctatgctgtactgccttctaattaactaaatttattttccatggatgtcataccacccaaattattacccaggcataaaatttttgtgttggctaatggtttttcttccaactttccaatagtcttgtttaatgtttatgcccaagaaatgtcacctccagtatttttcctcttgctagctattttctgttgtaatgtgcttttggagatgatatcacccagaggggcaagcccatctttcttttgggttgaggtattaagaggcagagtggtatggggtccctgggaatattagatgttgtaaaaagcaatgatggtggaagtttgtttagatttaaaatagaggagtaaaaattcactctgagcatatataggacttaagcatcatataagtttaaatcattggtacctggacagatgaaagtttagccagctttctatcattttctgctttatttagggccatctctttgaattgttgcgtgtctctatctttttcatcagagaaacgaatgggagaatctgtcctcatatttctttttttcttgagatggggtctcgctctgtagcccaggctggagtgcattggcatgatctcagctcactgcaacctctgccttccgggttcaagtgattctcctgcctcagcctcccgagtagctgggattacagatgcccaccaccatgcctggctaatttttattatttttaatagagatggggttttgccatgttggccaggctggtttggaactcctggcctcaggtgatctgcccgccttggccccccaaagtgctgagattacaggcgtgagtcaccgtacccagcctctcctcatatttccctccctccctcccttccctccttcttccctgcctacctttctctttctttcttacaattctctagggttctcttagtgtaaggcttccagcaaaataatatctgcagtatctgtactgttctgttcccaaaagacagtccttaagaaatactgtgggacacctggtttgtatttgctcctttctctccagcctccaggacgaccttcacgctccctgtttttctggagcccagagctccctaactatccatggcctgactctttctcttatctcaaaacttcttcaaattctattcccttgaacaccaaaaggctcaagttattgggcttaacatattatcttttccaggtaaaagcgatttttttcccttacctttttaactttgactcaaacgttatcttcccagagccaccttctgggaccactctatccaaaatgacaacgctccccatattacctgttgccctttcctgctttatttttccctgagcatttatgttatccaacgtaccgtgtgtgtgtgtgtgtgtgtatgtgtgtgtgtgtgtgtgtgtgtgtgtgtgtttattgtctgtctcctaccactagaatgtaagcttcctgaggacaggaatttttgtctgttttatttactgcatgattccctggcatctagaacagcacctggcacatagcagacatacaaaccaaaaggaatgattattttggtgagaattacaacaccgagggaggccaatgacaggtttctaaccatcctcttccatctgctctccctgctcatgtcagtcctatgtggagtagaatgaaactatctttgtcttttgacgttgctatttgttagtcctaacctcagcccctctgaagcctaagaggctcagaagccacatcaagctggcttggtgctagacatgggatgacgggaataaacaggggtatgacgcagtgtttagtgaatgaacacaccatttctgttttcctttgtcagctggtagcccacaagtaactttagaaatggaacagctgtgactgtggggaaggtagagagtttgcctccaaattcatgttgcactatttctctgtggttgatccaggattactgtggcatggcttggtcggtactaactcagagattcaagaatggcctcttttcatcacatgcagatgagcatcgactcaagtaagttacttccctttcctccttagatgtggacttaaaatctagatggcagattataatggagagtgagcaataatgcagattagatttcatgttgagggagcatttgattattccagacttgattttctcagggataggggccaaaatagtgagcctattatagcaaagccagaagaaatcagtggttaccaaacagagttctcaacaagtgatttgacaacaaaagtgatttttttttttttttgagacagagtctcactttgttgcccaggctggagtgcagtggcatgatcttagctcactgcaacctccgcctcctgggttccagcgattctcctgcctcagccccccaagtagctgggactataggcacgtgccaccatgcctggccaatttttgtatttttttgtagagacggggtttcgcaatgttgccaggctggtcttgaactcctgagctcaagtgatccgcctgcctcgccctcccagagtgctaggattacaggtatgagccaccgggcccggccaaaagtgattttttttttaactttgtattatagataatatcaaacatatagaaaagtagagagaatagcaacataaaccctcatgtaactatcacacagcttcaacaaataacattttgccagtatggttcattggtcctttcatttttaaatgttttagttaaaaattgtttaaaattgccgggcatggtggctcacacctgtaatcctagtgctttgggaggctgaggtgggtggatcacctgagttcaggagttcaagaccagcctggctaacatggcgaaaccctgtctccactaaaaatacaaaaattagcagggtttggtggcaggtgcctgtaatcccagctactcgggaggctgaggcagggagaattgcttgaacccaggaggtggaggttgtagtgagctgagatcgcgccactgcactccagcgtgggtgacagagtgagactctgtctcaaaaaaaaacaaaaattgttttaacataaacaaaactagaatagtgtaatcaactcctgtgtacctgtcaccctgctttcctactaacatttatcagctcctggcccatcttgtttttatctgttttcccatccacaatccccctcttacttcaactgggttgttttgaagctaatcccaaacatcctataattacatttgtagatattttaatatgctctctgaagatagggactcttaaaaaaaagaaaaagaaaaacacagccacagtatcattattgcctttgtggtaaacacaagataagtaggctgacttagaaataacccacttagaggtgaggaaggtgaagcgggaggaggtaggtcttttaataacttgtgggaatacggagtggcttattgcaaaggaaagtattagaattcttttctctttttttaaaatttaattatttttgtcacacagatatcagtgttttaaatcggcttggatgtaccaagtcttacatgaaggattccactttccctatgactacccaaacctgcggacagcccagctggtgtatgaccgagaggttcagtggacgctgggagccattctatataaaacacgattcttaccactcaggtaaagtaagactgaccaatctggtatcttgagctcagaggatatcagttgatgcctcagaatcggtttctttctttttttttttaaccagcttagaataggtcttaagtgaccttcctctctaccccctcacaaaaacaaactcctttacttccatgtgagccactgttactaccaggcatgctcgaacagaaagaaggttgagcattactggtctggagtctcagctttgctgtttcagaaatccagctttatttgtttactcacaacaaaccagtctttaggactgagctcttactaatcacttccaagatactgacaagctaaaatgtcattcttgggttaccctggaaaacacatctgactaaagaacaggggtaggatgtctagagcaatctttcataacatacagaggcactccagacattgtgtcattgacttagaaggctttttggtgggtcagaattagaataaaggacgtgagatgtttttagtggggctactttcatcaaactctggtagcctgataccttacttttatgtactgtcagatatttgggacaatttttaggtacctgtaccctggactatttcagataaactcagatgaattttgtatctttgatgtctgttcctctaaactcaataccgtcagcagccaggcaggcgacagaagtgagggaagtgggctaggtgggggttgcccacaactggagcatgtatcccagttaatgggctggttactgtcacacacaagcactgtcccagcatttgccagttctcatctgtccagaaaagtcagaaatccatattttttatgaagtctttcagtttagagattcgcattctagaagaacactgcaggtcaaaccagacaaaactagatctggatctggactgctgaagagtggcttctgttctagccaggtggaccattacacttggttttcatatcgccttatttttatctgactgtaatacagttgatcaggtaacagctttatttagatatatcctagatcctaaggaaacatagtacctttattttttattatttttttgagacagggtcttgctctgttgcccaggctgagtgtggtggcagtgccgtgttcatagctcactgcaaccttgaactcctgggctcaagtgattctcctgcctcagccttctgagtagctgggaatacaggtgctcgccaccatgcccagctaattttttgatttttcttttgcagagatggggtcttgttatgttgaccaggctggttttgaactcctggcttcaagcaattctcctggcctggcctcccaaagtgctttgattacaagcatgtgccactgcacttggctgcatagcaactttaaaaaaaggatttagacacacacactctgatttctttattggattcaggggataccctattctcattagtactgtatttataagccatattttaagacttatgttacaggtgatcaatctagcctttctgttcattttttgggattcaatttcaaaggccttcccatcttggcttagattctggagggtgtaagcctggaggtcccttctgggggccgtgggaaggaagacacagaagggctcctggggcgggggatgttcttcagctttgcctgctctgtggagctggtgtcataaaatgtttatgtggatggaataaatgtgataacactactgggcctttcaaatcagtaaatgtctccctttgaaacttaacagttttttccacctacaaattcttaattcttccctagggatcttcggcaggaaggtgtccgacaagcccatggtagctggttccgtctctcctttgtatacaaccactatctcttctttgcctgtatcctggtggtgctactggccatcttcctataccttctgcggctacgccgaattcaccaccgacaaacacgagcctcagctccattggacttgctgtggcttgaagaggtggtgcccatgatgggagtacaggtggggccgtgaggctggaccaggactagagaagcttgagcacccccgagttgctgctcattgaattcctccactttcttatatagcctcagatgctgtgatgtctgaccttgtggatatttgcccttggaatttctactttactttctaccgtaattccttctccgtacccaggtcttctctgagagaagctataatttaatctgtgaggaactaaatgacaggagattggtgctaatacgggggaccaagctttgtccaagtgaagcaggcttcgactccttctgagaggtctggtgtgttcctagaatctcaccttttcttcccttgctaaagcatgaagtttggcatttggcacactggaagcctggttgaaatgaaatttgtagcatctgatacaaagccagagacattctagcaagtgcagcagccccttctttctctgtaacagagatatcatttatgtggagatccacaacctttaacagggatccaagatctttgcagttcaatcgaccacataggaatttccaggcaccaaaatgatataacttccttgcttccttgacaaagaagccatcatgggtgtgatccaagatccctgtcgtagtgttgatgatgttagtacatgattttaaaggttagaaccccttctaaatgaatggtctgtggaagattttagtatcttatctgatgcctggtatgatgaggatagaaaatttttccatttttatgtgcctcacaggctgtttgggcattaattttgctttttgagccttaagtgtgttagtaggatggagaaactgtgatggggactgggaacctggatttgtctgattttaggtcactgttccctgggcctgtttttgtgagcccttacacaggaagatataaagagagttctttcatttcactgctaaaatcagtatgtagtatggggaatgtatttgggttgtttttaaagaaaaggggaacagaatcaggagagtgggcaaaggcaataaaatcaaagttcttattaattatttctgagaaatagaagtttctcaatttatgactcttggaatgtctgaaagggagcaaatttggaatagatcaatctgttaataagccatctggcaactttcagaacctctattaagagactgctgagtcacaaacagcacttccattaatgaagcgagaggaaaagccataataattacatcttcacccactacccttccagagctttgcttctcctccacatttagccattaaattgcatgaggatttctcttcatcagggtccgcatggaatctttcttatattttaccctttcctacatgtagccttgaatgtcctttccacgaatatgctcccacggctgggagcattttcttttcttttcgtcacctttgatttttgggattagattaataggggaaaaagtccctggctttaaagaaaacaaaagtagaattcttcaaaaataaatttcatactgggaacagaaaggaactaaatgcttcataaaacagggaaaaagaaattaagatcatcctagaaataaactaagataaaaataagtatactgacccttggttggtagataaaaagatgaccagtcttgtattgttttaaaattagataaacatggattaagcatgcaaagactctgttcctttttttttttcttggagacagggcctcacgctgtcacccaggctggagtgcagttgtgcaacatcatggctcaccgcagcctcaacctcctgggctcaaacagtcctcccaactcagactccagagtagctgggactacaggtgtgcgccaccacactcagctaattttttattttatttttttagagatggagtctgtgttgtccaggctggtctcaaactcttgggctcaagcaatcctcccacctcagcctcccaaagtgctgggattacaagcatgagctactgcacctgccctctgtttcctttggaaatctcttacctttcattagggtttctttcatagcaatttcctttggtttttaagacttctacattgctttttcttttattatctgtgctccgtgaaccttatgaatgctgcttaaaaataatgtcaaaatatgttttagctgcctactcaggtaacgttttcttttgctctcatcttggtttccatatactatttttggttttttgtgagatctaatcaatgatctagtcagaagctacttcactggctaacagtgatcatgttcatgtgctaaaaatgaacttgaaacacggaagtagtggttggtccagtttgaaagctcttattagtattcttcatcctggctgtaataatagccattatttgttatgcctttgttatgtagcagacactcttaaggattttatgtgtattattcaaattgctattactgttctttttatagttgagaatctcaggatacctacatttatcactttttcaatatatatgtatttcttattcttattttgtcttggagtgtttaatgtgttatttcctgttcattactttaatattatggtatctaggcttgtctttattaccatgagcaaggtctccaggagttccacagtactgaaggaaaattttgtcatatccctcagaagaactgaatatttattattggtatgggctcctttgtttattctcttctcccaattaatagattttaaatgaaatcttattagctagaaacaaaagccacttactccttgctgagagccaattacttaaatatatttcttccttataataaaataatttgcttctaggagcagaaatctatcttgccataccctttggtttttaaagatttctcttctatttgcatttctgcactttggtggttctcccatgaagataattatggtgtcataaaattcacattccactggttcctttgaatcttaccaaccactcttgttaacagagacaatgaacctgaactgttttaggactcttgttattactgagacaggtcacaaacatcaaaataggagtccgtggcttgtagtgatgctttttagtcttgtgatagcacaatccatcactttccccaaaattcttgtcatagaacataatgaaaaatatgtaaaatacccatttatgtggcatttcattcacttaagttgcagttaactctaagccaaattataccattttttctctctgtactttagctccttgaatttccttaatctgggaaacttttgttcccacaccaaggaacaaattcagggggtacaagtgcaggtttgttacatgagtatattgagtgatgctgaggtttggggtacagatcccatcaccaggtggtgagcatagtacctaacagatagttctttaatccatgccctcctctctccctccctgctctagtagtccacagtgtctattctggtctgggaaattttcatcactttccaccaatcttctatttattctccaaatgtcttccaaagtatcctgccccaccccctcctcatcctaagagattcctttaacttcaagatcatatccagtgattgctgaaaaatgtctgccatgcacttgctaagctagtgtttttaggcattaacatttattatcacatccatatttatatttttgaaataatttatacttctcactgatatcatctaaacagatgcttctcacagttttatgttttgttttttgtcagggatgaaagacaagtgagtggtatcacttaagggaaagaacagtaggcttaacgaatagcagacctggattctagttctggctttgtcatttactagctctggtaccccaggccagtcacttaccatctctggttcggttctcatctatcaaacaaagaggctagacaagattagaaactaaaggcagaagacaaggtagaaaaatcatatgattttgggaagagcattttgtcctttggtttagaagaccaggctgcccaaaagagcctcctattttatccataacccctgatgataaggttggtgggaacagagtttctaatagtaatcataataaatttcagaagagttttaaagcttctggtcaacccccttgatttatatgggtgataaaactgaggcctagagcagttgtaatatgtgcaaagtcatagtgactggcctcctagcccaactactttgtcagctacaatgaaatgctcattaacagaatctttctgcaagtataaacagaatctattttttataaaacagctggccacaactaaccatgccccatctttacaactgcttctgacattcatttatgactgctttgctcacatttaggaataaactttgaaaaaaatactttgtcagaaatagtgccaagttttcactacatctattcttgttcctgtatttcttttcgtacttttaaattttatacatctttttaaaacaattttatacaatttcctttactacaacatccaagcaattcattagatgactacagcctagatgaaggtataaatgcctattacatctacctcattaaagaacttcgttgtaattcttgggcagtttccagactctgttacagaaacagagggctgtttctttttgttgtctttaaacttttcaaattaattcaaaactagtatctaattgtcctttttgctgtggtatgtggtgtaatgttgattgggaataagaattatggtagaaatagcagatgtttcaaattctcccatattagtctcttagggacgctagctccagattccagcccctggggcaataacttgtgaggattttcctggtgttacaaaaaatattgctgttaaaaaactaagactcaaaaccaaaagttgtgattaataataacaggattattagtcaataatattttgattaatactatagaatagcaacagtgaatatacctcaaattgaaaacttttaggttgtgttcttggctcattctctcataacctggatctaagttggaaagctgtggcaccctgtttgggtgtcccatctaccctgttttctgtttctgcagatggcttgttcaagcttcattttaagcctgctctgtctacttatcttccttatatcctaatagacttctcttgtgttattacacatttctcttttgctctaatatttcattattttccagtttgtcagtaccgttatcagagggacgaggaaggaataacacaccagttgaccattttgtttctctgaaaatctgagcaatacggagatccttttattagtaaaactgaatcattactcatactacaagggctttcacttttaaaatgtaatccatcattgcttgccatttttatgaaaaccaaagttgaaaagtcttctgaatcacaggctatgtatagccacacatgcatgacttcaggctagcataaagacatgtctgctcctgagcctcttcttttaaagggcaaccacttgtataccctctggtggccactcctccttctccactccaaggcagccctggtactttcctaagtggcccctcctacagagcacttgccggcatttggcctgctgctggtgaagacgccccttactagcttcataaatgtttttctgcaagcagggatcccagacacatactttggtttctagtgtttcagttactatgttgtatttgaaattctcattccacaattaccctttagttgaagtcctgaagtacatgccatgtactccccctttatttctaccttgatcaatggcctctgcggagtgtagtgaaagacatctttttattatgatctacactttaaaaaaccaaaggctgcctgtattacattgctttggggagttgttaagactctgttttttctactgcttcacattaaacaataattttgttgaattttgaattcttaaaattctcactgacaaacattttaggtcagtgttgaggaaaatgtgtgatgcatgttagagaggtgatgcattctcccttatgcagggacatgggtatatgtgttacatatgctgatatataacccaccattcatcccaggaccacaagggtagctgtagataaactggttatcctaaaatcatgattatcagtgttgatctctgcaaccaacattgctttagggagttgctagtcattacccctgctacaatagatagtatttgtcagtctaagttacagacaaaaaattctaggttgactgattaagaaagccatgtgttttaatttccttcatgttttaaaaacaatggacgtaagtgcagagagacctttgaaaatattaagggaaatctatttaatcctataggtatgtgatgacttgtttttttggaaaaaggtatttggaacatcaatctgtaattatccattttccattcatgcattcactaattcaatatttgatatgtgtctgggagtgctgggaataacataaatacaaaaaaaaccctaagataatcattcaccagaagctcatagatataatacag

SEQ ID NO: 2531 - DNA, 639 bp, Homo sapiens
atcttgactcactgcagcctcaacctccctggctcaggtgatcctcccatctcagcctcccaagtagtttggactacaggcacacaccaacatgcccatctaatttttgtattttttttgtagagatggggttttgccatgttgcccaggctagtcttgaattcctggctcaagtgatctgcccacctaggcctcccaaagtgctgggattacagccatgagccactgtgcccggccccttttttaactttgtattggggatactgtcagaacaaaaagaagtggtttatacctgtgtatacgccaaagccagcagagtcactgctgccatcttggtccttctaggaaggggaattctccgagagaggaagtagagcactgtaatggcagtgactgaagtgattccctgcagggaagaaagagtctatcacattagatagaagtgccaggtttctaactcaccttacatgtatctcctctagaaccactcagcaaccatgaagtactttcctgtaccagtcacagagaacctccctgcagtcccagcctgatcactcctccacaggctgtctcttccaccatcctcttctgcttgccacttaaacgtcggtatcacccaggctccacctaagattctgt

SEQ ID NO: 2532 - DNA, 321 bp, Homo sapiens
tggggggagggggagaggcttattagcttagaaaaattcccttagtgattttgatgccctcctcaccccgccactgagtgctactgatttattttagaaatgctctcccacagatgtctgcatgactgactcccttatttcctcagcttccactcagatgtcaccttaccaaagagatttcgcttgatgatcctagcccactttctgtctcctgaccctaatttatttttcttcatggcactaaatatcatctagcacattatgtttctattgtgcgttatctgtcttccccaaatgctcaataaatgtttgttgactgaa

SEQ ID NO: 2533 - DNA, 182 bp, Homo sapiens
gaatttggctggggttggggtagggggacaggggtgaataatgaggacaaagacattagattagagaaatggtcctaaaatttcttccaaagagagcaggaaatatagttcctgctctaccctctcagtgttgccatcagtgcttcactgacaccccaaagcctatgataggctcctgtgct

SEQ ID NO: 2534 - DNA, 2069 bp, Homo sapiens
tcaaattgaaaacttttaggttgtgttcttggctcattctctcataacctggatctaagttggaaagctgtggcaccctgtttgggtgtcccatctaccctgttttctgtttctgcagatggcttgttcaagcttcattttaagcctgctctgtctacttatcttccttatatcctaatagacttctcttgtgttattacacatttctcttttgctctaatatttcattattttccagtttgtcagtaccgttatcagagggacgaggaaggaataacacaccagttgaccattttgtttctctgaaaatctgagcaatacggagatccttttattagtaaaactgaatcattactcatactacaagggctttcacttttaaaatgtaatccatcattgcttgccatttttatgaaaaccaaagttgaaaagtcttctgaatcacaggctatgtatagccacacatgcatgacttcaggctagcataaagacatgtctgctcctgagcctcttcttttaaagggcaaccacttgtataccctctggtggccactcctccttctccactccaaggcagccctggtactttcctaagtggcccctcctacagagcacttgccggcatttggcctgctgctggtgaagacgccccttactagcttcataaatgtttttctgcaagcagggatcccagacacatactttggtttctagtgtttcagttactatgttgtatttgaaattctcattccacaattaccctttagttgaagtcctgaagtacatgccatgtactccccctttatttctaccttgatcaatggcctctgcggagtgtagtgaaagacatctttttattatgatctacactttaaaaaaccaaaggctgcctgtattacattgctttggggagttgttaagactctgttttttctactgcttcacattaaacaataattttgttgaattttgaattcttaaaattctcactgacaaacattttaggtcagtgttgaggaaaatgtgtgatgcatgttagagaggtgatgcattctcccttatgcagggacatgggtatatgtgttacatatgctgatatataacccaccattcatcccaggaccacaagggtagctgtagataaactggttatcctaaaatcatgattatcagtgttgatctctgcaaccaacattgctttagggagttgctagtcattacccctgctacaatagatagtatttgtcagtctaagttacagacaaaaaattctaggttgactgattaagaaagccatgtgttttaatttccttcatgttttaaaaacaatggacgtaagtgcagagagacctttgaaaatattaagggaaatctatttaatcctataggtatgtgatgacttgtttttttggaaaaaggtatttggaacatcaatctgtaattatccattttccattcatgcattcactaattcaatatttgatatgtgtctgggagtgctgggaataacataaatacaaaaaaaaccctaagataatcattcaccagaagctcatagatataatacagttatatagctaaatgcaaccagttgtttttccaaatgtactcatcatctgtaataaaagaaaaatgaagtaaaacatctgaaaccttaacttactcatgagttgctacttccttggaggcaactgtagaagcattaatatatggttctttgggttgggtcatactgccctctgctgactcagttactaactaaggacaacctgggtttgaggatcaggagaggatggtgtgggaacctgcctcaggaactacagttccctttctttgaaggattctatccagaagagaccatatcctactaacatactaataggagcaacatagcagatcaaatgataaggtggggtggaaattagaagggaatgggaataagctagtcagaactttctaaggtaactaggctattaggacctaagccagtggtccctagacttgtctgcacattggaatcacctggggaactttaaaaatatgccttttacttcctccagggattgtga

SEQ ID NO: 2535 - DNA, 303 bp, Homo sapiens
aggcgcggtggctcacgtctgtaatcccagcactttgggaggctgaggcaggcggatcacgaggtcaggagatcgagaccatcctggctaacacggtgaaaccccgtctctactaaaaatacaaaaaattagccaggcgtggtggcgggtgcctgtagtcccagctacttgggaggctgaggcaggagaatggcatgaacctgggaggcgaagcgtgcagtgagctgagatcatgccactgcactctagcctaggagacagagcgagactccatctcaaaaaaagaaaaaagaaaaaaaaaga

SEQ ID NO: 2536 - DNA, 23934 bp, Homo sapiens
ctccgctttcgcgggggctgctggggcgtaggtgtcggggacgcgcgcacgggcgcgcgcagctgttgacgcgcttcttagctggtgcgcgccggagcccaaattccaagtggaaactgcaggcgcacgagggaggaacgcgtggagcatgaaaaggcagggggcctcctctgagcgaaaacgagcgcggataccgtccgggaaggccggtgcggaaggtggcgggggaggggacggtcggccgaaggctccccggggcgggccggcgggagtcgtagtcagtggtgatttcttctggagtcgtttcctcagctccttccagccccttgggcggcaccttctatctttgaggcgttaaaggtgtggaaacggagggcgtgacgaggggcaggtagcgagaatggctcagctgtggagccaaggttcgagtcccggggtcccctcataacggccctgcgaccttgtgcaagttggttaacttcagcttcacgttttttccgtcgccacacgaggatgccagtaccgcccgcaccagcagccagtactccgctgggatagttaattgtcgagcgcggagcccagttcctaacctgcagttacctgtagctgccacggcggggacggggcttggtccccaaagtcacgcagctaccaagtggccgagcttgtggctgctccaagacccgagttcttcctgagtgccagggtagcatggcatggcaggtgccagagaatttggcaagtccctcttcctccgtgaagaggaaccttcctaaaagttatcaagaatcctcaaagattttttctttatgtggattacatctatctattttgactgtattagaaattaaaacaaatttttttttgggaggccgagggggacagatcatctgagctcaggagttcgagaccagcctggccagcatggtgaaaccccgtctctactaaaaatacaaaaattagctgggcatggtggcaggcgcctgtaataccagttactcgggaggctgaggcaggagaatcacttgaacccgggaggcggaggttgcagtaagccgagatcgcgccactgcactccaccctgggcgacagagcgagactccgtctcaaaaaaataaaaataaaattaaaacaaaattttaaaatattgattagaaaataaccatagtaaacccattacatattgacataatatttttttgaaaaagaaatattcctaaacaacaacaacaaaaaaagcaaaagagtggaaatatatttttgcaagtttcttcagtatatcttaatggaagacagctggattctcatgcccgctgcttcattcagtctaacatgtcaagtagcctcttgaaaacgcctcttcacggaggttgcagtaagccgagatcgcgccaatgcactccatcttgggtgacagagtgagactctgcctcaaaaaagaaaacgcctctcacttgtgagagaattaaagtgaaaaagtcaaataaagtgttagaattattaagaaaacggttgtagccctgcagactctgaaaagtctcagaggctcccaaagctctctggactactacactttgagaactgctgctgcttctcctttgatcctataactttgttgcttgggacaactgccttgctctgccttctgtcatagccttttttatacatctctccatcttctcctgcctagggtcctttcttgtgtgaggcaaatagtcccccggcagcatcagcatcggccagtgccactgatctgacagctggtctggtagctaccaggaaactcatggagttaataatgcagagctgttggttaagagcatagattgacacttaaccctttcacagtttgggactgatagtattttttttttttttttttttttgagacggagtctggctcttgtcgcccaggctggagtgcagtggcctgatctcagctcactgcaacctccacctcccaggttcaagcaattctcctgcctcagcctcctgaatagctgggattacaggcgcccgccaccacgcccggctaatttatatacttttagtagagatggggtttcgccatgttggccaggctggtctcaaaatcctgacctcagatccgcccaccttggcctcccaaagtactgggattacaggcgtgagccaccgcgccggacagggactgatagtcttaaataagtaaggcaattgcagtttgatgttagcagatgataggtttttgttttatttgtttttcaaagtaaaaattgcttttttaaattataaaagcaatattgggtagaaaaaataaagcaataaagaaaagtaaaaagaagaaaataaaaataatttcaaatcacaccccaccagaagtgaccattaccagtatgtgaggaacattctagtaagtgtcattacatgaagtgtgcattgtttcgttcatttttttaaattatgtgctcccggaaaaaaactcaaaactctgtttacatcacactttgtaatataaatacattaattttgttgtaattattcagcttttagtaaatatttgattattgtgtaccatggtagatactgtgcttggtgtgggtgatgataaagatttctcacataaagaccttacttaggaggccagacgtggtggctcatgcctataatcccagcactttgggaggccgaggctggcagatcgcttgagtgcaggagtttgagaccagcatgggcaacatggcgaaaccccatctctacaaaaaatacaaaattaaccaggtgttgtggcacatacctgtagtcccagctactgaggaggctgaggcacaagaattgcttgagcctgggaggcggaggttgcagtgagccgagatcatgccactgcactctagcctgggcgacagagcaagactctgtatcaaaaaaaaaaaaaaaaaaaaaaaaacaaacttaggaactctaagtcaagtagaagtgatcagatatttatctgcataaataataaaaggtagaaagtaattcatattttaagaaggaacaattggggtttcataactcatgaagagttaaatgagttcaaaagagggacataaaattttctactttgggagacagaaaaaatcatggaaatgttccttgaaaaattttattcagagatgaagccagaaggaactctgggttgaggagaaggcattggggagccagcggtagggactggagagatctggaagcataagaaggaatgagacagagtatcactctgtcacccaggctggagtgcagtagcacaatcttggctcactgcaacctccacctcctgggttcaagcgattctcatgcctcagcctcccaagtagctgggattacaggcgcatgccacgatgcctggctaatttttgtatttttagtagagacagggttttaccatgttggccaggctgatctccaattcctgacctcatgtgatccacccacctcggcctcccaaagtgctgggattacaggcatgagccatcacacccggccagataactaatactttttgattcttgagactatatactttacatgaattatctaatttaatcctcactactctgaggtacatactaaaatctaccttgttttatagaaaacttaagtaactaatctaggatctcacactaaatagttggtgggacatggatttgaagtctgtcctgcttttaaacctatattccttataaagaagtttaaatatattctgcaggcattgagaagcattgtaagaatctcagctggaatgtgatgatgaggtctatgttttaggaagattaatttggcattcgatagacattttcctcagtataattttttatacatctgtctgtgtacctatttcagtctataggcatcaattcaataattaatgtgatattttattgcattcatgggccctagtgtacttatctattacctgttattggacatttgcattttggcagcagaatgtaaaccctttgtggtaaattggtctggatggatagaacctttatgaactcttaccattctccatgtattttaggagcagcaaatggatttctcatggaagtttgtgttgattcagtggaatcagctgtgaatgcagaaagaggaggtaagagaaatcagatagtgaatgaccgttggctacccttttaagagtctgaaaattaatcctgtgtgcttatctcagaagcccttgtgatctctaagcatccctcataatgctttcagaaacaaccaattagaaaccctactggaaaattatgatctagtctctccctctccccaagtgggtcacattttaagtcaagtgtcgacaatagtacttactcaatgacttgattttttattgaacttagcaaaattttaatttttttaaaccattaacttaaagatgacttcagagacttcatcatgaggaattttatcttttttacttttgaacattatctatttttccctcaaagtttctgttgtactctgaacctgttttaatgggaagcacagacatttccatcatctcaggttcagaaaaattaaaaaaaaattttattatggaaaaataaacatatacaaaagtagagcaaataggataatgaagccccatgtatgcatcactcatcttcacccattttcaacacatggccagtttttcatttatttcaggggtcaataaactttttctgtgaagagctgcatagtatatatattttcagccttgctggacacatttgatctttatcacttattttatttttaaatcttttgaaaatgtaaacatcagccgggtgcagtggcttacacctgtaatcccagtaattggagaggctgaggctgccagatcacttgagctcatgagttcgacaccagcccaggcaacatggcaaaaccctgtctcaacaaaaaatagaaaaattagccaagcgtggtggtgagcacctgtagtcccagctacttgggaggctaaggtgggaggatcacttgagtccaggaggcagaggctgaagtgagccagtcacaccactgcactctagcctgggtgacacagccagatcttgtctaaaaaaaaaaaaaaagttaaaaaaatccttcttactttggcaatagaaaagaatgaagtactgatacatgctataatatagatgaatcttgaaatattattctaagtgaaagaaaccagtggaagaaaatacaacatatgattccatttatatatatccaaaataggtaagtttatgtagacagaaagtagattaatagttgcttagggctgagaggcatgagaagggtaggtgactgctaaagggtgtagggttgttttggggatgatgaaaatgttctaaaattacttgtggagatggttgcaaaactctgtgtatatactaaagagtactgaattgtacacttttaaatgggtgaattgtattagtgaattatatgtccataaagctgttgtttttcaaaaagaatacaaaaacattcttagtttgcaggccatagccaaaacaagctatgtgcccatagcccacatgccatggtttgctgacccctgatttatagtcctaccttcctctcccaacctcagattactttgaagcaaatcccagacatcatgttaattttaaatatttcagtgtgtgtctctaaaaaataaagactcttgccgggcgcggtggctcacacctgtaatcccagcactttgggaggccgaggcgggcggatcacctgaggtcgggagttcgagaccagcctcaacatggagaaaccccgtctctactaaaaaatacaaaattagctgggcgtggtagtgcatgcctgtaatcccagctactcgggaagctgaggcaggagaattgcttgaacctgggaggcggaggttgcgtgagccgagatcacgccattgcactccagcctgggcaataagagcaaaactccgtctcaaaaaaaaaaaaaataaggactctttttttgttgtttaagttctttattgttttcaaaggcctagtatgcatacatatataagaaatccataaataatgtggaattattaatgtatattgtttaagataaggtcccttttaaagaacaaaacaccacaatgtcactaacacacctttaaaaaaatcatttcttaatatcgtcaaataacccagttttcagatttctccagttgactcatacagggtgtgtgtgtgtgtgtgtgtgtgtgtgtgtgtgtgtgtacagttctttgaatcaagagccaaacatttcatttgttttatatgcctcttaagtctctttaaatctgtaagtttctcctgcttttttctttaattctttgtttactttcttaagatttatttgttaagcaactgtgatattcatcttttagagtatcccatactctcaattttgctaattatatgtgtgatatcgtttaacatagtcctctgaccactgtatttcctataaaggtagttagcccagaggcctaatcagattcagatttcagttttgacaaaatttatttatagataacattatatacttcctgttgcatcacatcaggaggacataacatgttggtttttttctgtttttgtgatattaagattgaacagggagttcaggtattgccagcctaatctatccttaaggttttctgtcagcttttcacctaataaatttagcaacccatattttagtaggggttgcaaaatggtgacatttatttttcacttatgaactagaatagttctgtaaagaactttccctcatcctctgtttggttatgctgaagtatggtttgtataagaaaggcagaataaatgcttgcttattttcccttatttattataatactttttagaataatgaatttgttctctgtcttcccttgaattgttttgtcattatgaatgtagatttagatatattttgtgtgttttaatccattgtagttattctgcttattgatgaacaaaatgttctatctttggctagtgagagcttcttcaaactggttcctgagatcttttgatgtgaccttggtagcctaataattcttttggtttcagcattttcttattcttgaaattatcttggtttagctactcaaaagtagctttgtgttttttaaagcttagaataataaagacccttttgggaaatattatgttattttcttatcaacaaagactcagtattccactatagtcagttttaagaaacatctttattctatgttactttcctgtacatagagaggcaaccctataatacaaaaatttaagagaactagcttaactttaattaatttttaaatttgagtatgagtaacacaatgtgggctgcagagtatagctgagttaaaaacagagttttactctagctttataatttgatttctctgagatgatttctaagactgttctatatttggaaaaaatatatataaacaggttgctgtttaataacagcttattttttaaaaatgtgttgagcaatgcttttatattacaggtgctgatcggattgaattatgttctggtttatcagaggggggaactacacccagcatgggtaagtgtccatttttcccaggttttctgattggagttcatagagcctggaagcaactgataatcagtttcgttggggtcctttactaatgtcatgttaactatgttatggatgttgtatcagaaatgtttatgattgtaaaaaaatcaaagatttgatcaaacatatttctttctcacatcaaaaagttgaaaggtaggtaggtaattgttaataccggttcagctgctctgtagtaacatcaaggattaggcttttataaaatctttccatgctggcatccttagtatattgaaatcccctcctggtctttgtgctattgttgtcatatattttactcatacatatatcaaaaactccatgctgtattgttagttttgtttgaagagtcaattatcttttgttaaataagagatttaaataataagaaaaaaatcatatatttacccacatgcaactaccatttctggtgttctttattcctttgtgtagatcccgtatttctgtctggtttcattttcattctgcctgaagtactttctttaactttttttgttaaaaagtatgctagtgattcattccttcagcttttatatgtctaaaatagctttttccttcatttttgaaaggtatttttgctgggtatagaattctaggttgacaggttttttttttctttgaagatgtttttccattgtcgtcttgcttgtattgtttctgacaaaaagctatcatccatatctttgtttttctctatgtaatatgtctcttttttctacctacttttaagatttttttattattggttttgaacaattttcttatggtgtacctgagtatagttttttcatgtttcttggacctgtgcatttatacttctcatcacatttggaaaattttcagcttgcagcttgttctccactccctcctttagagacttaagctattcttacattagactacttgaaattgtcccaaaagtcactgatgaacttctctatttaaaagaaaatctcctttctgtgttttcattttgcatagttgctattgttttgtccttgagcttactgaccttttcttctgcactatctaatctgctattagtctctcctggtatgttttcatctcatacattgtagtcttcatctgtagaaatttgagtctttttatgtctctgatgtctcttaacttttttgaacatgtggaataaagttatgatagctgttataatgaccttgtctgcgaattctaacatctatatcagttctgggtttgtttcatttgatttatcatctaataatatatcttattttcctgccttgtaattttttattggatgcaagacattgtgaattttactttattggttactagacatttttgaattcctacaaatgttccaaaacagtttggtccttttgggtcttgcttttaagatttgctgggcaagtctggagcagtggttaatacagagctaattattccttactactgagtcaggattcttctgtgaactctaccctgtgaccatgaattttgaaattttcctgtctggctggtggaataggcattattcacagcttggtatgaatgacaggcacattatttctaatcctttttattggttctgtcccaggccttgcgtagtttctttgcatgcatgcaccggtcagtactcagctgaatattaaaggaggttctctgcagacctccagagttatctgtcttcctttcttctttcattccttcctttcctttcttttctttccttctccttttctctctctttgctttccttccttcctttttttcttttgacagggtctcacctgttgtccaggcttgactgaagtggtgtgaccatagctccctacagcctcaaactcctgggctcaagcaattgtcctgcctcagcctctcaagtagctaggattacaggcatatgccaccatgtccagctacatttgtttgtttgtttgtttggtagagatggagtctcaccattttacccagactggtcttgaactccttgcctcaggcaatccacccatctcagcctcccaaagcactgggattacaggcatgagccaccgtaccaagcctatcttttttaaaaaaaatcctttttttaaaccattgagatagtctttgctactccagtgttatctttctgtcctccctgtactgtctcctataaactctagctacttcagtcttcctgaactctaagctttgtctccttaactcagggaattgttttggctccatgtgggtcccccatccctgtgctttggcctagaaactctcaaggcagtaaattgggtcaatcagaattgacttactaacttcattgtttaccattttcaaggatcattgcccttcactgcttaatgtccagtgtcttgcaaaccactgtttcatatattttgtctgtttttttattattattattattataggtgggagggtaaatccagtcactgttaccctgtcttggccaaaagcagaagtctgtgtatgaattgtggtctcctaagttatgctactctgaggttgataatagcattatttaatgtaaaaagtttgtatacacaacagccctttggaatcttcacatgaaaagagggcattcctggccattctaaaatccctagagcatgtctgtaaatttgagtacagtctgtttttgtaacaccaattatgattcattgcttagtattggacaactgctatcctatgcaaaattggagttcttttagcaagaaaaaagaaagaaattcatactgggtaaacaactgatggggcctgtcacagccttatactattgatggtttatgagctagccacttattatggcatatttaggtacttttatgcatagatctctgcataaaatcacaaataagtagaactttgctccctttcacgtatcttgtttaaaaaaaaaaaaaaaaggttttgctaaatgtctttgcccattaaaggaatatgaactttgaagctatttaaccatctctccagtaggttttaaatagagctgtaatgaattagaaagaagaaattggatcttggggaataatgtactggcagaacatcgagcctggtagttattgcactttcaaatgtcacctaccaataaaagggttctgagtcataaggatttttgttgagtcaactgacaagtgcttttaaattgtagcatcttctgttttctaaatcgttctatttaaccctttgctattacttaccttctaccatatatacatttttcttctcagtgtctgtcctaccttttagagccatctttgtctggtaaatgaccaataatatatcattggcttttagctcacatttgaattttaatctgctttcttttcttgtaggtgtccttcaagtagtgaagcagagtgttcagatcccagtttttgtgatgattcggccacggggaggtgattttttgtattcagatcgtgaaattgaggtgatgaaggctgacattcgtcttgccaagctttatggtgctgatggtttggtttttggggcattgactgaagatggacacattgacaaagagctgtgtatgtcccttatgggtaagaatttgtatctaagacgtaaaagcctctaatgataattgtatttatgctcacaatatagaaaaacaacatcacaaaactgactttgcggtcatagctacagacacttatactaacctaagtatttcaaatagtagttatttagatgtttggggtggggtgtatgtgtggcaaagccttcttaactctcctcaattgctatagattaggctccgctactgttcccatagaatagaaatttaagggaaatttaccatggttcctttaaccactgcaccaagaacttcaaaagtattatagttggtgaggatggaccaccaagttggaagatgcaaagaggacagaagcaaactacctatgttactaaaccaaagtacttattgaatgacctcagagggacaagtattagatgtaatgctgcccttatagttgtcagattaaatggttttcatttggtgataagccacgaccatttttttgtataaaaatcagagatttgtggaaagataagacttttgaatttgtaaggctgccattttattattatgtcagtttactgtcttgttaggcgaagaaagtattaaaaagtttcagctaacatggagaattctatatatagtaatcagtgatgacatcttcattcatgttgttatatgactttctttttatagctatttgccgccctctgccagtcactttccaccgaggtgagtcattttcattttaaaagttctattgaacagtgttagttttctaatttcaacaactgccaccacctttttatggaacacaattctgtagtgttccaaggttaccaattggttttttagatcctaggactaaaagttataaaagtagagatgtgcaatttctagaaaatttgaagccttagttatgaaaagttgttaaaagtgggtgtaggtggtggtgggatataagagagcgagggagagagcaagtattgccttcaagtgtgtgtacctatcatagcattccaagcaagaatcctgagactcattttaactgagactgtattaggtcatgtgcaaccccaaaagaataaattgttgtggctggtgaaatgaaaggtactgtctatcttaagccaggcaaaaccatccctggggctagcagtgaggtggggtttcacagatagagacttcttaaggggagagaaagttgggtatctggagaagaattgggtcttattaggaagggagaaaggagaaacagatgcaatctagtgttgactatctagtcaatgaacagatgtccacaatagtatacaaaattatttttcattatagcttgtctgcaccacagtgattttttaatgtgatactttcttgtaaagaaatatttcctgtaaaaaatcaggtagatataattttttttgtttgtttgtttgagacggagtctcgctctgtcgcctaggctggagtgcagtcgcacgatccggctcactacaacctctgcctcccgggttcaagcagttctctgcctcagcctcccgagtagctgggattacaggcgcctgccaccatgcccagctaatttttggatttttagtagaaacagggtttcaccatcttggccaggctggtctttaactcctgacctcgtgatccacccgccttggtctcccaaagtgctgggattacaggcgtgagccaccacccctggccaaaaaatcaggtagttataatttctatactcttaggctacaccttggtaaaatggaagaacaagtatctattttgccttcagagagcactgccattgcacatgaaaagaagtctacagtcaaaaaaaatttttttacttcaaatttctgttctgttctttattccaataggtttaacaaaaatattttcatattttcaaaatttgtagaatttttgggttccacatttttctcactaatgtatttaatgagatatcataatatagttttagtggtgagaaggtgctgccaccaaaatagggaaatcctctgtggtagatttagttgcctacatacactaaagggtgaaatgaaggggcctgtcccagaggaccactaccacctaatccactgcaggctagagcttcaatgtcatgtagcagtatgagaaccaaagcagaagtagattttctgttttcagtttcctgataccactttactctttgagggctctgaggaggggagaaatctcttagaaagtaggatggggctgggcacagtggcttacccctataatcctaccactttgggagaccgaggtgggtggatcacaaggttaggagattgagaccatcctggccaacatggtgaaaccccgtctgtactaaaaatacaaaaattagctgggcgtggtggcgcatgcctgtaatcccagctactcgggaggctgaggcaggagaatcacttgaatcagggagtcagaggttgcagtgagccgagaccgtgccactgcactccagcctgggcgacagagcaagactgcatctcacaaacaaaaaaaagtaggttggaagtgaaacttcatatagtctgttgaaaacaactacccttatgctatgaaccttgagtatgtggggttaatagattaatccaaaatattagtcagtaatgagaatgtgagccaaggctttttctagaactggtgagtacagtgtttcattctacctagtccaatatttctgaagccttagaacagtttcccaaatttgactcacctgcctatcacatttaaaattttaccatatatgagtgctacctgtgcacatttttatttaatcattttctttaaataaaatcttaagtatgcacccataaaaaagaacaagatcatgtcctttgcagaggcatggatggagctggagaccattatccttagcaaactaacataagaacagaaaaccaaataccacatgttctcactcataagtgggagctaaatgatgagaacacatagacacatagaggggaacaacacacactggggcctttccgagggtggagggtgggaggacagagaggatcaggaaaaataactatgagtactaggcttaataccttggtgatgaaataatctgcacaacaaactcccaagacacgggtttatctgtataacaaacctgcacttgtacccctgaacttaaaaaaaagttaaaaaaaagtaaatttattttaaatagaaacttttataattactttatattgaaaacttttcatttcttatctgcatttaagtaaatatactatttaaatgtgtaccattattaaaatgattatgcacagtggtatgtagactgtggtgtgctgatgaactggctcctagaaaaaagagccctgatttgtagcatttttaaatttctgtggtttaaatactctaccttcactgaatttttttattattattaattaaatttttatttttcttttgagacaagtcttgctctgtcgtccaggctagggcacaatggtgcaattggctcactgcagtctcgaccccttaggctcaggtgatcctcccatctcagcctctcgagtagctgggactataggtgcacaccaccatgcccagataatttttgtattgtagatatggggtcttgccacattgcccaggctggtctcaaactcctgcgctcaagtgatctccccacctcggcctcccaaaatgccaagattataggcacgagccactgcacctggccctaccttcactaatttcaggctgccagtggattaacaatctgacttgcagaattcttgagtgtttaataattggcctttgtaagccagtacaagctaggtccagcatgccactgcatgtatactacattttgggaaactctgcgttagagatacctgttcaaaattcacatcagttttatttatttcagcctttgacatggttcatgatccaatggcagctctggagaccctcttaaccttgggatttgaacgcgtgttgaccagtggatgtgacagttcagcattagaagggctacccctaataaagcgactcattgagcaggtacgtggactttatctttttttcccctaagactctgttgtggttactcctgacattctgctgtttagccagtttgtgagactatatattactgactttgtggttactctgtaggaaaagcaagcaggcaataatgtatataattcttatttctttcacacaagcctttttaataaccaaggctttcaagatcaaattacatatagatagtgcctaaagatctgatctaacttggataagcacagcaaattttaccttttctctgccatgggcattgcagttttttttactttttatttttattttttagtttagatataaggtcttgctgtgttgcccaggctggtctcgaactcttgggctcaagccatctgccttccttgccctcccagagtgctgggattacaggcatgaggcactgcgcccagccagcattgcagttttaagccacatcttttcattgtcagcccatgtatattcaggggatcccatataaaattatcatctggaggtaaattccaaaactaaaattataatcttatttcttctcatctgtcaatataagaggaaatatatttttctattttatgagttttcctggtgagctagcatcatttgtagagcactcagaaggtgactttgtaattaatagtatgtgtatttttctgatgtcagtccagaggcattataagttagtgagtacagactttgagatgagagagttgagcgtttgagactcgggtttgatacttgctatgtgatgttgagcaggttaatagtctttaagcctctctttccccctgtgtgaaactgagatgagtttaatacttattttagagtttctcagaagattgctaaagatgggatgtgttagaggcttagcacagtggttggcatatactaggtcttaataatgttaggttctgttattactgctattattaataatactaatgttcctgtgtagacatctgcttattttcacttttctatagccatgaaaataattttcagaaatttctcctaaagatctgatgtgactttgctattctgggatgtaatggtttcacagacatttattaaatatatattagatgcaggacatttgtactgtgggggtaaccaagggctaagtgtctgtgtgtagtcactatccttacaatttagtgcagaacaggcacttctaatagagcaggcaattttaatagagctctatttttaaaaggtactataggagtacattggagaggaattaaccccaaatttggggaaatgaaggttggcaataattagaggaagcttcccagaagaaaagacatccagactgcagtgttttactcatttgaaggatgtttgggagttatctgtgtaaaagttgggggcagtgggagtgagggtgaaggggatgttggtggaattgttccatacaaaacaaatagtataagcaagggctataaacaaaagcaagcataacttaaaacactgaggaatggccagaatattgaatgtggacagaatgatatccagagccttgaaaaccttattaaagtatttattttcatggtgcagcggggaggcctaaagtgttttaaaatagaagagttgatgagtcaggtttccagttttaaaaggttactcagtaaggagtagcaaataagatataaccgccatagtaatgtattgcatttcaaaatgtgtatgtgtgtgtgtatgtctgttatttgtatgttaatctattggttagtaggaagagctactcaaatattctcatacattaacttcactgaagtaactacctagtagtgtaacatactagttaaagcataggctttgtgattggacaggtctgtgtttaaaccctggctttgacccttactaatagtgaccatggatacattacctagccatcctaaacctcagctttgctcttctgcaaagttaggataataatagcacctacctcctagaatagttgtgagggatttcttcaggttatagcacttagtaattgttctatattattaaatctgacatttagtgactgctctatattattaaatcactttgatagccttagataagcatatacttctaaataatcttgtatggaaggcgaaaagaaatggtagaattcatttctttaaaaatattatttctctatgttttggaaagccttgatttggaagaaacaggcaaatatgacttttttccattctgaagtgatttcagctttttagatagtcaatgttttgttttatggatgctttgttcaggccatttgagaatatgaagcatccttgttccatttatttccctaacaatttttaaattatttgaaatagccactcccctctttcactctcttgttaactttattttttgctttatttattcacttgctttattttttctttgttatacttattgctacctggaattttattgtataaatatccctgtgcattgtctcgtctttcttgaatgtgtaagctccatgagagcaggaactttctcttactcaccatgtcagggaggaaaaacttttcttctatcctcagggtttgttattgggggcctgcaaattaaactgactaaagacagattagcaggagtaaaaagagattttatcacataagtacatatatatgtaagtacatacagaagttcacaaagaaatatgacttagaattgggggcttatataccatcttaataggtgaaggggaaggagaaaatggcacttattgggggggaaaatgactttttggaaagataattttctagagacaaatttactatgctggacatcttacttgtccaagatcccaaagaaatagagaagatctagtaaaaattaaacattaatagtaatttttaaaatttaatatattctgacttatgtttctattctcactgccttattatcccattcaagagaaagatattaaaattcacttgtttttttttttcttttttcaggcaaaaggcaggattgtggtaatgccaggtatttatttatctatcaattcactagcataacactgaactatagtggaggaagagcaaaggaggcaggaaaatgtgagagagagtattagtacattacatattagtacatgatctttaaagagaagaatatatagtttgattaaaatgtttaaaactgggagatctgtgctagaatttaaaagtttagataagaaggaaaatattgtaataggcattagctcaaagaggagcaaataaggaagcagatagagattgaggtttctccatatttgctctcccattatatagaactttatgaattcagatgttcatctctggtgaggcacatcaaatttgatgctaatcatattttgtttaggacaaatgtcctaataaacagggtttaagcaaaggtttaggcaacatccttgggtaaaatataatactgtctcagttcctgaaaatctctgattgccaaattatttcttgtaaccagaatttaatcatatgatcctgatgataaccataagatcagttaagttcataatggctaactagaaatgaacagttggagcagtttttaaagaattagataatacaacatagaagagtgagacaaatgtaaagacaatcttaatttttttaattaagtttctcaaacatataaaaaagtagaaaatagcataatgaatactcatatgctcattccctagatttaacattttgccaaatttgtctcatcttttttctatcctgaggtattttattaaagttaaattgaaagcatcatggcattttatctttatttatctctaaaaagggtgggatgttaccataatgacaattccattatcacatctatcacaataaacatttaatactcaactttctccaattgtccccacaatggtttttatagctgatatgttcaaactaggatccagtcaaggaacaagcattacatttttggttatcttttgtttgtttgtttgtttttagagatgaggtcttgctatattggccaggctggacttgaactcttagcctcaagcgatcctcctgcctcagccacccaagtagctgggactacagttgcacgctgccatgcccagttctattatcttttaaaatatctttaatatagatgtttttccttttatttttcttgctttaaaaaaaagttacattattaagtttgggctgggcccagtggctcacgcctgtaatcccagcactttgggagtctgaggcagccagatcacctgaggtcaagagttcgagaccagcctggccaacatggtgaaatcctgtctctactaaaaatacaaaaattagccggccatggtggcatgtgcctgtaatcccagctacttgggaggctgaggcatgagcatcacttgaaccaaggaggcggaggttgcagtgtgctgagattgcaccactgcactccagcctgggtgacacagcaagactccgtctcaaaataaaataaaagtttggatcacttaccctgtaaaatgtcctactttctggatttatcagattatttcctcatgatattgtttagcttgttcctcgtgcctctgtatatcctataaactaatagttaaatcatgaggtttgaatagactctgcttaaatatttttggtcagaatacttcatgggtgattctgcatacttacatcatatgacatcacatcagaaggtattcagtctctggtcatctcactactagtgatgtcaagactgaccagcgttcaaaatagtgacacctagataaagagtaacttttaaaaagaggccgtgaacctgggcaatatagtaagacaccatctttaccaaaacgtaaaaaaattagttgggcatggtggcgtgctcctgacgtcccagctactctagaggctgaggtgggaggatttcttgagcccgaggtcaaggctgcagtgagctatgatcgcaccactgcactgcagcctgggcaacagagtgagaccctgtgtcaaaagaaaaaaaaaaaaaggccatataaggggtattgtcagatatttaggaaggctttgacctataacaagcccttgaaacataagcagagagaaagtatatattatctgtcaaattgtggtcctttttggttaatcaaggaatgttaaagagactctgagtgtgatgcttttccatttagcactaaatatatatagttttgacaagtaatacttagacaattgttgacattaagagtacctttgtttaatatgcaattgttatcagctgtgtgcaaggcattacttgggatgcaaagctacacaagaaactacgttctcaagaagctgactcaggtcaaaagatgttacatacaaaaatatttgtgattaatttctttaacaaaccttatcaggtaaatgttaattgtgtgacaattatgtatattttatgctaattgtgtgatagatatgaaaacagaaataaagtaatcctacttgaggagctcacagaatagacttataaacacaaatgtattacaatttcatatgaataagtaccagcaagtaaaaactcctaggtaagtcattctgaatgcctaataagtattcatcattgagaaatataaagaggtagttgccctctaggaactttcataatgaaacctacaacatatttaggctctggtttcttcatctataaagagaagaatattaaactagttctgtgggatcctttttaaccatagagctgtgttagtctgagtctggaaagatgtattacctatgtacttaagttgctgataacttagcaacatgtgtttcagtggccagatgttttgttatttgttagaaggaatagaaggaaataatatatttgtctcttaatccttacaataagcttgtgaggtagccagtattatccctcttttattggcaaaaaagttgaggtcagtggatttaaataatttatctaagatcacatagctgtgaagagctacagtgataaagccaggatttcagtctaaatctactcagcctgtattttttctatttctttctttttttctgagacagggtctcactgtgtcgcccaggctatggtgcagtggtgcagtctcagcttactgcagcctctgcctcctaggctcaagtgatcctcttacctcagcctcttgaataggtgggtctacaggcacccaccaccacatccagctaatttttgtatgtttttgtagagacggggtttcaccatgttgcccaggctggtctcaaactcttgagctcaagtgatactcctgccttggcctcccaaagtgttggaattacaggtgggagccaccacactcagccttttttctatttcttaaggctcagtgatattactgtactactaaggaaaaaaagacaagttaatgagtctgaaagagtgtgtaaaaataggttatttcagcatctttaatggcttgagatacaaagtacatagttttaaaatattgagtacatcctatagggagataaggatataaagatgaataaactaatttcatatttatgatacactagtatcagttcagaatatgattctttatatataaatatttaaaagattgttcatcaaaacaaatgtcataaaatatttggtggtacagttttaataaagtagaatcagattcttctgtgaaatgaagtataaagctgatatcgtaactaataacctgtataataccttgcattattcctgtttccaatgaagtcagtgtagtctttacatctggggctagagacagaacagaggttctctttcagacacatctctgaggttgtgcttttgtagatttttttcctcaaacctatccttacctttctttttaatttgattttgctttaattgagggacaagcagggatagcattgttatattagccaatggacagataagattctatcatacatgttctataaacttaatggtacttccccagagtctgtagcctatatatcttttatcacttctctaatctcattctagctgggtagggagagactaatttttgaatcaatgagaaattcagtttggggattccaagtaaagtaagcagtcgttactattccttaaattttatgcaaaattctattttacttaatgtgttacttattctttgcaacaggaggtggtataacagacagaaatctacaaaggatccttgagggttcaggtgctacagaattccactgttctgctcggtctactagagactcgggaatgaagtttcggtaaaaatgtattcttcgattcaaataagaaggatgagattaatttttactttctcccaaatagaaaaactttggatgggggcatgattaatcaatggaatattgtgactactacataagtattgtagttgtttttgtagttgaaaaacatttctaaaatggttcttgtcctgtcttaaataaacaggctctttgaacataggtgaaccttgccttgtaaaggcattgctgaacttagaccagttaatagtaaacaaattctgcagttgagcttcaaatgagtcagatatgcacatgtgcccattcgcctatgatttcctgtagcaaagttaataactatggtgtaaggatggaagagtcagtcatttttctccctcctacctttagtacttagtcttccctcacatttgttctctgttttcagttattttgaaattatattaccattaagaaattgtgagtattatatggggttttttaaatacttaagaagactcttacaatttaatagtagttgaatatttctgtttataaattgggaaaaacacaatgtaaaagaagcaagatggctggctgggtgaggtggctcacacctgtaatcccagcgctttgggaggccaaggcaggtggatcacttgaggtcaggagttcgagaccagtctggccaacatggtgacaccccatctctactaaaagtacaaaaaaattagctgggcgtggtgatacatgcctgtaatttaaaaaggaaaaaaaaaaaaaaaaggaagcaagagccttagaacttacaattccagatataaaatcaagtatactgtccagtggattcagctgctggatgtttcaagtaattaattgatgaaaattatggaatatactagtccagcatacttgacctacccttgtatcatgaaatagtctataaaatgaagcggcagtaggagggcccatttaataacataattatctgttcctttattatttctgttacagaaattcatctgttgccatgggagcctcactttcttgctcagaatattccctaaaggtaacagatgtgaccaaagtaaggactttgaatgctatcgcaaagaacatcctggtgtagccagacctctctgagagacatggatatcacaggatgaaggtagaactataatctgcaattctctatgacacagctttaaccttcttctctggccaggacagtcgcaatctttgttttaagtttcacatggccatggagaatgtgcccaagaagaaaaagaatttgaaacagagatacagtcacttcctttgcttagtcttaccagtgattgtcatcatggttaaagctggtctgtgcttcttccatagacagaagcttagtctgttttcagtggaattaattgatgaactgggaaaattttaactgcatggtatgaattcagagtgtgacttaagggtcaattcaaagcagtattttgacttttcatttgtaaaataaaaatttccactattaca

SEQ ID NO: 2537 - DNA, 325 bp, Homo sapiens
tcctaacccacccaagatgacacagtaaggtaaaaccacagtagagcccaggcctgtttgactctgaagtccaggctcctttccaacttagtgccctaaaggcctgattggggtgggggtaggcaggaagattcaagcactgattgtttgtagcccaggctgggagggcaacagctctagaaaaaaagtcactcactgctttaaccatcttccagctaactgcagtgaggtgtacagggccatggggctctgggatgaactcttccacctctacaccttgtaaacaaggattccagacacaccctccaaatgggaatggagacac

SEQ ID NO: 2538 - DNA, 325 bp, Homo sapiens; identical to SEQ ID NO: 2537

SEQ ID NO: 2539 - DNA, 1709 bp, Homo sapiens
ctaactgcccggcaccccgcgactgggttggggtcactcgtctccctcgcgttctcccgggatcttatgtttctctgcgtttcattccgttcaaagaaacgtggggcacgcgcggcgggtgcggctgcagcaggcgaccctccagcgcaccttcgaaggacgtccctgccctctgccttgcctcgtattgtggttcactagtaagtgcctgcttccctagtcaaagagaacacgtgagccctttggtgcgtcgagagaagggcggtcttctttagggctgaggagaaaggaccgcagttccactcctttccctacctgccgcctggacaggtctcccagggtgggcagagggcgaggagccgttgaggaccagccgcgaccagggactgctgcacgtgggtgtgggagagcgccacttggttatgatgaaatcgctgccatgcggcagaccccccaaaatccctcagtgtcttcctgatctagcaaatagtcacagctggtgtttcacaattaggtggagtgcggggagtgggctaggggggacacctgtgatacaaggttagctgctgtacctactcagggaacagcaaccatgtatatccattcggctggacttttgattgttcaataactgaggaggtatttatatttatttgtcttttattctaatatttttaccatgcattgaacgcaacaggagggtatttcagcaaattcacgacaaggtaatcgtcttatcactttttgtaggccattaatggtcaggaaattgcccatactctgtcattattgtttaataaatcattaaattatttcattaaaaaagaaaaacaggtatggtcaaacgaggaagcatatgtgacataaaaaacatgaaggatatcttattttcactatttgagaagaatatattttatttttagtactgtggcataatatataactttttataataataactgtatgcattatgtagtatagcttttaattgtatcattcatcacagttatatgtaaaaataattgacatgtatatgccataccatgaagcatatgatgttgtgcactttctcctccatttttcatttggaatacattccacaacatgatccaaaacataagaacttacgacttgtaactcgtttaaagccattaattgtgcagtaatgtgctacaggattcaatcagcttctcttaagaaacaagtgtcattgtatcagtttcctgttctgtgacacgccctttaaaagtaaaagataatataacatattttaatacattgtgtgtaatgtacatatgcatattgtctatgtactatatacacattgtttataatattgttattacagtttgtcattcacctgaaaggagaaggaaaagtacgaaaggtttctctgcttgggaaaaggtgaatgttgttatatcaagaacgattacacacatggatctcatacatgtttttagaacattgttcttctgattgaagaagtctgatgctcctgaaaaatcttaaaatatctgacttgtattgaagaaaattatttaattaaatttttaaaggctggttgaaaaagtctgacagttctgagaattttttaaatgtctgaattgtaataaaaaaatggtttactttaaacttctaaaaactaatgaccttgtgactaaagaaaaatcatttgaagtgtattaaaaaatagcaaaacattaaaa

SEQ ID NO: 2540 - DNA, 471 bp, Homo sapiens
ccaccactgctgctctcattctagaactgcactatccagtagaggagcctgtagcctcatgtggatatttaaacttaaattaattaaggttaaataaaatttaaaatttagttcttcagtcacactagcaacatttcagatgctccacaggcacatgtggctaggggctagtatattggttggcacaaatatagaatacttccactctcacagaaagttctattgatagtactgctctggactaaaaataatattgattcaaaccaatgagccactcaacacttttatttttggcataagagcatgaatttttacttcataagggacatttaaaaaaaatatggagtgggttgggcatggtggctcacacctgtaattccagcactttgggatgctgaggcaggtagattgcttgagccagggagttcaagaccagcctgggcaacatggtgaaacctcgtctctacaaaa

SEQ ID NO: 2541 - DNA, 31885 bp, Homo sapiens
ctgtattatatctatgagcttctggtgaatgattatcttagggttttttttgtatttatgttattcccagcactcccagacacatatcaaatattgaattagtgaatgcatgaatggaaaatggataattacagattgatgttccaaatacctttttccaaaaaaacaagtcatcacatacctataggattaaatagatttcccttaatattttcaaaggtctctctgcacttacgtccattgtttttaaaacatgaaggaaattaaaacacatggctttcttaatcagtcaacctagaattttttgtctgtaacttagactgacaaatactatctattgtagcaggggtaatgactagcaactccctaaagcaatgttggttgcagagatcaacactgataatcatgattttaggataaccagtttatctacagctacccttgtggtcctgggatgaatggtgggttatatatcagcatatgtaacacatatacccatgtccctgcataagggagaatgcatcacctctctaacatgcatcacacattttcctcaacactgacctaaaatgtttgtcagtgagaattttaagaattcaaaattcaacaaaattattgtttaatgtgaagcagtagaaaaaacagagtcttaacaactccccaaagcaatgtaatacaggcagcctttggttttttaaagtgtagatcataataaaaagatgtctttcactacactccgcagaggccattgatcaaggtagaaataaagggggagtacatggcatgtacttcaggacttcaactaaagggtaattgtggaatgagaatttcaaatacaacatagtaactgaaacactagaaaccaaagtatgtgtctgggatccctgcttgcagaaaaacatttatgaagctagtaaggggcgtcttcaccagcagcaggccaaatgccggcaagtgctctgtaggaggggccacttaggaaagtaccagggctgccttggagtggagaaggaggagtggccaccagagggtatacaagtggttgccctttaaaagaagaggctcaggagcagacatgtctttatgctagcctgaagtcatgcatgtgtggctatacatagcctgtgattcagaagacttttcaactttggttttcataaaaatggcaagcaatgatggattacattttaaaagtgaaagcccttgtagtatgagtaatgattcagttttactaataaaaggatctccgtattgctcagattttcagagaaacaaaatggtcaactggtgtgttattccttcctcgtccctctgataacggtactgacaaactggaaaataatgaaatattagagcaaaagagaaatgtgtaataacacaagagaagtctattaggatataaggaagataagtagacagagcaggcttaaaatgaagcttgaacaagccatctgcagaaacagaaaacagggtagatgggacacccaaacagggtgccacagctttccaacttagatccaggttatgagagaatgagccaagaacacaacctaaaagttttcaatttgaggtatattcactgttgctattctatagtattaatcaaaatattattgactaataatcctgttattattaatcacaacttttggttttgagtcttagttttttaacagcaatattttttgtaacaccaggaaaatcctcacaagttattgccccaggggctggaatctggagctagcgtccctaagagactaatatgggagaatttgaaacatctgctatttctaccataattcttattcccaatcaacattacaccacataccacagcaaaaaggacaattagatactagttttgaattaatttgaaaagtttaaagacaacaaaaagaaacagccctctgtttctgtaacagagtctggaaactgcccaagaattacaacgaagttctttaatgaggtagatgtaataggcatttataccttcatctaggctgtagtcatctaatgaattgcttggatgttgtagtaaaggaaattgtataaaattgttttaaaaagatgtataaaatttaaaagtacgaaaagaaatacaggaacaagaatagatgtagtgaaaacttggcactatttctgacaaagtatttttttcaaagtttattcctaaatgtgagcaaagcagtcataaatgaatgtcagaagcagttgtaaagatggggcatggttagttgtggccagctgttttataaaaaatagattctgtttatacttgcagaaagattctgttaatgagcatttcattgtagctgacaaagtagttgggctaggaggccagtcactatgactttgcacatattacaactgctctaggcctcagttttatcacccatataaatcaagggggttgaccagaagctttaaaactcttctgaaatttattatgattactattagaaactctgttcccaccaaccttatcatcaggggttatggataaaataggaggctcttttgggcagcctggtcttctaaaccaaaggacaaaatgctcttcccaaaatcatatgatttttctaccttgtcttctgcctttagtttctaatcttgtctagcctctttgtttgatagatgagaaccgaaccagagatggtaagtgactggcctggggtaccagagctagtaaatgacaaagccagaactagaatccaggtctgctattcgttaagcctactgttctttcccttaagtgataccactcacttgtctttcatccctgacaaaaaacaaaacataaaactgtgagaagcatctgtttagatgatatcagtgagaagtataaattatttcaaaaatataaatatggatgtgataataaatgttaatgcctaaaaacactagcttagcaagtgcatggcagacatttttcagcaatcactggatatgatcttgaagttaaaggaatctcttaggatgaggagggggtggggcaggatactttggaagacatttggagaataaatagaagattggtggaaagtgatgaaaatttcccagaccagaatagacactgtggactactagagcagggagggagagaggagggcatggattaaagaactatctgttaggtactatgctcaccacctggtgatgggatctgtaccccaaacctcagcatcactcaatatactcatgtaacaaacctgcacttgtaccccctgaatttgttccttggtgtgggaacaaaagtttcccagattaaggaaattcaaggagctaaagtacagagagaaaaaatggtataatttggcttagagttaactgcaacttaagtgaatgaaatgccacataaatgggtattttacatatttttcattatgttctatgacaagaattttggggaaagtgatggattgtgctatcacaagactaaaaagcatcactacaagccacggactcctattttgatgtttgtgacctgtctcagtaataacaagagtcctaaaacagttcaggttcattgtctctgttaacaagagtggttggtaagattcaaaggaaccagtggaatgtgaattttatgacaccataattatcttcatgggagaaccaccaaagtgcagaaatgcaaatagaagagaaatctttaaaaaccaaagggtatggcaagatagatttctgctcctagaagcaaattattttattataaggaagaaatatatttaagtaattggctctcagcaaggagtaagtggcttttgtttctagctaataagatttcatttaaaatctattaattgggagaagagaataaacaaaggagcccataccaataataaatattcagttcttctgagggatatgacaaaattttccttcagtactgtggaactcctggagaccttgctcatggtaataaagacaagcctagataccataatattaaagtaatgaacaggaaataacacattaaacactccaagacaaaataagaataagaaatacatatatattgaaaaagtgataaatgtaggtatcctgagattctcaactataaaaagaacagtaatagcaatttgaataatacacataaaatccttaagagtgtctgctacataacaaaggcataacaaataatggctattattacagccaggatgaagaatactaataagagctttcaaactggaccaaccactacttccgtgtttcaagttcatttttagcacatgaacatgatcactgttagccagtgaagtagcttctgactagatcattgattagatctcacaaaaaaccaaaaatagtatatggaaaccaagatgagagcaaaagaaaacgttacctgagtaggcagctaaaacatattttgacattatttttaagcagcattcataaggttcacggagcacagataataaaagaaaaagcaatgtagaagtcttaaaaaccaaaggaaattgctatgaaagaaaccctaatgaaaggtaagagatttccaaaggaaacagagggcaggtgcagtagctcatgcttgtaatcccagcactttgggaggctgaggtgggaggattgcttgagcccaagagtttgagaccagcctggacaacacagactccatctctaaaaaaataaaataaaaaattagctgagtgtggtggcgcacacctgtagtcccagctactctggagtctgagttgggaggactgtttgagcccaggaggttgaggctgcggtgagccatgatgttgcacaactgcactccagcctgggtgacagcgtgaggccctgtctccaagaaaaaaaaaaaggaacagagtctttgcatgcttaatccatgtttatctaattttaaaacaatacaagactggtcatctttttatctaccaaccaagggtcagtatacttatttttatcttagtttatttctaggatgatcttaatttctttttccctgttttatgaagcatttagttcctttctgttcccagtatgaaatttatttttgaagaattctacttttgttttctttaaagccagggactttttcccctattaatctaatcccaaaaatcaaaggtgacgaaaagaaaagaaaatgctcccagccgtgggagcatattcgtggaaaggacattcaaggctacatgtaggaaagggtaaaatataagaaagattccatgcggaccctgatgaagagaaatcctcatgcaatttaatggctaaatgtggaggagaagcaaagctctggaagggtagtgggtgaagatgtaattattatggcttttcctctcgcttcattaatggaagtgctgtttgtgactcagcagtctcttaatagaggttctgaaagttgccagatggcttattaacagattgatctattccaaatttgctccctttcagacattccaagagtcataaattgagaaacttctatttctcagaaataattaataagaactttgattttattgcctttgcccactctcctgattctgttccccttttctttaaaaacaacccaaatacattccccatactacatactgattttagcagtgaaatgaaagaactctctttatatcttcctgtgtaagggctcacaaaaacaggcccagggaacagtgacctaaaatcagacaaatccaggttcccagtccccatcacagtttctccatcctactaacacacttaaggctcaaaaagcaaaattaatgcccaaacagcctgtgaggcacataaaaatggaaaaattttctatcctcatcataccaggcatcagataagatactaaaatcttccacagaccattcatttagaaggggttctaacctttaaaatcatgtactaacatcatcaacactacgacagggatcttggatcacacccatgatggcttctttgtcaaggaagcaaggaagttatatcattttggtgcctggaaattcctatgtggtcgattgaactgcaaagatcttggatccctgttaaaggttgtggatctccacataaatgatatctctgttacagagaaagaaggggctgctgcacttgctagaatgtctctggctttgtatcagatgctacaaatttcatttcaaccaggcttccagtgtgccaaatgccaaacttcatgctttagcaagggaagaaaaggtgagattctaggaacacaccagacctctcagaaggagtcgaagcctgcttcacttggacaaagcttggtcccccgtattagcaccaatctcctgtcatttagttcctcacagattaaattatagcttctctcagagaagacctgggtacggagaaggaattacggtagaaagtaaagtagaaattccaagggcaaatatccacaaggtcagacatcacagcatctgaggctatataagaaagtggaggaattcaatgagcagcaactcgggggtgctcaagcttctctagtcctggtccagcctcacggccccacctgtactcccatcatgggcaccacctcttcaagccacagcaagtccaatggagctgaggctcgtgtttgtcggtggtgaattcggcgtagccgcagaaggtataggaagatggccagtagcaccaccaggatacaggcaaagaagagatagtggttgtatacaaaggagagacggaaccagctaccatgggcttgtcggacaccttcctgccgaagatccctagggaagaattaagaatttgtaggtggaaaaaactgttaagtttcaaagggagacatttactgatttgaaaggcccagtagtgttatcacatttattccatccacataaacattttatgacaccagctccacagagcaggcaaagctgaagaacatcccccgccccaggagcccttctgtgtcttccttcccacggcccccagaagggacctccaggcttacaccctccagaatctaagccaagatgggaaggcctttgaaattgaatcccaaaaaatgaacagaaaggctagattgatcacctgtaacataagtcttaaaatatggcttataaatacagtactaatgagaatagggtatcccctgaatccaataaagaaatcagagtgtgtgtgtctaaatcctttttttaaagttgctatgcagccaagtgcagtggcacatgcttgtaatcaaagcactttgggaggccaggccaggagaattgcttgaagccaggagttcaaaaccagcctggtcaacataacaagaccccatctctgcaaaagaaaaatcaaaaaattagctgggcatggtggcgagcacctgtattcccagctactcagaaggctgaggcaggagaatcacttgagcccaggagttcaaggttgcagtgagctatgaacacggcactgccaccacactcagcctgggcaacagagcaagaccctgtctcaaaaaaataataaaaaataaaggtactatgtttccttaggatctaggatatatctaaataaagctgttacctgatcaactgtattacagtcagataaaaataaggcgatatgaaaaccaagtgtaatggtccacctggctagaacagaagccactcttcagcagtccagatccagatctagttttgtctggtttgacctgcagtgttcttctagaatgcgaatctctaaactgaaagacttcataaaaaatatggatttctgacttttctggacagatgagaactggcaaatgctgggacagtgcttgtgtgtgacagtaaccagcccattaactgggatacatgctccagttgtgggcaacccccacctagcccacttccctcacttctgtcgcctgcctggctgctgacggtattgagtttagaggaacagacatcaaagatacaaaattcatctgagtttatctgaaatagtccagggtacaggtacctaaaaattgtcccaaatatctgacagtacataaaagtaaggtatcaggctaccagagtttgatgaaagtagccccactaaaaacatctcacgtcctttattctaattctgacccaccaaaaagccttctaagtcaatgacacaatgtctggagtgcctctgtatgttatgaaagattgctctagacatcctacccctgttctttagtcagatgtgttttccagggtaacccaagaatgacattttagcttgtcagtatcttggaagtgattagtaagagctcagtcctaaagactggtttgttgtgagtaaacaaataaagctggatttctgaaacagcaaagctgagactccagaccagtaatgctcaaccttctttctgttcgagcatgcctggtagtaacagtggctcacatggaagtaaaggagtttgtttttgtgagggggtagagaggaaggtcacttaagacctattctaagctggttaaaaaaaaaaagaaagaaaccgattctgaggcatcaactgatatcctctgagctcaagataccagattggtcagtcttactttacctgagtggtaagaatcgtgttttatatagaatggctcccagcgtccactgaacctctcggtcatacaccagctgggctgtccgcaggtttgggtagtcatagggaaagtggaatccttcatgtaagacttggtacatccaagccgatttaaaacactgatatctgtgtgacaaaaataattaaattttaaaaaaagagaaaagaattctaatactttcctttgcaataagccactccgtattcccacaagttattaaaagacctacctcctcccgcttcaccttcctcacctctaagtgggttatttctaagtcagcctacttatcttgtgtttaccacaaaggcaataatgatactgtggctgtgtttttctttttcttttttttaagagtccctatcttcagagagcatattaaaatatctacaaatgtaattataggatgtttgggattagcttcaaaacaacccagttgaagtaagagggggattgtggatgggaaaacagataaaaacaagatgggccaggagctgataaatgttagtaggaaagcagggtgacaggtacacaggagttgattacactattctagttttgtttatgttaaaacaatttttgtttttttttgagacagagtctcactctgtcacccacgctggagtgcagtggcgcgatctcagctcactacaacctccacctcctgggttcaagcaattctccctgcctcagcctcccgagtagctgggattacaggcacctgccaccaaaccctgctaatttttgtatttttagtggagacagggtttcgccatgttagccaggctggtcttgaactcctgaactcaggtgatccacccacctcagcctcccaaagcactaggattacaggtgtgagccaccatgcccggcaattttaaacaatttttaactaaaacatttaaaaatgaaaggaccaatgaaccatactggcaaaatgttatttgttgaagctgtgtgatagttacatgagggtttatgttgctattctctctacttttctatatgtttgatattatctataatacaaagttaaaaaaaaaatcacttttggccgggcccggtggctcatacctgtaatcctagcactctgggagggcgaggcaggcggatcacttgagctcaggagttcaagaccagcctggcaacattgcgaaaccccgtctctacaaaaaaatacaaaaattggccaggcatggtggcacgtgcctatagtcccagctacttggggggctgaggcaggagaatcgctggaacccaggaggcggaggttgcagtgagctaagatcatgccactgcactccagcctgggcaacaaagtgagactctgtctcaaaaaaaaaaaaaaatcacttttgttgtcaaatcacttgttgagaactctgtttggtaaccactgatttcttctggctttgctataataggctcactattttggcccctatccctgagaaaatcaagtctggaataatcaaatgctccctcaacatgaaatctaatctgcattattgctcactctccattataatctgccatctagattttaagtccacatctaaggaggaaagggaagtaacttacttgagtcgatgctcatctgcatgtgatgaaaagaggccattcttgaatctctgagttagtaccgaccaagccatgccacagtaatcctggatcaaccacagagaaatagtgcaacatgaatttggaggcaaactctctaccttccccacagtcacagctgttccatttctaaagttacttgtgggctaccagctgacaaaggaaaacagaaatggtgtgttcattcactaaacactgcgtcatacccctgtttattcccgtcatcccatgtctagcaccaagccagcttgatgtggcttctgagcctcttaggcttcagaggggctgaggttaggactaacaaatagcaacgtcaaaagacaaagatagtttcattctactccacataggactgacatgagcagggagagcagatggaagaggatggttagaaacctgtcattggcctccctcggtgttgtaattctcaccaaaataatcattccttttggtttgtatgtctgctatgtgccaggtgctgttctagatgccagggaatcatgcagtaaataaaacagacaaaaattcctgtcctcaggaagcttacattctagtggtaggagacagacaataaacacacacacacacacacacacacacacacatacacacacacacacacacacggtacgttggataacataaatgctcagggaaaaataaagcaggaaagggcaacaggtaatatggggagcgttgtcattttggatagagtggtcccagaaggtggctctgggaagataacgtttgagtcaaagttaaaaaggtaagggaaaaaaatcgcttttacctggaaaagataatatgttaagcccaataacttgagccttttggtgttcaagggaatagaatttgaagaagttttgagataagagaaagagtcaggccatggatagttagggagctctgggctccagaaaaacagggagcgtgaaggtcgtcctggaggctggagagaaaggagcaaatacaaaccaggtgtcccacagtatttcttaaggactgtcttttgggaacagaacagtacagatactgcagatattattttgctggaagccttacactaagagaaccctagagaattgtaagaaagaaagagaaaggtaggcagggaagaaggagggaagggagggagggagggaaatatgaggagaggctgggtacggtgactcacgcctgtaatctcagcactttggggggccaaggcgggcagatcacctgaggccaggagttccaaaccagcctggccaacatggcaaaaccccatctctattaaaaataataaaaattagccaggcatggtggtgggcatctgtaatcccagctactcgggaggctgaggcaggagaatcacttgaacccggaaggcagaggttgcagtgagctgagatcatgccaatgcactccagcctgggctacagagcgagaccccatctcaagaaaaaaagaaatatgaggacagattctcccattcgtttctctgatgaaaaagatagagacacgcaacaattcaaagagatggccctaaataaagcagaaaatgatagaaagctggctaaactttcatctgtccaggtaccaatgatttaaacttatatgatgcttaagtcctatatatgctcagagtgaatttttactcctctattttaaatctaaacaaacttccaccatcattgctttttacaacatctaatattcccagggaccccataccactctgcctcttaatacctcaacccaaaagaaagatgggcttgcccctctgggtgatatcatctccaaaagcacattacaacagaaaatagctagcaagaggaaaaatactggaggtgacatttcttgggcataaacattaaacaagactattggaaagttggaagaaaaaccattagccaacacaaaaattttatgcctgggtaataatttgggtggtatgacatccatggaaaataaatttagttaattagaaggcagtacagcatagctagatccttaagttctctgtccacttcctcatctgtaaaatgagtgttcaaagggctcctgcaaagaacaagtgagattctgtatgcaaagccctttgcacagcacctggcacagagtgaggcattcaataaatggctgctgccagcataagccatgtttatcattaataatttacctgagcagccttggcaaatgttggcccatggtagcggccaccaatgcgcaacacatcctctgtacaataaaaaaactcagagaagccgtagaactcgctgttgttgaagtcaataggcgattgatatatgccattgagtgaggcctggctggtgttggagcgagccagcagggggctcagcattgccccacaagacacccagtctcctcttcctcggacatgtaagacttggctgttcctctccaccacatctgtgagtcccactggcaggcagggatccagaaatggattgtcgggactcagacctgtcttctgaccaagcaatctgccacaatgacaaaaacaaacaaacaaacaaacacgtcatgcctgtattcaacctagtctaagaaacacaatgtgcatcagaaatatcttactactggttttcatgatatctctagaaacgaggatggagtgcaatttcatcacataaacatttaacttcagcaagttaaatttagaaaaaaaagagaggaatatggtgatcaattctgttcgacattttagtcaacatgtgtatttcctagtctgtagtgaaattggagatgtgaatctgctgttctccatctggtcttcattcccacgtacctcctaaaagtgcaaggaccttatcgtgcggagtgtggttctaatgtttaaaaatacaactggtagggggtgaggtgggaaggactgtggggagagattcctgaagagcagaccacggcagtggcccatgtgcaatggctggcaatggtgatggagcccatgcctgcctctgaatgagcagtgctggaacagaacaggcacagcaccagctccaggaagccacctgcagagcctggagcctctgagtggggagaagactggaaagctttgattcccaccatggccgtaacacaggtccagttattttgagtttatacttgcctagcaaccatattctcattcctcaaaatgatgagtatgaagatctgtccaaggacagaaattaagttggggtccaagtaactttgccaattgcagttaattattcatcagttcctaaacagacagatgttgaagagtggacttcttagaatgaggatgcgcccacaggtgtaaagaccgagggtgagaatggaatgaggcagtacaacagaacactttacaacaactggaaccgactattttaaggatgtgacaccaactgtaaggaaaactcagaaaattgttattgagaagagacaatgatcattttgccatctcaggaaataggttaatagactggcagctacacaagatatgccttttactcatcagtcacctgatgtaggtgacttagctacttggcaagaaaataccaacgcatgggaagaagatgcagtctggcaagaagtagtttggaggcagcagaaaacagcagacagaaaagaaaggagtagaacaaaagaagaaaatggaaaaggaagcacagcagctaatgaagaaggaaaaccaaaactggtgtgaaactttcaaaacaaatgatcttcaaacatcatggtgcctgcaggagacatctgagcacctcaacccaagcaatgtttgtatagatttaggagtactttcagaatacaaacacaccacttgattttaatgcattagtcaatcatccagggcaccaggattctcccaaagcaccttgaactcctagagactaagacttacaaaaacaaaatagacttatgggacaatattttcttcaacatgccgtaaatataagataattgattgctgtggataaattattacaaacggggtataccagtacttcttcaagctagtgttcgtagctaaatggttaagtatacgtaggtaagtgtgttgtttgcttagtatcagccctgccctttcatctgtggtccttctctccgtgactgggtttctcacccttctggttacctaggctagaccctcagcactgctggccatcctccctgccctacctacgccaccacaatcaatcacccaattacttaaactggtttcattccaaaattttgtgtaaatttaatgatggaaaagaactctgctttctcttatgctttccttcagtgtgcttaatgataaaataaataattttacagacttaaaaaacaaaaaagaaacaagaaatcccaccactgtttgtacattaaggtctaactacttcatctggtactcaaatgaagaatctgtgatctgtccaatgctaaaggaaaaactgactattatgaatttgatgagagaccattttaaaagttaattttaactatgcttgctttttatcttttagacatactacagaactgaactctcacaaaagatgcaactgcactgtaattcaacaaacatgtcttgaacacttccatgcagaaggaactgctagcagctacactatatattgtacattttaaactggcaatttaattcatctcccttttcccatgatgttaggtctgaatatgggaaacagcaagagatcacaataagctactgtactttatgagtcctaataacaaagatcagaatgcaccctcacccagagtgggactgctaatagaggtctttaagagatgctaccccattggcaggggtagtcagaaagaaggaggaagcagggacttatctgtcttaggaggatgtgagtatttctccctaatatctgcagcctgacattatatttcagaaactcagatcccatatcaaatgtacctgtttttgttaagagtttcattcagaacaaggtcttcgtagcgctgccgggcaaagttgcctccgaaacccagaaaagttgtgacataaaccctgtacacgtgttcagtgtgttgcacatcacagcccaggttgaactcagccagcaggatcttggcagcttcttcctataatacaataccaagagaaaaagggaattttagttttggttgccttctagaaagctatgacattgctaatacacgaggcttcatttctatgactactctttaaaacatcttaagcattctttcatcctcatagcattattttaaacaaagacacaaaatgacaagactgcactaaaaggtacaaattagacactaaattaagaactaaatatgaaattagaaacccaaaacactatctgtagttatataggaggtagaattactacagatatcattttctcacatgtatttttctgtattttccaattccctcaatgggaatgtgttattttaataggaaaacatcctttaataaaaataaatttaaggaactctgtggatcatcataagatctattctgtggccttttctttttcttttctttttttttttgagacagagtctcactgtgtcaccaggctggagtgcagtggcatgctctcggctcactgcaacctccgcctcccgggttcaagcaattctgctgcctcagcctcctgagtagttgggactacaggcacgtgccaccatgcccagctaatttttgtatttttagtggagacgggtttcaccatgttggccaggatgttctcgatctcttgacctcatgatcagcccttctcagcctcccaaagtgctgggattacaggtgtgagccactgtgcccggttctgtggccttttctaacattatccaagaagccctaaggttccttatgacaggtttggggattgggaaagttcaattttattgtaccgccaatgaaaaggtgctatatttttttcttgaacctcaagggcagaggctgaattaatcatattcctcagctcattccacattatcatggcaaagcctctcttttgctttatttatttattctcttttatcttcatacttaatctcattccattctctgccatgggcaaccattctaatgtgttatgtataatttttgtatatatgtattattataaaatgaggattcttgttttgaatgtatttctttttaatttgtgaaaaataccattgtgccctgcaatttcactccaaggtacataccaagagatccaaaaactggggtgggcatggtggctcatgcctataatcccagcactttgggaggccaaggagggtggatcacttgaggccaggagttcgagaccagcctggccaacatggtgaaactccgtctctactaaaaatacaaaaattagccaggcatggtggtgggtgcctgtaatcccagctactcaggaggctgaggcaggagaatcgcttgaacctgggaggcagaggttgcagtgagccgagatcgtgccatggcactccagcctgagtgacaagagtgaaaccccatctcaaaaaaaaaaaaaaacaaaaaaacttatgtacatagaaaaatgtgtatatgaatgttcacagcagcactgtgcataatagccaaaaagggaaaaccactgaaatgttcatcagctgataaatggataaacaaaatacagcatggttggtcatacaatggaatgctgtttagccattaaaaaggaatgaaatacccataccacgagatggctgaaccttgaaaacattttgctaaataaaagaagccagacataaaacaccacatattgtatgatttcatttatacaaaatgtccggaataggcaaatccactggagagagaaagtagatgaatagttgtcaggggtagggagaggagagaatgaggagtgactgctaatgggaaatgagtggggagtgaatatggggtttctttttggggcgatgaaatgttctggaattcaatagtggtggctgcacaactttgtgaatgtacataactttgtgagttgtacaaaaaaatatattaggcattcaggattatttaaaatgttttaaatgccattgtctcacagtttctttcatttttaccaagcactaagattcatcttgaagagccattatattgctatgtgtagttactattttttttttttttgagatggggtctcactctgtcacccaggctggaatgcagtggtgcgatcttggctcactgcaacttctgcctcccaggttcaagcgattctcctgcctcagcctcctgagtagcagggttagaggtgcctgcccaccctgcccagctaatttttgtatttttagtagagacggggtttcaccatgttggccagactggtcctaaactcctgacctcaggtgatccacccgccttggcttcccaaagtgctgggattacaggcgtcagccaccgtgcccggcctgctatatgtaaatctaatttgttgcttgcaagtatgcattccgtaccagtgttgctttccataaccatgttcctttctaaatctgcacacacacaaaagtcatttctttaagacttgaagccccagtcccgcttgtcacctatttcttagtatcagatccatgccttcgttttacctgttaaatacatactaacgaatatagactaaaaagtatcacaacctagttagtcccccacatttccaaccccagcatgaaattctctgctgactgctaaactcacatttccaacagtcctgtggatattctgacatatatgttccttgggtatcttaaactcaatatatccaaaattgaagtcattagttttacaacttctgaactagaagaccagatagacgctctcatccagatctctcaggacaatactgtttgcttaatatcacccctgcccttacccctgttgctcttctctcagttactgggttcctcagtcttctggttatctaggatagatcctcagcactgctggccatcctcccaccctactcacactaccacaatcaatcgctcaattacattgggttttcactccaaactatcccctgaaatctgtcccctccctttcatttccacttactttgtctaactcagccctttattacttctcactcaaggttccgtgacctatattctttctcctactgacacaaaaattttttcactacaaaaagatcagatcacagtcacacaactgacatcatcacaaaattcagagctgagaaggaccttcacagtttaattattttataaatgaaactgaggcccatgtgactgccttactcaaaaacttttggtggttttccactatctatggaaataaaagccagtccccttatgatagcactcaatactgctcatgatttagctccatcttatcttcccagtcttaactactagcacacctgaaaatcctatactgcaaaaggctattcgtcattccctggacattctggcctctgtgctgctttttctgtgcctttgtatatagtgttccctccatgcaggtggccttccctcagcctccactctgcaaaaaaaaaaaagcctactctcatccaaggcccaggtaaatactttaccttccatgaagcaagaatggctcccattcaactttgcaagctaagttggctgccagtccccatattgccacagctctctgtttaaaccagatgttctcaatgatgggcaatttccaccctgccccacacatctggtaatgtctggagacacttttgattgtcacaactggaagggggagggttgttactgacatctggtataggcaagagatatcatatgatgcatgggataacccctgatgacaaagaattatctgacccaaaatgtcaagagtgccaacgatgagaagccctggtttagatcaagttaagcactgctacagtctccctgatatcacaagctgtctccactgacagataaattataagtttttagggacagtgtaactcacatgtctattccttgtacataatattgtctattccttgcacataatgggtgtacataataggtgtacataatggctgtacaaaaagtgtctgtgtaggatgaaacttctccctcaaaatacattctttacattctagtggggtaaggattattagaaggcccagaatggaatcatcagtaaggggaaagggaataacatttattgaacaatagatatgtatcaaatactgtgctccagaatgtaaatgcattatcatgtttatcctcagcaatggcaggagatacctagtatagttataattgttaaaatgtattgaacacttatgctggacagtttgctaaatgctttacaaacatggtattatttcatcctcataactttatgaggtagatactattattattcctttttcacacaggaggaagctgaggctcagagaggtaacctactcaagataacgcaagctagcaagtatctgaacaaatatttagagccaggtaggttggtctaagtccaaagacagtgtccttccttctcaaatactagcattcctagcaactaaatttccctaaaaggtaaagtacctgctttgcaggaaggacagaggttgaggtaggaacttcataagcaatttggagagaggctcctcccatatccagtatccctactgtccttctccgtcctgctgccaattcctgggtagcctcagcatctgattctgaaataaataagagaacaaaaaggccctagtaattaaaaaataaaattaagtcaaacccccaaaacagcaatcccttgaaaatttgaaagcaggcaggtgccatggctcacacctgtaatcccaaaacactgggaggccaaggtgggaggattatgtgagccgaggagttcaagaccagcctaggcaacatagtgagacactctcataaaaaaaaaaaattttttttaattagctgggcatggtggtgcacacctgtagtcccagctactcaggaggctgaggccagaggatcatttgtgcccaagagtttgaggctgcagtgagctattatcgcaccactaaactctagcctcagtgacagagaacctgtctcaaaataaaaaaaagaaagcaaacaagtatactaactgaatcaactatatattacacaaagaataattcttgtgaattacttaaacatgacattttgactacgtatccctagtaggatatagcctaaggacaaaagaaacaaatatcttaagctacatcgcagtagtcttgttaacaatattgttggttttattatttaaaaattatgaagggagactgaggcaggcagatcacaaggtcaggagttcgagaccagcctgaccaacatggtgaaaccctgtctctactaaaacacaaaaattagccgggcatggtgctgcacacctgtaatcccaactactcagggggctgaggcaggagaatcgcttgaacccgacaggcggaggttgtagtgagccgagattgcaccactgcactccagcctgggtgacagagcaagactgtctcaaaaaaaaaaaaaaaattatgaaacatattgtggaataaaacaaataaatgtttatgtcaatatctttaggaacaaagattcagcataacagaacaaaaaggatataggtataaaaatcaaataaattaatagcaccctataatcttacatatgagtcagaaatatgactatgaactcatttatttttctctttctaaaaaatacatatttcctagctgtgttcactgaaaggcctagaagcaatgatatcccaggagtaatgaccacctgtggtatctggaccaataatctctaaataccatcttttactaaaagaaaccagggctcttttaaaaacaggccaatgccaggtctagggtagaaagtatacaagatgaccctggaatacattgctgtaccagatagcaaggggaatataaaagagtattggggtcatattaaaaggatacagcagccaacctaaagatgctccttaaaatactaataatgtgatgggctctaatgcatctaatatattaaaatccatgagttcataataataattaaaacttttttttcactggttacctttggaagttgctagacaccaactcattattcagaaatgtgataaataaaaagaatcaaggatttattctgtctttcccataagaactatatgtcagggtaaccaaagagttgatcaagaaaagttcattacataaaaattctagctgttaaatgcagaaggaatgacagaattagaaatatcaccattttgcaatctctaatgaaaaacatgtccaagcaatgatcacaattggctattaccacaattccatgaaaggcagataaggaattttaatactaagttagatcaggctgataatacttgaactctcaatacctgatcagtctgagcatgacaaaaagtgagtcaaccagacattacaaaactcctgatgtgagtagtggaaaacacacagcgccttctatgatttagtcttgcagatggaattgaatctgagtctaatcaaacatctatatctgacctccagtttaaaggacatatgaggggataagaaacatgttaaagaaaacatgttaaccccacaaagatgcagtcaatcaaatctagcatgtggcaaattctttctaccaggtgatccaattttttcttgcttttaaaggcaggggagtgaggtggtaaggttaacaattatagattaaaagagactaaagagacatattaatcaaatgcaatgcatgacccttgttcagattctgatttgaacaagcccactacgaataaacattcttgagaaaatcaggaaaatctatacctggatagggtattagatacgtattgtatgatattagaaattgttaattctattaaatttaaaaatggcattatggatatattttttgttcattttgaaaccccttatctgttgtagatacatactgacatacatgaaaataaaaattacatgtctggggtttgctttttaaaacattcaatgagaaaaaaaaacctttaatacatggggggatatgggggagaaatggcaaaacattagtaaatattgagcctgggtaatgggtccatggaggttcattttattattctacttttgtgaatgtttgaaactttccatattaaaaagttaaaaagaaatcaaagaaagcaaattaggactggaaaatgaagcatcttatgtttgaaaaaagaaaaacaactcaaaatttgcatttacatgctactgataggttataacttaaatcttcagcccttaggtaaactgtcataaaaagacaatattactcaccatcctcgtggtcgaatcttcccaaaacaaagttgattccaatccatgcataaacccctaagtaagaaacagaaaagccctcacttaattctctactgctatgccatgtatacacctctcccttagggcttctctttcctctttttcttggaaaaagtaatcatagtattttattccatactctcaatgtaggaatttcaaatctttcatcttgtgatttttttcccttttaaaattatttgcatcttctaaatttcctcaatgaatagaaattaattgtataacaaatgtctaagaagtataaatcatctgaatgtcacgaagatatcgaaaaaaaagaaaaaatgtaaattttggagttctagttctgggcaatcttgtctccccactgaatacaaatataaactctagatagaatgcatggagcagctttctggaaactctgaaagtaaatgataatgagcacaccgggaaagagaccagggtttaaactaccaccaagccagtagtgagtgtcccattttttccccctcagatattacctggtctagacttaagagcagcttgaaacatgaaagtaaacaccaggtgtgaacagaggaacttcaactcattttctggtccaaagaacagaaaaaggaatgccaaaagttcagagaaaataagggaaatctcctgctttttttttctttcttattttgttctctctaaccttaggcaacagaggtagaatttgagcaggtacctaaaactctgagggctttgaattcttttctctgaccagagaagctgtagcttcaagactgtgaaacaaatcctattgtttatttaggctccctctgtcctcctaccgcttggccctggatgcagatgcagtcatgagaagtgcatggcagagagtgggcaaattaaagccctggtattctgacaggaggatcatgaaagggagctccaaggaaccagaaagtggcagagggatcacagacagtagggagcaaagttgtgtatgaacccctgggctcacctccaagctacaaatacatggatctgaccctaaacaatatccaaacagctctgagagctgaactacaggctaggccactgcccaggttccagattagccactggctgatacacaggacaaatccaaatagcagtggccaaggctttgaaaaatgaatgaataggctgggcacggtggctcacacctgtaattccagcactttgggaggctgaggtgggtggatcacgaggtcaggagatcaagaccatcctggttaacacagtgaaactccgtctctactaaaaatacaaaaaattagccaggcgtggtggcacacgcctatagtcccagctactcgggaggctgaggcaggagagtcgcttgaaccagggagcggaggttgcagtgggccgagaccacgacactgcactccagtctggatgacagagcgagactctgtctcaaaaaaaaaaaaaaaaaaaaaaaaagaaagaaagaaagaaagaaaagaaaaatgaactaatagaatcacgggccggccgcagtggcttgcgcctgttatcctagcactttgggaggctgaggcaggcggatcacgaggtcaggagtttgagaccagcctgaccaacatggtgaaaccctgtctctactaaaaatacaaaattagccaggcatggtagtgcatgcctgtaatccaagctacttgggaggctgaggcaggagaatcgcttgaacccaggaggtggagattgcagtaagcagagatcacaccattgcactcagtgttggtaacaagagtgcaactctgtctcaaaaaaaaaaaaaaaaaaagattcacagcctacagaaagcagctcagaacttgagatcaactgcctcctaaaacaaaaaaaaaaagttctctttgatttaaacaggacccagagtctcataatgtaatattcaaaatgtccaggatggaatataaaaatacttggcatacaaagaaccaggaaaatctcaactcacaagagaaaagacaatcaaaagatgccaactctgagatgacacatatattggaattatcaaagatattagagcaaccatataaccaagaaatatgggcagtcctacaatgaatggaaagatagaaggtctcagcaaagaaacagaaaagaaaagaaatagaatattaagaagatcaaaatagaaattttacaactgaaaaatgcaatactgaaattttaaaaggtaaatcttttcccatgtatatgtctgcaattagaagacatataaatctccttctcgtttataagaaatggaaatataattcatcaaactggccaatttggctgcatgagaacacatattcactctaaaagtacaaacccaatagtgtgagattccagggaattatcaatactgcatagtaattgcaatgaaggcataacaaaacaaaagtaactcattctgatcatcccttggaattaaagtttctccttactttaataatttaccttacatttgactttgacaaactcaatacaactcctagaactatatatgttttcaaaagtacagttagctaaccaaatatccaactgaaatcattaaatactaatacattcttataaacatattgcttagtactaagttaaaaagagatatacatttttgacttccagaaccagcattctaaacagatgccaatgcaaaatatgcaaataatcaaatcaactatgtagcagaatcaagaaaattattggcagaaaaattaaaatccgatatatagaataattctaaacacccgttagagaggctgtgccatggttggcttagaggttaaccagctgcaccccttaaggcccagtaccttcctgcttcccagagatcacttctgcttgagactgtgaaaagaggaagtcaaactccagtggtaaatctttcactaggtcagccaagatagccaactgcttcctgcaagaaagaacaaaaaatcccaaagttagtcactaaactctcttctcataaactgcctcaacttgtccttctacttagccttgtcatgacctcactgttcacctacctcatctacttgtccagccctgcttctttttggtaccgcctttgattttaaaagtttaaactgcctccaggtatagcctcctacctaaaaggcaacatggtaatagtaatactttccccttatatgatgttattattcaaagagtgttaaaagatgaggctatgagactacggttctatgactctcacaggctgagtacaaacaagccacaggaaactgcagccaagttgcataaactataaaattgatgtaattacattattcctcactactgtaaaacaaagatgttaaattaaggaacacaatctcatcctcaaatcttacacaacatagaaacaatgcttcacattaccacacaagatgtactgttggttccacaagttttaatgtaatcctttacataagctaacaattaacttttttttgagacggagtttcactcttgttgcccaggctggagtgcaatggcatgatctcggctcactgcaacctctgcctcccaggttcaagtgattctcctgcctcagcctcccaagtagctgggattacaggcatggatcaccacacccggctaattttgtatttttagtagagacggggttgcaccatgttagtcaggctggtctcgaactcctgacctcaggtgattcacctgcctcggcctcccaaagtgctgggattacaggtgtgagtcaccttgcccagccacaattaactttttaatctccttttccatatttcaagggttgatttttttttcattgtgaaaatcttaccatttgaaaaccctagatcaggatcaaaatccagaggacataacaacatttccaatttggggaaaacacttgaaactttgtatctatagggttgtctttcctctaacattttaagcatgtaatcaatattatcaagcaaaggaaagcaaagaaacaaagctagaagtaataatatgcatctagagaaaatgttagttaaaataagacaagttatcttggattaaaaaatattcaatacaaaaatattctgctggctcagacagttgtcagtactacttgatgaagaatgttgttagcacttcaaagtgaagatctatatttgaagtaataatcttccagtataatgtcaagtatagtttcttaaaaaaagttcattgttatacatattaaattcttgcaataagaatttcaaatggggaccaagaaggggtattcttctgtccctattggatatgcttctaaactcctcaaagagagggttcgttggttttggcaatgatatggaagaatgggcaacaacatatgttgctgttagttatgcaaattactagtacaggctgggtgcagtggctcatgcctataatcccagcactttgggagggtgaggcacatggataacctgaggtcaggagtttgagaccagtctggccaatatggtgaaaccccatctctaccaaaaatacaaaaattagccaggcatggtgacagacacctgtaatcccactcgggaggctgaggcaggagaatcgcttgaacccgggaggtggaggttgcagtgagccgagatcatgccactgcactccagcctgggcgatagagggagactccatctccaataaataaataaataaattactagtacaacctttctaaagggcaatccaggaccatgcttcaaaatgtttcaatgtgtttaacctttgatccagctgttatacttttagaaattaattccaaggaaatcatcaaacaataaaataaagaagagaaatactgcagcattatttataacaatgaaaattatttataacaatgaaaaactggaaataccataccatagggattggttaaataacttatggcacagccatgcaatgtaatactatacagatgttaaaagaaatgaagtctacttatatctacatgtatagacatgaaaagataagagatgtccaatacattttacaaaacagtatgtataatgtgattccatttatgctaaaaaaacaaaaacccaaatcattcttcatgtatacatagtgacaggataaagctttcatcttctaaaattcaatattgtttatttatttaaaatgcttttaaaatggcgaaatgttgataattgttaaagctgggtagtgggtaaatggggatttactgcactgttctctttacttttatacacaagtgaaatttcctaaaataaaaattattattttattaaacaccaccttgtattatggtgtaatttttaagggattttttttaactgcaaaataaaagggaggtagaaaaaattctgttagtccaggcctttggcaaagaaataaaaccaaatgctaataaattcaaaatatagtctaaatggttcaaccctattttgaatctgcttacaaatgctaataaattagcaaacctttaatcatacaaaacaggttcttatactgatagtcacatttatgccaacaactcgcttggacttagaggcagcaatgattttataagcctagaacagatgtatgcattatttagagaggtgaccagaaaacaagttgaaagagaaaaaaaaaaggcaaatttctttaaaaattctttagatacaataaatattaatattcagagtttccacattgacaactaacatcttagacaaaaagggtggagctacacagtgggttttgtttggatggaaacttctttgacagaggtaataccgaacagtgccaggaggtgaggcaacaatctcctttcctccaaacacactaaaggtagccaaactaccaagtgggttcctctgcccagctcagctggtcaattctgcctttttaacctccaggtcagctttttctctggcctccctcccctttccttggccttttatagactttgtgatgtggcacctgctcttgtgtcatctatattcttcccagggtttctaaaatttttgaacaatatgaatatcacctatgtcaaataaaaattcttaattgcatgcacagtatgattgcaactttgtggaaattacatatatgtgaacagaaaggagggaatacaacaaaacgaaacagttttgatagggtagcagggttgtaagttgtattgtattgttttgttcatttttaagatttcccttaaggagttaaggctgcagttacaatatttaaagtttggttttaaagataagtaaaaacaaaacaaaaaattttttaaagactgaaatgtatggggcaataaggaactaaaaaacctctcatgttgacaaatggctatataaataatctgcttctcaacagtaaaccagtcagtaaaccagtaactgtgaaaaaaagtccactgaaagaagcattgctgctatatgttatgttgtctacatgtctgacataagccttggagccctacatgtatggctgaggtttttgttgtttgctgttgatttaaggaaagaaagccaactataaaatttaaacgttgtaaaaaaaaaaaaaaactgctgttgaccaaaggaaaatatttaagctaataaggaaatacctgatgcctatgagaccatgaacattccaggaggatgaattctaaagttaaggttggcaatggtctcattgatatgacaccaaaaggcacaggcaaccaaaaataaacaagtaagactatatcaaactaaaaatttctgtacagtaaaggaaaaaattaacagagtaaaaaggcaagctacagaatgggaaaaaatatttgcgaactataccttggtaaggggtttatctttaaaatattttagaaactcctacaactcaacagcaaaaatcctattaacccaatgtaaaaatgggctaaagacttgaatagacatttctccattcacagaaatggccaacaggcatatgaaaagttgctcaacatccctagtcatcagggaaatgcaaatcaaaaccccgatgacatatcacctcacacttgtcaggatggctgttatccaaaaaacaaaagacaacaagtgttggcagggctgtggagaaattggaaactctgcatactgctggtgggaatataaaatggtgcagcagctctgcaaaacagtatggaggttcctcaaaaaattaaaaatataggccgggtacggtggctcacgcctgtaattcagcactttgggaggccaagacgtgcagactgcttgagcccaggacttcaagaacagcctgagcaacatggcaagaccccatctctacaaaaaaaaatacaaaaaattagccaggcatggtggcacatgcctgtggtcccagatacttgggaggctgaggtgggagaatcacctgagcctgtgaggtggaagttgcagtgagccgagatcatgccattgcactccagcttgggcaacagagcgagaccctgtctcagtaaataaataaataaataaataaataatcaaactgtcatatgatccagcaatcctacttctggctaattattccaaagatttaaaatcaggatctcaaagagatatgagccctcccatgttcactgaagcattatttacaataaccaagatgtggaaacaacctaaatgttcactgacagatgaatatgtaaagaaaacatggtacatacacacagtggaatactatttagacttttttaaataaaaaagggcattctgcaatatgtgacaaggtggatgaacactaacgacaatatgctaagggaaataaataggcacaaaatttcagttaagcaagatgaataagcactgaagatccactgtacaacactgtacacacagtcaacaataacgtattgtatacttaaaaatttgttgggccagacatggtagctgacgcttgaaatcccagcgctctgggaggctgaggcaagcggatcacttgagcccaggagttctaaaccagcctgggcaacatggtgaaacctggctccacaaaaattagctgggtgtgatggtgcccacctgtagtcccagctacttaggaggctgaggtgggaggatcacttgggcctggggggcagaggttgaagtgagctgtgatcacaccactgccctccagcctgggcaacagagcagaccctgtctctaaaaaaaaagaaaaaaatctggttagagggtagctctcatgttgtatgcttaccacaataaaataaaaatcattaaaaaaaaagtcagggagctcattcttcccccggcctacgtaagtatggacggatcaaggtggtaccaaaggagagaaatcacaaacaaggagtctggcctaaatacagccttctcttcctcttcctctaatgcaggaagagggatcaggtggcaaggtgtcaggctgaattgcaaaggtcaagtggaaatgatgtgactggctggggctgagaaaacaggcctaaggcaatggagactgagctttgcagtagcagcaagaagagggactcccccagttattgccagggttctaggcagagttacagaaaaggtagtgttcctaccagagctctctgactagtccctaagtatccaggtcatcaggtgaccctcttcctaatttattctgtaattatgttctctatgtgcccgatgatccaaatctattaccatcaccactactcccaaccctcaatccaaactaagaatcactatagtcatcccagatagatactgatcccaaagcagcaaatgacaagaagttgggaatgaatgattgtgtcataattgggtttaggggtatagaccagggaaccacagaggacagtgcatgaaactggcctttcatctcttgtgccaccgttttcctgtgtttcctgtaccctgcatctcacctctcagggagaagcctcatgcctgctgtgcagaggatgtaaagaggggtctccttgtgcttcttcacaggcacatgagcagcagcaaagctcagcagaggacgaaggtaatcactggcatgttctggagtgtctgccattgcagagattccttaagttaaaacaaacaaacagacaaaactttctttaaaaagcggctcacataagactcaggaaactgataccctataaagttctcctcaaggtcctaaacatttatttatttgagaggtagggggtgacaatgaaagagatatccctcccattacccagactctcaagaagaaaggggtagcttgctttctgcttcttttgtctcctctttcatgccttaaaagagactgacaacaaaatatattctgattagtacctggcttgatttttttaaccactggttggctgttgcggtctctcatctgtttgatgtccagcaagtcatgggggttcccattatgtcttggccagaaataaacaaaaatccgggaaccactgctgccacagtcaacaacaagtccataattcagatttgggtcttcagtgtcagtagcttcaagctcccctactcgagc

SEQ ID NO: 2542 - DNA, 332 bp, Homo sapiens
gcagtgagcggagattgcgctgctgcactccagcctgggtgacagagcaagaccctgactcaaaaaaagaaaaaaaggccaggcatggtggcttatgcctgtaatcccagcactttgggaggccgaggcaggcggatcacctgaggttgggagttcgagaccagcctggtcaacgtggtgaaacctcgtctctaccaaagggcgcacctatagtcccagctactcgggaggctgaggcagaagaattgcatgaaccctggaggcagaggttgcagtgagccgagatcatgccactgcactccagcctgggggacagagccagactgcgtctc

SEQ ID NO: 2543 - DNA, 303 bp, Homo sapiens
tctttttttttcttttttctttttttgagatggagtctcgctctgtctcctaggctagagtgcagtggcatgatctcagctcactgcacgcttcgcctcccaggttcatgccattctcctgcctcagcctcccaagtagctgggactacaggcacccgccaccacgcctggctaattttttgtatttttagtagagacggggtttcaccgtgttagccaggatggtctcgatctcctgacctcgtgatccgcctgcctcagcctcccaaagtgctgggattacagacgtgagccaccgcgcct

SEQ ID NO: 2544 - DNA, 23934 bp, Homo sapiens
tgtaatagtggaaatttttattttacaaatgaaaagtcaaaatactgctttgaattgacccttaagtcacactctgaattcataccatgcagttaaaattttcccagttcatcaattaattccactgaaaacagactaagcttctgtctatggaagaagcacagaccagctttaaccatgatgacaatcactggtaagactaagcaaaggaagtgactgtatctctgtttcaaattctttttcttcttgggcacattctccatggccatgtgaaacttaaaacaaagattgcgactgtcctggccagagaagaaggttaaagctgtgtcatagagaattgcagattatagttctaccttcatcctgtgatatccatgtctctcagagaggtctggctacaccaggatgttctttgcgatagcattcaaagtccttactttggtcacatctgttacctttagggaatattctgagcaagaaagtgaggctcccatggcaacagatgaatttctgtaacagaaataataaaggaacagataattatgttattaaatgggccctcctactgccgcttcattttatagactatttcatgatacaagggtaggtcaagtatgctggactagtatattccataattttcatcaattaattacttgaaacatccagcagctgaatccactggacagtatacttgattttatatctggaattgtaagttctaaggctcttgcttccttttttttttttttttcctttttaaattacaggcatgtatcaccacgcccagctaatttttttgtacttttagtagagatggggtgtcaccatgttggccagactggtctcgaactcctgacctcaagtgatccacctgccttggcctcccaaagcgctgggattacaggtgtgagccacctcacccagccagccatcttgcttcttttacattgtgtttttcccaatttataaacagaaatattcaactactattaaattgtaagagtcttcttaagtatttaaaaaaccccatataatactcacaatttcttaatggtaatataatttcaaaataactgaaaacagagaacaaatgtgagggaagactaagtactaaaggtaggagggagaaaaatgactgactcttccatccttacaccatagttattaactttgctacaggaaatcataggcgaatgggcacatgtgcatatctgactcatttgaagctcaactgcagaatttgtttactattaactggtctaagttcagcaatgcctttacaaggcaaggttcacctatgttcaaagagcctgtttatttaagacaggacaagaaccattttagaaatgtttttcaactacaaaaacaactacaatacttatgtagtagtcacaatattccattgattaatcatgcccccatccaaagtttttctatttgggagaaagtaaaaattaatctcatccttcttatttgaatcgaagaatacatttttaccgaaacttcattcccgagtctctagtagaccgagcagaacagtggaattctgtagcacctgaaccctcaaggatcctttgtagatttctgtctgttataccacctcctgttgcaaagaataagtaacacattaagtaaaatagaattttgcataaaatttaaggaatagtaacgactgcttactttacttggaatccccaaactgaatttctcattgattcaaaaattagtctctccctacccagctagaatgagattagagaagtgataaaagatatataggctacagactctggggaagtaccattaagtttatagaacatgtatgatagaatcttatctgtccattggctaatataacaatgctatccctgcttgtccctcaattaaagcaaaatcaaattaaaaagaaaggtaaggataggtttgaggaaaaaaatctacaaaagcacaacctcagagatgtgtctgaaagagaacctctgttctgtctctagccccagatgtaaagactacactgacttcattggaaacaggaataatgcaaggtattatacaggttattagttacgatatcagctttatacttcatttcacagaagaatctgattctactttattaaaactgtaccaccaaatattttatgacatttgttttgatgaacaatcttttaaatatttatatataaagaatcatattctgaactgatactagtgtatcataaatatgaaattagtttattcatctttatatccttatctccctataggatgtactcaatattttaaaactatgtactttgtatctcaagccattaaagatgctgaaataacctatttttacacactctttcagactcattaacttgtctttttttccttagtagtacagtaatatcactgagccttaagaaatagaaaaaaggctgagtgtggtggctcccacctgtaattccaacactttgggaggccaaggcaggagtatcacttgagctcaagagtttgagaccagcctgggcaacatggtgaaaccccgtctctacaaaaacatacaaaaattagctggatgtggtggtgggtgcctgtagacccacctattcaagaggctgaggtaagaggatcacttgagcctaggaggcagaggctgcagtaagctgagactgcaccactgcaccatagcctgggcgacacagtgagaccctgtctcagaaaaaaagaaagaaatagaaaaaatacaggctgagtagatttagactgaaatcctggctttatcactgtagctcttcacagctatgtgatcttagataaattatttaaatccactgacctcaacttttttgccaataaaagagggataatactggctacctcacaagcttattgtaaggattaagagacaaatatattatttccttctattccttctaacaaataacaaaacatctggccactgaaacacatgttgctaagttatcagcaacttaagtacataggtaatacatctttccagactcagactaacacagctctatggttaaaaaggatcccacagaactagtttaatattcttctctttatagatgaagaaaccagagcctaaatatgttgtaggtttcattatgaaagttcctagagggcaactacctctttatatttctcaatgatgaatacttattaggcattcagaatgacttacctaggagtttttacttgctggtacttattcatatgaaattgtaatacatttgtgtttataagtctattctgtgagctcctcaagtaggattactttatttctgttttcatatctatcacacaattagcataaaatatacataattgtcacacaattaacatttacctgataaggtttgttaaagaaattaatcacaaatatttttgtatgtaacatcttttgacctgagtcagcttcttgagaacgtagtttcttgtgtagctttgcatcccaagtaatgccttgcacacagctgataacaattgcatattaaacaaaggtactcttaatgtcaacaattgtctaagtattacttgtcaaaactatatatatttagtgctaaatggaaaagcatcacactcagagtctctttaacattccttgattaaccaaaaaggaccacaatttgacagataatatatactttctctctgcttatgtttcaagggcttgttataggtcaaagccttcctaaatatctgacaataccccttatatggcctttttttttttttcttttgacacagggtctcactctgttgcccaggctgcagtgcagtggtgcgatcatagctcactgcagccttgacctcgggctcaagaaatcctcccacctcagcctctagagtagctgggacgtcaggagcacgccaccatgcccaactaatttttttacgttttggtaaagatggtgtcttactatattgcccaggttcacggcctctttttaaaagttactctttatctaggtgtcactattttgaacgctggtcagtcttgacatcactagtagtgagatgaccagagactgaataccttctgatgtgatgtcatatgatgtaagtatgcagaatcacccatgaagtattctgaccaaaaatatttaagcagagtctattcaaacctcatgatttaactattagtttataggatatacagaggcacgaggaacaagctaaacaatatcatgaggaaataatctgataaatccagaaagtaggacattttacagggtaagtgatccaaacttttattttattttgagacggagtcttgctgtgtcacccaggctggagtgcagtggtgcaatctcagcacactgcaacctccgcctccttggttcaagtgatgctcatgcctcagcctcccaagtagctgggattacaggcacatgccaccatggccggctaatttttgtatttttagtagagacaggatttcaccatgttggccaggctggtctcgaactcttgacctcaggtgatctggctgcctcagactcccaaagtgctgggattacaggcgtgagccactgggcccagcccaaacttaataatgtaacttttttttaaagcaagaaaaataaaaggaaaaacatctatattaaagatattttaaaagataatagaactgggcatggcagcgtgcaactgtagtcccagctacttgggtggctgaggcaggaggatcgcttgaggctaagagttcaagtccagcctggccaatatagcaagacctcatctctaaaaacaaacaaacaaacaaaagataaccaaaaatgtaatgcttgttccttgactggatcctagtttgaacatatcagctataaaaaccattgtggggacaattggagaaagttgagtattaaatgtttattgtgatagatgtgataatggaattgtcattatggtaacatcccaccctttttagagataaataaagataaaatgccatgatgctttcaatttaactttaataaaatacctcaggatagaaaaaagatgagacaaatttggcaaaatgttaaatctagggaatgagcatatgagtattcattatgctattttctacttttttatatgtttgagaaacttaattaaaaaaattaagattgtctttacatttgtctcactcttctatgttgtattatctaattctttaaaaactgctccaactgttcatttctagttagccattatgaacttaactgatcttatggttatcatcaggatcatatgattaaattctggttacaagaaataatttggcaatcagagattttcaggaactgagacagtattatattttacccaaggatgttgcctaaacctttgcttaaaccctgtttattaggacatttgtcctaaacaaaatatgattagcatcaaatttgatgtgcctcaccagagatgaacatctgaattcataaagttctatataatgggagagcaaatatggagaaacctcaatctctatctgcttccttatttgctcctctttgagctaatgcctattacaatattttccttcttatctaaacttttaaattctagcacagatctcccagttttaaacattttaatcaaactatatattcttctctttaaagatcatgtactaatatgtaatgtactaatactctctctcacattttcctgcctcctttgctcttcctccactatagttcagtgttatgctagtgaattgatagataaataaatacctggcattaccacaatcctgccttttgcctgaaaaaagaaaaaaaaaaacaagtgaattttaatatctttctcttgaatgggataataaggcagtgagaatagaaacataagtcagaatatattaaattttaaaaattactattaatgtttaatttttactagatcttctctatttctttgggatcttggacaagtaagatgtccagcatagtaaatttgtctctagaaaattatctttccaaaaagtcattttcccccccaataagtgccattttctccttccccttcacctattaagatggtatataagcccccaattctaagtcatatttctttgtgaacttctgtatgtacttacatatatatgtacttatgtgataaaatctctttttactcctgctaatctgtctttagtcagtttaatttgcaggcccccaataacaaaccctgaggatagaagaaaagtttttcctccctgacatggtgagtaagagaaagttcctgctctcatggagcttacacattcaagaaagacgagacaatgcacagggatatttatacaataaaattccaggtagcaataagtataacaaagaaaaaataaagcaagtgaataaataaagcaaaaaataaagttaacaagagagtgaaagaggggagtggctatttcaaataatttaaaaattgttagggaaataaatggaacaaggatgcttcatattctcaaatggcctgaacaaagcatccataaaacaaaacattgactatctaaaaagctgaaatcacttcagaatggaaaaaagtcatatttgcctgtttcttccaaatcaaggctttccaaaacatagagaaataatatttttaaagaaatgaattctaccatttcttttcgccttccatacaagattatttagaagtatatgcttatctaaggctatcaaagtgatttaataatatagagcagtcactaaatgtcagatttaataatatagaacaattactaagtgctataacctgaagaaatccctcacaactattctaggaggtaggtgctattattatcctaactttgcagaagagcaaagctgaggtttaggatggctaggtaatgtatccatggtcactattagtaagggtcaaagccagggtttaaacacagacctgtccaatcacaaagcctatgctttaactagtatgttacactactaggtagttacttcagtgaagttaatgtatgagaatatttgagtagctcttcctactaaccaatagattaacatacaaataacagacatacacacacacatacacattttgaaatgcaatacattactatggcggttatatcttatttgctactccttactgagtaaccttttaaaactggaaacctgactcatcaactcttctattttaaaacactttaggcctccccgctgcaccatgaaaataaatactttaataaggttttcaaggctctggatatcattctgtccacattcaatattctggccattcctcagtgttttaagttatgcttgcttttgtttatagcccttgcttatactatttgttttgtatggaacaattccaccaacatccccttcaccctcactcccactgcccccaacttttacacagataactcccaaacatccttcaaatgagtaaaacactgcagtctggatgtcttttcttctgggaagcttcctctaattattgccaaccttcatttccccaaatttggggttaattcctctccaatgtactcctatagtaccttttaaaaatagagctctattaaaattgcctgctctattagaagtgcctgttctgcactaaattgtaaggatagtgactacacacagacacttagcccttggttacccccacagtacaaatgtcctgcatctaatatatatttaataaatgtctgtgaaaccattacatcccagaatagcaaagtcacatcagatctttaggagaaatttctgaaaattattttcatggctatagaaaagtgaaaataagcagatgtctacacaggaacattagtattattaataatagcagtaataacagaacctaacattattaagacctagtatatgccaaccactgtgctaagcctctaacacatcccatctttagcaatcttctgagaaactctaaaataagtattaaactcatctcagtttcacacagggggaaagagaggcttaaagactattaacctgctcaacatcacatagcaagtatcaaacccgagtctcaaacgctcaactctctcatctcaaagtctgtactcactaacttataatgcctctggactgacatcagaaaaatacacatactattaattacaaagtcaccttctgagtgctctacaaatgatgctagctcaccaggaaaactcataaaatagaaaaatatatttcctcttatattgacagatgagaagaaataagattataattttagttttggaatttacctccagatgataattttatatgggatcccctgaatatacatgggctgacaatgaaaagatgtggcttaaaactgcaatgctggctgggcgcagtgcctcatgcctgtaatcccagcactctgggagggcaaggaaggcagatggcttgagcccaagagttcgagaccagcctgggcaacacagcaagaccttatatctaaactaaaaaataaaaataaaaagtaaaaaaaactgcaatgcccatggcagagaaaaggtaaaatttgctgtgcttatccaagttagatcagatctttaggcactatctatatgtaatttgatcttgaaagccttggttattaaaaaggcttgtgtgaaagaaataagaattatatacattattgcctgcttgcttttcctacagagtaaccacaaagtcagtaatatatagtctcacaaactggctaaacagcagaatgtcaggagtaaccacaacagagtcttaggggaaaaaaagataaagtccacgtacctgctcaatgagtcgctttattaggggtagcccttctaatgctgaactgtcacatccactggtcaacacgcgttcaaatcccaaggttaagagggtctccagagctgccattggatcatgaaccatgtcaaaggctgaaataaataaaactgatgtgaattttgaacaggtatctctaacgcagagtttcccaaaatgtagtatacatgcagtggcatgctggacctagcttgtactggcttacaaaggccaattattaaacactcaagaattctgcaagtcagattgttaatccactggcagcctgaaattagtgaaggtagggccaggtgcagtggctcgtgcctataatcttggcattttgggaggccgaggtggggagatcacttgagcgcaggagtttgagaccagcctgggcaatgtggcaagaccccatatctacaatacaaaaattatctgggcatggtggtgtgcacctatagtcccagctactcgagaggctgagatgggaggatcacctgagcctaaggggtcgagactgcagtgagccaattgcaccattgtgccctagcctggacgacagagcaagacttgtctcaaaagaaaaataaaaatttaattaataataataaaaaaattcagtgaaggtagagtatttaaaccacagaaatttaaaaatgctacaaatcagggctcttttttctaggagccagttcatcagcacaccacagtctacataccactgtgcataatcattttaataatggtacacatttaaatagtatatttacttaaatgcagataagaaatgaaaagttttcaatataaagtaattataaaagtttctatttaaaataaatttacttttttttaacttttttttaagttcaggggtacaagtgcaggtttgttatacagataaacccgtgtcttgggagtttgttgtgcagattatttcatcaccaaggtattaagcctagtactcatagttatttttcctgatcctctctgtcctcccaccctccaccctcggaaaggccccagtgtgtgttgttcccctctatgtgtctatgtgttctcatcatttagctcccacttatgagtgagaacatgtggtatttggttttctgttcttatgttagtttgctaaggataatggtctccagctccatccatgcctctgcaaaggacatgatcttgttcttttttatgggtgcatacttaagattttatttaaagaaaatgattaaataaaaatgtgcacaggtagcactcatatatggtaaaattttaaatgtgataggcaggtgagtcaaatttgggaaactgttctaaggcttcagaaatattggactaggtagaatgaaacactgtactcaccagttctagaaaaagccttggctcacattctcattactgactaatattttggattaatctattaaccccacatactcaaggttcatagcataagggtagttgttttcaacagactatatgaagtttcacttccaacctacttttttttgtttgtgagatgcagtcttgctctgtcgcccaggctggagtgcagtggcacggtctcggctcactgcaacctctgactccctgattcaagtgattctcctgcctcagcctcccgagtagctgggattacaggcatgcgccaccacgcccagctaatttttgtatttttagtacagacggggtttcaccatgttggccaggatggtctcaatctcctaaccttgtgatccacccacctcggtctcccaaagtggtaggattataggggtaagccactgtgcccagccccatcctactttctaagagatttctcccctcctcagagccctcaaagagtaaagtggtatcaggaaactgaaaacagaaaatctacttctgctttggttctcatactgctacatgacattgaagctctagcctgcagtggattaggtggtagtggtcctctgggacaggccccttcatttcaccctttagtgtatgtaggcaactaaatctaccacagaggatttccctattttggtggcagcaccttctcaccactaaaactatattatgatatctcattaaatacattagtgagaaaaatgtggaacccaaaaattctacaaattttgaaaatatgaaaatatttttgttaaacctattggaataaagaacagaacagaaatttgaagtaaaaaaattttttttgactgtagacttcttttcatgtgcaatggcagtgctctctgaaggcaaaatagatacttgttcttccattttaccaaggtgtagcctaagagtatagaaattataactacctgattttttggccaggggtggtggctcacgcctgtaatcccagcactttgggagaccaaggcgggtggatcacgaggtcaggagttaaagaccagcctggccaagatggtgaaaccctgtttctactaaaaatccaaaaattagctgggcatggtggcaggcgcctgtaatcccagctactcgggaggctgaggcagagaactgcttgaacccgggaggcagaggttgtagtgagccggatcgtgcgactgcactccagcctaggcgacagagcgagactccgtctcaaacaaacaaacaaaaaaaattatatctacctgattttttacaggaaatatttctttacaagaaagtatcacattaaaaaatcactgtggtgcagacaagctataatgaaaaataattttgtatactattgtggacatctgttcattgactagatagtcaacactagattgcatctgtttctcctttctcccttcctaataagacccaattcttctccagatacccaactttctctccccttaagaagtctctatctgtgaaaccccacctcactgctagccccagggatggttttgcctggcttaagatagacagtacctttcatttcaccagccacaacaatttattcttttggggttgcacatgacctaatacagtctcagttaaaatgagtctcaggattcttgcttggaatgctatgataggtacacacacttgaaggcaatacttgctctctccctcgctctcttatatcccaccaccacctacacccacttttaacaacttttcataactaaggcttcaaattttctagaaattgcacatctctacttttataacttttagtcctaggatctaaaaaaccaattggtaaccttggaacactacagaattgtgttccataaaaaggtggtggcagttgttgaaattagaaaactaacactgttcaatagaacttttaaaatgaaaatgactcacctcggtggaaagtgactggcagagggcggcaaatagctataaaaagaaagtcatataacaacatgaatgaagatgtcatcactgattactatatatagaattctccatgttagctgaaactttttaatactttcttcgcctaacaagacagtaaactgacataataataaaatggcagccttacaaattcaaaagtcttatctttccacaaatctctgatttttatacaaaaaaatggtcgtggcttatcaccaaatgaaaaccatttaatctgacaactataagggcagcattacatctaatacttgtccctctgaggtcattcaataagtactttggtttagtaacataggtagtttgcttctgtcctctttgcatcttccaacttggtggtccatcctcaccaactataatacttttgaagttcttggtgcagtggttaaaggaaccatggtaaatttcccttaaatttctattctatgggaacagtagcggagcctaatctatagcaattgaggagagttaagaaggctttgccacacatacaccccaccccaaacatctaaataactactatttgaaatacttaggttagtataagtgtctgtagctatgaccgcaaagtcagttttgtgatgttgtttttctatattgtgagcataaatacaattatcattagaggcttttacgtcttagatacaaattcttacccataagggacatacacagctctttgtcaatgtgtccatcttcagtcaatgccccaaaaaccaaaccatcagcaccataaagcttggcaagacgaatgtcagccttcatcacctcaatttcacgatctgaatacaaaaaatcacctccccgtggccgaatcatcacaaaaactgggatctgaacactctgcttcactacttgaaggacacctacaagaaaagaaagcagattaaaattcaaatgtgagctaaaagccaatgatatattattggtcatttaccagacaaagatggctctaaaaggtaggacagacactgagaagaaaaatgtatatatggtagaaggtaagtaatagcaaagggttaaatagaacgatttagaaaacagaagatgctacaatttaaaagcacttgtcagttgactcaacaaaaatccttatgactcagaacccttttattggtaggtgacatttgaaagtgcaataactaccaggctcgatgttctgccagtacattattccccaagatccaatttcttctttctaattcattacagctctatttaaaacctactggagagatggttaaatagcttcaaagttcatattcctttaatgggcaaagacatttagcaaaaccttttttttttttttttaaacaagatacgtgaaagggagcaaagttctacttatttgtgattttatgcagagatctatgcataaaagtacctaaatatgccataataagtggctagctcataaaccatcaatagtataaggctgtgacaggccccatcagttgtttacccagtatgaatttctttcttttttcttgctaaaagaactccaattttgcataggatagcagttgtccaatactaagcaatgaatcataattggtgttacaaaaacagactgtactcaaatttacagacatgctctagggattttagaatggccaggaatgccctcttttcatgtgaagattccaaagggctgttgtgtatacaaactttttacattaaataatgctattatcaacctcagagtagcataacttaggagaccacaattcatacacagacttctgcttttggccaagacagggtaacagtgactggatttaccctcccacctataataataataataataaaaaaacagacaaaatatatgaaacagtggtttgcaagacactggacattaagcagtgaagggcaatgatccttgaaaatggtaaacaatgaagttagtaagtcaattctgattgacccaatttactgccttgagagtttctaggccaaagcacagggatgggggacccacatggagccaaaacaattccctgagttaaggagacaaagcttagagttcaggaagactgaagtagctagagtttataggagacagtacagggaggacagaaagataacactggagtagcaaagactatctcaatggtttaaaaaaaggattttttttaaaaaagataggcttggtacggtggctcatgcctgtaatcccagtgctttgggaggctgagatgggtggattgcctgaggcaaggagttcaagaccagtctgggtaaaatggtgagactccatctctaccaaacaaacaaacaaacaaatgtagctggacatggtggcatatgcctgtaatcctagctacttgagaggctgaggcaggacaattgcttgagcccaggagtttgaggctgtagggagctatggtcacaccacttcagtcaagcctggacaacaggtgagaccctgtcaaaagaaaaaaaggaaggaaggaaagcaaagagagagaaaaggagaaggaaagaaaagaaaggaaaggaaggaatgaaagaagaaaggaagacagataactctggaggtctgcagagaacctcctttaatattcagctgagtactgaccggtgcatgcatgcaaagaaactacgcaaggcctgggacagaaccaataaaaaggattagaaataatgtgcctgtcattcataccaagctgtgaataatgcctattccaccagccagacaggaaaatttcaaaattcatggtcacagggtagagttcacagaagaatcctgactcagtagtaaggaataattagctctgtattaaccactgctccagacttgcccagcaaatcttaaaagcaagacccaaaaggaccaaactgttttggaacatttgtaggaattcaaaaatgtctagtaaccaataaagtaaaattcacaatgtcttgcatccaataaaaaattacaaggcaggaaaataagatatattattagatgataaatcaaatgaaacaaacccagaactgatatagatgttagaattcgcagacaaggtcattataacagctatcataactttattccacatgttcaaaaaagttaagagacatcagagacataaaaagactcaaatttctacagatgaagactacaatgtatgagatgaaaacataccaggagagactaatagcagattagatagtgcagaagaaaaggtcagtaagctcaaggacaaaacaatagcaactatgcaaaatgaaaacacagaaaggagattttcttttaaatagagaagttcatcagtgacttttgggacaatttcaagtagtctaatgtaagaatagcttaagtctctaaaggagggagtggagaacaagctgcaagctgaaaattttccaaatgtgatgagaagtataaatgcacaggtccaagaaacatgaaaaaactatactcaggtacaccataagaaaattgttcaaaaccaataataaaaaaatcttaaaagtaggtagaaaaaagagacatattacatagagaaaaacaaagatatggatgatagctttttgtcagaaacaatacaagcaagacgacaatggaaaaacatcttcaaagaaaaaaaaaacctgtcaacctagaattctatacccagcaaaaatacctttcaaaaatgaaggaaaaagctattttagacatataaaagctgaaggaatgaatcactagcatactttttaacaaaaaaagttaaagaaagtacttcaggcagaatgaaaatgaaaccagacagaaatacgggatctacacaaaggaataaagaacaccagaaatggtagttgcatgtgggtaaatatatgatttttttcttattatttaaatctcttatttaacaaaagataattgactcttcaaacaaaactaacaatacagcatggagtttttgatatatgtatgagtaaaatatatgacaacaatagcacaaagaccaggaggggatttcaatatactaaggatgccagcatggaaagattttataaaagcctaatccttgatgttactacagagcagctgaaccggtattaacaattacctacctacctttcaactttttgatgtgagaaagaaatatgtttgatcaaatctttgatttttttacaatcataaacatttctgatacaacatccataacatagttaacatgacattagtaaaggaccccaacgaaactgattatcagttgcttccaggctctatgaactccaatcagaaaacctgggaaaaatggacacttacccatgctgggtgtagttcccccctctgataaaccagaacataattcaatccgatcagcacctgtaatataaaagcattgctcaacacatttttaaaaaataagctgttattaaacagcaacctgtttatatatattttttccaaatatagaacagtcttagaaatcatctcagagaaatcaaattataaagctagagtaaaactctgtttttaactcagctatactctgcagcccacattgtgttactcatactcaaatttaaaaattaattaaagttaagctagttctcttaaatttttgtattatagggttgcctctctatgtacaggaaagtaacatagaataaagatgtttcttaaaactgactatagtggaatactgagtctttgttgataagaaaataacataatatttcccaaaagggtctttattattctaagctttaaaaaacacaaagctacttttgagtagctaaaccaagataatttcaagaataagaaaatgctgaaaccaaaagaattattaggctaccaaggtcacatcaaaagatctcaggaaccagtttgaagaagctctcactagccaaagatagaacattttgttcatcaataagcagaataactacaatggattaaaacacacaaaatatatctaaatctacattcataatgacaaaacaattcaagggaagacagagaacaaattcattattctaaaaagtattataataaataagggaaaataagcaagcatttattctgcctttcttatacaaaccatacttcagcataaccaaacagaggatgagggaaagttctttacagaactattctagttcataagtgaaaaataaatgtcaccattttgcaacccctactaaaatatgggttgctaaatttattaggtgaaaagctgacagaaaaccttaaggatagattaggctggcaatacctgaactccctgttcaatcttaatatcacaaaaacagaaaaaaaccaacatgttatgtcctcctgatgtgatgcaacaggaagtatataatgttatctataaataaattttgtcaaaactgaaatctgaatctgattaggcctctgggctaactacctttataggaaatacagtggtcagaggactatgttaaacgatatcacacatataattagcaaaattgagagtatgggatactctaaaagatgaatatcacagttgcttaacaaataaatcttaagaaagtaaacaaagaattaaagaaaaaagcaggagaaacttacagatttaaagagacttaagaggcatataaaacaaatgaaatgtttggctcttgattcaaagaactgtacacacacacacacacacacacacacacacacacacaccctgtatgagtcaactggagaaatctgaaaactgggttatttgacgatattaagaaatgatttttttaaaggtgtgttagtgacattgtggtgttttgttctttaaaagggaccttatcttaaacaatatacattaataattccacattatttatggatttcttatatatgtatgcatactaggcctttgaaaacaataaagaacttaaacaacaaaaaaagagtccttattttttttttttttgagacggagttttgctcttattgcccaggctggagtgcaatggcgtgatctcggctcacgcaacctccgcctcccaggttcaagcaattctcctgcctcagcttcccgagtagctgggattacaggcatgcactaccacgcccagctaattttgtattttttagtagagacggggtttctccatgttgaggctggtctcgaactcccgacctcaggtgatccgcccgcctcggcctcccaaagtgctgggattacaggtgtgagccaccgcgcccggcaagagtctttattttttagagacacacactgaaatatttaaaattaacatgatgtctgggatttgcttcaaagtaatctgaggttgggagaggaaggtaggactataaatcaggggtcagcaaaccatggcatgtgggctatgggcacatagcttgttttggctatggcctgcaaactaagaatgtttttgtattctttttgaaaaacaacagctttatggacatataattcactaatacaattcacccatttaaaagtgtacaattcagtactctttagtatatacacagagttttgcaaccatctccacaagtaattttagaacattttcatcatccccaaaacaaccctacaccctttagcagtcacctacccttctcatgcctctcagccctaagcaactattaatctactttctgtctacataaacttacctattttggatatatataaatggaatcatatgttgtattttcttccactggtttctttcacttagaataatatttcaagattcatctatattatagcatgtatcagtacttcattcttttctattgccaaagtaagaaggatttttttaactttttttttttttttagacaagatctggctgtgtcacccaggctagagtgcagtggtgtgactggctcacttcagcctctgcctcctggactcaagtgatcctcccaccttagcctcccaagtagctgggactacaggtgctcaccaccacgcttggctaatttttctattttttgttgagacagggttttgccatgttgcctgggctggtgtcgaactcatgagctcaagtgatctggcagcctcagcctctccaattactgggattacaggtgtaagccactgcacccggctgatgtttacattttcaaaagatttaaaaataaaataagtgataaagatcaaatgtgtccagcaaggctgaaaatatatatactatgcagctcttcacagaaaaagtttattgacccctgaaataaatgaaaaactggccatgtgttgaaaatgggtgaagatgagtgatgcatacatggggcttcattatcctatttgctctacttttgtatatgtttatttttccataataaaatttttttttaatttttctgaacctgagatgatggaaatgtctgtgcttcccattaaaacaggttcagagtacaacagaaactttgagggaaaaatagataatgttcaaaagtaaaaaagataaaattcctcatgatgaagtctctgaagtcatctttaagttaatggtttaaaaaaattaaaattttgctaagttcaataaaaaatcaagtcattgagtaagtactattgtcgacacttgacttaaaatgtgacccacttggggagagggagagactagatcataattttccagtagggtttctaattggttgtttctgaaagcattatgagggatgcttagagatcacaagggcttctgagataagcacacaggattaattttcagactcttaaaagggtagccaacggtcattcactatctgatttctcttacctcctctttctgcattcacagctgattccactgaatcaacacaaacttccatgagaaatccatttgctgctcctaaaatacatggagaatggtaagagttcataaaggttctatccatccagaccaatttaccacaaagggtttacattctgctgccaaaatgcaaatgtccaataacaggtaatagataagtacactagggcccatgaatgcaataaaatatcacattaattattgaattgatgcctatagactgaaataggtacacagacagatgtataaaaaattatactgaggaaaatgtctatcgaatgccaaattaatcttcctaaaacatagacctcatcatcacattccagctgagattcttacaatgcttctcaatgcctgcagaatatatttaaacttctttataaggaatataggtttaaaagcaggacagacttcaaatccatgtcccaccaactatttagtgtgagatcctagattagttacttaagttttctataaaacaaggtagattttagtatgtacctcagagtagtgaggattaaattagataattcatgtaaagtatatagtctcaagaatcaaaaagtattagttatctggccgggtgtgatggctcatgcctgtaatcccagcactttgggaggccgaggtgggtggatcacatgaggtcaggaattggagatcagcctggccaacatggtaaaaccctgtctctactaaaaatacaaaaattagccaggcatcgtggcatgcgcctgtaatcccagctacttgggaggctgaggcatgagaatcgcttgaacccaggaggtggaggttgcagtgagccaagattgtgctactgcactccagcctgggtgacagagtgatactctgtctcattccttcttatgcttccagatctctccagtccctaccgctggctccccaatgccttctcctcaacccagagttccttctggcttcatctctgaataaaatttttcaaggaacatttccatgattttttctgtctcccaaagtagaaaattttatgtccctcttttgaactcatttaactcttcatgagttatgaaaccccaattgttccttcttaaaatatgaattactttctaccttttattatttatgcagataaatatctgatcacttctacttgacttagagttcctaagtttgtttttttttttttttttttttttttgatacagagtcttgctctgtcgcccaggctagagtgcagtggcatgatctcggctcactgcaacctccgcctcccaggctcaagcaattcttgtgcctcagcctcctcagtagctgggactacaggtatgtgccacaacacctggttaattttgtattttttgtagagatggggtttcgccatgttgcccatgctggtctcaaactcctgcactcaagcgatctgccagcctcggcctcccaaagtgctgggattataggcatgagccaccacgtctggcctcctaagtaaggtctttatgtgagaaatctttatcatcacccacaccaagcacagtatctaccatggtacacaataatcaaatatttactaaaagctgaataattacaacaaaattaatgtatttatattacaaagtgtgatgtaaacagagttttgagtttttttccgggagcacataatttaaaaaaatgaacgaaacaatgcacacttcatgtaatgacacttactagaatgttcctcacatactggtaatggtcacttctggtggggtgtgatttgaaattatttttattttcttctttttacttttctttattgctttattttttctacccaatattgcttttataatttaaaaaagcaatttttactttgaaaaacaaataaaacaaaaacctatcatctgctaacatcaaactgcaattgccttacttatttaagactatcagtccctgtccggcgcggtggctcacgcctgtaatcccagtactttgggaggccaaggtgggcggatctgaggtcaggattttgagaccagcctggccaacatggcgaaaccccatctctactaaaagtatataaattagccgggcgtggtggcgggcgcctgtaatcccagctattcaggaggctgaggcaggagaattgcttgaacctgggaggtggaggttgcagtgagctgagatcaggccactgcactccagcctgggcgacaagagccagactccgtctcaaaaaaaaaaaaaaaaaaaaaatactatcagtcccaaactgtgaaagggttaagtgtcaatctatgctcttaaccaacagctctgcattattaactccatgagtttcctggtagctaccagaccagctgtcagatcagtggcactggccgatgctgatgctgccgggggactatttgcctcacacaagaaaggaccctaggcaggagaagatggagagatgtataaaaaaggctatgacagaaggcagagcaaggcagttgtcccaagcaacaaagttataggatcaaaggagaagcagcagcagttctcaaagtgtagtagtccagagagctttgggagcctctgagacttttcagagtctgcagggctacaaccgttttcttaataattctaacactttatttgactttttcactttaattctctcacaagtgagaggcgttttcttttttgaggcagagtctcactctgtcacccaagatggagtgcattggcgcgatctcggcttactgcaacctccgtgaagaggcgttttcaagaggctacttgacatgttagactgaatgaagcagcgggcatgagaatccagctgtcttccattaagatatactgaagaaacttgcaaaaatatatttccactcttttgctttttttgttgttgttgtttaggaatatttctttttcaaaaaaatattatgtcaatatgtaatgggtttactatggttattttctaatcaatattttaaaattttgttttaattttatttttatttttttgagacggagtctcgctctgtcgcccagggtggagtgcagtggcgcgatctcggcttactgcaacctccgcctcccgggttcaagtgattctcctgcctcagcctcccgagtaactggtattacaggcgcctgccaccatgcccagctaatttttgtatttttagtagagacggggtttcaccatgctggccaggctggtctcgaactcctgagctcagatgatctgtccccctcggcctcccaaaaaaaaatttgttttaatttctaatacagtcaaaatagatagatgtaatccacataaagaaaaaatctttgaggattcttgataacttttaggaaggttcctcttcacggaggaagagggacttgccaaattctctggcacctgccatgccatgctaccctggcactcaggaagaactcgggtcttggagcagccacaagctcggccacttggtagctgcgtgactttggggaccaagccccgtccccgccgtggcagctacaggtaactgcaggttaggaactgggctccgcgctcgacaattaactatcccagcggagtactggctgctggtgcgggcggtactggcatcctcgtgtggcgacggaaaaaacgtgaagctgaagttaaccaacttgcacaaggtcgcagggccgttatgaggggaccccgggactcgaaccttggctccacagctgagccattctcgctacctgcccctcgtcacgccctccgtttccacacctttaacgcctcaaagatagaaggtgccgcccaaggggctggaaggagctgaggaaacgactccagaagaaatcaccactgactacgactcccgccggcccgccccggggagccttcggccgaccgtcccctcccccgccaccttccgcaccggccttcccggacggtatccgcgctcgttttcgctcagaggaggccccctgccttttcatgctccacgcgttcctccctcgtgcgcctgcagtttccacttggaatttgggctccggcgcgcaccagctaagaagcgcgtcaacagctgcgcgcgcccgtgcgcgcgtccccgacacctacgccccagcagcccccgcgaaagcggag

SEQ ID NO: 2545 - DNA, 720 bp, Homo sapiens
tttctctgtctttcgccaacggcgctccaatgtacataatgcgtaacagattctcatttgccggattcagcacaaatagcggtggtgtaataataaagtctgctgattttttattatctggggtcatcacccatgactgaataagataaggaacatccggactggtgttacgtacacccagtgaaatttgctcttcaccttctgaataaacaagacgtgttgctgcaagtccaatcccgcctttacctgccgcccatgcggatgagcagctgagtaatattgccgttaaacttacggtcacaattccctttgttatgcaagttttcataaatagtcactcttaaaaaatatgaatatcccctccagaacactggaggggtactaattaataaaacaattaatgagttctattaataatagttaatatggaaatttgttaccgcattcacattacctgaagtcgctttccccgtagcgatataatcaactttaaaagtcaacgtctgatctccatcctgcaacaaaatgttcccggtttctgtgtctggcgtgatggccgttgtaccatcattcatatacatttgcagggccacgtttgtagcagcatcagatgaggcctggttagcaaacgctgtaatctgagtagtatccgcagtgccattaaaggtgaacgttgcattttttgttacggtagtatcacaatcttttaattcaattggc

SEQ ID NO: 2546 - DNA, 435 bp, Homo sapiens
cacccgcgggaggagacagaggaagccggttccaggcggtgcaggagcaagtcacagggtttatgttaatgcgggccctccccgcgccggcggcttagcctatgagccggggccctggcagacagcttaattaccgctgcagcgcgcctcagcttgtgttccttggctccctaaaataataaggatggcgtcaccgacttccccgggccatgtgctccccgcctgccttcagagctctattgtaggaaacaaacaacaaaaaaaatcagagacgtggatgcttttttcttggggagattttttgtttgttttaaagtaataggggactctgcccctagttaaggttttaaaagatcttctagaggtgtggagatctgggtctactactgttgaggctgcagaatagcctcctgttagcagaaacttgaaagctac

SEQ ID NO: 2547 - DNA, 461 bp, Homo sapiens
gaatcgcttgaatctgggtggcagaggttgcagtgagccgagatcacgccactgcacgccagcttaggtgacaagaacgaaactgtctcaaaataaaaagagttgagtctgtaagattttcactgggtcgtgtaccctgccagttctaaaaccttcatctccccttttccacactgcagctcccatcccccagcaaagctagacccaaaacccctccttcccttcttcagaccccaaaacagttcctgctcctctgtgaacacttttaagagctatacacgctcttaaaccagacaggcctgggctagaggctgggcagtcagggaaggcttcctgcgggaggtagaactgacaggtccttgatgtggagtctataccagctggaaggtaggaaggaggtttaagggggaggaagcaaaggaacaatatcagggaggggcccagctaggattcaccagcta

SEQ ID NO: 2548 - DNA, 422 bp, Homo sapiens
acctttccttgttgcctcaggaagtactagaaaaagaaggagcagttcttactctaagcttccttctctctggtcctgtccttcaaagggctctgtttcaggcccaaactgtccactttaatcagggccagcttcacaggcatgtgacccgtgcagcacgcacttggtttaatgcgctgctgtcactgtcttggaattcttaatttttaagcaaggggctccgtgtttttcattttatgctgggccctctaagccagtcctggcttttgatatagtgtatctcctccgttggtccttctgggtccccctcatctgcctttagcatgcctgttctatctggtagaggcatttgaagaatgcaccctggcccggccccagtcctgctacctggcacactggactggagttgtttactggtggct

SEQ ID NO: 2549 - DNA, 599 bp, Homo sapiens
ggaaatgcacaattttgaggaagagttaacttgtcccatatgttatagtatttttgaagatcctcgtgtactgccatgctctcatacattttgtagaaattgtttggaaaacattcttcaggcatctggtaacttttatatatggagacctttacgaattccactcaagtgccctaattgcagaagtattactgaaattgctccaactggcattgaatctttacctgttaattttgcactaagggctattattgaaaagtaccagcaagaagaccatccagatattgtcacctgccctgaacattacaggcaaccattaaatgtttactgtctattagataaaaaattagtttgtggtcattgccttaccataggtcaacatcatggtcatcctatagatgaccttcaaagtgcctatttgaaagaaaaggacactcctcaaaaactgcttgaacagttgactgacacacactggacagatcttacccatcttattgaaaagctgaaagaacaaaaatctcattctgagaaaatgatccaaggcgataaggaagctgttctccagtattttaaggagcttaatgatacattagaacaga

SEQ ID NO: 2550 - DNA, 599 bp, Homo sapiens; identical to SEQ ID NO: 2549

SEQ ID NO: 2551 - DNA, 197 bp, Homo sapiens
tttgaattttagtctttattatgtagtgtattagtctgttttcatgctgctgataaagacatacctgagactgggtatttataaggaaaaagagattaaatggactcacagttccacatggctggggagacctcacaatcatggcagaaggtgaaaggcacgtctcacatggcggcagacaagaaaagagaatgagt

SEQ ID NO: 2552 - DNA, 198 bp, Homo sapiens
tttgaattttagtctttattatgtagtgtattagtctgttttcatgctgctgataaagacatacctgagactgggtaatttataaggaaaaagaggtttaatggactcacagttccacatggctggggagacctcacaatcatggcagaaggtgaaaggcacgtctcacatggcggcagacaagaaaagagaatgagt

SEQ ID NO: 2553 - DNA, 1578 bp, Homo sapiens
  SITE (1293): n equals a,t,g, or c
cctccctctgagaggcaacaggccggctgaggtcatacttctcctcatactcattactaagaattttgtcctgggccttctttttgggaggtttctcctttgctggcttgggaggacctggcaccacatttgggtctcggtggccatgttcccgcctgtccatgcggttgtcccggaaacggcctgggccagcagcccttgtgctgggttctgatttggtggtgggaggggcatttgtgaagctctccaagctggtggccttgctgggcctcctggttgtctgtggcctctccctgtgctgatccttccgggatggagggtaaagattctctgaaactgagggtctcctggcagtgatcacctcagtggttgtagggggcctgtgggagggtgagggggtccagggcctctgcgtggtgggaaaggcagtggtggtcataggtcttgcagcaactgttaccgcccgggacggggaccgagtcactgttgtggctggggcaggaggaagggtggtggctctgggggttgagggagggtgggggcaaagctggtgccagtgcgggccagttttctcaggaccttcacccgactctctctggttggtgggacttgtgctctccttgggtcctctttcttcttctcgctgcccaggcttggccttcctgctccccctccaccgtcattcccctccgccaccacctggccctctacaccagaggccttacatttctggacaaagcccttctgcctgatcttctcgatcctacggatggggccttggtcgatgacctcgtacatggcttccagcctaacgggatatggatagcgctcctccacctgcagcgtcttcttcagcagcaccatgccaaacttgcccttctccagcttcaggaagctcatcagcttagggatgaggctagggtccaggggctgctccaggatctggccctcgctggtgatccttctcaccttgcctccttcctcacctgcctggtggaagagcacaatctgttggatgtgcctctccgccagctcacagtacacatcgtccttcagcaggctcatcatgaggcggtagaaaccttccgaggcatgaggggctgagatgacccatactctgttcttccctgcaaagctggcaaggatgttgggagagctggaccccgaagggaaacgcaacattcttgaccgagctgaggacccctcatctctgatcatctcacgcggagagcccctggctgatggtctttgctcaggtctcacggcggccccattgatgtcgagcggggctgncggctctgttgggcgagctagtctcaacacggggcacactcctccttctctggagaggctgaaggtttggttcctccagagtggatctctcaattccgcgagacctcccagtgtgcctcagaaaccgagctggcctactgctgtccggagaaaccaaaggcactttccgtcctccgtggctgcctctaatagtggcatgggggtggggttctgatccacacactagccacatggccaacagcatagtgaaacggggtcccattctccatgtcattgtgtaatcca

SEQ ID NO: 2554 - DNA, 385 bp, Homo sapiens
acctcaaaagcagaacacacacaaaaagaactgctgtcactaagtctcactaataccatcagccattatttcataaaagaaggaccacatttcacactccaccccgtcccccccaaaaaattaccaaggataacccagaaaactggatgcctttcaattgaatgaatttagcgtcacgacctgctcactctcctactcctgcttttctggtaccttcccagagtggatagagcattatcaagaggcagggcccccctgcctgttcactagcaggtgccgagggccatggcaaaaggaacagtggtggcctggcctccagaggcccctgagtgagccagggatttcctcgtttgtctgcaagttgggaaggcacctgatgccggtt

SEQ ID NO: 2555 - DNA, 219 bp, Homo sapiens
gtaatcagtatatgttttttgcatgatgagtacatgcatgtacaagcagggactgcacgttagtttgccattttaataagataactccttattggggaaatatcgcttgtaaagcttagaagaaatggaaatatcacttggagcaattttaaagcacgtggtaaaatcatgaagagaggctaccctcatccctctgagggcctctctgtgggtctgcaa

SEQ ID NO: 2556 - DNA, 322 bp, Homo sapiens
aggtgagggtgaggtttgagctgaagtccccggtgaagacgatagaagacttcctgcggaggttcacacccagctgcctgacctcaggctgcagcagcatcgggagcctggccgccaacaagtccagccacaagttgggctccagcttcccgtccaccccgtccagcgacggcatgcttctcaggctggaggagaggctgggccagcccacctcggccatcgccagcaacggctacagcagccaggcggacaactgggcctcggagcttgctcaggagcaggagtcagagcgcgagctgcggtacgaggcggagagcccgga

SEQ ID NO: 2557 - DNA, 477 bp, Homo sapiens
ctgacaatgaaaaaaaattgaccctggatacagagatggggcagagactttagggaggggcaaccaagttgcctaacatttagagggaggaatataacaggtagagagcagatatatttaacaaaaagttttctgcttggttggagtgccttggccaaaagcattcttgtaaaatgcaacttcatcacttcctctatactacatgaactcccagggtcagcattcatttattggatcagcaagatatttgaggctaggccatactctgggactcttctataactcctcaataattgccttttattaagagctaaagatgtatcaagcatttttcaaatattatccatggtgttcacaactgtcatgatccactctgttatcttcatctgacagaagagagatcaggtgacttgttcaagattacatagagtatatatatggtagagctgcaaacctgggctttttctaagactgctc

SEQ ID NO: 2558 - DNA, 439 bp, Homo sapiens
cggaggaggggcccgaggctggggcggctggtggcagctgcctcagtgacgactgccggcatcgcggcgacctgaggagatcaagccgcaggccccgccgtcgccaccactcccgccagtcttccttctccgctcccggccggggcgtcaggaatgggccccaatcgccgtgggccccgcaccctgcgtcgcccgtaggccccagtagccggaggccgaccggcctcccactacccctcgccctagccaagccgtccccaccccaaatccccgggaaggaagatgagggagacgggcccggcgcttagcagccagagcagcagcagcagcagcagcggtcgggggagggtgtttcgccgtttcctctcagccgccaggacaagatggcagcggccgcggagaggggctgagcccgggctgggtggtgccgcctgctgaa

SEQ ID NO: 2559 - DNA, 439 bp, Homo sapiens; identical to SEQ ID NO: 2558

SEQ ID NO: 2560 - DNA, 131 bp, Homo sapiens
cacgcagcttgagcaccccagccgatggccgcgtcccgggctttgtggccccgtccccagcgtcgcggagcagcgggtttgcagggtgtcaactctggggacgtgcgtgcgtgtgtgtgattgttggggag

SEQ ID NO: 2561 - DNA, 359 bp, Homo sapiens
ttccagaaagaaaggtgtttgtttcccaaaaggttagacattgattcagaacaaagggaacctgaggaaacgggtataaaagaaaatcaactctgaatgtgaggtattagaaagccatttgtttcctagggaaaaggaggaaagatggggtgggagacatgggctttactgtataaccttggtcatgtcacctaaacttcttggaactcctgagtgtaagagttgggaccaaggatcgcaaagcttctttcattcctaaaattctatggttccacgattatgtaagctgaaacaggccattctgttgatttcctaatctccaggaggaaagaaactagtctttgggagttaaaccgact

SEQ ID NO: 2562 - DNA, 131 bp, Homo sapiens; identical to SEQ ID NO: 2560

SEQ ID NO: 2563 - DNA, 351 bp, Homo sapiens
agaaaggtgtttgtttcccaaaaggttagacattgattcagaacaaagggaacctgaggaaacgggtataaaagaaaatcaactctgaatgtgaggtattagaaagccatttgtttcctagggaaaaggaggaaagatggggtgggagacatgggctttactgtataaccttggtcatgtcacctaaacttcttggaactcctgagtgtaagagttgggaccaaggatcgcaaagcttctttcattcctaaaattctatggttccacgattatgtaagctgaaacaggccattctgttgatttcctaatctccaggaggaaagaaactagtctttgggagttaaaccgact

SEQ ID NO: 2564 - DNA, 616 bp, Homo sapiens
  SITE (502): n equals a,t,g, or c
ctttgaattccttagtatgtagtgaagaaaatttagttgttagttgctttgggaagcctacttatggagtggaaaccaggaggttatcatggtagttgaccttgtaagaaaaatgattcttcttcagaaattaaaaacataactattgccagatttagctctggaatgtttagaatcaggctagaatagcattttccaaagaatattctaagagctattagctcctctagatattttgttgggggaaaaaggggattctgtggtcagatgagtttgggaaatgctgaacacttcattcttctttagcaagtacagtcagtacatcaaagactgagcagttcagtggtacataaatttatctcgccctgcatattcccaacatacttaacacagatgttttttacctgttaacatctcacccagctagtgttcctcagaacaaagattggaaaaagctggccgagaaccatttatacataggaggaagggcttacggactganaaagggagaacatggtagggattattgaatcatttcaaattgataccagcctgagtagtgtaccagcaattgacttaggctgggtttctttttggttttaaactcttgaactgt

SEQ ID NO: 2565 - DNA, 1236 bp, Homo sapiens
ataagtatctccttaaaaagaacataattctcattcacgcaagaataagttctttgaattccttagtatgtagtgaagaaaatttagttgttagttgctttgggaagcctacttatggagtggaaaccaggaggttatcatggtagttgaccttataagaaaaatgattcttcttcagaaattaaaaacataactattgccagatttagctctggaatgtttagaatcaggctagaatagcattttccaaagaatattctaagagctattagctcctctagatatttttttgggggaaaaaggggattctgtggtcagatgagtttgggaaatgctgaacacttcattcttctttagcaagtacagtcagtacatcaaagactgagcagttcagtggtacataaatttatctcgccctgcatattcccaacatacttaacacagatgttttttacctgttaacatctcacccagctagtgttcctcagaacaaagattggaaaaagctggccgagaaccatttatacatagaggaagggcttatggactgagaaagggagaacatggtagggattattgaatcatttcaaatttataccagcctgaatagtgtaccagcaattgacttaggctgtgtttctttatggttttaaaactcttgagctgttataagagatagttcttttaatgtgactatgcaacatgatagccaatggtgagggaaaaggaggtttctctagaagagtctgatgaaaggccgggaaccaaggtttttgagaagtctgcccctatttatttttagtaagtatcaagaggtagcctgagcctagttagagttagacctgtctttggatgaagaagtcttaatactgaaatactgaatttttaatacattattatttggtattctctataccccttcaagcagttgtttcccattcccaacaaactgtactttatacaattctggatgctaaaacttagagattttctctttgcataaattttggctccattctttccataacaatctaatcaaaactgggagttctcaagtgaatgcaaaaggagcaggccataactttatttgttagatacactgtcagaaacttgagatcttttggcctatgataataccattaatttttgcattgcttcagtttgccaagtgtttttacatcatctcatttgatctcaaaacagcttgacagagcaactgttattgaaatattacag

SEQ ID NO: 2566 - DNA, 5196 bp, Homo sapiens
cattgagtttgtagctgacagattacttgtggaacttggattctcaaaggtaatgtgtttaaaaatgtgttactactagttaaaatattataggaaagcaaggaccctaaagtataatttactgaaagcatttgtaacatactattctattttttaaatgtcaatgacagagacttgttttgtatgaacaaggttttgcaaaatcctttgaaatttaaaattaataactgaagtaggaggctggtaaaatattagaactaataagctcaataaattattttgcaataattgtagctgtatatttaataggattattttcaaggagttaggtttaatatgcatatatatattcaccctcatataaatcgccatgtgtctatattgtggtttgggagttaatacttttaaatagggaatagttattaggaagacattaactgtcacaatataactctttgaacagagttattcaagttatttttgtcatttatcagagataatgtacctgaatttcatcagtgcggttttcccattacttaagacatggagcctgcagccacactatctgggtttgaatcctggttccaccactttctagctgtgtgacctttggcaggttgcttaactatctcagtttcctcatctataaattagagatagtaataatatttactacaaaggattgttgatgagttgatacacttaaagcacttaaaataatattagacacataataaactcacactagatggtcactttgtacttaagtgaaacacagaaattcactatgtactataccatggtaattagaaatacagattttgatttcttgtcatgaaaatgtaagttcaaattatctttaatgagaatccttatgaaatctatgatgctgtggtaatcattacctatcttgctaatgttgtattagcagatatagcagaattatattctgataaccacccaggtacttaatgaaaaagtcaagtggggcgtaggtttttttggtaagataaactacattttaacattttagttgcaagatcctctctgtgtttactaattaatgagaaatcaagattataactatattaatataatctcttaaacttataaactatgtatattaaaagaaattgtgtttgttcataacttttaccaatatttttgttattagaaaatgaatttgcttatttaagccttacagtgaattcgctattctttaacccattaccatatcctcacatccacacgttcatgttctgctgcttattagaaaactgctgacccttgggtctaattttccttttgggaacttgctaactgtaggtatgtaaaacatgccacctcctgcaggagaaggtctaaacacaatgtaaaactttgtttttccacaggcttcaaaatatctgagtaaattctaaaaagcagaaattatagaggccttagatttttaatgcaatgaaagtagaaactgatttaaaaattgccaaaaagcttaatctacttagagattaaaaatatatccgttaggccaggtgcggtggctcacacctctaatcccagaactctgggaggctgaggtggaagaatcacttgagtctaggagtttgagaccagcctaggcaacatggcgaaatcctacaaaaaattagccaggcctggtggcatgcctgtagtcccagttacttgggaagctgagctgggaggatcacttgagcctgggaggcagaggttgcagtgagctgagattgtgccacggcactccagcctgagcaacagagtgagaccctttctctctcgctctctctctctctctctctgcatatacatgtatctcctttaaaatgagatttaaaatgaaaataaaaattaattgaaaatataaagtaaatgacaatatgattactatgtatcaaaacttgtaggagctgggccttgtggctgactcctataatcccagcacttcggaggccaaggcaggaggattgctcgaccccaggagttccacactagtttcagcaatatagcaagaccctatctctacaaataaaaataataataaggctgggcacagtggctcatgcctgtaatcccaaaattttgggaagctgaggcaggtggatcacctgaggtcaggagttcaagaccagcctggccaacatggtgaaaccctgtctctactaaaaatacaacaattagctgggcatggtggtgggtgcctgtaatcctagctactcgggaggctgaggcgagagaatcgcttgaacccaggaggcagaggttgcagtgagccgagattgtgccattgcactccagcctgggcaaaaagaccgaaactctgtgtcaaaaaaaaaacccaccaaaaacaagccacttaatttagtttgtttttttggtcttggttactttgtccatgccatgaatgacttagatctaattttttgaaaagtcttcagttctaacatctagtgagtctatggctattggttcagtgccctttcactgtatcttgctgtatattacagctccaatattccctcactttttacacacaatttctgatggagaatttcatagaatttcactcagccacacccagcatatgagtttttggaaaaaagatacataaatatttaaagctttatttaaagattaagtcacatagcatgcaattcacccatttaaaatgtacaattcaatagtttttagtgtagtcacagagttgtacaaccatcataacaacctattttagaacatttttatcaccccataaagaaactgtatccctattagcagtcagtcactcctctttcctccccttacccaccttgccttaggcaaccactaatctaatttttgtgtctgtagatttgcctattctgcgtctgtagatttgcctattctgcatattctatttcatacaaatggaatcatataatatgtggccttttgtggttctcttctttccttagtgtgttttcatggtgcattcatgttgtagcatgtatcagtgctttattcctttatatgaccaaataaataatattccactgtatggatataccaaattttatttatccattcgatggacatttaagttgtttcctcttttgatctattgtgaataatgctactatgaacgttcatttacacatttttgtgtggacatgttttcatatctcttaagtatacacctaggagtgaaattgctggatcatatggtaactccatgtttaatcattagaagaactaccagactgttttctaaagcagctgcacaattttatattcccaccctgtatgagggttctaatttctccacatccgcaccaacacttattacctgttttttaaaaaattatagccatccgagtaggtgggaagtggtatctcattgtgatcttgatttgcatgtctctaatggataaggatgctgagcatcttttcattttgtatatcttctttaaagaagtatcagtttgtctatttagacactctgcccatatttaaaattgggttacttgaatatatgtttatctgtagtgttcatattttttgctgggatactcctaaattgagaaatcctcttttgttactccttgtgaatcactgaaatatcccacagtttccatcaagctgtatctccaagtctgcttcttgaattcttttttttttgaaatggagtcttactctgttgcccaggctacagtgcaatggcatgatcttggctcactgcaacctctgcctctcaggttcaagcaattctcctgcctcagcctcttgagtagcttggattacaggcatctgctaccacgcccagctaatttttgtacttttagtagagacagggtttcaccatgtcagtcaggctggtctcaaactcctgacttcaggtgatcccacctacctcggcctcccaaagtgctgagattacaggcatgagccaccatgctcggccttgtttcttgaattctgaagcagtaaaaaagcttcttgttagcatagtccccctttttgtttggagacatctagtcactatggataacatttattctgtcttccctgatcttgttcccttaatgacaatttgttgattatctgttctcttataaactaagaaacatacttagaaccacagtggattgttgctaatttaacattttatagtatcatgtatgtctgactaatagtaatatctatgaaaaatgctcatggtgtattggatatctcaagctgtgagaacattttctattggttagtattaaatatttcaattcctgaaatagttgtgtttttttttctatttattagaataccagagatgctagtacagtttcttgaggagattagtggttgatcttgggtcatcttaaaatttgtcagccttgagtacctccagggtcttaggggaatgatatgatcttgtagctgactagataggttttgagaaacctgacctctgttttggtcatctttgctcttattgtggatgtaatttgatctcttcagaatgtctaataatatttctttcctttttaggtttttcaggcagaaaatccttttgattttatggaaaacatttctttagaaggaaaaacaaatttctttgagaaacgagtttcagagtatcagcgttttgcagttatggcagaaaccacagataacgtcttcaccttggatgcagatttttaaaaaacctctcgttttaaaactctataaacttgtcattggtaaatagtagtctattttcctctgcttaaaaaaaattttaagtatatcctttaaaggactgggggtttgctcaaaaggaaatccaaaacctattctaaacaatttgcatttatataattttcctgtttaacaacaagagtgtgacctaaatgcttttgtcttgtcactgaaataaaagatggcattatgtggttaagagcatggggcgaggggtcagacatgagtctaaggttctgcccttactccagtgtgtgacccttggcaagtcagttaatcttggtaaacctcggtgtacttatctttaaaatgggagtaatagtaggtcctaaattcatagagtggatattaggattaggatgcaaaaataaatgcttaaccaacactactactgttagcaccactactaattatcattcattgataatattaattgcaatgatgttgtaataaaatactctcatttcc

SEQ ID NO: 2567 - DNA, 631 bp, Homo sapiens
gtgctgtcgtcgtcgtagctgccctgggcatcctcgtcctggttctggagggccgtggggagcatccctctggagctcgccgtgtaagggtccgaggaggagtgggagcggccctgcgacgtggggcggggccgcccggcctgggtcagtgagagcctgggctgggaaggtgaccgacccgcgtctctgctctggggtcccgggtggtgctgggacgtggcgacgggaggagggggctgctgttgtggggcccggccgggtgtcatccttctgggaacactgggatgctgctgtgaccgtgctgcgggcggacgagcaggggacgcgtggcggtctgtggaccctggctgtgctttgggagaatgaccctccgtgtccgcgtctgtgctctgttgaacatcctgagccttggaggccagggaggagtacttgccctgaggatgtgtatctgcccctgtggatttggggttctctgggatgggttccttccgatgcaggctggcccctctctgcgggcttctccttaagtcctcccagccccgggagatgggctgcctggaggaggaaggcacgtggtcattgacaacggtggcaggaagcggcttctcatcctcctcgtctccatggatac

SEQ ID NO: 2568 - DNA, 3783 bp, Homo sapiens
cccttctacatttggtctgccattataacctacacagtaccaaaaataaaaataacagagcctggtaaattcaacatgccagggaagttggcttcataccaaactattagtagtgacacatcatttcaaatagaagctctaaacagaattttaaaccaatagctcaaatatattagataatgatagtctcaaattatgacttctccacaacagatatgaatgtcaattaagaatacagtaaagtcacagctttctgacaatactgtgggaatgagagtgtgtggcataagtaaatttgccatagaaaacttaagatcttagtagctgtagctttattttagccatgtggaagttggaggaaggaaggattggaaggatagagaaaattatgtctaaaatgtactagatgctgtcccacttttctggggatgttaaactaaacacagctattcccagctgactcaggtcccaatcaccaatcgccgagtataaaagcacaatgctgtctcaaagcttgctgaacgctgtggggctgcttgagaagtatttgctcagacagtaagaagatgcagcagcacccttacacttgttgtttctgtctgtctctgcctcacatggagatgtttctcatcagctccagtctgctctggtccagcattgaccgctcggcaaagtgcttgggctttctgaccgctactcgcaggtcagacacttatttctctcattccttcatttatttattaaatatttatggagttcctgctatatacaagggaacgttgagttttacatctactctcagggtgctaggtttgattaaaacagtcaatcttagtggaaaactgagtttgatatggggcattgttctatgtctttacattgggctaaaataacaatgcattgtacagatctgcaaaaaaaaaaatacattcattcaagaatgttctataaagccccaattacatacaaggagggtttaaagcaccatttaactgaatgcaaatttatggtaaatgcctcggaccctgccctggacataaattccagttcatagcggacttcgttcaaccctctgttatagaaatacaaagcacacatctgcctgtaactcctctttgtgacaatgatctttaacatacattttctggaggttttagacaacatgcactaattgcactgtctgagcaattcatacccaagatatctgagtttgtctcagggtttgtttggttgagagttttgcatgcagaagatgagaacaagataaagacaagaacaagataagcctacatatgtatctaaccagcttctatggatcccttaaacacatggcggcacttgaacaactaagaagaaactgagttgggcatcatggttgtgacacattttcacaggttaagagtgtatgccaaagaattcaaagaggcaatgtaggacagtgaaaagactgtggaattagaggcaatgtgggttagtaatggctgtgaaattaggccatttggaattggaatggcaactctgaggtgtctgccttagggcaagcccctcagatcctgagccgcagcttctgcatctggaaaacagggataacaatgcaaaccgtagggaccgttcagaggatgaaattatgtcacatgtgcaaagctcttaacacggtgcgtggacatagtaggtgctaaatacaatagaataaaaacttcttatgcattgccatgaacaccactgaacaccttaaagaaagactgtttgaaaaaataaactaccttgtctgtaagagggtctggcaggctgtcgggagagagggttacggaatctggcatgcatcatcctctggcgcaaggacagcatcggggtggtggagaagtggccaggcggggcgcgcgtggtgtaccgcggccaggggtgggtgcccgcgacggggctcacggtggcagcgctgcgaggcggcggtcgggaagggacgtgggaggccctgggggagctgcctggaggtggggggagaggtcgcttcacaggagccaggctccctccgcgaggggcaagcgcgatggcaggctccctctcttccttggcgaggctcccatcggcgtctttgccgcccctgggagtggaggaagagggccactttggcacagaggaagacagaaggtcttctttcccgcctttaaaaaaccccgcgtcctcctcctcctcgtcctcggctgagaccgactgctgggacttggaggacaggggccgcttggaaggaggctccgacttccccggcgctgccctgctggggacccgggcgcgggactgggggccgccgggtcggctgggcctggcgggggaggccgcatgtccgcgctgggacctgtggtcaccacctgcccctgcgcctgtgggagactccacctgctggtgcttgggaagggacgcagctgcctccttggcgcgcgcggcgtgtgcgggggcccgcacatcctgggcctcgacttctgtgctgtcgtcgtcgtagctgccctgggcatcctcgtcctggttctggagggccgtggggagcatccctctggagctcgccgtgtaagggtccgaggaggagtgggagcggccctgcgacgtggggcggggccgcccggcctgggtcagtgagagcctgggctgggaaggtgaccgacccgcgtctctgctctggggtcccgggtggtgctgggacgtggcgacgggaggagggggctgctgttctggggcccggccgggtgtcatccttctgggaacactgggatgctgctgtgaccgtgctgcgggaggacgagcaggggacgcgtggcggtctgtggaccctggctgtgctttgggagaatgaccctccgtgtccgcgtctgtgctctgttgaacatcctgagccttggaggccagggaggagtacttgccctgaggatgtgtatctgcccctgtggatttggggttctctgggatgggttccttccgatgcaggctggcccctctctgcgggcttctccttaagtcctcccagccccgggagatgggctgcctggaggaggaaggcacgtggtcattgacaacggtggcaggaagcggcttctcatcctcctcgtctccatggatacctgagctaagcttagggtgggaatcagagtgagagggaaccctggggtgggctcgggagggcacagtcgactgtggggagctggagggctgcagccgaggtccccgcccaatgctgaacctgcttggagacctcccgttggcagcaaagggtttgtgtctgagcaaatggaagtgtccagaggcaggccgggcccgcagcgtctgggccgtggcctccgcctgccttccgccgtcttccctatcgccgtcaccgtggctttcaccatcagaagcctccgctccctcagagacctgcgtcctggacgagagatgagaagagacggaggaggacatggtggaccgtgatggcgcattggagttggtggctggggcgtcctcaccatccttcccgcccttggaaagtggagagctcaggtgtggctgggtgggcagcagccgagatgatcccccatggggtggagaaagtcttgagggtggggctgaggcactggaatcttcctctgcggcccctgaatggggggtcctccgggccggcgaggctggctttgcgccggggtgcacagagcttctgtcgcggagaacgctggacggggactggcggctgggggacagggctggccggggctgggcgaaggcgcccttggggtggagggagcccacagcgcgctcatc

SEQ ID NO: 2569 - DNA, 3783 bp, Homo sapiens
cccttctacatttggtctgccattataacctacacagtaccaaaaataaaaataacagagcctggtaaattcaacatgccagggaagttggcttcataccaaactattagtagtgacacatcatttcaaatagaagctctaaacagaattttaaaccaatagctcaaatatattagataatgatagtctcaaattatgacttctccacaacagatatgaatgtcaattaagaatacagtaaagtcacagctttctgacaatactgtgggaatgagagtgtgtggcataagtaaatttgccatagaaaacttaagatcttagtagctgtagctttattttagccatgtggaagttggaggaaggaaggattggaaggatagagaaaattatgtctaaaatgtactagatgctgtcccacttttctggggatgttaaactaaacacagctattcccagctgactcaggtcccaatcaccaatcgccgagtataaaagcacaatgctgtctcaaagcttgctgaacgctgtggggctgcttgagaagtatttgctcagacagtaagaagatgcagcagcacccttacacttgttgtttctgtctgtctctgcctcacatggagatgtttctcatcagctccagtctgctctggtccagcattgaccgctcggcaaagtgcttgggctttctgaccgctactcgcaggtcagacacttatttctctcattccttcatttatttattaaatatttatggagttcctgctatatacaagggaacgttgagttttacatctactctcagggtgctaggtttgattaaaacagtcaatcttagtggaaaactgagtttgatatggggcattgttctatgtctttacattgggctaaaataacaatgcattgtacagatctgcaaaaaaaaaaatacattcattcaagaatgttctataaagccccaattacatacaaggagggtttaaagcaccatttaactgaatgcaaatttatggtaaatgcctcggaccctgccctggacataaattccagttcatagcggacttcgttcaaccctctgttatagaaatacaaagcacacatctgcctgtaactcctctttgtgacaatgatctttaacatacattttctggaggttttagacaacatgcactaattgcactgtctgagcaattcatacccaagatatctgagtttgtctcagggtttgtttggttgagagttttgcatgcagaagatgagaacaagataaagacaagaacaagataagcctacatatgtatctaaccagcttctatggatcccttaaacacatggcggcacttgaacaactaagaagaaactgagttgggcatcatggttgtgacacattttcacaggttaagagtgtatgccaaagaattcaaagaggcaatgtaggacagtgaaaagactgtggaattagaggcaatgtgggttagtaatggctgtgaaattaggccatttggaattggaatggcaactctgaggtgtctgccttagggcaagcccctcagatcctgagccgcagcttctgcatctggaaaacagggataacaatgcaaaccgtagggaccgttcagaggatgaaattatgtcacatgtgcaaagctcttaacacggtgcgtggacatagtaggtgctaaatacaatagaataaaaacttcttaggcattgccatgaacaccactgaacaccttaaagaaagactgtttgaaaaaataaactaccttgtctgtaagagggtctggcaggctgtcgggagagagggttacggaatctggcatgcatcatcctctggcgcaaggacagcatcggggtggtggagaagtggccaggcggggcgcgcgtggtgtaccgcggccaggggtgggtgcccgcgacggggctcacggtggcagcgctgcgaggcggcggtcgggaagggacgtgggaggccctgggggagctgcctggaggtggggggagaggtcgcttcacaggagccaggctccctccgcgaggggcaagcgcgatggcaggctccctctcttccttggcgaggctcccatcggcgtctttgccgcccctgggagtggaggaagagggccactttggcacagaggaagacagaaggtcttctttcccgcctttaaaaaaccccgcgtcctcctcctcctcgtcctcggctgagaccgactgctgggacttggaggacaggggccgcttggaaggaggctccgacttccccggcgctgccctgctggggacccgggcgcgggactgggggccgccgggtcggctgggcctggcgggggaggccgcatgtccgcgctgggacctgtggtcgccacctgcccctgcgcctgtgggagactccacctgctggtgcttgggaagggacgcagctgcctccttggcgcgcgcggcgtgcgcgggggcccgcacatcctgggcctcgacttctgtgctgtcgtcgtcgtagctgccctgggcatcctcgtcctggttctggagggccgtggggagcatccctctggagctcgccgtgtaagggtccgaggaggagtgggagcggccctgcgacgtggggcggggccgcccggcctgggtcagtgagagcctgggctgggaaggtgaccgacccgcgtctctgctctggggtcccgggtggtgctgggacgtggcgacgggaggagggggctgctgttctggggcccggccgggtgtcatccttctgggaacactgggatgctgctgtgaccgtgctgcgggaggacgagcaggggacgcgtggcggtctgtggaccctggctgtgctttgggagaatgaccctccgtgtccgcgtctgtgctctgttgaacatcctgagccttggaggccagggaggagtacttgccctgaggatgtgtatctgcccctgtggatttggggttctctgggatgggttccttccgatgcaggctggcccctctctgcgggcttctccttaagtcctcccagccccgggagatgggctgcctggaggaggaaggcacgtggtcattgacaacggtggcaggaagcggcttctcatcctcctcgtctccatggatacctgagctaagcttagggtgggaatcagagtgagagggaaccctggggtgggctcgggagggcacagtcgactgtggggagctggagggctgcagccgaggtccccgcccaatgctgaacctgcttggagacctcccgttggcagcaaagggtttgtgtctgagcaaatggaagtgtccagaggcaggccgggcccgcagcgtctgggccgtggcctccgcctgccttccgccgtcttccctatcgccgtcaccgtggctttcaccatcagaagcctccgctccctcagagacctgcgtcctggacgagagatgagaagagacggaggaggacatggtggaccgtgatggcgcattggagttggtggctggggcgtcctcaccatccttcccgcccttggaaagtggagagctcaggtgtggctgggtgggcagcagccgagatgatcccccatggggtggagaaagtcttgagggtggggctgaggcactggaatcttcctctgcggcccctgaatggggggtcctccgcgccggcgaggctggctttgcgccggggtgcacagagcttctgtcgcggagaacgctggacggggactggcggctgggggacagggctggccggggctgggcgaaggcgcccttggggtggagggagcccacagcgcgctcatc

SEQ ID NO: 2570 - DNA, 418 bp, Homo sapiens
agggtgggaatcagagtgagagggaaccctggggtgggctcgggagggcacagtcgactgtggggagctggagggctgcagccgaggtccccgcccaatgctgaacctgcttggagacctcccgttggcagcaaagggtttgtgtctgagcaaatggaagtgtccagaggcaggccgggcccgcagcgtctgggccgtggcctccgcctgccttccgccgtcttccctatcgccgtcaccgtggctttcaccatcagaagcctccgctccctcagagacctgcgtcctggacgagagatgagaagagacggaggaggacatggtggaccgtgatggcgcattggagttggtggctggggcgtcctcaccatccttcccgcccttggaaagtggagagctcaggtgtggctgggtgggc

SEQ ID NO: 2571 - DNA, 327 bp, Homo sapiens
tttgtaattttttttttttttgagacggagtctcgctctgtcgcccaggccggactgcggactgcagtggcgcaatctcggctcactgcaagctccgcttcccgggttcacgccattctcctgcctcagcctcccgagtagctgggactacaggcgcccgccaccgcgcccggctaattttttgtatttttagtagagatggggtttcaccttgttagccaggatggtctcgatctcctgacctcatgatccacccgcctcggcctcccaaagtgctgggattacaggcgtgagccaccgcgcccggccccaatttgtaatttttaa

SEQ ID NO: 2572 - DNA, 5151 bp, Homo sapiens
agctctgggagaaggtgaggaaggctcaggtttttcgggtttcccattgtcctccgtgttctgctgaacatccgccttactggctgcaacagattttaaagaattgcctgtcaaagaagaaactcaaaagcgaaagcggaggtgagacacagtatttaaaacagcatatggaggcatttcaaatcagtagtcataatggctaacttctaattccttagaacactggaaacgtgttttctcaacgatagcattctttttaaaacttatattttgctttaagtaacaaatatagtcctagaaaatataagtgaattgaatctctattgaaccaggttatgccacatcttattatttgaagaaattctgaaatgagtactttgaagtaactcatttattttataaatgcaaaatcttatataggattttcttaataaaactaattgtcagtgtattacaaatgcattatagctgtccttaatagacaagaaacatgaatacacctggtgcaaattgctgaataatctatactcaaagtgatggggaatgtgtgatgagcaaccaatttgtaatttttaaggcattacaaaaatttccctcttcccatagcatgtccttacctgcttcctccttcttgtttaaaattccattaatagtggacacatttataattctaaaataaggcttaaaataaaaaaaactcctgggataggcaaacattatattaaatgtactgtaatcaccctgtcttcagagcagactgactgagggaagagattctataggggagaggaacctatattgcagtgagagtgccggaggggcaaatgtcatccatttcacagatttttccatgacaaaattgtctaatattgcagtctaccatgggtcttcatagcacataatgaaggaaaagccgccaatatccagcataaatgtgaggaagtagaaaagaaaacatggtccaaaaacactcccttccagttgtggatctttattaacttgtttggtttggatatcgatcaggtaagctagacaactgaaatccttctgggtacagctgcattcctaaataatggaatacaaaccaaaaattttacttttatcttatttttaaattttagattcaggggctgcacgtgcaggtttgtcacatgaatatactgcatcatggtgaagcttgggcttccagtgaacccatctcccagccagtgaatattgtacccagtgggtaatttttttaaccctcacccgtctcctgtcctttctgcttttgcaaactaaacatttttaaagctacatagaaattgaagagagctgacaatgaaaaatgtcacactaccatttgtaaaaatgttctttccctgttaccacaagcctaaagttaaataatgatgtcagattaattatataattaatacattaataatactgaaatagtaactgttatcaataatcaataacattttaatctttgagaagactaatttctaaaggaaacacaaaaatattttaaaaatcaatatgcaacttagcctggaaaaatcatctgctgagcagttccaaacccaagagcatgattcaaaggaacacaaaacaaacagcaggaatgaagagagagagaagacagccacagacacataatgcttacttgttggcatagcgacaatgaaggctttggagtgaggtcccaggcctctcctgtttgtggcccggattttgaaaagatagcgttccccaggctgcagaccatccaccagggcagaagtagtgtctccaggataggtgagggactttgctccaaatggtttgagagccggggcgtatgaaagaatgtattctgaaatgatttggcagatggttggaaggaggaaactgaaaacagtcctgtgtccagcagacagactgtatgggcaggacgaattagaacgtgcattactaaaattaatacactagcaatgcacgccaagtcaccagctggagcatgaagacacagcagaaggtgaactcacattcattcgggcaaccacacagggctatgtatttaattagctgacacttcaccattttaggcaaattaaacatatgaaagccaggaggccagtcttcatacaattccccccaaatttacacaccgttgggtttctaaaattgtatttatttactaatttgctatgattgatatgtcctgatagaataaactaaggaaaaagaagtgacaactgctaggaatggatcctgaatagcatctgacatcttcaagagttttactttattaacctgggttatttttattagcacatttagccagaaaaattccatatttgaaatataatttcatttttgtaggaattataaaagttcttagtatatcctgataaagatatttcacagtattttagagctgtgaagaaaagttgttaagtaatagatttatgtgatagctaatgtttccatctttaattggcttgctctatagtcacataatagccctgaattttggaaaaccaaagcaaattcagttcaaggaactaaaatatgtttatgctcacatggaaatgttataacataagggaataatattttaaaaaataatttttgccttcaactaaaaactgtcatgcctatttcctctcaatgaacccaagatttacaaaacatcaaattaatatgagtaggggctgggcatggttgctcacgcctgtaatcccagcactttgggaggctaaggcgggcagatgacttgaggtcagaagtttgagaccaccctggccagcagggtgaaacccccgtctctattaaaatacaaaaattagccagtgatggtggtgtgtgcctgtggtcccagctactcgagaggctgaggcaggagaatcacttggaccctggaggcagaggttgcagtgagccgagattgcacactgcactccagcctgggcaatgaagtgaggctatgtctcaaaaaataaaataaaaagaaaaagaaatgagtaggaacaaagaaaaataactttaatcacagaaaattcaagaattatcaggagcatggatgatcttttcttttcccttagctccaatctttaaaaagtatatttatttaaaaaaaaaacgtttcaaccaaaaatgcttttgcagcatttgtctggaaaaaacagcattcatttctcattgaaaatcaacaaacttgtcatttgtggtggtcaaaagtaagaattaagagaacccattgtctataaaaatttgtgattcaaattttaaaataaattaaatccatctggaaaataaatttagccttgtcaaagtatattcttctattacgttttatatttcttgtacatagaaaattattaattttaatctcaccactacacccttacaaaaacgacctaagcaggcttaagatacgcgagttcttttggacataaaaactcagtatctgttattatttctgcaatatttaattgactaccatggaacttctttcgccaaggaactgtaaatatcaactcagatgagggagagaggaagagtacataagtagcatgggaataaagtcaccagaggtgcaataattaccttttcattttttaactaacaaaaagtagttagcaaaaaaaaagtctttattcaattttcagaggtcttctcggcagcacaacaatacttaatacagagggagttaaagttcaaattgtggtaaaaagaatgatttaaagcaagctgttcaacctgtggcccacaggctgcaagcagcccaggacagctttgaatgaggcccagcacagattcataaactttcgtaaaatattatgagactaatgcatggaccttttttttaaagctcatcagctttcgttagtgttagtgtattttatgcgtggcccaagacaattcttcttccaatgtggcccagggaagccaaaagattgtacacccctgatttaaagggaccaaattaatatttttctctggttgtggatttattccaatggcaaaaaaaaaaaaaaagagaaagaagaatagtacaatctattctttaaaaaaaaaaagtgaaaaaacgtgaagtatagaaaatacagttccacatcgaccttccttaacttctattattccaagaaaagacatcctacatgtcagcaaacataacttttggatgaatataaaagagaaccattcagttttttcaattaagaaattctcaaaggagactagtagtaattttctggatttctttaagcttacacaaacatttcatagtttctggacatattagacttaaagttgcccctcaatctaataacaataaaaattatttctttcttgaataaaacctccattccttcctacccttagagtacatttgcataggcagtgccaggaaaaacttcagcatggctctttaaaatgtctccaaacagattctgagaggttcttaaacgcttttacattaaaaataaaagattttcatgtttatttagtattctcaacagactattttaaaatttaactagttgtgaatgttttactctatttttattctttaaaatatctaggtttttttgctattttggtgttatgttttccttgacatcaataaatacataaacaaatggtgacaaatagggaatcaatccattttccagcgattattacttgagtttttcaaacccattaaatgtatttatggtcccatgaaagatactgatggctctgcaggattcctgctgacacctgctttcgtgatcttcctagcacaacgaaaagacccatagcatggaagccagggtgttgttcagatgggaaaaggttatgttgtcacacccatgcaatgaaaaacatccttcccaacagcaacagcaaaaagccttcacaggaggatgaaaagaatagtcactttcgtgactgcttggatcttgggcaatgaaaatcttgcatgaaatatcctcgtcccttgggtgagcacctcttagacatatgttgcttccctatttctttttcagtcaacaaagccgtaagcagaggccatgttcatcagaatcaatgcatcttacagtttagggagtgagattcctacctttcactttcccctcagtctctggtagcgcatcccaagatgcagcgacaactgtaggtttgccattgactggccagacg

SEQ ID NO: 2573 - DNA, 393 bp, Homo sapiens
ccaaatatttgggcatagtaactaaagaaagcttcaacaaacttccctggtgattgttttgcacccttatatttgagagtaatgggtatagggagatattccttcattgctttaaggagttaaagcaatattccttcatagttgatacttcttcatagttgatattccttcattgctttaaggaatctttatgcacagttagctatcaaaccatgaaagtcagtgctttataatgcaaaagaatacaatgaaaatttttattgaccttgagcaaatcactttccttccttaggctttagttccctcaactatagaatgagacagtaagctagataacttctggtgagcctttctattttatcattctattgaaatctggtgctaaaaattatg

SEQ ID NO: 2574 - DNA, 393 bp, Homo sapiens; identical to SEQ ID NO: 2573

SEQ ID NO: 2575 - DNA, 5005 bp, Homo sapiens
aataattaccagttcctctggaccacctgctgctggtgcatagaagagcttgtactgacgaggatttccctctgcatggtcccagcggacattcaaggtgctggtagaagggtcatacactctcaggttccttacagtgtttagaggttctgaaatgcacagaaatcccatcacagtataatgctaacaatcaagcacacatgaaacacagattcactgatatctcccaggcaccctagaacatagcaggcaccgcacaaacatttgttgaagtagtgaataaacgacacacactgtgtccgcgtcagcctgatgcatatgtctcatctatccacaagacattttggtcttagagcacctttctatcctagaaagtaacatctttctccacaaacagagacaagtaattccaaggaaggatgttaaaaacgatcaatatggccaggcacggtggctcatgcctgtaatctcagcattttgggagcccaaggcaggtggatcacttgaggtcaggagttcaagaccagcctggccaacatggtgaaaccccatctgtaccaaaaatataaaaaattagccgggtgtggtggtgtgcacctgtaatcccagctattcgggagcctgagacaggagaatcgcttgaacccgggaggcagaggatgcagtgagccaagatcgtgccactgcaatccagcctgggcaatagagcaagactccatctcaaaaaaaaagaaaagaaaaaactattaatattatttctaaatgaatttttaaatattagtaaaactttgtgtcaccccagtgtttccagataaagagatgattccattctaatagtagctattaaagaagctataggaactcaggtttcacttactggtcttgcctcttcccgtcatccgacctccttcaccatcaggatacagagaggatacggtgatagtgtaaggagtgtctggcttcagtttctgcaggaccacactgttctgccgtcctcctattgtggtcttgagtaaaaagggtcttggtaagtgtcagccttgctctctccatctcactaatctgttagaaaaagctctttctacagggaagctgtttgagacccttgtcaagttccagaattacataccacagtcaaggtttaacatacaccttgtggtataacttcaaatgtaaaatatgcacctcaaatcataaaaaggattccaagctttaaactggtgaccccaaaaagatatttcaacttgctagccgccagcactgcaaaatttcatccaaaacacatttcacagaactcttcaaaaaaaaagggggcgggggggactaatcataagtgagctacaaagggactttaagatatgaaacaattgcataattttagaggctccacaccacttaatattattcttacctttttaacagatgtttttatttgctttagaaacacattaaaatgattcagcatacagtataaagctcttggtgtttcccccaagaacactgtcactctaacagccttagctgtgttaacgacatgaccagacctttcgccaggccacactcaatcaggggtttccagttgtctccatgataccagccccgtggtatgaagcttttcagtttactctaattatggagcttaaagtttttattcgttacttaaggccatctagctatcttgttgaaagaaaatttgtacaatttattaacagtctaccgaattcagatgtttatgtcatactaattaaaatcgcatgaaaatggcacactgcccaaaatgagtgcacatgtagatggctggatgtgctagaacaaaccagatgtttccaacttagcactcatccactcaagtagtctgaattccagagaaaaacccagtgaatcacggtcatcatcctcaatacggacaaactgaactaccgtggctaattttaataaatttcatatttgaggttatgagagaaaagtatcaataccagtataagccattttgataaaaacttaatacataacaaatctgaaagcctatttaggagaactgcttttatgagtaagcagaggggcatctacctacctctcccatccagctccccaaaataattctagcatcagttattcatcattttcatgatttcacggactagtgttaaaatccaagtaccccaaagactaacaaagcttaagggcttcatactttccagaagataagtttacgagactctttatgatagcaaacagctgaaagacagtaaaagagacttaggagaagcagctggaacatcaatgcccccaagatgggaaatgctaagaacaagcttctcctgatttgtagttttaccgaaatctggcatgccacagaaaaaaaagaagttctgtttctgaagttaatatatcagtccatctaatttgtcttattttcatataaatgtctattgattacagttgatattaagtttattaattataatctatttacctaaaacagacaaattctcagtccaaatgcatcacactacctaagactggagctataaaagcctcaaaagaccaactcaaagtcacactagagatgggaaggtttctgattcagctaagcttacttactgggtagtatcagagatctttaaccacacaccttagattaatgccaacccctaccttggctaatacctctaaactgataagagaaatgacccatttgcttgagctcggcaagtcagatgattaaaggttaataacacatgtgtctctaaggctatataagaaaatattctagccaaaaaagtcaataaaactctgtacctcaccaaaactggagatttgttttgaaatgaatcagaaaacataatcatacctatgtaaaaatcatgaggcttcctgacctaggataatacatgcagttctaattacatagttcacaaaaggcaaagttgtagaaagcccaaaaccagacaactaaagtaagggaggtaaaatggacaaaggttctattaaatagggaaagactaggaagagaaagaggatgaagactgagtttcgagtcctaccatctttcttggggacctccatttggataatagaaaaatgaaaaacagtgtaaattaggttaacaggctcccacatctagaaacaccagatctagaagacaccctatgacatgcaaaaaacagggggaaatgagataaatagaaaataaacattataggtaagtttagcaaactttcagcagttgattaagttagagagaggaatggaaggtcaacatagactcaaaaactatctggatatcgtcatggataatccagcactaatagtttttaaaggaactatggatgcattgaagcacatgcctcatgctttggggctgtaatgaagaacaactatcatctctcatgagaacatccattgagtctccatgatggcaatccacgtggagtgccagctaaagagtcagattattccatccaatgcaataaatcttaatatcccttaaaaagtaagtatgactaactaagcactgagggggaaaaagagtttgaagagaaatggtagaattaatccaagttataatttttattaaaaaattaccgtttgctcattgccttcccctgtggaaggctgataagtgatcctatatttctgcacacgaccactagcaggatcccacttaacagtcaggctgttagatgttgcattgtacacttgaaggtttcgtgggccacttttgggagctgaaagaagattgttgaaaaactgagtaagcagacagaacaatgcctccccctaaaatatatacagctcccaaggcaatcagagaattctatgcctctgggtttataattaaattcgttcccttaataaaaatggttattgattcttaaatgactccttagtatggactttcattttgcttctgtccctgcaaacgtgacatgttgaagttccaacttccaatatgatggtattgagagatggggcctttgggtggtaattagggttagattaggtcatgagggtggggctgccataatgggattagtctttgtaagaagagacatgagagagtttattctctctctctctcctccatgtgagagagtgagaaaatgagagagaccgagaaaggggctggctagctataagctgggaggaaagccaccacccagaaacgaattgaatagcaccttggtcttggacttctcagcctccagaattgtgagaatataaatttctgttatttatgccatccagtctaatcttttgttatggcaccccaagctgatcaatacactccaaaacaagtagtagcaaagcaaagtttttcaagaaaagcctatgtaaaagagttctcaatgaacatcttaggatttaaaagcagatgacctatttattatgtatcttatggtacttttcatttatacattcattcattatttgttcattcaaacaattcatcaaattaaattcttaccttgtgttgttaagataggcactaaaagaaaacagaatttgggaacacattactaatatagctgtagccctattttttaaaaattaactttaaaatatcaatgtcctatttgaaagctaaacacctacgtgtgcgctcactgccagtcaggtcatcactttctgactcatcaggatagatggcagtaatggaaacttcatagatggtgttggggttcaggttttcgaacaccaaagtgttttcatctccatttaagatggtcttggagaaagaggacaaaaacatacccacgcaaaagtaagtctccacttacatcatacacactcaatggcagtttatttacattatttagccagatgttcctcctgctctgatgcatgtcatgagctcaaatgtcaataaatgcttattgacaacaagagtaatacttctttgaactaagcttccctacaaattaaatgggacatgaaagacagagagaaagataaagagagttaactacctccatcttatctgagcttccaaaaggtgccc

SEQ ID NO: 2576 - DNA, 5005 bp, Homo sapiens
aataattaccagttcctctggaccacctgctgctggtgcatagaagagcttgtactgacgaggatttccctctgcatggtcccagcggacattcaaggtgctggtagaagggtcatacactctcaggttccttacagtgtttagaggttctgaaatgcacagaaatcccatcacagtataatgctaacaatcaagcacacatgaaacacagattcactgatatctcccaggcaccctagaacatagcaggcaccgcacaaacatttgttgaagtagtgaataaacgacacacactgtgtccgcgtcagcctgatgcatatgtctcatctatccacaagacattttggtcttagagcacctttctatcctagaaagtaacatctttctccacaaacagagacaagtaattccaaggaaggatgttaaaaacgatcaatatggccaggcacggtggctcatgcctgtaatctcagcattttgggagcccaaggcaggtggatcacttgaggtcaggagttcaagaccagcctggccaacatggtgaaaccccatctgtaccaaaaatataaaaaattagccgggtgtggtggtgtgcacctgtaatcccagctattcgggagcctgagacaggagaatcgcttgaacccgggaggcagaggatgcagtgagccaagatcgtgccactgcaatccagcctgggcaatagagcaagactccatctcaaaaaaaaagaaaagaaaaaactattaatattatttctaaatgaatttttaaatattagtaaaactttgtgtcaccccagtgtttccagataaagagatgattccattctaatagtagctattaaagaagctataggaactcaggtttcacttactggtcttgcctcttcccgtcatccgacctccttcaccatcaggatacagagaggatacggtgatagtgtaaggagtgtctggcttcagtttctgcaggaccacactgttctgccgtcctcctattgtggtcttgagtaaaaagggtcttggtaagtgtcagccttgctctctccatctcactaatctgttagaaaaagctctttctacagggaagctgtttgagacccttgtcaagttccagaattacataccacagtcaaggtttaacatacaccttgtggtataacttcaaatgtaaaatatgcacctcaaatcataaaaaggattccaagctttaaactggtgaccccaaaaagatatttcaacttgctagccgccagcactgcaaaatttcatccaaaacacatttcacagaactcttcaaaaaaaaagggggcgggggggactaatcataagtgagctacaaagggactttaagatatgaaacaattgcataattttagaggctccacaccacttaatattattcttacctttttaacagatgtttttatttgctttagaaacacattaaaatgattcagcatacagtataaagctcttggtgtttcccccaagaacactgtcactctaacagccttagctgtgttaacgacatgaccagacctttcgccaggccacactcaatcaggggtttccagttgtctccatgataccagccccgtggtatgaagcttttcagtttactctaattatggagcttaaagtttttattcgttacttaaggccatctagctatcttgttgaaagaaaatttgtacaatttattaacagtctaccgaattcagatgtttatgtcatactaattaaaatcgcatgaaaatggcacactgcccaaaatgagtgcacatgtagatggctggatgtgctagaacaaaccagatgtttccaacttagcactcatccactcaagtagtctgaattccagagaaaaacccagtgaatcacggtcatcatcctcaatacggacaaactgaactaccgtggctaattttaataaatttcatatttgaggttatgagagaaaagtatcaataccagtataagccattttgataaaaacttaatacataacaaatctgaaagcctatttaggagaactgcttttatgagtaagcagaggggcatctacctacctctcccatccagctccccaaaataattctagcatcagttattcatcattttcatgatttcacggactagtgttaaaatccaagtaccccaaagactaacaaagcttaagggcttcatactttccagaagataagtttacgagactctttatgatagcaaacagctgaaagacagtaaaagagacttaggagaagcagctggaacatcaatgcccccaagatgggaaatgctaagaacaagcttctcctgatttgtagttttaccgaaatctggcatgccacagaaaaaaaagaagttctgtttctgaagttaatatatcagtccatctaatttgtcttattttcatataaatgtctattgattacagttgatattaagtttattaattataatctatttacctaaaacagacaaattctcagtccaaatgcatcacactacctaagactggagctataaaagcctcaaaagaccaactcaaagtcacactagagatgggaaggtttctgattcagctaagcttacttactgggtagtatcagagatctttaaccacacaccttagattaatgccaacccctaccttggctaatacctctaaactgataagagaaatgacccatttgcttgagctcggcaagtcagatgattaaaggttaataacacatgtgtctctaaggctatataagaaaatattctagccaaaaagtcaataaaactctgtacctcaccaaaactggagatttgttttgaaatgaatcagaaaccataatcatacctatgtaaaaatcatgaggcttcctgacctaggataatacatgcagttctaattacatagttcacaaaaggcaaagttgtagaaagcccaaaaccagacaactaaagtaagggaggtaaaatggacaaaggttctattaaatagggaaagactaggaagagaaagaggatgaagactgagtttcgagtcctaccatctttcttggggacctccatttggataatagaaaaatgaaaaacagtgtaaattaggttaacaggctcccacatctagaaacaccagatctagaagacaccctatgacatgcaaaaaacagggggaaatgagataaatagaaaataaacattataggtaagtttagcaaactttcagcagttgattaagttagagagaggaatggaaggtcaacatagactcaaaaactatctggatatcgtcatggataatccagcactaatagtttttaaaggaactatggatgcattgaagcacatgcctcatgctttggggctgtaatgaagaacaactatcatctctcatgagaacatccattgagtctccatgatggcaatccacgtggagtgccagctaaagagtcagattattccatccaatgcaataaatcttaatatcccttaaaaagtaagtatgactaactaagcactgagggggaaaaagagtttgaagagaaatggtagaattaatccaagttataatttttattaaaaaattaccgtttgctcattgccttcccctgtggaaggctgataagtgatcctatatttctgcacacgaccactagcaggatcccacttaacagtcaggctgttagatgttgcattgtacacttgaaggtttcgtgggccacttttgggagctgaaagaagattgttgaaaaactgagtaagcagacagaacaatgcctccccctaaaatatatacagctcccaaggcaatcagagaattctatgcctctgggtttataattaaattcgttcccttaataaaaatggttattgattcttaaatgactccttagtatggactttcattttgcttctgtccctgcaaacgtgacatgttgaagttccaacttccaatatgatggtattgagagatggggcctttgggtggtaattagggttagattaggtcatgagggtggggctgccataatgggattagtctttgtaagaagagacatgagagagtttattctctctctctctcctccatgtgagagagtgagaaaatgagagagaccgagaaaggggctggctagctataagctgggaggaaagccaccacccagaaacgaattgaatagcaccttggtcttggacttctcagcctccagaattgtgagaatataaatttctgttatttatgccatccagtctaatcttttgttatggcaccccaagctgatcaatacactccaaaacaagtagtagcaaagcaaagtttttcaagaaaagcctatgtaaaagagttctcaatgaacatcttaggatttaaaagcagatgacctatttattatgtatcttatggtacttttcatttatacattcattcattatttgttcattcaaacaattcatcaaattaaattcttaccttgtgttgttaagataggcactaaaagaaaacagaatttgggaacacattactaatatagctgtagccctattttttaaaaattaactttaaaatatcaatgtcctatttgaaagctaaacacctacgtgtgcgctcactgccagtcaggtcatcactttctgactcatcaggatagatggcagtaatggaaacttcatagatggtgttggggttcaggttttcgaacaccaaagtgttttcatctccatttaagatggtcttggagaaagaggacaaaaacatacccacgcaaaagtaagtctccacttacatcatacacactcaatggcagtttatttacattatttagccagatgttcctcctgctctgatgcatgtcatgagctcaaatgtcaataaatgcttattgacaacaagagtaatacttctttgaactaagcttccctcacaaattaaatgggacatgaaagacagagagaaagataaagagagttaactacctccatcttatctgagcttccaaaaggtgccc

SEQ ID NO: 2577 - DNA, 5005 bp, Homo sapiens
aataattaccagttcctctggaccacctgctgctggtgcatagaagagcttgtactgacgaggatttccctctgcatggtcccagcggacattcaaggtgctggtagaagggtcatacactctcaggttccttacagtgtttagaggttctgaaatgcacagaaatcccatcacagtataatgctaacaatcaagcacacatgaaacacagattcactgatatctcccaggcaccctagaacatagcaggcaccgcacaaacatttgttgaagtagtgaataaacgacacacactgtgtccgcgtcagcctgatgcatatgtctcatctatccacaagacattttggtcttagagcacctttctatcctagaaagtaacatctttctccacaaacagagacaagtaattccaagcaaggatgttaaaaacgatcaatatggccaggcacggtggatcatgcctgtaatctcagcattttgggagcccaaggcaggtggatcacttgaggtcaggagttcaagaccagcctggccaacatggtgaaaccccatctgtaccaaaaatataaaaaattagccgggtgtggtggtgtgcacctgtaatcccagctattcgggagcctgagacaggagaatcgcttgaacccgggaggcagaggatgcagtgagccaagatcgtgccactgcactccagcctgggcaatagagcaagactccatctcaaaaaaaaagaaaagaaaaaactattaatattatttctaaatgaatttttaaatattagtaaaactttgtgtcaccccagtgtttccagataaagagatgattccattctaatagtagctattaaagaagctataggaactcaggtttcacttactggtcttgcctcttcccgtcatccgacctccttcaccatcaggatacagagaggatacggtgatagtgtaaggagtgtctggcttcagtttctgcaggaccacactgttctgccgtcctcctattgtggtcttgagtaaaaagggtcttggtaagtgtcagccttgctctctccatctcactaatctgttagaaaaagctctttctacagggaagctgtttgagacccttgtcaagttccagaattacataccacagtcaaggtttaacatacaccttgtggtataacttcaaatgtaaaatatgcacctcaaatcataaaaaggattccaagctttaaactggtgaccccaaaaagatatttcaacttgctagccgccagcactgcaaaatttcatccaaaacacatttcacagaactcttcaaaaaaaaagggggcgggggggactaatcataagtgagctacaaagggactttaagatatgaaacaattgcataattttagaggctccacaccacttaatattattcttacctttttaacagatgtttttatttgctttagaaacacattaaaatgattcagcatacagtataaagctcttggtgtttcccccaagaacactgtcactctaacagccttagctgtgttaacgacatgaccagaccttttgccaggccacactcaatcaggggtttccagttgtctccatgataccagccccgtggtatgaagcttttcaatttactctaattatggagcttaaagtttttattcgttacttaaggccatctagctatcttgttgaaagaaaatttgtacaatttattaacagtctaccgaattcagatgtttatgtcatactaattaaaatcgcatgaaaatggcacactgcccaaaatgagtgcacatgtagatggctggatgtgctagaacaaaccagatgtttccaacttagcactcatccactcaagtagtctgaattccagagaaaaacccagtgaatcacggtcatcatcctcaatacggacaaactgaactaccgtggctaattttaataaatttcatatttgaggttatgagagaaaagtatcaataccagtataagccattttgataaaaacttaatacataacaaatctgaaagcctatttaggagaactgcttttatgagtaagcagaggggcatctacctacctctcccatccagctccccaaaataattctagcatcagttattcatcattttcatgatttcacggactagtgttaaaatccaagtaccccaaagactaacaaagcttaagggcttcatactttccagaagataagtttacgagactctttatgatagcaaacagctgaaagacagtaaaagagacttaggagaagcagctggaacatcaatgcccccaagatgggaaatgctaagaacaagcttctcctgatttgtagttttaccgaaatctggcatgccacagaaaaaaaagaagttctgtttctgaagttaatatatcagtccatctaatttgtcttattttcatataaatgtctattgattacagttgatattaagtttattaattataatctatttacctaaaacagacaaattctcagtccaaatgcatcacactacctaagactggagctataaaagcctcaaaagaccaactcaaagtcacactagagatgggaaggtttctgattcagctaagcttacttactgggtagtatcagagatctttaaccacacaccttagattaatgccaacccctaccttggctaatacctctaaactgataagagaaatgacccatttgcttgagctcggcaagtcagatgattaaaggttaataacacatgtgtctctaaggctatataagaaaatattctagccaaaaaagtcaataaaactctgtacctcaccaaaactggagatttattttgaaatgaatcagaaaacataatcatacctatgtaaaaatcatgaggcttcctgacctaggataatacatgcagttctaattacatagttcacaaaaggcaaagttgtagaaagcccaaaaccagacaactaaagtaagggaggtaaaatggacaaaggttctattaaatagggaaagactaggaagagaaagaggatgaagactgagtttcgagtcctaccatctttcttggggacctccatttggataatagaaaaatgaaaaacagtgtaaattaggttaacaggctcccacatctagaaacaccagatctagaagacaccctatgacatgcaaaaaacagggggaaatgagataaatagaaaataaacattataggtaagtttagcaaactttcagcagttgattaagttagagagaggaatggaaggtcaacatagactcaaaaactatctggatatcgtcatggataatccagcactaatagtttttaaaggaactatggatgcattgaagcacatgcctcatgctttggggctgtaatgaagaacaactatcatctctcatgagaacatccattgagtctccatgatggcaatccacgtggagtgccagctaaagagtcagattattccatccaatgcgataaatcttaatatcccttaaaaagtaagtatgactaactaagcactgagggggaaaaagagtttgaagagaaatggtagaattaatccaagttataatttttattaaaaaattaccgtttgctcattgccttcccctgtggaaggctgataagtgatcctatatttctgcacacgaccactagcaggatcccacttaacagtcaggctgttagatgttgcattgtacacttgaaggtttcgtgggccacttttgggagctgaaagaagattgttgaaaaactgagtaagcagacagaacaatgcctccccctaaaatatatacagctcccaaggcaatcagagaattctatgcctctgggtttataattaaattcgttcccttaataaaaatggttattgattcttaaatgactccttagtatggactttcattttgcttctgtccctgcaaacgtgacatgttgaagttccaacttccaatatgatggtattgagagatggggcctttgggtggtaattagggttagattaggtcatgagggtggggctgccataatgggattagtctttgtaagaagagacatgagagagtttattctctctctctctcctccacgtgagagagtgagaaaatgagagagaccgagaaaggggctggctagctataagctgggaggaaagccaccacccagaaacgaattgaatagcaccttggtcttggacttctcagcctccagaattgtgagaatataaatttctgttatttatgccatccagtctaatcttttgttatggcaccccaagctgatcaatacactccaaaacaagtagtagcaaagcaaagtttttcaagaaaagcctatgtaaaagagttctcaatgaacatcttaggatttaaaagcagatgacctatttattatgtatcttatggtacttttcatttatacattcattcattatttgttcattcaaacaattcatcaaattaaattcttaccttgtgttgttaagataggcactaaaagaaaacagaatttgggaacacattactaatatagctgtagccctattttttaaaaattaactttaaaatatcaatgtcctatttgaaagctaaacacctacgtgtgcgctcactgccaatcaggtcatcactttctgactcatcaggatagatggcagtaatggaaacttcatagatggtgttggggttcaggttttcgaacaccaaagtgttttcatctccatttaagatggtcttggagaaagaggacaaaaacatacccacgcaaaagtaagtctccacttacatcatacacactcaatggcagtttattcacattatttagccagatgttcctcctgctctgatgcatgtcatgagctcaaatgtcaataaatgcttattgacaacaagagtaatacttctttgaactaagcttccctacaaattaaatgggacatgaaagacagagagaaagataaagagagttaactacctccatcttatctgagcttccaaaaggtgccc

SEQ ID NO: 2578 - DNA, 588 bp, Homo sapiens
caaggaaatagttattcatttattgttcataatttgttgttctgatacccaaaggaaacagtttcatttttattttttaaaaacacacataccactgcagtttaaaaatgagaatgtctgcctagctgtaaacaacactaaaagtattgcactctgacaattgattagaacatacatacatactgctacacatacagtgaattccaatctaggaatattgccacaggaaaggaactctgagcatgttacgatccaggtaacccacacatagcttcttcctatagatcactaaccttaaacatgatatgaagcagaacatgctgaccctgttcagagaactgaacacctggagacccaaatgactgctgaaatcccctttcacaacccctccattgaccaggtcctctggctgttttgcagcacaagcatttttttatgtctgccaccattcctgagctttcattgtcacttatttctctattttctggtaaccaaagctaattacacaaaccccagagccattaaaaatttgttctaataattacaatgaaaaggcccattgagataaagagagtggtactatttcca

SEQ ID NO: 2579 - DNA, 588 bp, Homo sapiens; identical to SEQ ID NO: 2578

SEQ ID NO: 2580 - DNA, 588 bp, Homo sapiens; identical to SEQ ID NO: 2578

SEQ ID NO: 2581 - DNA, 698 bp, Homo sapiens
aaccccacgtgccgattttaacttctcttttactaaatttatggctttctcaataccctcctctatttaaatccctcttcaagttattctttatttagtagattgtaatgtcctcgattggagaagtccaggtctataaagcgtttcatgactgttaatgctctaatcatatgattttgtggcacagaagtagatactgggtctaattaggcaaattaacagtgcataaattgtaaactaggtcattggtgggctgtttaggtctgggaagagataatgctcatttaatttactcaaagagccatttatcaaatgcctacttttgtgtcaggaactgggcatgctaagagtattctaatggaatatggaggagttaacaccttacttgctgttttgttttgtcctttttaacttggtcaatgttttacttgtattactctcataacatcttcaataccctgtcttgaatccattgatttgtgtatttatctccctccccttcattagattttaagcactttcaagaaagggacttggtcttatttatagaccatgcatccaagtgcctcacagatagatccttgagaaatattgttaaactgaactgagaggtgaacgcctatgtttttggtctgcacttgagctagagtcaaaacacaggactcttgacttcacattcccagatgcttttccctcta

SEQ ID NO: 2582 - DNA, 2547 bp, Homo sapiens
cctcttcagcactgagtttcaagtgtctatgatcttctatcagagttggccacaatttggaagctttctttaaaatcctctttcgcattccttctcctcttgggagacaagaactattttctgaaggagtggtttcttcaagtgtggtttctaggccagcagcataagcattacctgggaacttgttagaaatgtaaattcttgggttgggcatggtggctcatgcctgtaatcccagcactttgggaggccgaggtgggtggatcacgaggtcaagagatcgagaccatcctggccaacatggtgaaaccctgtctctactaaaatacaaaaattagctgggcttggtggcacacgcctgtagtcccagctactcaggaggctgagggaggagaatcgcttgaacccgggaggcagagtttgcagtgagccgagatggcgccactgccctccagcctggtgacagagcaagactccatctaaaaaaaaaaaaaaaaaagaaagaaaaaagaactggctccagcccagacctacggagtcagaaactctgggaataggacccagcaatctctctctctctctctctctctctctctctctctctctgtttgtgtgtgtgtgtgttcattgtggtaaaatatacataatataaaatttaccctttgaaccacttgtaagtgtacaatttagtggttttacatatattcatgatattgagcaaccatcactgctactcatttccacagcttttttatcatcccaaacagaaactctatacccattcagcaatagattcccattcccccaaccccatccttagtccctggtaacctctattctactttttgtttttgtgaatttgtctgtttgttctaggtacctcacataagtggaatcatacagtatttgtctttttgtatctgttttttttcacttagtataatgtttttcaggctcatctaggttgaaacatgtatctaaatttcactctttttcgaggctgaataatattccattgtatgtatataccatattttgtttagccgttgatctgttgatggccattggagttgtttcaaccttttggctatcatgaattatgctgctataaacattgtacaaacatctctttgagtccctgctttcaattcttttgagtataaactgagaatggggattgatggatcacaggataattctctgttagctttttgaggagctgccaatctgctttccacagcagcagcaccatttcacattcctaccagcaagacacaagtgttccaatgtctccacatccttgccaacatttgctgttttctacttttttgatagcagccatcctaatggatgtgaagttacatcctattgtggttttgatttgcactttcctaatgatattgagcttttttcctatgtttcttggtcatttgtatatattctttgaagaaatatctgttaaagtcgtctctctcttttttttttttttttttttgagatggagtctcgctctgtcacccaggctggagtacaatggtgccatcttggctcactgcaacctccacctcccaggttcaagcaattctcctgcctcagcctccagagtaggtgacactacaggcacgggtcaccatatctggctaattttgtatttttagtagagccggggtttcactatattggccaggctggtctcaaactcctgagctcaagtgatccaacggcctcagcttcccaaagcactgggattatagctgtgagccaccatacccggccaagttaccccatttttgaattggattgtttgtctttttctattgagttgtaggagttcttcatatatttttggatattaatctcttatcagatagatgatctgcaattttttttcccactttgtgagttatttttttcactgtctttatagtaacttttcttttttttttttgagacagaggcttgctctgtcgcccaggctggagtgcaatggcccgatcttggctcactgcaacctccgtctcctaggtttaagcgattctcctgcctcagcctcccaagtagctgggattacaggtgcctgccaccacgcctggctaattttttgtatttttagtagagatggggttccaccatgttggccaggctggtctcaaactcctgagttcaggtgatccacccgcgttggcctcccaaagtgctggtattacaggcgtgagccaccacgcccggcctgtagtgacttttgataggcaaaagtttttaattttgatgaagtccaacttatttattttttcttttgttgcctgtgcttctggtgatatatccaaggaattattgccaagtccaatgtcatgaagatttcccccatgtcttcctctaagagttttagagtttatgctcttacatttaggttcttgattcattttgagttaatttttatatatgatataaggttaaaagtccaacttcattcttttgcatatggatatctagttttctcaccaccatttgttgaaaagtctgacctttctccattgaatgattttg

SEQ ID NO: 2583 - DNA, 381 bp, Homo sapiens
ggagatggtgggtgataaaatctaatcttcatcaaggatgttggataaccagtaaaaagcagctgtatgttaataaagctgtattgcctgtccttctttacaactgcactttaattagatatttacattttgcctttatgaatatataggcaaatgtttttcctatattttccttgatgaaacatgtttagatattcatttgacttctttctttctcattattccctttatttcatttaagatgtgtactcgtattgagctcagatctctgaactcttcctcttaataaacaaaccttctacttcttttagttcattaaatctattttaatctttccttgacagtgattttataaacaatggttgtttatcggagaaaata

SEQ ID NO: 2584 - DNA, 381 bp, Homo sapiens; identical to SEQ ID NO: 2583

SEQ ID NO: 2585 - DNA, 381 bp, Homo sapiens; identical to SEQ ID NO: 2583

SEQ ID NO: 2586 - DNA, 888 bp, Homo sapiens
caagaattcaaccacaaagacccttacagagccttagccctctgaaaacttccggatacaaagccaactgactatgctagattaccatcacagttaaaggaacccagccttctcagatgggaaaaaaatcagaataagaactctggcaattcagaaagccagtgtcccctcacctccaaacaggcccactaggttcccagcaatggttaatcagtctgaaatgtctgaaatggcagacatagaattcagaatctggatggctaggaagcttatcaagaccaagagaaagttgaaactcaatccaaggatgcaaagcaattcagtaaaatgattcaagagttgaaagactaagaagccgttttaagaaagacccaaaattgaacttcttgaactgaaaaattcgctacgagaatttcaaactacaagcagaactattaacagcagaatagaccaagcagagaaaagaacctcagggcttgaagacagttaattaagtcaactcagtcaggcaaaaataaagagaaaaaataaagaaaaatgaacaaaacctctgagaaatatgcaattatgcaaagaaaccaaatctatgactcattggcattcttgagaaagaaaaataataagcaacttggaaagtatatttgaggacatagtccatgaaaatttccctaaactcattagagaggttgacctgcaaatccaagaaatatagaggaccctagccagatactatacaagacatccatccccaaggcacgtggtcatcagattcactgaagtgaacacaaaagaaaacatcttaaaggcagcaagaaagatggggaatgtaacttacaaagggaacccatcaggctaatagcagacctttcggcagaaaccttataagcc

SEQ ID NO: 2587 - DNA, 888 bp, Homo sapiens; identical to SEQ ID NO: 2586

SEQ ID NO: 2588 - DNA, 888 bp, Homo sapiens; identical to SEQ ID NO: 2586

SEQ ID NO: 2589 - DNA, 425 bp, Homo sapiens
ggtgaaggccacagattctcttcagtttgcctatccagtggccaagtctcagatgtcatctttctcaacccctcagcaacattcgacacaacatattactttcttctctcgagttccaggacaccccactcttggtttgcccctattctttctcagtccttttgtttgttcctaattctcttcccacttattgtaaatattagaacatcctaggggctgggtgtggtgactcacacctgtaatcccagcactttgggaagctgaggtgggtggatcacttgaggttaagagttcgagaccagcctggccaacacggcaaaactgcatctccactaaaaatgcaaaaattagcctggcgtggtggcgcacgcctgtagtcctagctgcttgggaggctgaggcataagaatcacttgaacccagga

SEQ ID NO: 2590 - DNA, 114 bp, Homo sapiens
tttgggaggccgaggcgggcagatcacctgaggtcaggagttcaagaccagcttggccaacatggtgaaaccctgtctctactaaaaatacaaaaattagctgggtgcggtggt

SEQ ID NO: 2591 - DNA, 299 bp, Homo sapiens
ttaagcgattttcccacctcagcctcctaaatagctggaattacaggatgaaccaccgtattaagaggctcgcctcttaatatggttacaatagcaattatgcctccaacacatgcttttgggagggacacattcaaaccatagcaaataccttctgaaaagttgacctgaacatttacataagctgtcacccgggaacttatcttctaatgcaggtgtaaatgactattagagatactttgctgaaaacttggtgaagaagcagagagcatgaggatgttaagcccctttagagagta

SEQ ID NO: 2592 - DNA, 210 bp, Homo sapiens
tccacagcctagaaagtgtggtttctgggccctacccagcttcagggcctaaaagccactcttagctcttcccaagatatctccagaatcagaatgagagagctgcatggaagcgaccccaggccctgtgcggtgtggtcagagtccaaggccagggcgcttgccccagtcacataaatggttagcaaaagccagggtgcggccctagtc

SEQ ID NO: 2593 - DNA, 88 bp, Homo sapiens
ttttttttctttttgagacagagtctcattctgtcacccaggctggagtgcagtggcgcaatcttggctcactgcaacctctgcctcc

SEQ ID NO: 2594 - DNA, 308 bp, Homo sapiens
aattctttctcgtgatggtgtcaagaacgtggacactggctggggctggagactcaccagcatccggagaccctcctgagccctccagcaatacaactttgacacaaactatgaaatcacagatccaagaagctcaaagaacccaagcacaggaaacatgatgaaactacatgaaggaacatcagaattgaattgttcaaaatcagtgataaagagtaaatcttaaaagcaaccagaacaaaatatccatcatatacgcagaaataaagataagtatgacagcagatttacaaatagaaaaaaaaaca

SEQ ID NO: 2595 - DNA, 13821 bp, Homo sapiens
gagactgataaacacctgcaacgtgttacagagcagcaaacaagcattcagaggaaacaagagaaattacattgtcatgatcacgaaaagcaaatgaatgtgtttatggagcagcacataaggcatcttgaaaagttacaacaacaacaaatagatattcaggtatctgtaataaatccagtacagattccataatcttttatcacttggatctctcagccagtattcattgataattacagtagctcattagattgtaacagttttagttctgaaatcatgatttgcttatctttcttctcctgtaatgcgggtaactctgaatgttatatctcaaatgtcactagttgtgtgagacctctccctctagttggcttttcctccttttacactatttttgttcatatcatttttattatttattttttgagatggagtttgctatggttgcccaggctgaagtacagtagtagaatctccagtcactacaacctccacctcctgggttcaggagattttcctgcctcagcctcccatatagttgggattacaggcgcacaccaccacgcccagctaatttttgtatttttagtagaggtggggtttcaccatgttggtcaggctggtctctaactcctgacctcaagtgatctgccttcctcggcctcccaaagtgctagagttacctgcgtgagctgccatgcccagccatatttttaagtgcttatatcatattgcaactattggtttacgtcagcagttttcagtctgggaatgtgcactagaattacttgaacagctttataaaaatatttgtgcttggcaggccaagctaagaggattgcttgaggccgagagttcaagataagcctggttgatgtagcaagacctcatctcttaggaaaaaaaaaaaaaaaaaaaaaaaaaaatttagcctggcatggtggcatgtgcctgtagtcccagatacttgagaggctgagactgccggagaccttgagtccaggagtttgcagttacagtgaactatgataatacaactgcacttcatcctagatgacagagtgagaccctatctcaaaaaaaaagaactatatacacacacacatacatacacacacacacacacacacacatatacacatacacaaacacacatgcttaggcctttcagtgattttgagccagcgattctgaggtagtgcctggcaatcattgaaagcttcataatgattctgatgcacaccgttggataagaactacctggtgtacatgtttgcttttgcatttaattaattaaaataatgaacatttttaatgccttttgagagtaaggcactgggctattataaaaagcattatcctcacaaggagctgtagcatactttcttatttattttggaatttctttttctttctttttcttttttttttttttgagacggagtctaactctgttgcccaggctggagtgcagtggtgtgttttcggctcactgcaacctccacctcccagattcaagtgattttcatgcttcagctacccgagtagctgggattgccagcctgcgccaccatgcccagctaatttttgtattttcagtagagacagggttctaccatgttggccagaccagtctcgaactcttggcctcaagtgatccacccatcatggcctcccaaagtgctggaattacagacgtgagccactgtgctcggcctattttggaatttctaactcctagaacacgacttagcactcagtaaactcttttttttttttttttttgagtgagtgagggaatgatcagcattgtaaatgtgttggttttaatttccttttttttctaatatgaaatttatttatttttttgagacagagttttgctcttatcgcccaaactggagtgcagtggcgcaatctcagttcactgcagcctccgcctcccatgttcaagcgattctcctgccacagcctcccaagtagctgggattacagacgcccaccaccatgcccagctaactttttatatttttagtagagatgggtttcaccatgttggccaggttggtctcaaactcctgacctcaggtgatccgcctgccttggcctcccaaagtgttgggattacagaagtgagtaaccgcgcctggcctactgtgcatttaaaaacttaaaaaaattaaaatataacattcaggctgggcacagtggctcatccctataatcccagcactttgggaggccgaggtgggtggatcacttgaggtcaggagttcaagaccagcctggccaacatggtgaaacctcatctctaccaaagatacaaaaaattagctgggcatggtggcacatgcctgtagtcccagctactcaggaggctgaggcaggggaatcacttgaatccggaaggcagaggttgcagtgagttgagattgggccactgtactccagcctgggtgacagagcaagactctatcttaacaacaacaacaaatgtatatatatgtgtgtgtgtatatatatacacacacatatatgtatatatctataacttaatgactttctaaattatatattttttaagacaaaaattcagaagaatgtactaaaataagtttattatacttaatatatcatcataaagtagacattaatttgctataattttcaagacttaacagggtttatcttgagcttttcatgtggttgaagataatattttattggaatgattatatgcataccaagtaaagtttagtaagtactccctgcatgactaaaattgagcacgcagcaaattatctagtgagagaccaggaatgagtctataaactattagtttatagataactttacttctttaagcctcaatttctttacctagaaaatattttctgttgttcaggataaaatgagatgacacatttgaaaagcacattgattccttaaggagtggctcctacttagtcctaagtacttacctgccatcatccatccttccataactaaatctgtaacttaatgactttctaattttggaagaatgaaatctgctaatttagatgtcttacttataaagcttataattacagagagagttgaagttttgtttacatactggatatattagttgttcagtaaatgcttaatgaaatgaaattagttgagtctgtttcatctgttttatgtagagggatctcaacacacttttagaaattctgtaaaactataaatttttttaggtttttcttggcctggcataaaactctattttgattattactcattgcatgcctgtatcaaagtatttcatgtgctccataaatatatacacctactgtgtactcacaaaaattaaaacaaaacaataaaaccctcttttttgaaaccagttttattagttaagatacttgctcatttcagatattttattttattttattttattttattttattttgttttattttattttgtttttgagatagagtcctgctctgtcacccaggctggagtgtagtggcaccatttcggctcactgccacctccgtgtcccgggttcaagtgattctcctgcctcagcctcctgagtagctgggattacaggctcccaccaccacacccagctaatttttgtatttttaggagagacggggtttcaccatgttggccagactggcctcgaactcctgacctcaggtgatccatttgccttggcctcccaaagtgctgggattacaggcttgagccactgcaccgggccccatttcaggtattttaataaatagtgctgaaaactatgttgtcactctagtttccatttatatacaaatgcatatattattgctgctgctaagcatggatgtttatttgagtactcactatcaatgattttcaaaccttgacctcaaacaaaatcctaccatttaggatataaaagatgggatgttttggtttaaaattctctgattcaagtagaggtttagggtgagggcctctccttcctggtcttctcttagccggctgcaatggcccctgagccatgtctgtggtagaaaggacagcactgaggtttagaatggttaaggaaaatgattaaggtcacacagcagagtcaggcttagtcagatctttgtgcttctacatctttccaatggcatcactgctgctactacagtggatacttgcaatgtaatacatatttttcattgtttattaaatgcagtaaattatgtttaactcctctaatatttcaatgtattttatcatctaactctttcaaatgatatttgaaaataataaaataatcttatttcttctagactcattttattagtgctgcactcaagactagtagttttcagcctgttagtatgccctcctccagagcagtggaaaagtattccgtaaaaccagaacaccctaatcttggtagctgtaatccatctttatataacacatttgcttccaaacaaggtaaaaatatgtagttctctatgaataaaaaatgtcagctgtgaattttctttgtgctacataagctgaaaacatatttcctgagcagtaggagtttttgttttataaaatttatttataggagtttttgttttataaaacaatttttttaaatgttctttttttaaaattgtgtttctcaggctaccttgtcttagataaaatgagttctttttttgcgtcaagtaatttttagtttattttgaaattttttaaattatggattatgttcttaactgattttaattaatctcataaattatcagaagcacttataaatttagaaaaaatttacttatttactacaaaaatgcttgtaaataaatcagttctcctgttctctgacaaactgcatatttgctctttcttgattctgtcagagcaactacctgagtacatttttaaaccatttctaaatattttcagaattagtaatgcaagtctgcttatcttgattgaattttaaaactctataataacaaaggaatacatggcttacttgttaaaactttagtatttaaaataaatgaataaatgtttttctaagttattgatatttgaataatgaactaaagaaaatcgagctactatccctttaatgatatacagatctatatagtacaatattttcagcacttgatttgttagaacagtgttgttttacagtcattaaagattgctcatgcttttaaggtgctttacattttgcaacaaatgagtggtccttacaaaactgttgtgcccagcactttgagaggccaaggtgagaggatcacttgagtccaggaattcgagaccaacctgggacatatagtgagatcctgtctctagaaataaaaataaaaaattatccaggtgtggtggcacatgcctatagtcccagttactttggaggctgaggtcggaggattgcctgagcccaggaggtagaagcttcagtgagctgtgatcatgcagctgtactccagcctgggtgacagagcaagaccctgtttcaaaaacaaaaaaacaaacaacaacaacaaagaactgttgtgaagtaatatgagtccatttttaagttatgaagagaggacagtgaagcacagaatggtgtgacttgcctgctcaaggttacctgacttgggagggaggatgtcagagctagggccagaactcagctttcagtatgacccagctgagtgccttctatagcagtggacacttttttcataactcaattccagagaatttcttgctgataattttgtttttcttaaacttgagttttcatgaaaaaggtgtctattttgttgattgtaaattgaatttttctttgtatatataaattacagtaacaaataaaagaaaataaagagtaaaaattcagtaaattaaacttttaatttttctatgctttttcttgggcaaatatcatgtttacatatttgtaattgtagcattttatacaacttttttactagcacataaaaagatttgccatattttatatagttgtcttcataattttaacttgtaatgactaaagggtggcctattgaataactattttacaatctacttgaccattatcctgtttcggatactcaggcagtttttaggttttcatcttcataaataatactgtaataaacatcatatttaaagcacattttctttcttttatgttatttccttagaataatttcataagagtaagattactaggttaaagtatataaaactttaattcttcctatacttattgccagatggtttatcagttttcactgccatgaaaagtatctgggcctgccagtttcaccgcagcttcagtagttctgaatattatcatatagattcgtatttactagatgtaagtgtacaatgtttgtagtcttcatttcttttgatttttaatggggtgaagttatttctctacacttaataatttgttcatcatttataattttgaatttatttttaaagtataggcaagagtaatatgctataatttttaaagctttttaaaagcaagttaagtttttaaaaaattttctgttaaagcacctttaaaagaagttgaagatacgagttttgataaacagaaatctcctttggagacaccagcacctcgcagatttgctcctgtacctgtttcaagggatgatgaactatcaaagagggaaaatcttttggaagaaaaagaaaatatggaagtgtcgtgtcacagaggtaatagagacttttactagacctatcccaaattaggaaattgtcatgagattttctgtgcctagtagtaactgaagtgggatctctatttgtaatattttactttaaatgacccttgctgggaaaatcaagcttctttagattctttgtaaaagggtttggaggtatacatttataattattttatcttttacaggttattattacttaaacctttaatgaacaagttttgttaactttttttttttttttttttttctgagacggagtctcgctctgttgcccaggctggagtgcagtggtgcgatctcggctcactgcaagctccgcctcccgggttcaccccattctcctgcctcagcctccggattagctgggactatgggcgcccaccaccatacctggttaaattttttgtatttttagtaaaggcggggtttcaccgtgttagccaggatggtctcgataagttttgttaatttttatttattttttatgagacaaggtctcactctgtcacccagactggagtacaatggcgtgatcatggctcactgcagcctttacctcctcaggctcagttgatcttcccacttcagcctcctgagtagctgggactacaggtgcacgccaccacaccaggctaatttttgtatttttcatagagatggggtttcactatgtttcccaggctggtcacaaactcctgggctcaagcgatctgcccgcctcagcctcccaaagtgctgggattacagatgtgagccactgtgcctgggcaagttttgttattaataaataaaaaacaatgctttgctgaaggtaaggctgatcatttttagagcatgcttcctcatattgtttttaggtgtgaatttcaataataaaacgtagagaaacttaacattcatcaccatgttcacttggaaaaagtgctaatatatgaactttttttgagatgaagtctcgctctgtcacccgggctggagtgcagtggcaccatctcagctcactgcaacctccgcctcctaggttcaagcgattctcctgcgtcagcctcccgagtagctgggactacaggcgcccgccaccacgcctggctaattttttgtatttttagtagagacggggtttcaccatgttagccaggatggtctcgatctcctgacctcgtgatccacccaccttgggctctcaaagtgctgtgattacaggcgtgagctactgcgcccggccatatatgaactttttaacacagagcaagaacttttataagggacatgtattaaccaaacatcatatgttctcactcataaatgggagctaagctatgataatgcaaagccataagaatgacacaatggactttggggacttgtggggaaagggtgggaagcgggtgagggataaaagactacaaattgggttcagtgtatactgcttggatgatgggtgcaccaaaatcgcacaaatcaccaataaagaacttattcatgtaaccaaataccacctgttccccaaaaatctatggaaataaaaaaaattaaaagaaaaatagtatattacagagtcttaaaatgtaccccttctaacaaaagtaagtgaaatattaaactaaacactttaattcttggaatcatttaaatgcatgcaggtcttatcttagacacatttaaagaattttaagaaagtcacaagataataaaatctttaataaagaaggcaacctcacaccaaaaattattatgtagtcttactacatacaaacaaggctaaaggatagatccacttattggtactttgaagaaatagataaatctcttctttactaatttataaaagtcgtctattttactggacttcgtgatgatgacacttatcaaattccttttttctgtgatggaaataaatgtaggggtttttctatgaattcaaccttttacttacttgtttatgtatttttttgtagagacagggtcttgctttgttgcccaggctggtctcaaactcctggcctcaaacagtcctgctgccttggcctcccagagtgctgggattgcaggcatgagccattgcgcctggttgtggtatagtttttatgaggtgtaaatatttagttttatttgatgagtgtatttatggcctaaattgtaggctactttgtaggctataaattttttttttttttgagatggagtttcactcttgtcgcccaggctggagtgcgatggtgtgattttggcttgttgcaacctccgtgtcccaggttcaagcaattctcctgcctcagcctcccaagcagctgagattacaggcacgcaccaccatacccagctaattttttctatttttagtagagacggggtttctccatgttggtcaggctggtctcgaacttccgacctcagatgatccacccacctcagcctcccaatgtgctgggattacaggcatgagccactgcgcctggcttttaggctataaattgagtagataatcatcataagaagctaacttaggccagaatacaaatatgtgagatattatatacaagagaaatgaattagtatttggaaaatgatactatatctcttctatttcaggaaatgtaagactattggaacaaattttgaataataatgattctttgacaagaaaaagtgaatcatcaaacaccacctcactaactaggtcaaaaataggatggactcctgagaaaacaaacaggtaaaaacaagagattggaatgaaaactagattgaaaagagttttgttaagatttttcaaatttctttgggacttttaataaattatagcattgcttcttaaatttatcttagatttagttactattttttgatgctaatatatcttccccctttctataatatagctatgaaatgaatatctcattttttcaaaatgcaggttattaatttctaacgtatggattattcatttctgattaaatgatatctaggatttgtttcaaaaataatccaagataggttaggggcaagtaagttgggagtatagataaaatgaggctagccaaaagttaatgattgttgtagttaaatattgggtgtatggggttcattttagtattttctctatttttgtgtatatttgaaattttacataataaaaagttttaaaaaaatcaaatctgggccatgataattatatttatcttcaacatcttaaaaactacagtaataagaactagaggagccatatgttgagtaattttatgtggagatattgtatagtctatttacatgtaatgtaattactgataaggtaggatttgtgtctaccatgttgctttctatatgccttaggtcttagttcactgttcctcccttagtgccttcttttgtattagacattttctggttgcaccattttaattcttttgtcattttctctactattattttttgagttattttcttcgtggtcactccaggaattacaattaacatattaatttaaagcaatctaatttggattaatagtgatttaatttcaatattattcagaaactttgctccagtaaagccttgttccctccccttttcttctattattatcatacaaattacatctttatacattataagctcatctatgtagtctgataattattacttgatgcagctcttttaaatcagataggaaaagaaaagagatatgaacaaaaatacatatactggcttttatattcaactatatagttcatctttaacagtactctatttcttcatatggattcaagttagcccagtgtccttttattccaccctgaaggactcctgatagtatttcttatagggtaggtctgttagcagtgaattttctcagtttttgtttatctggtactgtcttaatttctttctcactttttcgttgtcatttaaacagacatttggtttctcatagttgtggaagctggaagttcaagatcaaggtgctggccgggttggtttcttttgaggcctttcttcttgacttgcaggtggcctccctcttgctgtctcttcacatggtcatccctctctgcacacacacccctggtgtcccctccttcacttttgaacaataattttgctacatacagaatttttggtagatgttctttttctttcagcattttgaatatgtcacctgactgccttttggactctgtggtttctgatgaggagttgtatgttggtgtgcttgatggtgtcccacaggtctctaagacttaatttttcttcatccatttttctttccccaattatcctcatattcctttcctcataatctcaattagcctgtcttaaagtttgttgattcttctgccaactcaaatatgatgctgagcccctctagtgaattatacatttcagttgttatatttttcaactgcagaatttctgtttgtcttttaaaaaaatgttttctatctctattgatcattctatatttggcaagacttcattcttatactttcctttaattttaaaactggtttcttttagtaatagctgatttatagtctttgcctagtaagtctaatatctgggattcctcaacagcagtttcttttgactgtgcttttttctgtgtttgggctctactttccagtttctttgtatgtctcataaatttttgttgaaaactgggcattttaaataatacagtgtggcaactctggaaattagattctttcacctcccagagtttattgttgctagttattgttgttgttgctgtttgtttagtgactttcctggactaattctgtgaagtctgtattctttgtcatgtgctcccactgaagtctctgttttgttagcttagtctgccagtgattggaaagagatttccttaactgccttgaactgataagtctccctctctttgccatggattacgtgtgtgtgtgtgtgtgtgtgtatgtgtgtgtgcgagtgcatgcacatgcatgtgctagagcatgcctccagtgcctggcagattatgagtctgttttagcctttcacttcctacttgcacagagcctcaaggtcggaagtgagtgattaggaccttcccaggtctctcttgggcatgtacatagccctgtatgtggactagaaggcatgaccttctagattcctaggaatatgttggagcttttcaaaactccactttggacatttcattgcctagatttttaacatttgttgaccacaatcttgtttgccccaactagtgtcactacctcacgctgctgagatgttaaacaattgccaccgttttttgaaaaatgccctggggatactttctcgctgagctagcagtgagtcagttcaaataaagacaaacactatgaatgagacttttaggagagcttgaaaccattctactgtctttagtggttgtgaggctgttggttttcgaggccgccacagagttgggaatagggtcccgagaatgaggcaagttaaaaaaattccataaagcttgctcttcttacctagagtcagccatttttcttgaataaatgctcctggggttcttgcaagtctttaatttccagaggttagaaaaacttgattttgatgatttttgctagggttctcattgtgcttatggagaagcagattttcagaatttcttactccaccaatctggaagtgcttctggatgttagcttcttgaaagcataaccttttcctgctccttttctgctacatctaaacttttctggttagataattttgtctcttgtgattttctgtgtttcatttgtttaatcacataactgattaattccatagttcaattttaataggataccatttagtaatatagctaagactgtatcaaagatttgtgtaatgaaatgtttactgaatttacaacaatttaggaaactttttcaaaaatcttctgtagcgttgaaactctaccttctcaaagatttccttcctgtgaagagctagaaacaactaaagtgactatgcagaagtctgatgatgttcttcatgaccttggccaaaaagagaaagaaacaaatagcatggtccaggtaaagtgggaatggtcttaaaattgatgattagttaagataaaaattaaaaaggaataaaagagttataaagatagaaattaggaggaaggatgaagaaaaagcactgaaaaagatatgtcagccacatctgttccatttataaagtatttccagaggccttcaccaagtgatttctacttatcgctccttgaccaggactgagccatatagccacctctggcttcccagcttctgttggaaagggaggaaggggaaaagagacctgtgagtgaatggacttcatttatccaatccacaatgtctgccatttcttccatacataaagagccaacttgcttatattttactttattttgctttcttcagcagagagagagagctattattggtcgctggactgcttagcactgctatggatttctcacctctattttatttaacactcacattagttttttttcttttctttttttgagtcagagtcttgctctgtcacccaggctggagtgcaagggtgcaatctcggcttactgcaacctccacctcccggttcaagcaattcttctacctcagcctcctgagcagctgggattacaagggtgtgccaccacacctggctaatttttgtatttttagtagagacagggtttcaccatgttggccaggctggtcttgaactcctgacctcaggtgatccacctgcctcggcctcccaaagtgttgggattacaggcgtgagccaccatgcctggcccacattagtatttctaaatggaggaaaaacactttgattgccaagtattcttttgtaagtcttcagtttgacaaattgagtccttagaatatattggtataatgtatggcctcaacaatagtgatagctgttattttgattaaaggaatcgttgtgagtttagtaactttctggtctttttttcttttaagccaaaagaatctctgagtatgttgaagcttccagatcttccacagaattctgttaagcttcaaacaaccaatacaac

SEQ ID NO: 2596 - DNA, 13819 bp, Homo sapiens
gagactgataaacacctgcaacgtgttacagagcagcaaacaagcattcagaggaaacaagagaaattacattgtcatgatcacgaaaagcaaatgaatgtgtttatggagcagcacataaggcatcttgaaaagttacaacaacaacaaatagatattcaggtatctgtaataaatccagtacagattccataatcttttatcacttggatctctcagccagtattcattgataattacagtagctcattagattgtaacagttttagttctgaaatcatgatttgcttatctttcttctcctgtaatgcgggtaactctgaatgttatatctcaaatgtcactagttgtgtgagacctctccctctagttggcttttcctccttttacactatttttgttcatatcatttttattatttattttttgagatggagtttgctatggttgcccaggctgaagtacagtagtagaatctccagtcactacaacctccacctcctgggttcaggagattttcctgcctcagcctcccatatagttgggattacaggcgcacaccaccacgcccagctaatttttgtatttttagtagaggtggggtttcaccatgttggtcaggctggtctctaactcctgacctcaagtgatctgccttcctcggcctcccaaagtgctagagttacctgcgtgagctgccatgcccagccatatttttaagtgcttatatcatattgcaactattggtttacgtcagcagttttcagtctgggaatgtgcactagaattacttgaacagctttataaaaatatttgtgcttggcaggccaagctaagaggattgcttgaggccgagagttcaagataagcctggttgatgtagcaagacctcatctcttagggaaaaaaaaaaaaaaaaaaaaaaaaaatttagcctggcatggtggcatgtgcctgtagtcccagatacttgagaggctgagactgccggagaccttgagtccaggagtttgcagttacagtgaactatgataatacaactgcacttcatcctagatgacagagtgagaccctatctcaaaaaaaaagaactatatacacacacacatacatacacacacacacacacacatatacacatacacaaacacacatgcttaggcctttcagcgattttgagccagcgattctgaggtagtgcctggcaatcattgaaagcttcataatgattctgatgcacaccgttggataagaactacctggtgtacatgtttgcttttgcatttaattaattaaaataatgaacatttttaatgccttttgagagtaaggcactgggctattataaaaagcattatcctcacaaggagctgtagcatactttcttatttattttggaatttctttttctttctttttcttttttttttttttgagacggagtctaactctgttgcccaggctggagtgcagtggtgtgttttcggctcactgcaacctccacctcccagattcaagtgattttcatgcttcagctacccgagtagctgggattgccagcctgcgccaccatgcccagctaatttttgtattttcagtagagacagggttctaccatgttggccagaccagtctcgaactcttggcctcaagtgatccacccatcatggcctcccaaagtgctggaattacagacgtgagccactgtgctcggcctattttggaatttctaactcctagaacacgacttagcactcagtaaactcttttttttttttttttttttgagtgagtgagggaatgatcagcattgtaaatgtgttggttttaatttccttttttttctaatatgaaatttatttatttttttgagacagagttttgctcttatcgcccaaactggagtgcagtggcgcaatctcagttcactgcagcctccgcctcccatgttcaagcgattctcctgccacagcctcccaagtagctgggattacagacgcccaccaccatgcccagctaactttttgtatttttagtagagatggggtttcaccatgttggccaggttggtctcaaactcctgacctcaggtgatccgcctgccttggcctcccaaagtgttgggattacagaagtgagtaaccgcgcctggcctactgtgcatttaaaaacttaaaaaaattaaaatataacattcaggctgggcacagtggctcatccctataatcccagcactttgggaggccgaggtgggtggatcacttgaggtcaggagttcaagaccagcctggccaacatggtgaaacctcatctctaccaaagatacaaaaaattagctgggcatggtgacacatgcctgtagtcccagctactcaggaggctgaggcaggggaatcacttgaatccggaaggcagaggttgcagtgagttgagattgggccactgtactccagcctgggtgacagagcaagactctatcttaacaacaacaacaaatgtatatatatgtgtgtgtgtatatatatacacacacatatatgtatatatctataacttaatgactttctaaattatatattttttaagacaaaaattcagaagaatgtactaaaataagtttattatacttaatatatcatcataaagtagacattaatttgctataattttcaagacttaacagggtttatcttgagcttttcatgtggttgaagataatattttattggaatgattatatgcataccaagtaaagtttagtaagtactccctgcatgactaaaattgagcacgcagcaaattatctagtgagagaccaggaatgagtctataaactattagtttatagataactttacttctttaagcctcaatttctttacctagaaaatattttctgttgttcaggataaaatgagatgacacatttgaaaagcacattgattccttaaggagtggctcctacttagtcctaagtacttacctgccatcatccatccttccataactaaatctgtaacttaatgactttctaattttggaagaatgaaatctgctaatttagatgtcttacttataaagcttataattacagagagagttgaagttttggttacatactggatatattagttgttcagtaaatgcttaatgaaatgaaattagttgagtctgtttcatctgttttatgtagagggatctcaacacacttttagaaattctgtaaaactataaatttttttaggtttttcttggcctggcataaaactctattttgattattactcattgcatgcctgtatcaaagtatttcatgtgctccataaatatatacacctactgtgtactcacaaaaattaaaacaaaacaataaaaccctgttttttgaaaccagttttattagttaagatacttgctcatttcagatattttattttattttattttattttattttattttattttattttattttattttgtttttgagatagagtcctgctctgtcacccaggctggagtgtagtggcaccatttcggctcactgccacctccgtgtcccgggttcaagtgattctcctgcctcagcctcctgagtagctgggattacaggctcccaccaccacacccagctaatttttgtatttttaggagagacggggtttcaccatgttggccagactggcctcaaactcctgacctcaggtgatccatttgccttggcctcccaaagtgctgggattacaggcttgagccactgcaccgggccccatttcaggtattttaataaatagtgctgaaaactatgttgtcactctagtttccatttatatacaaatgcatatattattgctgctgctaagcatggatgtttatttgagtactcactatcaatgattttcaaaccttgacctcaaacaaaatcctgccatttaggatataaaagatgggatgttttggtttaaaattctctgattcaagtagaggtttagggtgagggcctctccttcctggtcttctcttagccggctgcaatggcccctgagccatgtctgtggtagaaaggacagcactgaggtttagaatggttaaggaaaatgattaaggtcacacagcagagtcaggcttagtcagatctttgtgcttctacatctttccaatggcatcactgctgctactacagtggatacttgcaatgtaatacatatttttcattgtttattaaatgcagtaaattatgtttaactcctctaatatttcaatgtattttatcatctaactctttcaaatgatatttgaaaataataaaataatcttatttcttctagactcattttattagtgctgcactcaagactagtagttttcagcctgttagtatgccctcctccagagcagtggaaaagtattccgtaaaaccagaacaccctaatcttggtagctgtaatccatctttatataacacatttgcttccaaacaaggtaaaaatatgtagttctctatgaataaaaaatgtcagctgtgaattttctttgtgctacataagctgaaaacatatttcctgagcagtaggagtttttgttttataaaatttatttataggagtttttgttttataaaacaattttttttaaatgttctttttttaaaattgtgtttctcaggctaccttgtcttagataaaatgagttctttttttgcgtcaagtaatttttagtttattttgaaattttttaaattatggattatgttcttaactgattttaattaatctcataaattatcagaagcacttataaatttagaaaaaatttacttatttactacaaaaatgcttgtaaataaatcagttctcctgttctctgacaaactgcatatttgctctttcttgattctgtgagagcaactacctgagtacatttttaaaccatttctaaatattttcagaattagtaatgcaagtctgcttatcttgattgaattttaaaactctataataacaaaggaatacatggcttacttgttaaaactttagtatttaaaataaatgaataaatgtttttctaagttattgatatttgaataatgaactaaagaaaatcgagctactatccctttaatgatatacagatctatatagtacaatattttcagcacttgatttgttagaacagtgttgttttacagtcattaaagattgctcatgcttttaaggtgctttacattttgcaacaaatgagtggtccttacaaaactgttgtgcccagcactttgagaggccaaggtgagaggatcacttgagtccaggaattcgagaccaacctgggacatatagtgagatcctgtctctagaaataaaaataaaaaattatccaggtgtggtggcacatgcctatagtcccagttactttggaggctgaggtcggaggattgcctgagcccaggaggtagaagcttcagtgagctgtgatcatgcagctgtactccagcctgggtgacagagcaagaccctgtttcaaaaacaaaaaaacaaacaacaacaacaaagaactgttgtgaagtaatatgagtccatttttaagttatgaagagaggacagtgaagcacagaatggtgtgacttgcctgctcaaggttacctgacttgggagggaggatgtcagagctagggccagaactcagctttcagtatgacccagctgagtgccttctatagcagtggacacttttttcataactcaattccagagaatttcttgctgataattttgtttttcttaaacttgagttttcatgaaaaaggtgtctattttgttgattgtaaattgaatttttctttgtatatataaattacagtaacaaataaaagaaaataaagagtaaaaattcagtaaattaaacttttaatttttctatgctttttcttgggcaaatatcatgtttacatatttgtaattgtagcattttatacaacttttttactagcacataaaaagatttgccatattttatatagttgtcttcataattttaacttgtaatgactaaagggtggcctattgaataactattttacaatctacttgaccattatcctgtttcggatactcaggcagtttttaggttttcatcttcataaataatactgtaataaacatcatatttaaagcacattttctttcttttatgttatttccttagaataatttcataagagtaagattactaggttaaagtatataaaactttaattcttcctatacttattgccagatggtttatcagttttcactgccatgaaaagtatctgggcctgccagtttcaccgcagcttcagtagttctgaatattatcatatagattcgtatttactagatgtaagtgtacaatgtttgtagtcttcatttcttttgatttttaatggggtgaagttatttctctacacttaataatttgttcatcatttataattttgaatttatttttaaagtatagggaagagtaatatgctataatttttaaagctttttaaaagcaagttaagtttttaaaaaattttctgttaaagcacctttaaaagaagttgaagatacgagttttgataaacagaaatctcctttggagacaccagcacctcgcagatttgctcctgtacctgtttcaagggatgatgaactatcaaagagggaaaatcttttggaagaaaaagaaaatatggaagtgtcatgtcacagaggtaatagagacttttactagacctatcccaaattaggaaattgtcatgagattttctgtgcctagtagtaactgaagtgggatctctatttgtaatattttactttaaatgacccttgctgggaaaatcaagcttctttagattctttgtaaaagggtttggaggtatacatttataattattttatcttttacaggttattattacttaaacctttaatgaacaagttttgttaacttttttttttttttttttttctgagacggagtctcgctctgttgcccaggctggagtgcagtggtgcgatctcggctcactgcaagctccgcctcccgggttcaccccattctcctgcctcagcctccggattagctgggactatgggcgcccaccaccatacctggttaaattttttgtatttttagtaaaggcggggtttcaccgtgttagccaggatggtctcgataagttttgttaatttttatttattttttatgagacaaggtctcactctgtcacccagactggagtacaatggcgtgatcatggctcactgcagcctttatctcctcaggctcagttgatcttcccacttcagcctcctgagtagctgggactacaggtgcacgccaccacaccaggctaatttttgtatttttcatagagatggggtttcactatgtttcccaggctggtcacaaactcctgggctcaagcgatctgcccgcctcagcctcccaaagtgctgggattacagatgtgagccactgtgcctgggcaagttttgttattaataaataaaaaacaatgctttgctgaaggtaaggctgatcatttttagagcatgcttcctcatattgtttttaggtgtgaatttcaataataaaacgtagagaaacttaacattcatcaccatgttcacttggaaaaagtgctaatatatgaactttttttgagatgaagtctcgctctgtcacccgggctggagtgcagtggcaccatctcagctcactgcaacctccgcctcctaggttcaagcgattctcctgcctcagcctcccgagtagctgggactacaggcgcccgccaccacgcctggctaattttttgtatttttagtagagacggggtttcaccatgttagccaggatggtctcgatctcctgacctcgtgatccacccaccttgggctctcaaagtgctgtgattacaggcgtgagctactgcgcccggccatatatgaactttttaacacagagcaagaacttttataagggacatgtattaaccaaacatcatatgttctcactcataaatgggagctaagctatgataatgcaaagccataagaatgacacaatggactttggggacttgtggggaaagggtgggaagcgggtgagggataaaagactacaaattgggttcagtgtatactgcttggatgatgggtgcaccaaaatcgcacaaatcaccaataaagaacttattcatgtaaccaaataccacctgttccccaaaaatctatggaaataaaaaaaattaaaagaaaaatagtatattacagagtcttaaaatgtaccccttctaacaaaagtaagtgaaatattaaactaaacactttaattcttggaatcatttaaatgcatgcaggtcttatcttagacacatttaaagaattttaagaaagtcacaagataataaaatctttaataaagaaggcaacctcacaccaaaaattattatgtagtcttactacatacaaacaaggctaaaggatagatccacttattggtactttgaagaaatagataaatctcttctttactaatttataaaagtcgtctattttactggacttcgtgatgatgacacttatcaaattccttttttctgtgatggaaataaatgtaggggtttttctatgaattcaaccttttacttacttgtttatgtatttttttgtagagacagggtcttgctttgttgcccaggctggtctcaaactcctggcctcaaacagtcctgctgccttggcctcccagagtgctgggattgcaggcatgagccattgcgcctggttgtggtatagtttttatgaggtgtaaatatttagttttatttgatgagtgtatttatggcctaaattgtaggctactttgtaggctataagttttttttttttttgagatggagtttcactcttgtcgcccaggctggagtgcgatggtgtgattttggcttgttgcaacctccgtgtcccaggttcaagcaattctcctgcctcagcctcccaagcagctgagattacaggcacgcaccaccatacccagctaattttttctatttttagtagagacggggtttctccatgttggtcaggctggtctcaaacttccgacctcagatgatccacccacctcagcctcccaatgtgctgggattacaggcatgagccactgcgcctggcttttaggctataaattgagtagataatcatcataagaagctaacttaggccagaatacaaatatgtgagatattatatacaagagaaatgaattagtatttggaaaatgatactatatctcttctatttcaggaaatgtaagactattggaacaaattttgaataataatgattctttgacaagaaaaagtgaatcatcaaacaccacctcactaactaggtcaaaaataggatggactcctgagaaaacaaacaggtaaaaacaagagattggaatgaaaactagattgaaaagagttttgttcagatttttcaaatttctttgggacttttaataaattatagcattgcttcttaaatttatcttagatttagttactattttttgatgctaatatatcttccccctttctataatatagctatgaaatgaatatctcattttttcaaaatgcaggttattaatttctaacgtatggattattcatttctgattaaatgatatctaggatttgtttcaaaaataatccaagataggttagggtcatgtaagttgggagtatagataaaatgaggctagccaaaagttaatgattgttgtagttaaatattgggtgtatggggttcattttagtattttctctatttttgtgtatatttgaaattttacataataaaaagttttaaaaaaatcaaatctgggccatgataattatatttatcttcaacatcttaaagactacagtaataagaactagaggagccatatgttgagtaattttatgtggagatattgtatagtctatttacatgtaatgtaattactgataaggtaggatttgtgtctaccatgttgctttctatatgccttaggtcttagttcactgttcctcccttagtgccttcttttgtattagacattttctggttgcaccattttaattcttttgtcattttctctactattattttttgagttattttcttcgtggtcactccaggaattacaattaacatattaatttaaagcaatctaatttggattaatagtgatttaatttcaatattattcagaaactttgctccagtaaagccttgttccctccccttttcttctattattatcatacaaattacatctttatacattataagctcatctatgtagtctgataattattacttgatgcagctcttttaaatcagataggaaaagaaaagagatatgaacaaaaatacatatactggcttttatattcaactatatagttcatctttaacagtactctatttcttcatatggattcaagttagcccagtgtccttttattccaccctgaaggactcctgatagtatttcttatagggtaggtctgttagcagtgaattttctcagtttttgtttatctggtactgtcttaatttctttctcactttttcgttgtcatttaaacagacattttgtttctcatagttgtggaagctggaagttcaagatcaaggtgctggccgggttggtttcttttgaggcctttcttcttgacttgcaggtggcctccctcttgctgtctcttcacatggtcatccctctctgcacacacacccctggtgtcccctccttcacttttgaacaataattttgctacatacagaatttttggtagatgttctttttctttcagcattttgaatatgtcacctgactgccttttggactctgtggtttctgatgaggagttgtatgttggtgtgcttgatgggttcccacaggtctctaagacttaatttttcttcatccatttttctttccccaattatcctcatattcctttcctcataatctcaattagcctgtcttaaagtttgttgattcttctgccaactcaaatatggtgctgagcccctctagtgaattatacatttcagttgttatatttttcaactgcagaatttctgtttgtcttttaaaaaaatgttttctatctctattgatcattctatatttggcaagacttcattcttatactttaattttaaaactggtttcttttagtaatagctgatttatagtctttgcctagtaagtctaatatctgggattcctcaacagcagtttcttttgactgtgcttttttctgtgtttgggctctactttccagtttctttgtatgtctcataaatttttgttgaaaactgggcattttaaataatacagtgtggcaactctggaaattagattctttcacctcccagagtttattgttgctagttattgttgttgttgctgtttgtttagtgactttcctggactaattctgtgaagtctgtattctttgtcatgtgctcccactgaagtctctgttttgttagcttagtctgccagtgattggaaagagatttccttaactgccttgaactgataagtctccctctctttgccatggattacgtgtgtgtgtgtgtgtgtgtatgtgtgtgtgcgagtgcatgcacatgcatgtgctagagcatgcctccagtgcctggcagattatgagtctgttttagcctttcacttcctacttgcacagagcctcaaggtcggaagtgagtgattaggaccttcccaggtctctcttgggcatgtacatagccctgtatgtggactagaaggcatgaccttctagattcctaggaatatgttggagcttttcaaaactccactttggacatttcattgcctagatttttaacatttgttgaccacaatcttgtttgccccaactagtgtcactacctcacgctgctgagatgttaaacaattgccaccgtttttttgaaaaatgccctggggatactttctcgctgagctagcagtgagtcagttcaaataaagacaaacactatgaatgagacttttaggagagcttgaaaccattctactgtctttagtggttgtgaggctgttggttttcgaggccgccacagagttgggaatagggtcccgagaatgaggcaagttaaaaaaattccataaagcttgctcttcttacctagagtcagccatttttcttgaataaatgctcctggggttcttgcaagtctttaatttccagaggttagaaaaacttgattttgatgatttttgctagggttctcattgtgcttatggagaagcagattttcagaatttcttactccaccaatctggaagtgcttctggatgttagcttcttgaaagcataaccttttcctgctccttttctgctacatctaaacttttctggttagataattttgtctcttgtgattttctgtgtttcatttgtttaatcacataactgattaattccatagttcaattttaataggataccatttagtaatatagctaagactgtatcaaagatttgtgtaatgaaatgtttactgaatttacaacaatttaggaaactttttcaaaaatcttctgtaacgttgaaactctaccttctcaaagatttccttcctgtgaagagctagaaacaactaaagtgactatgcagaagtctgatgatgttcttcatgaccttggccaaaaagagaaagaaacaaatagcatggtccaggtaaagtgggaatggtcttaaaattgatgattagttaagataaaaattaaaaaggaataaaagagttataaagatagaaattaggaggaaggatgaagaaaaagcactgaaaaagatatgtcagccacatctgttccatttataaagtatttccagaggccttcaccaagtgatttctacttatcgctccttgaccaggactgagccatatagccacctctggcttcccagcttctgttggaaagggaggaaggggaaaagagacctgtgagtgaatggacttcatttatccaatccacaatgtctgccatttcttccatacataaagagccaacttgcttatattttactttattttgctttcttcagcagagagagagagctattattggtcgctggactgcttagcactgctatggatttctcacctctattttatttaacactcacattagttttttttcttttctttttttgagtcagagtcttgctctgtcacccaggctggagtgcaagggtgcaatctcggcttactgcaacctccacctcccggttcaagcaattcttctacctcagcctcctgagcagctgggattacaagggtgtgccaccacacccggctaatttttgtatttttagtagagacagggtttcaccatgttggccaggctggtcttgaactcctgacctcaggtgatccacctgcctcggcctcccaaagtgttgggattacaggcgtgagccaccatgcctggcccacattagtatttctaaatggaggaaaaacactttgattgccaagtattcttttgtaagtcttcagtttgacaaattgagtccttagaatatattggtataatgtatggcctcaacaatagtgatagctgttattttgattaaaggaatcgttgtgagtttagtaactttctggtctttttttcttttaagccaaaagaatctctgagtatgttgaagcttccagatcttccacagaattctgttaagcttcaaacaaccaatacaac

SEQ ID NO: 2597 - DNA, 479 bp, Homo sapiens
taatttagtactaaaattcctcagggaaaaaaatgtgtgataaatttttcagcataaaatttacattccctttgtgaaagggctgtcttccagtaaatgcagtcaataaatttatctccaaaggcacaaatgtgtacacaaaaaacctcaaacatctggtgaagtggtttctttgagaaaagccaaaatacagtgcttttgaggttggtaagccatgaaaaatctcttttgaaatagaattaagatgcttttgctgttattacagaaaaaaaaagtctctaattttctttgaatatccagtatctcttaaaaatttttgttttgcaaatttgttaaaaactggttaacgtaatttgcacgtgagatagtgcaacttcaaacaggttttttgttgttgttttttaaacacaggtgggagatatgggagattggcctggatagctaggcatgggatagattttaaaaggctttcttttgtt

SEQ ID NO: 2598 - DNA, 264 bp, Homo sapiens
gtttatggaaacttaggtaacatacagttttcagaagatagtcaaggcctaaggaggaaaaatgtttatttttttctctactttggaagaatcaataggagttgtaatttactgtgttcgataacatggtagccaccatctgtgtcttgaatcagtcatctagttattcacatatataaatatatatataaatatcagtaaacatttacctgaattcttttttttctttgagacagggtcttgctgtgtcgcacaggctggagt

SEQ ID NO: 2599 - DNA, 952 bp, Homo sapiens
gggtcagggatgggtcggggaggcaattcattactcatatttggttgaggtataagttttatatgtagagttagacttttgtattttagaagatttagttgacatggtcatatctactatcctaattttattttaaattatgtgttcatttttcacatatgatttgcatttgaaaattagatgcttctatattctgtcatcttttattcacttcatctttatgagaattacacttatttaaaggagttttcctatatataattcattatatattcaatattattccaaaatatttctcaaatatgtgaacattttggtattctaataatgtttagaagtagttttataacaattgttagagattgtaaatatactttaaagttatgacagatatgtaaatacattttaaaattatgacagacattcagatgttgagacagaaatccttgaaaatagttgtcaggactatcggttatatgttttaacctctgttagaaatggcatggggaaaaatttcatggcttcaaacacatttttaggagaagaaattgttgaaatacaatttcagcaataaaaggctcacctttatatgacttacctgtcacatttcctgtaaactgtttggagattgtttttgttactatgaatttctctgatgctttctttaatgaacagtaactgtatttacttgaaacacattgcttggaataatgcttgaattattctgagatgactttgattcatttgaaatggaaaacacttgaaaatgtagaggtttgtttttcaaaaaattgtaattaaatagcttaattattgattgcaagagtccttgaatggtatcagtgtatctggagatcaagagtttaacatttcccttggttttcttcacaatggaaaagtctgaagttttattttgtcttaataaagcagtcatggctcttaaaactcaaaa

SEQ ID NO: 2600 - DNA, 165 bp, Homo sapiens
gtgtgtgaaaggctagagggctttcccggtgtcacctcctgccctggcctgggaagtgtcgtggggacagctgctccggagactcctggctgccaggcttgacttgggcttgattgatttagcctgttacctggaaagggcactgctgctccctgcccaggtcag

SEQ ID NO: 2601 - DNA, 165 bp, Homo sapiens; identical to SEQ ID NO: 2600

SEQ ID NO: 2602 - DNA, 165 bp, Homo sapiens; identical to SEQ ID NO: 2600

SEQ ID NO: 2603 - DNA, 311 bp, Homo sapiens
atcactgtccctgtttacagatgagtgacctgaggctcagagagggaaggtaacttgctctgccttacacagcccagacctgaactctagcgtctcaccgtgaaatctgtaacgtttctcccgcaccatcacataccgaaggcaggcgtctgtgcagaaaacaggctgctcagaaagaagagtgcttacttttggcgagctcctgtgcgtcacatcctgggcttcctcactgctccatgctctaggtaccattctcccccttttagagatgaggaaactgaggtctggattgcagaagctgagtccagatt

SEQ ID NO: 2604 - DNA, 311 bp, Homo sapiens; identical to SEQ ID NO: 2603

SEQ ID NO: 2605 - DNA, 5157 bp, Homo sapiens
aatgcttcagtgaacatccttgcacatatatttttgtgtttgttggtaagtaattctgtagaaagtggaactgttgttgcgttgtgtgttttgagtttggataaattttttatctagagaggtgaaactggtttatgcttccattaagagcctatgggagctgtggggttttttataatatcatcctccaaatggctagggggaagggagagctctctgaatttaggccagagctggcccactgcaggctgggcaggcccaggcctggacttggagcccggagaactcaggtatccctctggggccccccacagacaccgagacaaagttcagactcttcagtgtggcacacaggcctcggtgacccctgctgccctctgcagcctcctctgctcttgctccctgtgtttcatactggacccctggtaattcactggatatggttatgtttgcctgccctttgcctatgcgtcccctccccctggaatgtcttttcttcttaatctccgtcctccctgtccttcaaggcctgggtcacaagtccctttctccacgaagccttcttataatctctccagcctgaattgtcttctctgtgttcctttagtcttttatctgaaccatatccccccttaggtgggagcaagttgtgggtgggagagggcaaacttcagcctcattagatagaggctggacttccggaagagctgggaagggggaccatagtttctggggaggggtggagaactcacatttacctagctgctggccaggctattttcatacccacagaccgatttaattctcaactactgtactcatttagtagatgagaagaatgagacattgaaaacatgcacagtggaggtgggaatgaaagccagctctccaactctccagtcctctttcctgtcactgcatcaggctgcagggtgaaggggaggtctgggatacaaagagaacttagaggtggagcagttggattctgtgcagtgctaggagggaggagaggggttggagtaggtgggaagtaggcctccttcagtttggatagcacttcccttaacccaatgactctagtgggagggtggagggatggggatgggaagggagcctgggagtgaggaggaaaggcaaactctgtcttcccccaggggagtcaatgaatagtacctaaaatggaaaccaaacaaaacaacttcaggaagtaacaagggcttgcttagagacatgacggtaaaccctgaaccatcagctaaaagaggtagatagcagtggttgcccctggggagaggtaaatgtgatggagagggaacaactgtgtacaaacatgtgactttacgttttgatcaaaataagacttttaaaaaacaaacactttttaaaaagaaggaaagaaaagtaggaggggctatcccaggagctgagcgttctgccccgcccctatgagtcctgccggcttcgcgtgcccacgggagccgggtcccctgccctgctgcggcgcatgatgcctggtgggggttctgcccaggcccctccggctagatacaatccgcagcaccattacaagctgtgtgcaagttgttcaccactctgcgctgttcccccctctgtaaaatgggttggccgttgtaccctctctgaaaaggatgtgctgatgcctcggtgaaaagctttcaaaaatgttagttcatgttatttttttgctggaggtgttaggtgcggagaggcgagggggctcgcgtgcgtcgcaggaggctcagctgggctcgccgccgctcgtgcctgcgcccatttagtgtgcacacagctagcgcccgccgtatgtcaggcctggtgctgggtctccgccccggagctggggtgcaggggctgccgcgccctgtcgggtcgatccgggtgggaacccagatgtctccaagatccgagacagatccccgccccgcgccctccctggggggcggtccccggcttgggcgggatgggcgggcggctacttaaggtcggcgacccgaggccgcggctgccgactgggtcccctgccgctgtcgccaccatggctccgcaccgccccgcgcccgcgctgctttgcgcgctgtccctggcgctgtgcgcgctgtcgctgcccgtccgcgcggccactgcgtcgcggggggcgtcccaggcgggggcgccccaggggcgggtgcccgaggcgcgggtgagtgcccggggggccccggggctcccggagtaactctctattgtaagttcttgcagatacagcgctaggaaaaggggagtaattcaggtctagaatggaaaaactgttttgttgctttgtaagtatctcttgctgcttccggggctctggctcgcagacgagggtgggagcctcggggccctggctgttccttcccaggaagctaacctcaccttggccggatttcttttcccctgtcctcctctaacatcttacctcctgtctcctgaattctccttttccttctctgattttttctcccctctgcctcacttctctccttctctcttctgatgtcttcttccatttacgattccttgttctcatttgatctctctccttctccaatatttccttctttcttgtatgacctcgcctgtctgcttatggtcattattatcatttcttctctcctttctgctgtcttccctgccctgtctggtttcgtgtttttccacccttctgcctgagttctccccaccttgtttctctgacttctctcctctgatttttactcccaccagatctcttctccggccagaggtgacctgcacctgctgatttttgtcctcgactccagcctaaccctcctgcaccctccccggccccagccccagtgcatgtgtaatagcctccccatttttaaccacttcatctccaacagcctcctgcagaccctggtgcatcctcttctcctcttccaagaaatgaaatttgggggtggtgtgttgtggggcacgagggaggaggcagacagcgcaggaggccacttggactcagccatttggacccttcttgggggtatgatggggatgggtacagagaggagagggggctcctgtggatcacaggaggctcaggtgggctcacctcgatttgcgagtgcacccacttagcgtgcacagagctagcgcctgctgtctgccaggccccgtgctggaaatctttccacttcccaaagagcaaaagcaaacaggctgtgtgaccttcggtcagtcccctcccctctttgagcctcagtttctctgtctgcagattggggttggataatgagctctcagagggccctttggtttcaagagccattgaagatgctggaaggaagcaagctgaggccctggggacccttagatttactattgccatctgaggggtctacccatcatcccagagcttgtgatcttggagcctggggcaacccctgctacactgtttcctagctggaggtccctggcagagtcccttcatctctctgtgcctcggttatcacatccaattggcaataagaaaagaagggaggctgggcgcggtggctcacgcctgtaatcccaacactttgggaggccaaggcaggtggatcacctgaggtcaggagttccagaccagcctgaccaacatggcgaaaccctgtctgtactaaaaatacaaaattagccaggcatagtatcgcatgcctgtaatcccagctactcaggaggctgaggcaggagaatcgcttgaacccaggaggcagaggttacagtgagtcgagattgcaccattgcactccagactggacaacagtgcgagactctgtctcaaaaaaaaaaaaaaaaaaagaaaaaaagaaagaaagaaaagaaaggagcagggaggtagagccctctgtaccctccatcaccagaaaaagctgaagaggggctgagtaggagggacagatgctggccagggcacaggttttgaagcataaaactcttgccctgtttgctgactcgttgagacagggtgcccagaaggggatagacttccctggggcgtggggagagcaggaggctcaagtgagatgctcttggtgctagaaaccgccctccctcatgcctggggtctctccctgccaggaccctgccccgcttaggctctgccctgtctcatcccagcccaacagcatggtggtggaacaccccgagttcctcaaggcagggaaggagcctggcctgcagatctggcgtgtggagaagttcgatctggtgcccgtgcccaccaacctttatggagacttcttcacgggcgacgcctacgtcatcctgaagacagtgcagctgaggaacggaaatctgcagtatgacctccactactggctgggtgaggctggccctgcccagcccctgccccagcccccattctgaacagtgcagacctttggggcatggtccccagggagggaactgattattgagcacctagtatgtgctgggcccttgactggtggttcatgccctgagacgctagagccagcctggccaagttcacacccccactctgcccctaacccatgttctgtcctttggcaagtcacttagtgtccctgtggagtggacatgatgatagctctgcactacctcacaggaatgttgtgagcgttaaacaccttactgtgacactcagaactgtgggtgaattggagaccctggacctctccacaacttccctggcccagctccaggcactccccagtttgcccttgagtcaggagcccggagtccctgccacacctctgccgtgggatgctataagttctgcccccttgctgagcctcagtttcctaatctgtgaattgatctgatgctcccagtcctgagtttacgctcaggagggctgagaatgaacataagggaatgtgacagagctgggaggacgcttagagaaaaatgaggtccatcgtcctgttatacagatggattaactgaggctcacagaaggcaagggctttctcagcttctacagctaggtcagggcagtgctggggttcctcctccacctcctcttcctcaggggtctgggatacttctggaaagccaggctcatattgctctgatgtcccgtaggcaatgagtgcagccaggatgagagcggggcggccgccatctttaccgtgc

SEQ ID NO: 2606 - DNA, 312 bp, Homo sapiens
  SITE (166): n equals a,t,g, or c
atcactgtccctgtttacagatgagtgacctgaggctcagagagggaaggtaacttgctctgccttacacagcccagacctgaactctagcgtctcaccgtgaaatctgtaacgtttctcccgcaccatcacataccgaaggcaggcgtctgtgcagaaaacaggnctgctcagaaagaagagtgcttacttttggcgagctcctgtgcgtcacatcctgggcttcctcactgctccatgctctaggtaccattctcccccttttagagatgaggaaactgaggtctggattgcagaagctgagtccagatt

SEQ ID NO: 2607 - DNA, 5199 bp, Homo sapiens
  SITE (233): n equals a,t,g, or c
  SITE (270): n equals a,t,g, or c
  SITE (387): n equals a,t,g, or c
  SITE (830): n equals a,t,g, or c
  SITE (889): n equals a,t,g, or c
  SITE (918): n equals a,t,g, or c
  SITE (940): n equals a,t,g, or c
  SITE (978): n equals a,t,g, or c
  SITE (1005): n equals a,t,g, or c
  SITE (1035): n equals a,t,g, or c
  SITE (1067): n equals a,t,g, or c
  SITE (1100): n equals a,t,g, or c
  SITE (1123): n equals a,t,g, or c
  SITE (1713): n equals a,t,g, or c
  SITE (1837): n equals a,t,g, or c
  SITE (1877): n equals a,t,g, or c
  SITE (2806): n equals a,t,g, or c
  SITE (2810): n equals a,t,g, or c
  SITE (2833): n equals a,t,g, or c
  SITE (2834): n equals a,t,g, or c
  SITE (2856): n equals a,t,g, or c
  SITE (2878): n equals a,t,g, or c
  SITE (2889): n equals a,t,g, or c
  SITE (2918): n equals a,t,g, or c
  SITE (3120): n equals a,t,g, or c
  SITE (3313): n equals a,t,g, or c
  SITE (3363): n equals a,t,g, or c
  SITE (3472): n equals a,t,g, or c
  SITE (4420): n equals a,t,g, or c
  SITE (4438): n equals a,t,g, or c
  SITE (4570): n equals a,t,g, or c
  SITE (4618): n equals a,t,g, or c
  SITE (5097): n equals a,t,g, or c
  SITE (5135): n equals a,t,g, or c
  SITE (5140): n equals a,t,g, or c
aatgcttcagtgaacatccttgcacatatatttttgtgtttgttggtaagtaattctgtagaaagtggaactgttgttgcgttgtgtgttttgagtttggataaattttttatctagagaggtgaaactggtttatgcttccattaagagcctatgggagctgtggggttttttataatatcatcctccaaatggctagggggaagggagagctctctgaatttaggccagangctggcccactgcaggctgggcaggcccaggcctggnacttggagcccggagaactcaggtatccctctggggccccccacagacaccgagacaaagttcagactcttcagtgtggcacacaggcctcggtgacccctgctgccctctgcagcnctcctctgctcttgctccctgtgtttcatactggacccctggtaattcactggatatggttatgtttgcctgccctttgcctatgcgtcccctccccctggaatgtcttttcttcttaatctccgtcctccctgtccttcaaggcctgggtcacaagtccctttctccacgaagccttcttataatctctccagcctgaattgtcttctctgtgttcctttagtcttttatctgaaccatatccccccttaggtgggagcaagttgtgggtgggagagggcaaacttcagcctcattagatagaggctggacttccggaagagctgggaagggggaccatagtttctggggaggggtggagaactcacatttacctagctgctggccaggctattttcatacccacagaccgatttaattctcaactactgtactcatttagntagatgagaagaatgagacattgaaaacatgcacagtggaggtgggaatgaaagccagnctctccaactctccagtcctctttcctgntcactgcatcaggctgcagggntgaaggggaggtctgggatacaaagagaacttagaggntggagcagttggattctgtgcagtgcntaggagggaggagaggggttggagtaggtngggaagtaggcctccttcagtttggatagcancttcccttaacccaatgactctagtgggagggntggagggatggggatgggaaggngagcctgggagtgaggaggaaaggcaaactctgtcttcccccaggggagtcaatgaatagtacctaaaatggaaaccaaacaaaacaacttcaggaagtaacaagggcttgcttagagacatgacggtaaaccctgaaccatcagctaaaagaggtagatagcagtggttgcccctggggagaggtaaatgtgatggagagggaacaactgtgtacaaacatgtgactttacgttttgatcaaaataagacttttaaaaaacaaacactttttaaaaagaaggaaagaaaagtaggaggggctatcccaggagctgagcgttctgccccgcccctctgagtcctgccggcttcacctgcccacgggagccgggtcccctgccctgctgcggcgcatgctgcctggtgggggttctgcccaggcccactacggcctgagttcaaatcccggcagcaccatttacaagctgtgtgcaagttgcttcaccactctgcgctgttcccccctctgtaaaatgggttggccgttgtaccctctctgaaaaggatgtgctgatgcctcggtgaaaagctttcaaaaatcgtcagcgncatgttatttttttgctggaggtgttaggtgcgaagaggcgaaggggctcgcgtgcgtcgcaggaggctcagctgggctcgccgccgctcgtgcctgcgcccatttagtgtgcacacagctagncgcccgccgtatgtcaagcctggtgctgggtctccgcccncaaagctggggtgcaagagacctcacacaaaatctgatatttaccactaaaaaaccaaatcaatacaaaatcaaacacagactaacgcaaactaacaaacaatattaaatataccacaatttattaaataaagatcaaacaatctataaaaaatcaaacaaaagataacactactaactaaatcctctccaacaataccctccatatatccgaaccgccccgcgcccgcgatgctttgcgcgctgtccctggcgctgtgcgcgctgtcgctgcccgtccgcgcggccactgcgtcgcggggggcgtcccaggcgggggcgacaaaggggcgggtgcccgaggcgcgggtgagtgacaggggggacaaggggctccaggaataactctctaaagtaagttcttgcagatacagcgctaggaaaaggggagtaattcaggtctagaatggaaaaactgttttgttgctttgtaagtatctcttgctgcttccggggctctggctcgcagacgagggtgggagcctcggggccctggctgttccttcccaggaagctaacctcaccttggccggatttcttttcccctgtcctcctctaacatcttacctcctgtctcctgaattctccttttccttctctgattttttctcccctctgcctcacttctctccttctctcttctgatgtcttcttccatttacgattccttgttctcatttgatctctctccttctccaatatttccttctttcttgtatgacctcgcctgtctgcttatggtcattattatcatttcttctctcctttctgctgtcttccctgccctgtctggtttcgtgtttttccacccttctgcctgagttctccccaccttgtttctctgacttctctcctctgatttttactcccaccagatctcttctccggccnaganggtgacctgcacctgctgatttnnttgtcctcgactccagcctaanccctcctgcaccctccccggcncccagccccangtgcatgtgtaatagcctccccatttttnaaccacttcatctccaacagcctcctgcagaccctggtgcatcctcttctcctcttccaagaaatgaaatttgggggtggtgtgttgtggggcaggagggaggaggcagacagcgcaggaggccacttggactcagccatttggacccttcttgggggtatgatggggatgggtacagagaggagagggggctcctgtggantcacaggaggctcaggtgggctcacctcgatttgcgagtgcacccacttagcgtgcacagagctagcgcctgctgtctgccaggccccgtgctggaaatctttccacttccaaagagcaaaagcaaacaggctgtgtgaccttcggtcagtcccctcccctctttgagcctcagtttctctgtctgcagattnggggttggataatgagctctcagagggccctttggtttcaagagccattngaagatgctggaaggaagcaagctgaggccctggggacccttagatttactattgccatctgaggggtctacccatcatcccagagcttgtgatcttggagcctggggncaacccctgctacactgtttcctagctggaggtccctggcagagtcccttcatctctctgtgcctcggttatcacatccaattggcaataagaaaagaagggaggctgggcgcggtggctcacgcctgtaatcccaacactttgggaggccaaggcaggtggatcacctgaggtcaggagttccagaccagcctgaccaacatggcgaaaccctgtctgtactaaaaatacaaaattagccaggcatagtatcgcatgcctgtaatcccagctactcaggaggctgaggcaggagaatcgcttgaacccaggaggcagaggttacagtgagtcgagattgcaccattgcactccagactggacaacagtgcgagactctgtctcaaaaaaaaaaaaaaaaaaagaaaaaaagaaagaaagaaaagaaaggagcagggaggtagagccctctgtaccctccatcaccagaaaaagctgaagaggggctgagtaggagggacagatgctggccagggcacaggttttgaagcataaaactcttgccctgtttgctgactcgttgagacagggtgcccagaaggggatagacttccctggggcgtggggagagcaggaggctcaagtgagatgctcttggtgctagaaaccgccctccctcatgcctggggtctctccctgccaggaccctgccccgcttaggctctgccctgtctcatcccagcccaacagcatggtggtggaacaccccgagttcctcaaggcagggaaggagcctggcctgcagatctggcgtgtggagaagttcgatctggtgcccgtgcccaccaacctttatggagacttcttcacgggcgacgcctacgtcatcctgaagacagtgcagctgaggaacggaaatctgcagtatgacctccactactggctgggtgaggctggccctgcccagcnccctgccccagcccccanttctgaacagtgcagacctttggggcatggtccccagggagggaactgattattgagcacctagtatgtgctgggcccttgactggtggttcatgccctgagacgctagagccagcctggccaagttcacancccccactctgcccctaacccatgttctgtcctttggcaagtcacttnagtgtccctgtggagtggacatgatgatagctctgcactacctcacaggaatgttgtgagcgttaaacaccttactgtgacactcagaactgtgggtgaattggagaccctggacctctccacaacttccctggcccagctccaggcactccccagtttgcccttgagtcaggagcccggagtccctgccacacctctgccgtgggatgctataagttctgcccccttgctgagcctcagtttcctaatctgtgaattgatctgatgctcccagtcctgagtttacgctcaggagggctgagaatgaacataagggaatgtgacagagctgggaggacgcttagagaaaaatgaggtccatcgtcctgttatacagatggattaactgaggctcacagaaggcaagggctttctcagcttctacagctaggtcagggcagtgctggggttcctcctccacctcctcttcctcaggggtnctgggatacttctggaaagccaggctcatattgctctngatgntcccgtaggcaatgagtgcagccaggatgagagcggggcggccgccatctttaccgtgc

SEQ ID NO: 2608 - DNA, 772 bp, Homo sapiens
aggtcctattctgggcctctctgagaaaaagtgtccctgaaaagaaagggagctcccacttccatggacccttagccatgccaaggggcagtaccggctttctgctggtgctgatgagctgtggtgtgaactcacgaaggtcagctgattcacgggccctggatctctgctctccttccgctaagtgggactcgggccagcctgccatgaaggaggtagctgctgcagctttcaggaaggaacaccaggtgtcaaccccaccgggtggccaaccccacctggctaggacccagtccctggtggctgctctcccgagaggcgggcagggctggggctaggggctgtccaggagtgttctggactgtcccttcgccacaattcccacaggctgctcaggaccgaggctgagacgggcgaccaggacgggattgtatggctgcaggaggctacacagtcccaggaggctgcttctaagaggcccacgtggcctgcatggggatgcgcctggctgtccagcatgtggtcatttgaattgtacatgtttcactgggatgcctacagaaaagtagacagaagatgtggaaaaagtttttgaaatgttgcaaacttagctacttttaaaataaaaaaaatagctttataattataaaagcaatatgtaaatcttaaaataatttgctacattctagtaagcatcttatgatctctatgtgccctataacattatgttgtatagtttaaatatatacaataaaatctattttaaaaaata

SEQ ID NO: 2609 - DNA, 363 bp, Homo sapiens
caagattatgccgacatggctgttagaagacaagacaaattagcagactcatgctcatttctgtcattgaacaattcgtctcattccttcctcaaggcgctgccgttttcctgctctccgtccgtgggggtgtttgtttacacatctctcgcaagaaaagcgcttctctctggcttccctctgcctccccccctccttcctgccctctcccctgccttcccttcctccttccttctctccctccctccttttctccccgttcctttcttcccttctctctgtccttcccccttccttcctttactgatgtaacaaccttggtgtgccgtggctaagccacactccacccctgacctgcggggg

SEQ ID NO: 2610 - DNA, 104 bp, Homo sapiens
atcccagcactttgggaggccgaggcgggtggatcacgagctcaggagatcgagaccatcctggctaacacggtgaaaacccatctctattaaaaatacaaaaa

SEQ ID NO: 2611 - DNA, 1174 bp, Homo sapiens
tctcagtgtagtttttatagaaaacacaaacccagaaatgtaaaataattaatttttaaaatacatcctcaggacttacaagtccaaatcaaaataactgttatcttttagagtagtactcttaggggccaacatacccattgcagcccttcactgttgccccaaatgcatttagacctttttacattagaagtacctgatcacaggccaggcatggtggcttacgcctataatcccagcaatcccagcactttgggaggctgaggcaggcagatcacttgaggtcaggagtccaagaccagccgggccaacatggcaaaaccctatctctactaaaaatacaaaaattagttgggtgtggtggcacatgcctgtaatcctagctacttaggaggctgaggcaggagaattgcttgaacccaggaggtggaggttgcagtgagcccagattgtgccactgcactcccagcctgggccacagagtgagactcttaactcaaaaaaaaaaaaaaaaaaaaagtacctgatcacagagaaaataaattgggcagtctttcccacctgtttatttcggggtggagaaaatgggtgagaagatgagacgactgcttcggagccgctctgctggtcctctaagagaatagtgtcagtaattcattttgatcaaaagatgacgtgacccattttaatcaccactatattcaacatatgtttccaaatgactttagcttttgaaagtggattcaatttttggacatagctatcagttcgccaccattgcagatgtatgtatttttttaatgtgacatagacacttgatatgcctgccaatcacatttaccaaagagtgtcgtgcagtacagtcaagccgaagctggttggggcctagccttccttctttcaccccagctaggttgactagtcccacatttacacattctgggatgttgagtaatgagtagctaggaaattaatgtttctgaaacataagtcaagcaataaataagaaaacccagtatacatcagtgtgggtgaaattgccttccattttaatcctatgtgagatacctgaaacatgttaactctattatcaacagaatgcataaatctgatgttcttggttgatataggtataataaaggaaaaaagcattttcgggggaaatgccaagaaa

SEQ ID NO: 2612 - DNA, 619 bp, Homo sapiens
gctataatacctggcaatagaataattaagtgttgcccagggtcagaaaaacaagaatgatttgtattttaatcaataaaagcctgtagacgggagggggagtaacaaggaaacaatgtgatttattttctaagccggtgcctgtccacatatgcacagggtggcaagcagcatccagttatttccaagacttgaactctaaagtcagacagagtagggttcagatcctgggtctgccgtttagatatttgtgaccctgggaaagttatgtaatctataactgaatttcctggtgtgtaaattgatggtagtaatgcctgccctgtaggactgtcatgtaaattagatcatataggaaaagcattttaataaattcctttcctatcttatcttacaattatattgctgggataatggatcatcaaggaccaaagctaagatactagacccctgggtttttgagtgggccagatgacttggacaagttgtttaacctctctgtgttttgttttctttttgttatgtttcttctaatccaaaattgaggcaagtagattacatactgtacagagtccctttcagctttagaatcccagtaattcctagccaatgtgttcac

SEQ ID NO: 2613 - DNA, 679 bp, Homo sapiens
gttttaatacttctattactctttatcagtatatattcacaataaaataatatccatctaagaggaaatgtgctgaaatcatagtaggcaggatgtatatgttagctatagatggaggctatcggtaatggaaccagcttccagtttggggattgagggttttggaatttgcttctgtgttgttgttactgtatttcactaatattaagcaaggtgcttttgtttattattttaattctcccaaacctatagattggacattatcccaattttacaggtgagaaaactgaggctcagtgaggtaaacaacttgcccaaaattacacttctaactgacatttagatcaaattgcacttgaacgttttaaactttatttccaatgccagtgctttttgaactatggtgtactgcgtttagtgtcttaagagcttaaggaaggagaaagaaaagaatgaccataagattccttctataggaggtaatgattctgcagttaagttgcttcattgaccctaagatactcacatcctgttccttagaccctgcatactcataggtagtttcatgtcttccttttctcattctgtaaggctaacctaagcaatttaaagatctcttgtcaagggaggaaagtgttacccagtaaaacagagttctgaaaagggagcctatctgaat

SEQ ID NO: 2614 - DNA, 670 bp, Homo sapiens
agttcttttcgctgacgcggactacggcagtggatggctgaattggagcacagaggaaagctgaggtcaaggaagttaaataaatggtatctgagaacctacctctggtgatggtcatatcggtgtctccgagggtcgtactcgccccccacgtccaccacgatgtcacaggaagcgagtttttcgggatcccgggtccgcacaatctctgcatcctgcgaggtacacaggggtgaaggggctgccgggtgtcgccgggtaggggattaatgctggacttcagggaggcaggaagggtaggaagggtgcttgggctgccgggcgctatcggagtgaccctgttggcggaatgccatccaccccggaggcatgcatgcacgcagtcccagggtcacttttcgcggaccgtacccggtactccggcaggaggcgaagcagtgcgcatgccagtgcctcgtcgcagtggaaggtgccattgtgcgtcccgattcggggcggtgccatgagtttgctgcgggatcgttttgggggcgggacggactctggaccgagcatgcggtgccgggtatacaggggtggcggcggcagcagcagcgttaagaggccgcgcaggaattggtgtcccataagcagctccctgcagggaggcaggagcgccgacccggaagag

SEQ ID NO: 2615 - DNA, 3537 bp, Homo sapiens
tgtttacccaaaggtgctgagcaattgctgtttgtgtgtgtcaataaaaagacggggccatgctgctttatggttttcaaagcccttccccatatattacagcatccacttctcacaaccaccccaggatgtagacaggggaggtatcaccattcccttgtgagatgagcctgactgagggagaggatgagtgttgggcctgctataggccaggaaccctgacccgaggcccagtgctgagtgctgtgtgagcactgctcccaggcggcctgctggaaatgcatgtggggggcatctctgtcctcaggtccccaccttgtcatagagggtgcccaccatgctgtcctcttcactagtgcccagcaactgggccagcagcttgtgcccgaagtgcagatagatgagtcccgcactgctcagcttggtctgccacggcttcccaggggacagggagctcatggtctctgtgaaagacctgaggagcatagggaggtggggctgaggtgagggaccttggctagagtctccatgcattcattcaatggttaactcaatgcttcctatctgccacattttatgttttattagacattaaggataaaaaaccaagacactgtccttgctttcagattcatctgccggaggccgacaaacacaaccccctgagtactctcactagacgagacaagggaaaggaaggaagggatgaggaaagggttcagaggagagccttcaggtcagttctgaaagatgaattagtgggtgtccaccagatagacaaggggtgaaagagaaaaagcattccaagcagagagaacaacatgaatgatggctgagagacaagtgtcttgatggaacttcagcaaaggcagctcaggtgtgagaagtgaatggcaaaagaaaaagctggaagggcaggcagggccagaccatcggactttatctgtgggtaatcgaagtcattgggggattttaagcaggcaggtgcatgttacagcattgcaccagccagcatggagaacagatgcaaggagattacctgcaatggttcaggtgaataaagaaggcaagaatttgaacagcagtggggcagaaaatagagaaaagatataacagatgttagggaagcagaaactacagccatgatttctaaataccagtccatctcagaattacctagggagctccatttgttaactgacttttattattaaatattgagtaaatacaggctgggctcagtggctcacacctctaatcccaacactttgggaggccaaggcgtgatcacttgaggtcagtagtttgagaccagcctggccaacatgctgaaactctgtttctactaagaatggaaaaattagccggacatggtggcacacgcctgtagtcccagcttcttgggaagctgaggcaggagaattacttgaatctgggaggtggaggttgaagtgagctgagtgccactgcactccagcctgggcaacaatagcgaaactccatctcaaaaaaagtaaaaataaaaaaaatgaggctgggcatggtggctcacacctgcaatcctagcactttgggagactgaggcgggtggatcacctgaggttaggagttcaagaccagactggccaacatagtgaaacactgtctctcctaaaaatacaaaaattagctgggcgcctgtagtctcagctacttgggaggctgaggcaggagaatcacttgaacccagcagacggaggttgcagtgagtcgagatcacatcactgcactccagcctgggtgacagacgagactccatcttaaaaacaatttgataaaaggaagtggtcaataatgccaagtgctaaagagatcagttgagaccctttaccagctccctggtttggtgctgaggtaactggtgcccttctgccgagcagttccagagaagacactgggagagtgggcttgaggggaatgaactggaaaggaacaggtgaagccacggtcagctgttttttgaagggtggctgagaagcaagggtgagagcttaggctgtaaatattgggagggtttcttcctgacatcatttataatatgtatgctaaaaaaagaaaaaaggagagagacttaaaacatcgtaatccctctctccaagataattacttctcgtggtgtggtataattgagggagagttttatttgtacacctgtgtttcttttcaagatggaagatacttgagaagggttttaggctgtagggaaggagaggcagagacactagtggaactgtgacatgaaatcccagaggataggccaacagtggctcacacctgtaatcccagcactttgggaggccaaggcggggcagatcacaaggccaggagttcgagaccactctggccaatatgtgaaacccgtctctactaaaaatacaaaaattagccgggtgtggtggtgggtgcctgtagtcccagctactcgggaggctgagacaggagaatcgcttgaacctgggagacagaggttgcagtgagccgagatcgtgccactacactccagcttgggcgacagtgggagactccgtctcaaaaaaaaaaaaaaagaaaagaaaaaagaatcccagagaagaaagtaatagactggaaacaggacagaggattaacctccaatagaagggaagaaatttcccttagttggtaggagggagctgaggatgtttgaggtgggagactgaggaaatgctcaacttcttttgaaaagaggcagggacactcagtttgatgcggtagaggcttgagggagaagaaaaggattggaatgggctacccttgagcaagaaggatttccctttggaagggtgtaaatgaagtagaaaacttcacacatctgaactgtcaccaactgccacaatcatgtgggcccagcagttaggtgcagcagcaagggcaccagaatggattaatcacagatgggtttatttagttggggtgatgaagttgctgatggaaaaaaagccttggctaaggaaggagatgagataaggggcctgagggactccctgggaaccaaaggaggtcccaggccagggagatgggtgaagaacaggcagggccggaaggatgatgtagtcctagtgggagtttgatttcagtgatgaagcagttcttttcgctgacgcggactacggcagtggatggctgaattggagcacagaggaaagctgaggtcaaggaagttaaataaatggtatctgagaacctacctctggtgatggtcatatcggtgtctccgagggtcgtactcgccccccacgtccaccacgatgtcacaggaagcgagtttttcgggatcccgggtccgcacaatctctgcatcctgcgaggtacacaggggtgaaggggctgccgggtgtcgccgggtaggggattaatgctggacttcagggaggcaggaagggtaggaagggtgcttgggctgccgggcgctatcggagtgaccctgttggcggaatgccatccaccccggaggcatgcatgcacgcagtcccagggtca

SEQ ID NO: 2616 - DNA, 3361 bp, Homo sapiens
accaacattctgcccagctggcacatttattggcattaaaacacaagacccttcccatcaccaggaagccacgcccaaagggtgtccctctgccccatttctgcaaaaactctcaggccttagcagtagcctgagctgcccccagggctgtgagctgctgaatcttctgactcatcatttccatgacggctgtggaaaaaaataagagtcaaaggttagaagcaaaaaggagaacctagagttaaggagaagtgacaggcaagtttaaggacaggcgaccgactaactacagtttgttaataaccctttttttttttttttgagacagaatcctgctcttgtcaccgaggctggagtgcagtggcacgatcttggctccttgctacctctgcctcccgggctcaagcaattctctgtctcatcctccctagtagctgggattacaggcacccaccaccacacctggctaatttttgtatttttagtagaaatggggtttcaccatcttggccaggctgggcttgaactcctgacctcgtgatccacctgcctcagcctcccaaagtgctgggattacaggcgtcagccactgcgcctggcattgttaataaaactttaactcagtgatcccctgtggggtccctaacccaaatttagggtctacaatgcatcggtcaatatgctaacacagctgggtgtggtgagaatgagactcttctcggaaaaaaaaaaaacctgctaaccaaagatataaaaacgaacacaatatggtattaaatgagtctgacataatcagaaaactatgatggggaaagatttttacctttggaacactggttctgaatcctgattataacagaggggagcttttttaaaaaaaaacagaccttggtacaacttcccctcctttgacttccaagttgatttagtcaatctggaatgggcccaagctttctttttaaacttcctgagtgattctcatgtgcagtcggggttataattgctggtatttagttcgtttggatcatgattccttcctgtgtgttcatctcattcccccattccatcgtcattaaataggagctccaccaaagcacaaacatgatttccttcctctaaatttctcaaacgctcaacccaggaatctacagatagtgattatgcaatacacagattctaaagatgccaaagagaaactaagacatagttttactccagcaaaggggacacccccgtggttcacactgcaatccatgttccttattatggagatagggtcaagaggtgccccaggaaaaacttaccctgtttcatggcgtgcttctcctgaagagctggttggattttctccatctgcttggttagaaaatctatcttcctcttgaagaagtccttggcatcctcagctgtctacaagatcagaggtgaataaggggctaaaaggagactccctctggccatgctgcgctctagagcttcccctgaatttcccttccctgtttagaggggcatccacatgctctcactcaccttctctacatagtacccagttcccacatcgatgagcacgtgttccacatcatgcagcttcccagggacatacatctgagaagcaagaattaagggaaaaactagccagcccagcatgagccatgattccgccagccagcctgcttggcctccaaagaccctctttttccaaaaagctacaaggcataaggactgaataatctggaggccttagaacaatacctataactccaaatggaaagaagacagagaagttggttctttaaggagaaaatgatgtatgctggaacaccctcttgtcctgcctcatcccatctctcactctctaagcagttcttgcaattcttcccattagcccctccagaaagactagacatgttttcctactgttgtagagtactacaagtaaaaagccagcctcatttcccttaatgccctcaatcatgaagtagctaattcctgacaaagtcaatgttttgtttgttttttgctttctgagacagagtctcgctctatcgcccaggttggagtgcaattgcccgctatcggctcactgcaacctctgcctctcgggttaaagcaattctcctgtctcagtcgccggagtagctgggattacaagcatgtgccaccacgcctggctaatttttgtatatttagtaaagacagggtttcaccatgttggccagaccgatctctaactcctgacctcaggtgatctgccagccttggcctcccaaagtgctgggattacaggcgtgaaccactgtgcctggctaatttttttttttaaaccattccctactacacactactattcctgtgttccttttagcctgtcagttctgagactacagattaaagatgccctactgccataacttgctcattcaaataaaacactgaacaagtgaacacaatccaggtttcttagtgacagtttagaaatgagccacaattaagctgaagttgaagattaacagagccaagctccctgtttctatatcctcctatttttgtctattgcctgtatcttctaagatattagcaaagtgtaaaccaccagctttatctccatattaatgttctcaaacagcaaagggaaatattacatctcaactatacatactccttggtgttcacaagacattagctggatgttggtgtgaagtcagataaaagagctacaaagtgtgtaataagagtattcttggccgggggcagtggctcacgcctgtaatgtaatcctagcactttgggaggccgaggcaggcggatcacgaggtcaggagttcgagactagcctggccaatatggtgaaacccccaactctactattaatacaaaaattagccggtcgtggtggcgcgtacctaaagtcccagctactcgggagactgaggcagaagaatctcttgaactcgggaggcggaggttgcagtaagccaagatctcaccattgcgctccagcctgggcgacagagcgaaattccgtctcaaaaaagaaagaaaaaaaaaaagggtatcctcaaaatcattgtgaggagagggtaatctgaagtaatcaaaacaatccccctccccgctttttgggggagtgaaggagaaagggagaaggcagcaggtagccgttcctgtggaaaggatacagaactcgtcagtgggacgagtaattctttccctgtgaaagcaatgaagacaaacacctggggaaggttagcggctccaacgtaagacgttaaagagagttccaacagggcacagcacccacagacagtgtgaaaagaacggaaacaggggcaataggagcagaggaatgtcctgtactttt

SEQ ID NO: 2617 - DNA, 311 bp, Homo sapiens
aactgatgggccgggtgcagtggctcagacctgtaatcccagcactttgggaggctgaggtgggcagatcacgaggtcaggagatcaagaccatcctggctaacacggtgaaaccccacctctactaaaaatacaaaaaattagccgggcatggtgatgggcgcctgtagtcccagctactcgggaggctgaggcaggagaatggcgtgaacccgggaggcggagcttgcagtgagccaagattgcgccactgcactccagcctgggcgacagagcaagactccatctcaaaacaaaaaacaacaaaaaaa

SEQ ID NO: 2618 - DNA, 718 bp, Homo sapiens
ccagcctgggcaaaagagcgagaccctgtgtctcagaaaaagagagagagaaacagagagcaaggagcaggtgggttataatggagtccctgcaccaagcagagcctgatgcccgcccttgctctgaacttcctagttatgtgaaccaaccaccaggccagttgggttgggtttccagccctgtgctcttgtctgtcctcactgacagacaaaaataactcatcagtcggttctcagacccacagtcccatgacatttcttgactgtttcagaagtaatgcctcaaggaccagcttgcagaaagtggaggacctgccccctggaccttacaagtagcaggccactcttaaaaatgcaaggaccacagatgtcaccatgactgaaaaatagaggctggccctgcctctgaagatgctgcaatggacttgtgttcaaggagaaattggctgtaacttcccttattgagatataatcgggctcatcgttaagctgtggtcagccagaagtgtagctgtgcccctgggattgaaatcagcaatcaatctggacatcctttttctatcttcatgaggcacctccccagtaccaaccaaatttcttggggatcccccgggacttctcataaatggaattgatttgaactcaggaaaccctcaaataggccagaacaactcactaattaaattcatcccctcccaaaaacaaaaacaaaaacaaa

SEQ ID NO: 2619 - DNA, 1248 bp, Homo sapiens
cccaattaaaaattctttttaaaaaaaccaatttaaaaataaaggcaaataacctaatttttatataactcaaagtttttaaagaaacaaaccaatttaaaagttccaaaggatttgaataaacgtttttccaaagaagatatgtaaatagccaataaacgcataaaaacgtgcataacaccattagctattaggaaaaggcaaatcaaaaccacagtaaaaagcagcttcaaagccactacatggttgtggtcaaagagaccacaaataacaaattggaatctttatacatagctggtgggaatgtaaaatggtgcagctgctttggaaaacagtttcacaagttttcaaaaggttagacctaccatataacctagcaactctactcatatttatatgtcagctacaaataaaaacattaagttcaccaaaatatttacacatgaaagttcatagcatcattattaaaatcagaaaaaaatatattaaaaaaaacctcaaatgtccatcaactgacgaatggataatcaagatatagtgttagtctattcatacaatggaaaatgaacgggcataaaagagaatgacatgacccgtgctacaatgtggagcaatcttgaaaatgtgctaagtgaaagaagccagcaagccatgctgaaacaagtcagcattcatacaatatgattcaatttatatgaaatacccagaacagaaaaatgtatagagacaggctgtagattagtggttgtctagggctgggggcaatagaaggcagagtgactgctaataggaagtttccttggagggatcatgaaaatgttctaaaatcagattatacgtccatttgcacaattttgtgaatatactcggaaccactgaattgtatactttaagtgggtgaggtatgtgaaaattaaatgtcagtaaagctgtttaaaaaagtttcatcccaaagctacattttacctaaggcaaatgtttactaccgcttctctttcagtcccaaataatttccagccatatgttccagtcaagcctcgacaaaattaaacaacaccacaacttactccagttacaagccaatgtgcaaatgccccaaacttgaccataaatttaccacccaacccccatcgtctcattcccaggaaaaactaaacacaagatcaactccccttgcaagttgaagtcctgacattgaagtctaaagaaatcacagcccacaataaaattcttaaagtgtacaaacaa

SEQ ID NO: 2620 - DNA, 1283 bp, Homo sapiens
ttcacaacttaatcacctcccaaaggctccatctcttaatacgatcacattggggattaggtttcaacataccaattttgggggtacacaaatattgaggtgatagacacttccaggcttttgccaaacattagtaaacaatttccagtgaatactctgccccattctctcctactcaagcagagtatcttaaggcagcagattggagtgacgttactttaagggtaactttgaagccaatctaattcatactcaaaaaagtattccaaaattttggtactctattatgggttacaaaccccttgtgacaccatatttaagagccactgctattgaggcttgcactctcttgcttgaaatgaggtgctcccaaacctgggagatggctcccaaagaacaagagaatcaaccccatcgtgcatttatgtgctgccccaggtaatccacaggcacaaagaacttgagcttcctggtgtgttcttcagaaaaaaaggaattcaaaaagcaaatgtaaaatggaacagaacttggcctcaaagtgatgttggaaaaatagccagtcctgatgacttggtcgaggtaacttgctttgcccactgttaactacagagccatatgataatggaacatcaaggttttccagataaacccaaagccttttgtgtctataccttgtaacctgtcatgttcatcaacgttttagactgtaccattgctctttctcccttctttattcattttatatggggacgtttgactaggatcaccagatgtagatttggtaatttttccataccattaagatgtatgataatggattttattaatttaacacaaatgcataaaaatatgatgtaataagaaacaatcctgaaattattaaaacatttctttgtccttacttaaacctaacctgccattttaaaagacacctaactctataaacaaatgggccattacagacgtaaaacaaatattattcagtgaaatttattcaaggacttaaaatgattgaaggcattaggaacataaaaatgcataagatcctcttttaaatcccaatattccctaaccactggtttataaaaaatactctaaggtttatagaattagtttggttccgttagttgatcaagttacttacactaagtcagcaattcaaaacaaataattccctctgtgtgtgtttgtttgcttgcaaatatgtttcattttaaagtgtctttttatatagaaagccaagttggtggaatttatcttgtcattaaaatgatgtgaaaatc

SEQ ID NO: 2621 - DNA, 309 bp, Homo sapiens
ttctttttttttttttttttttttttttgagacggagtctcgctgtcgcccaggttggagtgcagtggcgcgatctcggctcactgcaggctccgcctcccgggttcccgccattctcctgcctcagccttttgagtagctgggactacaggcgcccgccacctcgcccggctaattttctgtatttttagtagagatggggtttcaccgtgttagccaggatggtctcgatctcctgacctcgtgatccgcccacctcggcctcccaaagtgctgggattacaggcgtgagccaccgcgcccagccga

SEQ ID NO: 2622 - DNA, 3379 bp, Homo sapiens
ccagcccggaggcgggaaggacaacttggacccgcagttccgccggaagtggccccagcctcgaggccgggcgtcttcggtcatctccggcgcttctagggctggttcccgtcatcttcgggagccgtggaggtacgaacttaagacatgcctattttattaatttacttccaaacgcaacgaaaggtccatggacaatttgtgggccatttaattcagggcccccaattcgtacgtggagaagtgggaatgcaaaagtactttgacctttaaccttcggtccggcgcggtggagggaaacgcctccgtctctatataaggaattttccggtctcttcgggtcctttttcctctcttcagcgtggggcgcccacaatttgcgcgctctctttctgctgctccccagctctcggatacagccgacaccatgggtttcggagacctgaaaagccctgccggcctccaggtgctcaacgattacctggcggacaagagctacatcgaggggtgagcggacgggctgagtcggggtggcggggaggtttctccgcccggggccggggccacgtggcgcagcgtgtcggctgccgcgggagggagggaggccgggccccggggccctttcgagagggaggggaaagcgccccgttgccgtctcccaaggccctcgtgtggggcgagcccggcctccggggagcggttcacgagcaaggaaaggttaaaatgtgctttatttacacttaattcagccaggtgtttccgcatcgctgcccagttaatacatgttaagctgtagatagagcaacgccagacattgcagtatttgaggtctacttagtggcagacatttctcaggatagcgcggtgacccaaacatatggtttgatttgaaggagctaataagaaaagaaaagcattaaagcaaccctgctggggttagtgcccactaattaatgtgatgcatacggtatttattatttattcgctggcgtttgtttttcaaaggtgtgtgtgaatgtttctgtgtccttggcaggtatgtgccatcacaagcagatgtggcagtatttgaagccgtgtccagcccaccgcctgccgacttgtgtcatgccctacgttggtataatcacatcaagtcttacgaaaaggaaaaggccaggtaaaatcatctttgtatagagctgaagaataagactgctctcgaagtttatcaggatgttcacatgacaaaactggacccaggctactttagttttgttgggatattgtaagctaaatttttctgtaaccttagaaggccaagagactgaagccctccattttttcacagaacaggtagaacatggacagcagcaattcaacttttccccacactgccctgccaatgtgcctcgaccttgacctggggggcccacctctggggtgagagggtggctcattcattcagtccttggccattcttctgaaactgccaacaagggtggaagtttggggaagtggactccagttcactaagaatggaactgagcatacttaatgaaatctcaaacagaaatgttcatactgaaagagtaaatcatagtgagtattgaaaataatgtctcacatggtactaatgcttgtcgggtgaggagttgaacatatgacagtgtttacctgggcgcatgtgaaagggtaaattatgattgcaaaagggatctagtgataagtagtgattaaaacaagttattttgtattttctggaaaaggatgttatactagctcaatagtggttgaatttaaatgtttttcaagcctgccaggagtgaagaaagctttgggcaaatatggtcctgccgatgtggaagacactacaggaagtggagctacagatagtaaagatgatgatgacattgacctctttggatctgatgatgaggaggtatggcgtcttctataaagaacatatcggccaggcgcagtggctcatgcctgtaatcccagcatgttgggaggctgaggcgggtggatcacgaggtcaggagttgaagaccagcctggccaagatggtgaaaccctgtctgtactaaaaatacaaaaaaatgtggcaggcatctgtaatcccagctactcaggcggctaaggcagagaattgcttgaacctaggaagcggaggttgcagtgagccaagatcgtgccactgcatccagcctgggcgacagagcgagactccgtcccaaaaaaaaaaaaaaagaatacatcgatcagcaattgtatcaatgtggttaagccaaattgcctggatttgaatcctggctttaatttatatgcctttttcaaattctgactggttgcatgatgaataaaatcaaatcaccatctttcggctgagttcgtgatggatttgcttttttctgattaagccagtcttttttgtgatgaccccactagctttaagcagaggaacaaccagctttctgaagtggattaattttttttctttacaggaaagtgaagaagcaaagaggctaagggaagaacgtcttgcacaatatgaatcaaagaaagccaaaagtaggtcatttgtttttaacttcatttcatgttaatgtaagtaatctttttcaaagcttgaccttgaagtaatttcctccacattccttgaataggtcaatattttaaaacctgtacaggttcttccacagctactggtctgcagctgttcttatggtagcagttgtggcattcctctgtgggaaagaaactgttaacacaaacacctctttcttagcaaaacagaaagtgggtatatatgtgtgacagacacaagatgtatctgtagttttgtttggctaaggagatagtctcaaaacaaattgagatggatttgtttgtgtcttggagtagggtgaaaaaaatacaattcattatttgaataatgctgtttattgtttttagaacctgcacttgttgccaagtcttccatcttactagatgtgaaaccttgggatgatgagacagatatggcgaaattagaggagtgcgtcagaagcattcaagcagacggcttagtctggggctcatgtgagtttaggctttgcctttttttttttgaaactaacatctggaatttgcctacagtttcaacctttcctacaagacttttctaactaggatttttcttaatgctctttttagctaaactagttccagtgggatacggaattaagaaacttcaaatacagtgtgtagttgaagatgataaagttggaacagatatgctggaggagcagatcactgcttttgaggactatgtgcagtccatggatgtggctgctttcaacaagatctaaaatccatcctggatcatggcatttaaataaaagattgaaagattacc

SEQ ID NO: 2623 - DNA, 32193 bp, Homo sapiens
tgtaaaatttttacttccttttttatttttttaaattctcagtgatccttattctgattccttttggttttgacaattaaaaattatgaaagctggttgttttgtctcctattgctgaaataatttagttgatttaacactacagatggtgttaggataatgaatacagaacatcaatgagaatctaaattatatctcttgagacctccctcattccaagggaggtctcataagtatacatgcatacatgtataacttataaaaaaaaaaaagccacataaatcaccatgacattatagaagcagattcaagagaaaatagaaaaatgtgttcaccattaaactcaatactaatttttagaagtaacaacctatagaatcaacattaatgagacgaaataatatgttgcagttaagaacaacaggctttggagtaaataagaagtaggtttgagttggtgacttttgctgtgtggccttgggcaagctatttaatatacctaggcttcagtcttcatcagtaaaatgagataatactactatctcacagggttgtagcaagaacaaaagaagataatgcatgtaaaaccagagtgcttagcacatataataaagctaaattatcattagccattgttactatgattattattaattataattatcctagatacatatctgagcatgattatgtatttttcctatttacccagcttgacaaggtgcttaaatcttttctttagcactagaaaaaagtaggttttaattgaacctcttttcatttcatccattttacagacaaattatttatgaagataagccaacaactcataatttaaggatctctttatgttcgtcacaaaggttatcaatgcttttaagagcatctgcatagttttgttatttaacctttacacacaatacatgtttttcaaactgcaaagttgataactaatatcattttcaaataggcatagtataaccttaaatattacatgattcaaattattattatttttttttacaaagaaataaacctgtaaaggatcactgcactacagttgtccattaattatctgcggcaaaactgggatcctagtagaagcttcagcatatggatggttcctctactgcctgggcaccctctgtgacagctttgacacatttggccattgtctgtgaggctctgctaattgaatctgaaagatattaagaaaatgtcattttgataatacaactttttaaaaagcacatactaaaactttaatggtgcacatattcaggaggaaaaaagattataaggccctatgcaagtatatataattatatgtaaccaacagattccaacgataaaccccttactggccacatgctttcaataactatccctggaaacaatcaaataactatagagcagctagacagtgcaccagtatgcagccattaaaaaattatagaaaagtattaaaaacataggaaaggccaggcgcggtggctcacacctgtaatcccagcactttgggaggccgaggcaggtggatcacgaggtcaggagattgagaccatcctggctaacacagtgaaaccccatctctactaaaaatacaaaaaattagccaggtgttgtggcatatgcctgtagtcccagctactcgggagtctgaggcaggagaatcgtgtgaacctaggaggcggagcttgcagtgagccgagatcacaccactgcaatctagcctgggcgacagagcaagactcttgtctcaaaaaaataaataaataaataaatataggaaaaatgtgtacaatactattattgaaaaaggttacaaaacagcatatgtactaaaatacattgaattgtccacttcatgagtaaattttagggtacatgaattatatttcaataaagctatcaacccccaagtgaataatctcacttttttttttttaaagagaccagatctgactatgttgcccaggctggtctgaaactcctggattcaagccatctgcccccctcagcctcccaaaatgctggaattacaggcatgagccactgcaccaggcctaatctcaccttctgtttcactaaaaaatatataggccaggggtggtggctcacatctgtagtcccagcactttgggaggctgaggtgggtggactgcttgagtccaggagtttgagatctgcctgggtaacatggcgaaaccccatctctacaaaaaatacaaaaattagctggatgtggtggtatgcgcctatagtcctagctaccgaggaggctgaggtgggaggatcacttcagctcaggaggcagaggttgcagcaagccaagattgtgccactgcacttcagcctgggtgacagagtaaaatctcatctcaaaaattatacacacacacacacacacacacgtacatgtaaacagtaataattacatataaataacaatagttaattaatataatatatatgtgtataatgcatatgtatgtccctggaggaagagtgactaaaatgttaaaaataattatagttatttcttgatagtgggagggtagtgatttttctttttttaaaaaaaaaaaaacttttaggttcaggggtacatgtgaaggctttttacaccagtaaactcatgtcacagggatttgttgtacagaatacttcatcaccgaggaattaagcccagtacccaagacttatcttttctgcacctctccctcctcccactctccactctcaagtagactacagtgtctgttgtttccttctttgtgttcataagttcgcagataaataccatagaagtgattttttgttgtgcttttgagcataggtattattttacaatgaaggtaatctttattatctaactaaaatacttatttaaaaaatcttagatacaaactatataaaaaaattaagagttctatgtgcttttagatagaaaattagtcaaaataatctatcaactattaactacctcataacctagatgttgtatcaactgttctaagaatctgcaataaacaagtttcagtttgtctgcattccttaaaaacattcctaacaatttacatcagaagcactgtttaacatgtttcacatttaaatgttttgattcttccacctataattctcagaaaaacctgcagttatttgccactttggaaaattcaccataaattgctacacagtgactttccttacaacagcaaaattttatatttaaaatctattaattgcttggattttcaaactttgcttacatttcagaaacaaaaaaactagagtagaatcagaaaatatgcttacgttagttccaatgtttgaaaaccttcaaagattaagaattgcaaacactatcaatcacaaattggaattataacaccaaatgaggtgatctgattacttcttacctttcgtatttggcagagtcatgttgacaattacatacctgtcatgtagaagtcttttatagttagctgaggtggaacaagtgggtcagcaagaagctgctggttcactagctgcacaaaaaagaagagatcaacaataatatggaaaactagtactgttacaccagtagatacaacattatgaaaactgctcataggcgagctgttacctttgagagctcatttgcttgctggaagtaattagccccttcaatatcatcatatcgaacaagattaggagagacttcttccaatctgttccttacttgatccagagtatcatatggaagagtcattccagcaatctacaacatgtcaggtccccaaaaacaacaaaaagctttaatacttaaaaatatcaaataatagataattgtaactatggtgaaataatgcagcactactgaaaaacctattggtgtccattagtagacatacatttatgaaggaagcagttaagcagggaacacaaatatcaaaaattctaattcattcacagctgtcagtacattagtgactctatgaaatgaagagacaatactatgctaaatccaaatgtttttgctaacctgttattaaaatacataaagtttacaatgtgttattattttaaaagtcaggatgcttacttttacatcaataaagagctaacagatgtattttcaggcaaaagacaagtcaacaattttcaacaataaaagcaccaatttcaggccaggtgcagtggctcacacctgtaatcccagcacttcgggagaccgaggtgggaggactgcttgaggcccaggagttcaagaccagcctggccaacatggcgaaaccccatctctactaaaaatataaaaattagccaggcttggtggtacatgcgtgtaatcccagttactcaggaagcttgcgcccgggaggtggaggttgcagtaagctgagatcacgccactgcactccagcctgggcaacagagaaaaactctgtctcaaaaataaataaaataaaataaaagcaccaatttcaagttcctttattttttaagagacagggtcttgctctgtccctcaggctggagtgcagcggtgcaatgagagctcactgtaaccttgaattcctgtttctgaatacatgttttctatagaaattattcaaatcatctctgcatttcagactggcatcttccttgactttgaaaatcattctaacaggctaaaatatcaaatatgcctttagtagcatcactaagaaatgactcagaaattatacctcagagagtgctcttataattttccagtcttctcttgccaagccaggaggtgtcactgctaccttagtctgctgagctctaccctcagtgttgacatatgtagcagacttctctgtgtaagcagctcctgggagaataacatcagctatgggagccccaacatcaccatgatgtcctgcacaaagatggaaaatggtaaaccaaaattttattaaaaactgattttctactgtacatgaagatagtatatatcattttaaatcccattttgtaaagtcacaaaagtttttaaaactaaaatgaaacagtagtgaagtaataaaaattaaagcccacctcaaccctaattcaactcccttcccaaagaaaattattattatttttttgagatggagtctcgctctgtcgcccaggctggagtgcagtggtgcaatcttggctcacagcaagctctgcctcctgggttcatgccattcttctgtctcagcctcccaagtagctgggactacaggtgcctgccaccacactcagctaattttttgtatttttagtagagacagggtttcaccgtgtttagccaggatggtcttgatctcctgaccttgtgatccacccgcctcagcctcccaaagtgctgggattacaggcatgagccaccgcgcccggccccaaagaaaattattgttaaagcatttgggggccaggtgtggtggctcatgcctgtgatcccagcactttgggaggccaaggtggacagatgacttgaggccaggagtttgtgtccagcctggccaacatggcaaaactgcatctctactaaaaatacaaaaaaattagcccaatgtggtggtgtgtgcctgtaatcccagctactcaagagggctgaggcatgagaatcgtttgaacccgtgaggctggggctgcagtgagccgagatcacaccactgcactccagcctgggtgacagagtgagactctatctcaaaaaaaaaaattttttttttaaagaaaaaaaagtatcttctcagactattttatgcaaatacaaatatgtataatataatacacacatataaaatagccaagtaagtatactgatgcttacaaagtagaactgctcagatgtaccagtttgtgaaatttggtaaagtagactgaaatgggggaggatgcaaagacaggaatatgacagtaatactgaaaaaggcataaacgaaaaactacagaaaaatttggaaacactgccacccattaataacaactggcagaagaaaaaagttattcagaaaagaagacctttagaaacatctgaatcaagtgtaagaaaatcgtagaataatatatagtttaatataatttgtgcacatttgtatatgcgtatgaagatgttatgaagtacgcatatcaaaactcaacaatgattatttcttaaaggactaaaaacaggattttagtttattttgtttttaattttattaaaaataacattttttattgctctgtcacccaggctggagtgcagtgacgtgatcatggctcattgcagcctcaaactcctgaactcaagtgatcctcccacctcagcctcctaagtagctgggatcacagacatgcagcaacacgcctagctaatttttaaattttttgtagaaacagggtctccctatgttgcccagactggtctagaactcctaggctcaacaaatcctcctgcctcagcctctcaaagtggtgggattacagcatgagccacggcacccaaggaacaggatttagttcatatattttggtttaactttttttttttttttgagagggaatgtcactcttattgcctaggctggagtacaatggcatgatcttggctcactgcaacctctgcctcccaggttcaagtgattctcctgtcttagcctcccgagtagctgggattacaggcgcccgccaccacgctcggctaatttttatgtttttagtacagacagggttttaccatgttggtcaggctggtcttgaactcctgacctcaggtgatccacccgcactggcctcccaaagtgctgggattacaggtgtgagccaccgcacccggcaggtaataattcttaaaagcagtatcaattatgtaactaataacacttgtggtttgtttaaaaaaaaaggaggaggagtgggggaggcaaaattctcaaatggaaaacattcagttcactaaatatattactaaatggtttctaacatacataatgtactactctcttttgtttctggtgtcacaggtgatacttaccttgataaataatgaaacaatcctttggcaaatcctgtcgtgtgatacaacctccatctgctcccaggagaaacagcaccttgggagggttcttccgaattgcttccaccccaggcttatagccaaggtccaaagcagctacttgacttgcaatcctgcaaagcaattatggaattttaccataactgcagtattttcaatgtaaaaaattaaatgtgatttttggaataatttcctttcaacaatgtcaaaaaacccattttattttattttatttttttctcggcgatagagtctcactttgtcgcccaggctggagcgcagtggcgtgatctcggctcactgtaacctctgcctcctggattcaagcgattctccttcttcagcctcccaagtagctgggactacaggcacatgccaccacacccggctaatttttgtattttcagtagagatggggtttcaccatgttggccaggctggtcttgaactcttgacctcaggtgatccacctgtcttggcctcccaaagtgctgggattacgggtgtgagccaccacacctggccaaaaaatcccattcttacccatttaaaatagatgctaaaaccagaaacagcagtcttttactgttttgagaatggcaaccaaagaaatgtcagattcttaggacgctctgtctctccatgacatagtattgaatgaaataattctagaaattttatgccaactgtaattgctttaagtctgattcttattcaataaagtaagacataaaacatgataagtcatatatattcaaagaagaaaaatcagattatttcaaaaatgaaaagggagaaattgaaaaccactcattaaactgtaattcagcaaaaaccataatgagaaaaccaaaaccttatagaaattttttctacgaatatatattactcttataagcacaaaataatcttttaaagaagaggtctggaataaatatactttgaatagcagggttgttgttttggtttagcttggtatttgttaactatctagaaatagtagccattctgaggacctaaaacaagttggaagcatgcttcgaaaggctcagaaatggttatcctgtgtgccccaatagttctacttttagaaatatatcctaagaagataatttcaagtgcaaaggtatctgtgaatcactgtattatttaagaagttaaaaactaccatcaacatacatgttaaaaagaagaaaatggctaaaaaaatttatagtatattcatgatatcaattagccattaacatttttatttacaaacaatttctagaaaaaaatttctgaccatagtaggaaattctcatttggcaatgaaaacctattgaaaccaggacacaaaattgtattcacagtataatttcacctatgtaactaaaaaatattacacagctgtgaggtgaagtggctcgtatctgtaatcccagcactttgggaggccgagggtggcagatcacctgaggtcaggagtttgagaccagcctggcgaacatggtgaaatcccatctctactaaaaacaaaaaaattaggccgggcgtggtggctcacacctgtaatcccagcactttggaaggctgaggtgggcagatcgcctgaggtcaggagatcgagaccatcctggctaacacggtgaaacccagtctctactaaaaatacaaaaaattagcctggcatagtggcacgcgcctgtagtcccagctactcaggaggctgaggcaggagaattgcttgaacttcagggatggaggttgcagtgagccgagatcgtgccactgtgctccagcctgggtgacagagcaatacttcatctcaaaaataataataataataataataaaataaaaaaattagccaggtgtggtggcacatgccaatagtcccagcttacttgggaggctgaggcaggaggatcgcttgaacctgggagggggaggctgcagtaagccaagatcatgccactgtacttcagattgggcaacagagtgagactctggtctcaaaaaaataaaataaaatattacgcagggtaaagaaaaaaactagaagaaaatgcatgaaaatagtaataattatctacacattgtagaataaggatcagttccatttctgcacatatctgtctcttttcaacttacctaaattaaacctgcattattgatatggtttgaaataaaggctaggtgcagtggctcacgcttataatcccagcagtttgggaggctgaggcagaagtatcgcctgagcccaggagtttgagatcaacctgggcaacatagtgagactttatctctacaaaaacaaaaaattagctgggcatgtggcatgcgcctgtagcttcagccatttaatacttgggaggcaggggtgggaggatcgctggagctcaggaagtcagggctgcagtggactatgatcatgccactgtactgagaccctgtctcaaaacaaaaagccaaataattaaaaagaaaaaaaaagaaagaaagaaatcctttagctgaattctcatattagcttacatttttatcatttaattaaagaacttgttgcaatttttgaaccaaggtgtaactaatataacaatttttatagtacttcactttttttctcaacactcactgttatttcaaatattttaaatattccttatcatctcgggctcttctcacacagagtaaaggtctatatttcacatgtgtaactgggataatgttgctaaatgttgtttgtaaattaaatttaacagtgtatcaggaacacatacatatacacaacattacttgaatttatagtatataaagcaattactcaacaaacctatgaaggatattcataactttccaatcaccagtaacaccactagtcatccgaatcttttgtgcaatgctagaaacagctgcaagaattgctgctccatcatttctttggagtgcagaactgcctaaaaccaccattggttttttagcttcctttaggacctatttaaaaaaaaaaacaactttgattttaaaatattacaagtaagctgaacaccaaaccatatttgcctctataatataggttgtcccaagtcttaggtgtaacatgaatgtcttcaatttgttagcccaacatacagacacacatatacaaccagatttagtttaatccaaagcatcttgccaatgctactgtgaaatatgcctgagtatcagctaaaacacgttttctaaaagtaattattcagaataaaaagcctagcaaattatcctgtggtcagaataactatgggcaggtcccagaaaaattggggaacttctctccagagattcagatgttaattaaagaataggaaaaactatgcttaagtatcatgcctactatcttccatctacttaccatgccacagatagggaggaggaggcagggaaagcaatgatcaccagatcacaatgttaaatacctacaattttaaggctttgttttaaaccatagtaactctaaatgacaaaaactaggagaatgcatcccaagagtaaaggaaactacaaatttcacagaagatgggcaaataagatgtaaagttataggctgggcacggtggctcacgcctgtaatcccaacactttgggaggctgaggtgggtggatcacttgaggacaggagttcgagaccagcctggccaacacggcgaaaccccgtctctactaaaaatacaaaaaaattaaccaggtgcggtgttatgtacctgtagccccagctacacaggaggctgaggcacgagaattgcttgaacctgggaggcggaggttgcagtgggccaagattgtgccactgcactccgtctgggcaacagagtgagactctgtctcaaaaacaaaacaaaacaaaacgtgtaaagttatagaatacacgtctcattctcccacccatcctttgtgtcattcttcaataaatagctggccacaatcaaagaatcagcatggaaattatgctgatatattataaagaggaatacattaatcacaagaggaatttgccaaggaaatgtgaatagttgagagaaatagtttttaatagtctcaaagacaatgaaaaataacacactctttctcacttaaaaactcaaagaagcaacactgtagagtattatatagtaaggagattttcatcattgaattcaggatagaactggaagacaaacaagtaataaataccattccagaaacaataaaaaactaaacaggccaggtgcagtggctcaggcctgtaatcgcaacactctgggaggccgaagtgggtggatgacttgagcccacaggttcaagtacagcctgggcaacgtggcaaaacctcgtctctacaaaaaattggccaggcatggtggtgtgcacctgtggtcccagtggtggctgcagtgagccaagacagcaccattgcactccagcatgggtgacagagccagaccatctcaaaaacaaaaaaaaaagacagaaaagaaagaaaacatgattaaatacaaggacaggaaagacagggtacaggatacaaaacaaatggaaaaaggaaaaaaacacagatatgaaaaaccaggcaaggttggctcatgcttgtaatcccaacactttagaaggctgaggtgggagaattgcttgaggccaggagtttgaggccagactgggcatcacaatgagccccatctatacaaaaaaatataaaaattagctgggcatggtggtgtatgcctgcagacccagctacaggggaggcttaggtgggaggactgcttaagcccaggagtttgaggctacagtcagctacaattctgccattgcactgcagcctgggcaacatagtgagaccttaaaaatacatatatagaaaagaagattcgacaactgcattgtcaagagttgtttttttttcttttgagacagggtcttactctgttgcccaggctggagtgcagtggcatgatctcggctcactgtgacctccacctcccaggttcaagctattatcttgcctcagcctcccaagtagctgagattactggcacacgccaccatgccaagcaaattggggtttttttgtattttttagtagagatagggtttcaccattttgcccaggctggtcttgctcctgacctcaggtgatttgcctgcattggcttcccaaagtgctgggattacaggtgtgagccaccacatcaagagttcttaatgaaggtaacagaattaatgaaaaatgtatttaaatctattatagaacaaaacgttctcaggccaggcacagtggctcacgcctgtaatcccagtactttgggaggccgacacgggcagatcacgaggtcaggagattgagaccatcctggccaacatggtgaaaccctgtctctactaaaaataaaaaaattagctgggcatggtggcgtgcgcctgtagtcccaggtactcgggaggctgaggcaagaatcgcttgaacctggcagactgaggttgcagtgagccgagatcatgccaccgtactgcactccagcctggggacacagcaagactctgtctcaaaaaaaaaagaaaaaagaaaaaaagaaaaggaaacgttctctcaaaatagtagtcacctatcacatggggatgggaattagagaggagaaaggaagacttttcacggaatattttttaatatttttgatcttttaatcataattttttttctattcaaaataaacaagttgtgctttgctacttcatcctcttgcacatcaccttcttccctacacctgagactgtaagtgaagcaaccatcttggaaccacaaggagaaggacacacacaatcacatgtgagcaagcaaatgcactgacgacagcaaagcaggaaggcaggctctctttgatgatatgcttggacaactgcatcagcttttttttttttttctttcttctttttgtttttttgagatggagtctcactctgtcacccaggctggagtccaatggcgcaatctcagctcactgcaacctctgcctcctgggttcaagtgattctcttgccccagcctctcaagtagctgggattacaggccactacaaccggctaatttttgtatttttttttttttaagcagaagcggggtttcaccatggtggtcaggctggtctcaaactcctgaccttgtgatccgcccgcctcagcctcccaaagtactggaattacaggcatgagccaccgcacccagcctgcatcagctttcaatgtgcctacctccagacccccttgtgtgacaaacagaaactccttagtttttagttgttggttttttttttgtttttttttttttgagatggagtctcgctctgtcgcccaggctggagtgcagtggcatgatctgagctcactgcaacctccgtcttctgggttcaagcgattctccaccctcaggctcccgagtagctgggattacaggtgcccatcaccatacccagctaatttttgtatttttagtagagacggggtttaaccatgttggccaggctggtctcgaactcctgacctcaggtgatccatacaccttggcctcccaaagtgctgggattacaggtgtgagccactgcacctggccggaaattccttagtttctttctttttttcttttttttttgagacagggtttcactcctgttgcccaggctggagtgcaatggtgcaatcttggctcaccacaacctccacctctcaggttcaagcgattctcctgcctcagcctcctgagtagctgggattatgcatgcaccaccatgcccagctaattatgtatttttaatagagacggagtttctccatgttggtcaggctggtctcaaactcccgacctcaggtgatccacccacctcagcctcccaaagtgctgggattacagatgtgagccaccatgcccggccaactccttagttttttaatcacctccaccaccacacatatattctaaaataaagagaaccttgtatctttagactgaaagtacattctgtcctatagtcttatagtgatgtcttcacctttaagacatattttggtgaagttactgaatttcaagaatgataatcagaatcccagcactttgggaggccaaggcgagtggaccacaaagtcaggagttggagaccagcctggccaatatggtgaaaccccgtctctactaaaaatacaaaaattagccaggtgtggtggtgcgtgcctgtagtcccagctactcgggaggctaaggcaggagaatgaacccgggaggcagaggttgcaatgagccaagatcgtgccactgcactccagcctgggtgacagagcgagacttcgtctccccgccaaggaaaaagaaaaaaaaagataatcaggacagggtttggggcggggcggaggaataaagtttacatgcttcttcactaacaaaaggcagtgtctataaagctcagaaaggggggaaaaaaaagtctgaccctggaatttcacatcctgacaagctgtctcttcaggaatagacattctcaagcaagcaagaactcaaggaatacaggcaaccatgagccacctttggggaaaagcaaaacaataaagccaacaacaaaatgaattaaagaaagaactcaaatgaaaaaaacatgtacctcagaaacaaaaatagaaggactggtaaaattttaaggaataactccttttgtaataaagaaagatttaaatgaagttaaaagtgcaattctttcaggtttactttgatttcttttcagataatttcaagaaaattaaactctggcaaataaaaactgcatgtacagtatgatctcatttttgtttgactattcatccatcttgctttgctctctacataaatggagagattatgatgttttatcaatacctgttttggggtggtggaattttaggtaatgttttactttcttcctcatgttcttttctgtattggtgtaagtttttttgggggtgggacagagtctcgctctgttgcccaggctggagtgcagtggcacaatcttggctcactgcaacctccgcctcctgggttcaagcaattctcctgcttcagcctcccaagtagctgatactacaggcgcacgctaactttggtttgtattttagtagagacagggtttcaccgtgttgcccagtctggtcttgaactcctgacctcaggtgatccacctgcctcggactcccaaagtgctgggattacaggcgtgagccaccgcgcccaacctggtgtaagttttaacacttacataggattattacaaaaacagttaagtttaaataataataattaaaaatcaacaagagtagatacacataagttgagagcacctggctaaatggatggcttcccgaagcaatgtcttgaagaattttgggggagtctcccaggtggtcatatgtgtaagtgaggtccactggactgcctataagggccacttttaagtcattatgcagccagctgaaataaaaacaacattttaagaagtaaataactaagctaagcagttactggtctcatcaatcctaagtgatacatctatttactattacaaaatgttaaaagcacagacaatacatttaacagatatgatttactacgtacctttcaaaacagtgttgcaaaaaggcatgccaaggcaattcagtgatttaatttgctgtgtagaaatgctatccagaccaggcgcagtggctcacacctgtaaatcccaacactttaggaggctaaggcaggtggattaattgaggtcaggagtttgaaaccagcctgaccaacatggtgaaaccccatctcttctaaaaatacagtattagctggacatggtagcgcatgcctgtagtcccagctacttgggaggctgaggcaggagaatcgcttgaacccaggaggtagaggttgcagcgagctgagatcgggccactgcactccagcctgggtaacaagagcaaaactccacctcaaaataaaaaatttaaaaaaaaaaaaaagaaagaaatgctagtaagccagctataaaagttatttatttattaatttatttatttttgagagagagtctcactctgtcacccaggctggagtgctgtggcgcaatctcgactcactgcaagctccacctcccgggttccagcaattttcctgcctcaccctccggagtagctgggattacaggcacctgcctctacgcccagctaatttttgtatttttagtagaaggcaggctttcaccatgttggccagactggtcttgaactcctgacctcaggtgatccacccgcctcagcctcccagagtgctgggattataagcatgagccactgtgcccggcctaaaaaaattttaattttagaattaatctgtaatttttattttgcagtatttacatgacagggtcaattatctcttaattatccattaaggatatttaaacattttcataattcatgaaaatataccatgttattgacatttattctccacagcagggaactatggctccagttcctccaaaaagtcataagtgcaatgactatatagtctggtttgtctgagataatgcttttttttttccctgttatcctgatgtaattattaattccctctttcactcccgtagtttagacaataaactatatggttaccctctttataaatctctaagatgtaaatttaaaagacagaaagcatgctagaaaataactggcttgtgttcttaaaaaaaaaaaaaaaaaaaagtcaaaaaagggaccagaagagtcatgaaactaattgtaatgtatgactccagaatggatcctgaggaaacaaaaaaattgctataaaagaaattatgaaaaaaaaaatcaatgaaatttaaatataaacgtaggcttatgaaataatattgtatcaaaactaaatttctggctggatgcagtggcttatgtctattactcccagcactttcagaggccaaggcaggaggaacacttgagctcaggagttcaagaccagcctgggcaacatagggagatcctgtctctacaaaaggtattttaaaaaattagctgggcatggtggtgcatgcctgcagtcccagctactcaggaggttgtggtgggagcatcatttgagcccaggaggtcaaggctgcagtgaggtgtgatcatgctaatataccttagcctgtgtggcagagcaagacccctaacacaaaaactagctggacgtggtggcatatgcctgtattcccagctactcaggcagctgaggcaggagaattgcttgaacccaggaggcagaggatacagtgacccgaaactgagatctcagaaaccaaaaaaactaaatttcttttttttgagatggagtgttgctcttgttgcccaggctggagtacagtggcatgatcttggctcaccacaaccttcgcttcccaggttcaagcgattcttctgcctcagcctcccaagtagctgggattacaggcatgcgccaccatgcccggctaattttgtatttttagtagagatgggtttctccatgttggtcaggctggtctcaaactcctgacctcaggtgatccacctgcctcagcctcccaaagtactgggactacaagcgtgagccaccacgcccagcctaaatttcttcattatttaagagaatgctccttgttctcaggaaatccacgctgagaatttaggtataaaagggcaccatgtccaccagaaacttccaaatgattcagaaaattagattcacacacacatatatatgtagtgtgtatatatatatatatatatatacacacacactgagaatcataatacaaatatggcaagatgttaacatcagttaatctatgtgaacaatatacaaaatggtatacaaagaccatttcaagcatcttgaattatttcaaaataaaaagctaataaagtaaatttaaaagactcgcaaggagaggagaaaacggacctattagaaattgttgcaactgggcgtggcagttcatgcctgtaatcccagtactttgggaggccaaggtgggaggatggcctgaacccaggagctcgagactagcctggcaacatggcaaggctccatctctaaaaaattaaaaaggccgggcgcggtggctcacacctgtaatcccagcactttgggaggctgaggcgggcggatcacaaggtcaggagatcgagaccacggtgaaaccccgtctctactaaaaatacaaaaaataagctgggtgcaggggcgggcgcctgtagtcccagctactcgggaggctgaggcaggagaatggcgtgaacccgggaggcggagcttgaagtgagccgagatcgcaccactgcaatccagcctgggcgacaaagcgagactctgtctcaaagacaaaaaaataaaaaataaaaataaaaataattttttaaaaatctaaaaaattaaaaaaattaaaaaaaaaaaaaggctcggtgcagtggctcacacctgaaatcccagcactttgggaggctgaggcgggcggatcacgaggtcaggaaatcgagaccatcctggctaacatggtgaaaccccatctcgaggcggagcttgcagagccgagatcctgccactgcactccagcctgggtgacagagtgagactccgtcccaccaaaaaaaaaaaaaaaaattgtcttccagttatcttttggagtctcactaccactaacactattaggaagatgccatttttcacatataaaacaaaaaaattacataaatatttttaaaccttgaataaatactattaccaacctctttcgaattctagcattaaacagtggtgcctcaaaacgtgggtttgtaccaaccagaagaacaacatctgcctcttccacaccagcaattgtagtattaagaagataattggaacgcaaatctgtgctagaaatacaatatataaaatgcaaatttactttaaaattaagacatacagagaatccatgaaatattctcctatcatcaaacccattgccttctcaaacaaaaaattttatgaagtatttctaaattaaatgaacatttcagatacttattttttttctcagatagagtctcactctgtctcccacgctggaatgcagtggcgtgatcctggctcactgcaacctccacctcccaggttcaagcaattctcctgcctcagcctcccaagtagctggaattacaggcgcacaccaccacgtctggctaatttttttgtatttttagtagagacggggtttcgccatgttggccaggctggtctcaaactcctgcacttaggcgatctgcctgccttggcctcccagagtgctgggattacaggcgtgagccactgtgcctgagatacttagtgataagtggattcctctatttcctacaacttctggtttgatcttggtctatatatgaaaataaactgggggatatgttggagaatccaggttgtcacattttatacataacttgtaactaaaaaaagaaaggaaagcctagatcctagcttcatatttctcacccagctcctgcagtggggaagacctcttcagtgcataaggtgtcagagtccactctattaagcaaatctttgagagctaccagggcttcagcatccaccaagccacctgcaattgctgccacatctttgccttgaaaactctgcaactagaaacagatgaaaagggcatcaccaagaaacctacacgcagcaaagaccacaatgaaatgttcagaaaataaaacagtacttgttttcaagtacaaaaaaagttaacagacttctgattaaaagttttacaacatgcccaggcacactggctcatgcctgtaatcccagtactttgggaggcagaagtgggcggatcacctgcagtcaggactttaagaccagcctagccaacatggtgaaatcccatctctactaataatacaaaaatcagctgggcatggtggcatacgcctgtatccccagctgctcgggaggatgaggcaggagaactgcttgaaccaaggaggcagaggctgcagtgacccgagatcgagatcgcgccaccgcactccagcctgggcgacaacagcaaaactccatctcaaaaacacaaaaaaagttgtacaacaattattaattaatctaaaagtgaaaagctgcagaggtgttatgtggggccacagctaataacatcaacttagaaggaagctgttttatatttaggaacaaaggcacttcaaaatgaggtctggagaatgaagtggaactatagttaccttaaatgcgacctcctctgaagtatctgcctttccctctagtgctttatgttgtctttctctaacaagaaaactattccctccacttgtactctggcaagcttatattcattctcagattcttctttaagaatcaccttctgtaggaaggcagctttttttttttttgagatggagtctcgctgtgtcacccagactggagtgcagtggtgcgatctcggctcactgcaacctccaaggaaggcatcttgatatgcctgtcctagttaggcattcctcctacgtgctctcactcatattactccttatataattactcatagctgcatataataattgctgaattgtgcaactttctctactacaagattgtaggatgcaggaatgatgtgtctctggtctttatatcccttaatagcataatatctagcatatgtcctcagtagatgtctgtaaaatggaaggagattaaatcataatcttggtaaaagtaaaaaagggaagaaatatacatcccccccttcatggcaaagatgtttcttgataatcacaaacactatttaacactatttatttcaaattttaccattccagctacgcgagagagcgcatcctcccaagaagtataggttaaaagccctttttcatttctgaccattggctcggtaagtctttgacgttttagcccatcataggcaaatctagaaaacagaaattacaccattgtggaatcttgctaaagaagtaactataattttcaagttaaatcaacaagaaatgttatttaaatacagtactggttaaagtgtcaaatatctaaacacctagatacaagtaattattccagatatttttagagatgaactaatagattttatgaacttcacctaaaactaaaataccatctgaaagtttgatttcttcccttaaatcatacaaaaaaaagtttgatttcttatactttcagctaactgaacaatcttaaaattacaacacaaaaaaatctgacagctaaaaaagtcaaatcatttttatttacaaagcatgagtatctctaaatattttatcaaaattatattgtgcaaactcttctattcagcttctttttcaagcaatcatcccacctcggccttccaaagtgctgggattacaggtgtgagtcactgcgcccagcctagcttcttttctctaatgaacaaactgaaataagttgagaatgtatcaatctacttgaatttctccatgtgggaggaaaaaatatctttctcaaagtaaatacaatatccagggattgacctaggactattaaagtcagtattatcacattatataagcaactcagattccagtagtctatattcagtaactaatttgcaaatataaaagataattcttcaaaattattataaaatttcctttaaataaactgtaaaagttaaggaaaacaatatagcatatacctggttttatcagagatccactcttcattgatgtcctcatgcatacgtggcaaaatcctcatcacttctccagttcttgtgctaaccacaatattacttccaaccgcatccattacatcaatggattctgtctttctgagaaacacatacggtgtttactatggtgcttttgggaataaagaaagtttctgttacctggtttaccaaaaaattttttttacaattaattccctttctgaattactttaaaaaatgaagcttagaggaactgcaattaaataaaagaaccccccacctttttttttgccctggggtctcactctgttgcccaggctacagtggcatgatcataattcactgcagcctagaactcctgggctcaaactatcctctcaccacattttaaaaattttttgtagagccggtgtctcattatgctgaccaggctggtcttgaactactggtctcaagcaatcctcccaccttggcctcctaaaagctgggattataggtgtgagccactgctcccggcacacccacatttgaacacataaattcctggcacagtaaggaaggctttaaaactattatctgacacagaagctagtttgaaggggctccaactagccaaatctgggacgattcaacaagaggggcaggatttctgtctatgggagattaaggagctcaaaaaaccttcccactgaaaagcaaaagtaaagctggccaaaaatgacaaaacccaccatttcagcagtttagaaatctaaacacatacaatgtgggaagcttttatgcactgaaaaactggtggctgggctcagtgctcctcctatgctcctctccaccccctcaaaatggaatttcttcgaggccggggcaggctgtgaagatgagaacttctttggtacagatggagacaactcacttaacttggagcacgaggcaaacttgtttgtggaggtgatactttggaggtcatcgtagctgaggatagccaagattttaccagcctaagtttgtagtggtaattgcggcaagcattcctaacagaggctgctacatgtgcaggtgaaaccagagaaagctcaacctattcataaactcctggataactctgagacccaaagggcccagtgcaaagtaatagctgggcaaacttgaaaacagcctcaactttgaatatgctcctccatccacaaacagatccattggcaaagaacataactcttattaggtcacggtgtttgaagtacaattatacctgactactaaactatgcagacacaggggaactcctaagaagcctcacttaaaaataaaaccaagaatattaaaatatgttgaaagaaccaaagaaaatcatatttaaaaattgaaggggatgtatgacaaccacgaatcagcaagtagagattctcagtaaggacacagaaattacacagaaacaaaaagccaaatcccaagttgaaaagtataaagtttaaaattggatgataatttgttatgttttaagaaccttaaaaataatcacacctcttgcatctatctactccatttcttggtttaatcaggagaatgagagatatacacagaaatgtgtaaacagcaatattttttacagatttgtaatcataaagaaatatacaagctaaatgtctattagcagaaactggctaaatgacattcctcatagttgaaaacttaataaacaacaacatgggagactatacatttaaaatgtcaacactattaaactctttggaagaacacatgaaaaaaataattttgtggttgagtactttagaattaatttccaagaaaactacagttaatttgcacaggttcaatccattctaactacttaccttctatttaaagggttttacataaacaaacaaagtcaacagaccaaaacaactgaaacccaggaagaaaatgaaccttaatatttttttgaatagtaatgaattaaggacaaaaaaacaaattgtcataaaataaaagataccttgtttcccaaggccgggcagtaaaggcatagggcttagaggttagggcacctacagggcagatatcaatgatattcccagacagttcagacatgaacatcttttcaatgtatgtgccaacttgcatatcatttcctctgcctgttgttcccaaatcatctactcctgcaatctcacttgcaaacctacaagataaaaaatgtgtcatcaatggtcaagtccagcaaaattatttcctttcttattcatgatcacaaagagatgattttccaaacactaaaaagaaatgagtatatttttaaaggtgagcacagtcctagaataaaaaataatgaaatgtttgcatttaattgaggtgtaacacacaggcagaaacttgtacaaatcatatgtgtacaactcaccaagttatgagtgaaagcaaatgcttatagattttaatttttaaatccacctgaagttggtactaaatgaaagtgaacttattttattcatatatcagaaacagcatccctcttctcccacccaaaaaaagtagccattctttccaatgttattattcatcaaattgtgactattaagtatacaattatattctataatagaaaaaaaaggaaaaaaagttacctgatgcagcgagtacactgtatacatcttgtcatgatggtctttaccaatggcccaatgttcttgtcttccacagcacgcttcccctctaaaaatcggctcctatcatttccaaacatcatggactggtccttaagtagattatgaaagagtcaatctcatgctgctaataaaattaaaatctgagacaaccaaaaagattgacagaattctactacatacctgcagatcacattcacctccctggtcacaaataggacagtccaatgggtgatttgctaataagaactccatcacaccttccctgtatgaaaattgtaacatataaaatgactctcaaatacacacacactgacattaactgctggcactcaaaatgacctatagactttattttttttttttgagatggtgtctcgctctgttgctcaggctgcagtgcagtggcacaatcttggctcactgcagcctcctgcctccacctctcaggttcaagcgattctcttgcctcagcctcccgagtatctaggattacagatgcccaccaccacacctggctaatttttgtatttttagtagaggcagggtttcatcatgttggtcaggctggtctcgaactcctgacctcaagtgatcctcccgccctggcgtcccaaagtgctagaattacaggcgtgagccactgtgccaggcccacatataggccatttaaacaaccttcatagatgtatatttgttatacaattaatagtaattttacatttaatatcagaaatgccaattatctatcattgtggtaatattttttttaagagacggggtcttgctatgttgcccaggctggactcgagctcctgggctcaagtgatcctcccgagtatcattctggtagtattaaacacacaatctggaaaatgcttagaggagcctagaataaagtatcattagagaacatagaaaattatgatttttggtcaggtttggtggctcacgtctgtaatcccagaactatgggagggaggctgaggcaggatgatcacctgaggccaggagttcaagcccagcctggacaacatagtgagacctcgtttcaaaaaataaagaaaattgtaacttttaacaataccgaatgatcaaaagttgctgaatggtcctcagaaaatattcacattaattcaaaataaaaacaaacacaatcaatcccagtatagtatagtagtagcttagtaagtccagattcacccttcttcacaagttgagcaagttactaaagaaggatttttaatgctgatcctaaagctcaataccataaactcctgacttcaccttctctactatgtagtactcacttctattgctcctagaagctgagcacaccaacttcttccgagtttgatattaaattcttaatctatgggaaggtctaaataccaaaatgtgcaattttctgctttatgaaagggtactacattgaataacaataaagtacctggcttttttggatttttctgagtttgttaggatattccaacccttcattactggcatggcacaagcagctacaacctgggatttcaatgaaaaaaaaaaatgtgtatttgtatttatttgtgattacaagcaactcaatatataaaaatgttaaattatataaaaacattaaattatacatttgataacaggcaaagaatagggtattttttaaaactgaattttgttaagttttcatattcataatacgatgatctagtactttgcatttatctcagaaataaaacatcctggtttttaggtttattctaatagtcaatgcaattttttattctgctctgaaacagaacaccaaataactgctttgattagcaggcactattgaataaaaaaattgcatacaccaaaatgaaattaaactactgaaagtgaacttcttccctgcaacccttttctctactaaaaatggcagggcgtcagcacttttaatgtgctacttggcaactctacatcctggttatatattatacagccatttggaaatactgacaactataaatcacctttaatttctagatatgttacaattatatgacatgtgtttgtaaagcacttctatctatgtgtttccagttttgaaatgaagagaatcaattgtacaaaagaattaaatttatagatagaagtaaagagggctaggttctccactacgatattgattctaaataaagtttgctgcaagatttaaagttttctaccttctacagcatggtgtagaattttaggtatcaagtaccttaggggctttctcaatttcaacaaggcacatcctgcagtttccagcaacagacaacctttcatgataacagaatcgagggatctgcatgccaaccttctcacaagcctagaagtaaaaaaaaaaaaaaaaaaaaaaaaagcattagaataacctgacttcactgctgttattgctgaaacacacacatacagcatcttattacttctatctatctatctatctatctatctatcttaattcattcttatttcagtccctttctttgcctttgattctaacccgtctcctctgaagctgcctcagaggatctcaggatccttggcgtgacttcaccttatgtggaagaaactggataaagtatccttccactgtgctgaagacttgacttcccacatccattttgaaccattgtccacaatgtccccagtggtttcatacctggacttcttctttgcctcgctcccctcctttggattagagatttcactacacattatctagctggctatctgtctttggctcctatatgctacccaggactcacctcccactgtggctgaaggttttcccagtttctgtttgcccagtaagggggattatccctgctctgccaattatcacctaccctgctctgcaatttcttcctccttttagtctataaacatgttcaaatttcctctagagttagttcctcatcctcagccttcattctaaagcaatctcatcaatttccagtgtttaaactatttagttagcaaaaatgtgttgagtctttcctttgtgcaggatgcaggtatagtagtgaaaaagacagatagtgtcccagccttcatcctagctgacattccttatgctgattatgtccaaaccttaatctgcagccatgttagacctccacttctccaagcttcagatttacaggtatttgcatgtgtatgttccacagacagcttaaattcaaatgatttctctcccctctatacactccaaaataacctaacaaatgcagaaaaccacaagaattcctccggtctctttgagttctaaagaactatttgtctgtggctctactgaaacttcttttgtgttttttttttctcactgttaaagcaatattgggaagttctgtacgacgggggaaaaaatccctcgggtcttcatcattcctgaaggcctgtctacatttcattctcccttgaatctactctcttgttttcattcccattgacactatctattttagggcttttgtagtatcctgtcccaataatacaaaatgctttttccttgtctcttattccagtcttgctattctccaaatgatcatcctctacagtcgctgtcaccctgtttaaataggcaacaaaactcctgatggatcaaaatataagctcttctgcatagcagatactgtatttcatgactggaccttcccttcctcaataacttgatttcctgtgatctcatcttctacttataccttatgtttcatcaatattaaactatttgaagctttcaaaatatgacaagctatctgccttaactttttccataggaaatgcaagcatgtcgttcttgttcacaatatgaacacacctgttcatcctttaacacctcctcagggatgacctgaggcacccaatacctctttctactacctcctatccctgccacaacttttcactgtaccttgaacatacatttatatcatattttgtgctttcatgtctgtgactggcagatagtctagaaatgactgctaaaatgaacaaagaacatttagatctgtgacaacttacaaatggagtgaagcatgacttctctatgaccaatttattatttctggaggaatatgaagaaatatttagagcatgaatgtaagcacatgctaccctccatttacctgctttgtaggatatattcctatgaatattactaaccacagaaaggttatatgaaaatgaaaagcattaagcaggcccacaacaaatggaggttattttttcacaaacttacctatagtaactaatttaagttacttcaaatttcttttctttttttttgagacagagtcttgctctgttgcccaggctggagtgcagtggcacaatctcggctcactgcaacctccgcctcctgggttcaagcaattctcctgcctcagcctctcgagtagctgggattacaggtgcgcgccacgatgcgcagctaattttttgtatttttagtagagaaggggtttcacagtgctggccaggctggtctagaactcctgaatgatccgcccgcctcggcctcccaaagtgctgggattacaggcatgagccactgcgctcggacttcaaatttcttaatgggtattcatttggaatgaaaagtgaaacaaaagaactaccataattcactaaaaatgccacaaacaaatatatgatagctcactttgaagtgccaagatttaaaatgaaataattttaatataactttgctgtgtatagttattttaaagaattatttactaataatcagtataaaggaaataaattagtatttttaaaaaaatcagaacacacacacaaaatagttagaatgtatgcctacttggaggacggtcgttcccggttccaccatgacagactgaccatcaacaaatacttcaatcaagttgcttgctgctgtggcagttgttcgaactgaccatcaaagatattgaagcgaaaaacagattaacagtttattatagcagatgataatggatgaattgactctaactacaaacctaaaatttttcattccttattattcctctgtattgctctggatgcaaacttatggttgtctacttttgatagcagagtagtttaaactgaaacttctttcttcttctttttttttttttttttttgagagggagtcttgccctgtcacccaggctggagtgcagtggcgccatcttggctcactacaacctccacctccccggttcaagcgattctcctgcctcagccttccgagtagctgggattacaggaactcaccaccacgcccgctaatttttgtatttttagtagagacagggtttcgccatattggccaggatggtctcaaactcctgacctcaagtaatccttctgcctcggcctcccaaagtgctgagattacaggagtgagccaccatacccaactttaaactgaaactcttaatgtcactgaaaatatgttcatgggaagatcacttttcaaaaacagaatgtgatttttccattttggcattgatgtgtgtagttcctaatactttctattccatgataattcctataaactgtttaaagtaaaattatattttgaaaattattcaacttagatcatttgtttcttctttttttttttttttccaagatggagtctcgatctatctcccaggctggagtgcagtggtacaatcttggctgtatgcaacctccacctcccgggtttaagctattcttgtgcctcagcctcctgtgtagctgggattacaggtgtgccccaccatgcccagctgatttttatatttttagtagtgatggggtttcactatgatggccaggctggttttgaattcctggcttcaagcaatccacctgcctcagcctctcaaagtgctaggattacaggcatgagccaccacacccggccggtttctatttttattttaaaaaatcatgggtttagggtctttgataaactatgccatagacttataaatttacaaaaataaggtctaatatccacgaatgcaaatttaagaaaatactcaccacatcctttaggagacttagaaaggcctactaaggcctttcttacaggtatccttaacatattgctaaaaataaaacaaagaattatattattgtagggaaaaaaacaatcaccaactgtttggtaatgttttatggctttaaattatttcacatacattatgtcattgaacactcataggttctgatattttcacttagtctgtagatgagaattctcagtctcagagatactgacttgtacaatgtcaaagagctaagcagcagcagctattgtatacatttggactttctaattctatgcagagagcagttttgccatttaaaaaaaaatgacatagaaaggatcaaacttaaagcactaccacacagtaaaataaactgcaagactaacagtgagcttatcattaatggttatgtaaaataaagttgtcttttctgcttttatttcctaccaatacccattctatcatttcatgttctaagcatagctgtctactaaatgttcctgagatattctgagatagctcaccagcccaagcctttgaggtgtcttgattgctattttctggtacacttatcttacagatttccaattatgtgtttataagcccgttctgccctcactgcattaattccttgaatttttctatcttcagtacctatccaccaggctggcacagagtaagctcttaaacaatggctctcaactgaggacaattttgctccccagggaatatttagcaatgtctgaacacactgttgtcacaaacaaggggaagttactgacatctagtgggtagaggacaaggtgctggctattctacaatgtacaggacagtcccccacaataaagataattatccaaagtgtcaacagtgctgaagttgagacactgctctaaaaggcttgctgaattactgaaataaatgggtgtcgattatataaacaccacgacttaaagacacacaaaacagaaaagttaccaaaacttctttttatttgtttttgtttgtttgtttctgagatggagtctcgccctatcacccagactggagtgcactggtgcaatctcggctcactgcaacctccaccgcccggattaaagcaattctcctgcctcagcctcctgaagagctgggattacaggcacccgccaccacacccgactaattttttgtatctttagtagagacagggtttcaccatgttggccaggctggtctcgaactcctgacttcatgatccgcccaccttgacctcccaaagtgttggggttaaggcgtgagccaccgtgcccggccctttttttttttttttttttttgagatagagtcttactctgttgcccaggctggagtgagtgcagtggcacgatctcagctcattgtaacctctgcctcctgggttcaagcgattctcctgcctcagcctccagagtagctgagactacaggcatgcacaaccatgccaggctaatttttgtatttttattatttatttattttatttatttattgagacggagtcccgctctgttgcccaggctggagtgctgtggcgcgatctcagctcactgcaacctccgcctcccaggttcaagcgattctcctgccttggcttcctgagtaaccgggacaggtgtgtaccacca

SEQ ID NO: 2624 - DNA, 444 bp, Homo sapiens
taaggcctaagtcatcggacactggtcctctcccggggaataaaacggcctcctcctctgagagggaaatgtcctgaattttccctgcagagggaaggtcacctgcaagcctacattcgtgacagcgttcccgaggaccccctgatcctcatcttcttttctgcttcatcagaccagagaccgtggctaaaagccccccatctgccggctctcaggggcttccgaggcggcggggcgggaggcggcgcccagtcaaggacaacagaagactacgtcgcgtgggccaaaggaaacagtcccgtcaataaataagcctctggccgacgcacctcacccttcccatccatacaagacctcaccttctccccggagccgcggaggctgttctgctaaactgtctggaccacgacgaccccctaggaggccgggtcgcttattcaatat

SEQ ID NO: 2625 - DNA, 443 bp, Homo sapiens
tcccaaagtgctgggattataggcataagccacaatgcccagcccctaggtcaattttttaatagaactatacagtgctatttcttctccatctgattttatgttgtgactgccttgactgtgggaaactatattataaggaagatttatttaacagatagatacattgaataatatctctaagcaatgtttataatccaacagcctaaaagtcatgggagacattttcaggttgtcattatcataagagccagcagagggcagcactacattttctggaaaaccagagagtttgggaataatgaaaatgccaaaagaaacacaaaaaacaaaaaaccaaaaccatgaataaacttcggtgaatggtaataaaaatttgcaattattgacatggtgaaggggttgagttccaaatagcttggccaaaatgttaactatcagca

SEQ ID NO: 2626 - DNA, 2585 bp, Homo sapiens
ttttttttttaagagttgggggtcttgttatgttgctgatatggtttggatggctgtcacttccaaatctcatgttgaaatgtaacccccaatgctggaggtagggcctcgtgggaggtatagaatcatggggcaaatccttcatgaatggcttggcaccatcaccttggtgatgagtgagatcttagttcatgtgaaatttggttgtttagagtctgggacctcctcctctctcttgctccctctctcaccatgtgatatgctcgctcccattttgccttctaccatgattgtaagcttcctgaggccctcatcagaagcagctgctggtgccatgctttgtgtacagcctgcagaaactgtaagccaattaaatctctcttttgcaagaattacccaatctcagatattcctttacagtaatgcaaacagattaaaacagattagtactgacagtggggcactgctatacatattggaaaatgtagaaacagctttggaactgggtaacaggcagaggttggaagaatctggagggctcagaagacagaaagatgagggaaagtttggaacttagagactagttaagtggttgtgaccaaaatgctgatagacatatggtgaagtccagagtgatgaggtctcagatggaaatgaggaagttattgggaacaggaataaaggtacatctatgtcatgctttagcaaatagcttgggtgcattgtgtccaggccctaggaatctgtggaagtttgaacttaagagtgatgacttagggtatcagggtatctggcagaagaaatttctaagcagcaaagcattcaagatgtggcctggctgatgctagcagcctacaatcagatatggaagcaaagaaataacttaaagttggaacatatttaaaagggaagcagagcgtagaagtttggaaaattcacagactagtcatgtggcagagaaggaaaaagcactttgaggagaggaatacaagcaggctgcaggaatacagttgtccatgctggactcaactcatttgctcaagcaatccttgtgcctcagcctcccaagtagctggggctatagcttgtgccatcatgctcagctattcaccttacattgctgtccaaaatgttttcatttgaggcaacctgggatagtaaaagtacttctaattaaacactcctgccattagtatctagctgtgtagccataaataagttatttgatatttcttgagtctcaattaatacctactattagcagagattttgtgaagaatagtcttaatgtatttaaagctttaatggcacttatttagaaggtcctcaggaaatggtattattattccaaggtctttctagattgccttattcacctaaagagacttgatcttgagcctttgtagattttctcattggtgattccttcactgcttagaatgtcatgattccaccagacaggttactctcatctacgtgtatttttcttacatctttttcagtctatttttctctagcaattatcttcaatgtttatgcttacaataaccttagtatttggcattacgacactaatatgtgcccatgagacagacggagcactacttatcccagaggaggtattatttatttatttatttattttttgagagggaggcttgtttcttcacccaggctgcagtgcaatggtgtgatctcggcttaccgcgacctccgccttgactctcagttcaagcgattttcctgcttcagcctccccagtagctgggattacagccatgtgccaccatgcctggctaatttttgtatttttagtagagacagggtttcaccacgttggccaggctggtctcaaactcctgacctcaatgatctgcccgcctcagcctgccaaagtgctgggattacaggtgtgagccaccgcgcccggtccagacaaggtattttttagagattatgattgttcaccacaagctgcctagcaggtagcccaaggatcctggatcaacttagctatatagcatcttttctatctgaatgcagtattctcttacccacaaccatatgaagtctacacatattcattaacagtattatataaaatacaaaattgggactatgtcccctcaagatgagcacagtgctaagaggtaagagatgggaagtttgtattaagttcaaacacttttggcaagaatttatacaatttcaggtaactgggcattttaggcaaagcacacaacttcatgatgtatcactgaggaggataagataaacagttctaaaagctggtacaggtgacaaattttgtgcaattttaagttttacatttttttgtacaaataggatcttgctatgcagtccaggctggtcttgaactcctggcctcaactgatcttcctgccttgaacccccaaaatgctgggcttacaggtgtgagccactgcacctgctgtttttaaagatattgtaacatactattattctaaaaccttatcctttgttgtatcagaaaaacgacatcctagactgggcgcggtggctcacgcctgtaatcccagcactttgggaggccaaggcaggta

SEQ ID NO: 2627 - DNA, 325 bp, Homo sapiens
ctatgacacacacaaaattctatttttctgctaacagaaataaaatccccaactgatggaccacttttctgatctagtttttgattgttttttaggaacttaaaattcttagtgactcatattttaaaatgcacagactcagtttctgttttaaggaatatggcacaaagatatttagggaaaaagtatgtatgtacacgcacatatatacatagtatatgtgcacacaaacattaatgaggtggtaaaacttctaaaatagagtccatatcaacatcctctttctggagtctgtctttcttccattctttttatttatctcccc

(The sequence listing continues in the following parts.)

What is claimed is:

1. An isolated nucleic acid molecule comprising a polynucleotide having a nucleotide sequence at least 95% identical to a sequence selected from the group consisting of:
(a) a polynucleotide fragment of SEQ ID NO:X or a polynucleotide fragment of the cDNA sequence contained in Clone ID NO:Z, which is hybridizable to SEQ ID NO:X;
(b) a polynucleotide encoding a polypeptide fragment of SEQ ID NO:Y or a polypeptide fragment encoded by the cDNA sequence contained in cDNA Clone ID NO:Z, which is hybridizable to SEQ ID NO:X;
(c) a polynucleotide encoding a polypeptide fragment of a polypeptide encoded by SEQ ID NO:X or a polypeptide fragment encoded by the cDNA sequence contained in cDNA Clone ID NO:Z, which is hybridizable to SEQ ID NO:X;
(d) a polynucleotide encoding a polypeptide domain of SEQ ID NO:Y or a polypeptide domain encoded by the cDNA sequence contained in cDNA Clone ID NO:Z, which is hybridizable to SEQ ID NO:X;
(e) a polynucleotide encoding a polypeptide epitope of SEQ ID NO:Y or a polypeptide epitope encoded by the cDNA sequence contained in cDNA Clone ID NO:Z, which is hybridizable to SEQ ID NO:X;
(f) a polynucleotide encoding a polypeptide of SEQ ID NO:Y or the cDNA sequence contained in cDNA Clone ID NO:Z, which is hybridizable to SEQ ID NO:X, having biological activity;
(g) a polynucleotide which is a variant of SEQ ID NO :X;
(h) a polynucleotide which is an allelic variant of SEQ ID NO:X;
(i) a polynucleotide which encodes a species homologue of the SEQ ID NO:Y;
(j) a polynucleotide capable of hybridizing under stringent conditions to any one of the polynucleotides specified in (a)-(i), wherein said polynucleotide does not hybridize under stringent conditions to a nucleic acid molecule having a nucleotide sequence of only A residues or of only T residues.

2. The isolated nucleic acid molecule of claim 1, wherein the polynucleotide fragment comprises a nucleotide sequence encoding a protein.

3. The isolated nucleic acid molecule of claim 1, wherein the polynucleotide fragment comprises a nucleotide sequence encoding the sequence identified as SEQ ID NO:Y or the polypeptide encoded by the cDNA sequence contained in cDNA Clone ID NO:Z, which is hybridizable to SEQ ID NO:X.

4. The isolated nucleic acid molecule of claim 1, wherein the polynucleotide fragment comprises the entire nucleotide sequence of SEQ ID NO:X or the cDNA sequence contained in cDNA Clone ID NO:Z, which is hybridizable to SEQ ID NO:X.

5. The isolated nucleic acid molecule of claim 2, wherein the nucleotide sequence comprises sequential nucleotide deletions from either the C-terminus or the N-terminus.

6. The isolated nucleic acid molecule of claim 3, wherein the nucleotide sequence comprises sequential nucleotide deletions from either the C-terminus or the N-terminus.

7. A recombinant vector comprising the isolated nucleic acid molecule of claim 1.

8. A method of making a recombinant host cell comprising the isolated nucleic acid molecule of claim 1.

9. A recombinant host cell produced by the method of claim 8.

10. The recombinant host cell of claim 9 comprising vector sequences.

11. An isolated polypeptide comprising an amino acid sequence at least 90% identical to a sequence selected from the group consisting of:
(a) a polypeptide fragment of SEQ ID NO:Y or the encoded sequence contained in cDNA Clone ID NO:Z;
(b) a polypeptide fragment of SEQ ID NO:Y or the encoded sequence contained in cDNA Clone ID NO:Z, having biological activity;
(c) a polypeptide domain of SEQ ID NO:Y or the encoded sequence contained in cDNA Clone ID NO:Z;
(d) a polypeptide epitope of SEQ ID NO:Y or the encoded sequence contained in cDNA Clone ID NO:Z;
(e) a full length protein of SEQ ID NO:Y or the encoded sequence contained in cDNA Clone ID NO:Z;
(f) a variant of SEQ ID NO:Y;
(g) an allelic variant of SEQ ID NO:Y; or
(h) a species homologue of the SEQ ID NO:Y.

12. The isolated polypeptide of claim 11, wherein the full length protein comprises sequential amino acid deletions from either the C-terminus or the N-terminus.

13. An isolated antibody that binds specifically to the isolated polypeptide of claim 11.

14. A recombinant host cell that expresses the isolated polypeptide of claim 11.

15. A method of making an isolated polypeptide comprising:
(a) culturing the recombinant host cell of claim 14 under conditions such that said polypeptide is expressed; and
(b) recovering said polypeptide.

16. The polypeptide produced by claim 15.

17. A method for preventing, treating, or ameliorating a medical condition, comprising administering to a mammalian subject a therapeutically effective amount of the polynucleotide of claim 1.

18. A method of diagnosing a pathological condition or a susceptibility to a pathological condition in a subject comprising:
(a) determining the presence or absence of a mutation in the polynucleotide of claim 1; and
(b) diagnosing a pathological condition or a susceptibility to a pathological condition based on the presence or absence of said mutation.

19. A method of diagnosing a pathological condition or a susceptibility to a pathological condition in a subject comprising:
(a) determining the presence or amount of expression of the polypeptide of claim 11 in a biological sample; and
(b) diagnosing a pathological condition or a susceptibility to a pathological condition based on the presence or amount of expression of the polypeptide.

20. A method for identifying a binding partner to the polypeptide of claim 11 comprising:
(a) contacting the polypeptide of claim 11 with a binding partner; and
(b) determining whether the binding partner effects an activity of the polypeptide.

21. The gene corresponding to the cDNA sequence of SEQ ID NO:Y.

22. A method of identifying an activity in a biological assay, wherein the method comprises:
(a) expressing SEQ ID NO:X in a cell;
(b) isolating the supernatant;
(c) detecting an activity in a biological assay; and
(d) identifying the protein in the supernatant having the activity.

23. The product produced by the method of claim 20.

24. A method for preventing, treating, or ameliorating a medical condition, comprising administering to a mammalian subject a therapeutically effective amount of the polypeptide of claim 11.
